United States Patent Application Publication US 2014/0057251 A1 - sequence listing, part 172

SEQ ID NO: 337744 - DNA, 1955 bp, Cannabis indica
aaaataatttccaacatctactacatcagcaaaaggcttgttgaagctgaaggacgatatctgctaataaaaaagctcacttactacctaatcttagcaacaaggaagctaatgccttactttcaagctcatcctgtttgggtgtacactgaccaatcattacacaaggtattacaaaaatctaatgcctctggacgattactcaaatggccagtggaattgggccagtatgaaataattttccaaccccaaacagcaatcaaaggacagactttagtggattttgtagttcagtgtacgggcaaagaagaaagcatttcaaaaaataacccggagccagtacaagaacctcagccgagcaacaacgaagacaaacctacctggaagttacatgtagatgggtcggctacagatcaactgtccggtgcagggattgcccttatcacacctgggagcaacatttacacagggcagtgaagtttgggtttagagcatccaacaatgaagcagaatatgaggccctcattgctggcctaaaacttgctcgggaactacatgcagaagatattgagatctgtagtgactcacaattggtagtaaatcatgtatcttgggagtacaaagctcggggagaaaaaaagatagcctatctaagcaaaatacacgacctcttgcacaattcaagagctatgtccttaagcaaattccaagagaagaaaacacaactgttgatgccttagcctgacttgcaagcagcaatataactgataaggctaatctaatccccattcaatttcttgaaaagcctagcatcacttgtacggaagaaattgagattattgacacatctccgaactggatgacgccaatagcagcctacctcaacactggagaactcccaagtaacataaatgaagctcggaagatgaggagaaaggctgcacggtacatcattgtacaaggagtcatgtatagaaggagattctccatactattactcagatgtgttacacaagaagaagttgcacgacttttgtctgaagtacacgacggattctgtggcaaccacgcagccgggcaaagtctatcaaagaaaattctaaggcaaggatatttctggccgaccatgattggagattcaaaggcctacgttaagaaatgtgacaaatgccaaagatttcaaagttacctcgtgcattgcccaaagaactaacttagatgcaaagtccttggccttttgctatttagggaattgatctaatcggacaattgcctaaaggtaaagggagagtacaatacgcagtggttgcagtggactattttactaaatggatggaagtcgatccattggcaacaaatacatccaaaaaagtacttaactttgtggtaaaagatataatatgtcgattcagactaccgtacaaaatagtctcaaacaatggtacacagtttgatagtcaattgttcactaatttttgtacaaactatggaatcatgaagagtttctccacagtagcacatccccaagtaaacggtcaggtcgaagcagtcaacaagacacttaaagacactttaaagaaatgacttgaagatggtaatgggaactgactggaagaactcccagaagtattatggtcttaccgtacaactgaaaaaatagcgaccggacaaactccatttgctatggcatatggttatgaaactatgctgcccgtagaactagaaccttcgtcccacagaagattgacctgcgaccaagaagttaaccatgcactcctagtagaatcacttgacaaaatcaaagaaaaattgtgatattaaaattatgcatatgtgacttggcacgtaacatctatctagtatatctattctatataaagtgtgtctatataactgaaattcttggtttatgagaaattcatgggtgacttcttatttttatttaataaaataat

SEQ ID NO: 337745 - DNA, 539 bp, Cannabis indica
gaatttatacattaaacataatcatgaaataaatcatgtgaaccatacaacataaaagaaatttctgatcttatattaattagtaaatctgattatattgaaatgggttttatttagggcacaaaacccaacactatcccgagccccaactcgcggtttaagtggccagaccaccgctacataatctaatatcctgtaacccaaaaacctcaacaatttagaattcaaacgatataaatatcaatatacacatgctattcacacactaattcttcccaccatcacactataattgtctaaacaggtaaggtaatagcaaatatcataaacacttcctataccatgagtcatcttgtcttcgcagtaaatgtacatgttcgaccaatcttcagtaccttcaaaaccatagttgctctgatacaaagttgtaatgccctatcccatagggacgccacatgtgtaattttataaaactagtttaatactaatatatatattaattaattattaaaaactataaggatagtaaaaacttgact

SEQ ID NO: 337746 - DNA, 1035 bp, Cannabis indica
acccgaacctagaccgggacccaaacccacacaataaccgggacttggacctagaatcaggatagggaccagggaaatagaactaggaccgggacctagaacccgaccaaggcacgaacatgaatttaggacccagctcgggacccggcaccagaaatagaaccagactgctacccgagattgggatccagatccagaccgagggcttggacaaaacccgtagtcaacgtcttgatttgggacccaaccttggacccgaactcacacccggacctgaacccagtcgcaaacaaaaaagtggacccgtacccgtaccttgtgacccaaaattggaaccaaaaccgaaagtagaccggactggtactaggacttggacttggaatcataactgaaattggacctagatccagaaccgtaaccggaccaggacccggactccaaatcagacctagactcgaatttggagccggacccggatccaaacccaaacctggactggggacacgaacccaaacttgaactaagacctaaaaatggagccagactagggacacaaaactagggtcgggaccttgaaccgcaccccagtctcgataccgaacccaaactaagaaatgggaccagggacctgaaccaaaaccatgccgagaccagtgacagtgataaaaagctttactcgggattcgcgtaatggggcctggaacagaccagtagtcggtgtctagaccttggactcaaactaggaccagaacccagacgaagaaccgaacccgaacccagacctagacctggaaaccaaaattagaacctgaacaaggatcgccgaaacaggaccctagaacaagactaggacggtgaccaggacccggacccagacctagaaccgaacacagacctagcctcagactcaaactgagacatgaactcgggccaagacacggtcgtgtacccagaccgaaactgacacccagaccttgacctagatctgggacctgatcccaaacatagacttggacctagatagggatccggata

SEQ ID NO: 337747 - DNA, 519 bp, Cannabis indica
tgtatctcgagatggaccttatttgtttgttgttcatctcgctggtctcatcaaccagtagttactatttatagctcgccattttaaaaaagggcaatttaaatatttcaaccgactgtacttttcgaggggagttgtttgaacatatttattgctttataattcgtgctagtttattttctagcttttttacacgtgtcaataccatattattgctcgaaatatgggtataataataccagttgttagttttatgttactaaattaggtacgcaacgaaagagttttgtattaactaattatcgttgtaccaattagggctgtacaaaaaaatttgtaaaccgcccaaaccgaataatccgcccaaaccgaaccgaaaaaaccgataaaaattacaaaccgaaataacccgccaatctgttaattgggcgggttgaaaataggtccaacccgaccaacccgattttgcacctttaatttttttttaactttttagtttttattatatataacataaat

SEQ ID NO: 337748 - DNA, 625 bp, Cannabis indica
gattattaactacagactttccatatctggtcacacattgactctccccctgatttcgtgcatagtgcaaactttccttaatggtagtttgcatctggttcaccaccggcacattggaaaacatagcatcattcgtattaccatcacgaagccattgggatccaatctggtagttcttccttctcggctgtgcacgaagaaacgaaccataaggcttgacgacttgatcaattggcatagagaacagcttcggacagagtctttcggcatggccaatgattctgcaaataaagcagaacgttggcacatattcataattaaagtttgcccagaaccactcacttcccgttttacgtaacttcatccgacgcttcaacggtaaagtgatgtcgatagtaagactgacacgtaaatactcccgccatattccttgaaagttctttggatccatctccacgaacgtgcctatgtagttcgcaaggtctcgtaggacctggtctgacttaaaccccgcttggaggtcaagaacttggacccaaaggtctaaatgcttcacagccacggttctgggattatccccatctttcaaccgagtaaaaacaaattgtattctattaaaagtcca

SEQ ID NO: 337749 - DNA, 759 bp, Cannabis indica
atggcgtttgccataggactgctctaccctaccacccacagagtaatggccaagttgaaatttccatccgggagatcaagatgatattggagagaacagtgtagagatcaaggaaagattggtcaggaaagttagatgatgcactgtgggcgtacagaacagcttttaaaacatggagttggcagttgcatgagagaaaagatggagttggcaggtgtagaagagaaaagattgctgcaattgaatgacctggaagaatttagaaatgaggccaatgaaaatgcgaaaatctacgaggaaagaaccaagaagtggcacgaatggaacttagtcaggaaagagtttcaagccaggcagaaggtcctactttttaattctaggttgaaattatttcctggtaagctgaagtccagatggtcgggaccattcacggtggtcaaggcatacccatatggagctgtggaactaaaaggcgaaaacccagagactttcaaggttaatgggcaacggttaaagctctacttgggaggtcatattgacaaagcacagtccgccatgattctggtgcctctttgaagaaaacaaccaacatccagctatatgacgataaagacagcgctcttaggaggtaacccaagttttaatggtgtttttagttgaacaatcctactgtttttcttgctttttgttagtttttgttcattgaatttgtaaactgaattttagtttattgtttttcattcctttcaaaaaaaaaaa

SEQ ID NO: 337750 - DNA, 579 bp, Cannabis indica
atgtggtatagaggtcgtacttccgtaaagaacgttcttgaccatttggtgagctttgtaaataggcacacgagagcctaagttcaagtcggtactacatagtatatatattttatgcatatcttactgagtttgttgactcagtaagatgcatgaacatatggagaatgcatctcaaataatgaattctctacagatcatgtttaggcagcattctaatgaaacaagacataatgctactcgtagctacatgaattgtaagatgaagaaggttatccctgtttgatctcatgtattgtacatgattgagctaatgcatgaggcagagacacacatgactatcattgatgagaggactcaagtgaatatgatccttgagttgctatctccttgcttcaaggctttcaccaaaatctatgtaatgaacaagctagatttcaacatgactcaattggtgaacgagttgaccgtgtttgagaaccttaacaaggataagtccaaagaaggtgagtcaaacatcattgaagcaaaatccaactctccttcttcttaagaaaaggaagtggaacagtgaggaca

SEQ ID NO: 337751 - DNA, 502 bp, Cannabis indica
aatcttacctcaatttcaaatttcggtgtgccagccaacctgactagaacaactgctcggtaaattacagactcctaaatcacatcgacaacaacaaggataagtgacgcgctaaatcacaaccggagacttaggttttaaaccaaaaccctatatactataacttaacatggcaataccctaaactagcagggcattaaccaactaaagctctgaaactagcataaatcgacaacacaaattttttgggaacccaacaacaaatctaggtaaccggttttataggccctgtaaaaccggctagccggtctaccctagaaaacccaaaacattccaaaacctaaccaaatcgattccaaactttaccaaacctttcagacttgcatattataccccaatagacatatttcaagcaataaaacaactacttaagctcataattgaaaaacaccattaaagagccaagcttgagttctaaaactcaaagcttgctcaatcaaca

SEQ ID NO: 337752 - DNA, 543 bp, Cannabis indica
atcgatagggtagatgagatagttagaagcccaaatcatttccttccgcatgcgtagaatgttagagtagatccattccttataatggagtatttttggttcttccaatatggtaatttttcttaaagtaaataggtaataacacgaacgagaagttatcataatagatgatgcttgtattaataaaaaaagccaaagcttaaaaccgatgagtaaaagatggagagacactaaagaagagagagaaagaccatgaggtagattttttgtgaacaaggtgaattctagacatttttttgactcaaaatacttctcgaaaatgacaacttttttcattcgaataccaaatgagttgattcaacatgatttagaaagttgggaaaaatatatatattttttacgtctttttccttaaatgaaaaatcatgaaaaaatttaagtttgatcataaaattttacattttcttagaactggagccaccaatatactcatacaaaaattgttatttatttttctttttttgaaaataaaatagcaacttc

SEQ ID NO: 337753 - DNA, 668 bp, Cannabis indica
aggtctcagagattttttataggttagcaattagatgataaattgattcgttcccttaatttattaggtgtgaatgttatagcataccattcctgagccaaattcatatttatttagaagttatataataaatagttttattctttgtgttctataacacttatttaaatagtgtttttttaaagaaagtaaaaatgtttttgaaaatatacttttttatagaatattaatcagactaaatatagattttatcccggagatggttatcaattctctcaacggtctgaagttctagtgggagattgggaactacgctaatttttataatagactctctcatgtttttactagctgtaatttttcttttatcagcagaaatgaacatataattttgtcgctcataatgtggctaagtaggcttttactcacaatcaatatggttgtttgagtgtttcatccatcccgaactttatcttttgtaatgaccgtgaggtttaattttatctatgatatctatgaacgttttatttacaaaaaaaaaaaaaagctagaggtgtactcatcggaccatatccagtatttttggcatatccagatccgatccattattcgattttagattttaccatcccatctaatctaattaatttcatttatctaatcaatcc

SEQ ID NO: 337754 - DNA, 1142 bp, Cannabis indica
ggtcgagtccaagcatctagtctcggatcccaagtcttgaggtgggtcttaggtttaggtttttgccaaggtcgggtcaaaaatctagatccaagttctggtccaagtttgagggcccaattcctgggtctgggtcccccatctatgttcgggtcctaggtcccgatctaggtctaagtttatgttacggtgtaggttcaggtctcgggtcctgattcgagtccaggtctcggtttgggttcaggttcgagtttgggtcccagtactagtctgagtctgggttttgggtcccaagtctgagtttggttcttcggtcctaggtctgatctcgatttttgggtctaggtttgggtctgggtcccggtcttggtctaggtcgcagtcttggtttatgtccaaggtcacaggtcccggtccaggtccaggtccaagtcctagtattgattttggtttgagtttgggtcctgtcctagtgctggttagatgctgtgtccggaattaggtttggatcccggttttgttttgggtctgggtacggatctgggttcaggtcctggattcaaacactgactacgggtatggttgaattctcaggtccagattaggatctcggtcttggatccctatcttgctccagtttgggttccgggtcccgggtcgagttttaagtttgggtttggggttgggtcccggtagttaggtcctaggttctgggtccaagggcaggttctctgtcatgagtctggggtcaagtttcgaggctcagtcccggttctggggcctagtttcgggtccaagtcccccatctaggtcgagatccttggtttaggtctaggtctaggtttgggttgggggcccaagtcccccatctaggtcacggttcagttctcaagtcccaggtccgagtcttgggtcccaggtcccgggcccaatcccaattctggttctagtcccaatccaggtttagggctcggtcctagtctcggtctgggtcccagtcttgatctcggtctgggtccaattcccaggtttgattctgagtcctgggtttaagtctgatttctagtacgagtccagctgtaggtccaagtttgagtctgggtcttggtctgggttggggtttcggtccgggtctgggtcta

SEQ ID NO: 337755 - DNA, 991 bp, Cannabis indica
atttacgccccctctcactttaaatcataggtccgccactcgggggagctcctacaactcatggatagaattatgagtaaataaagtgaataagtaaatggaggttaataaattaatatctcattgcaaattgggttagtagtaggtctctctgaaacaaaaataaagtcattttaagctaggagctatgtatgttgctatgtttttgggttggtgcctctccataaaaaaacatgtgacatcaacgggggagaatcattataagttggaatcttttaatgtttttcagttaacattttcttatgtacaagcaaattgatatgcatctcgaagtggaatcaagagtagggaaggaaaagttttttgtcacatttgtatatgctttcaatgatgaagctagtagagagattctttggaaggatttgaaggctctggctaaaggaatttcatctccttagctagtgctaggagactttaatgatatcctttgtgtggaagagaaagttggtgatcgggtaaacatcacaagattaacaaattttaaagattgcattaataagtgccaattagaatatgtgaagttctcaggatctttctttacttggaataacaagcaagggagttgaaacagaatttactccaaatttgatcgagtgatggctaatcgagattggttggacaaatatacttcaaccgaagcagtattccttgcggatggtcaatttgatcattgtccaacaattttggctatctatccagagctaaaatcagggaagaaacctttcaagtattttagattttggcaaaattctattgaattacctaaaattctaattgatagttagagtgttcagcaacaaggtacaccaatgttctccttagtcaacaaactgaaaagactaaaaggggcgttgagaactttgaataataaggttagaattggtggcattcaagcataggaagtgagggcctttaatgtgctcaaaggttg

SEQ ID NO: 337756 - DNA, 881 bp, Cannabis indica
gggtccaggtccgggtctcggtccgggtcctaggtctcggttcgggtacaggtcagggtctcgggtccgattcctggtcagggttcgggtcccgggttaggtccgggtccgagtctcggtcctaggtcctaggtcccagccccggtcccggtctcggtcttgggtccaactcccggtcctggtcttgggtcccgagttcggtcccaagttcgatctcgggtcccggttcgggtcggtcggatctgggttcgggtccaggtcctggtcccgagtccaggtctgggtctgggtctcgggtcctggtccgagtctgggtcctgggtctcgagtttgagtcccgggtccgagttcgagtcccagtctgggtccaggtccgagtccagatcaggtttgggtcccaagtcccggtttcggttcgggtcaaggtctaggttcgggcttgggtcccgggtcccggtcccgggtcagggtccaggtccgggtcctgagtcatgatccggatcccgatcctagtcccggtcttgggtctcgggtccgggtcccgatctcggtcctggtcttgggtcccgggtttgtctcgatctcggtctgggtctgggtttgggtccgagtccaggtccaggactggacctggcatcgtgacccgaacccgagaccaggaccgcgaccgacacccgggacccaaaacccagaccccaacccgaaatcagactcgagacccggactcgaacccagacctggaccaagacccgaacccaggaccctgattcggacccaaagtcagactcggatccaaacttagacccagacccgacccgttgttggtgtatgggtagagttttattaaaaatatattatctttacacaatttattaatacat

SEQ ID NO: 337757 - DNA, 1021 bp, Cannabis indica
cttataatttaatgaattatataataaaaaaaataaacaaatttaaaaaatagatatttgatggttaggatattatcaattttattaataattaaataaaaataaaatatcctaagtttgaaaattttatagttagaaaccctaaaatttctattcaaatcaaaatcaacaaacttaaaatttcatgttattttgccaaaaaataaaattttaattaaaataaatatctaataaaataaaatgttgaaactaatattttttcgaatcttataagataatttaataaaatatatatttcaaaataacaaatttggaaaatttaacatggttagcaaatttgaaactttaataggtgatttcaagtgagttacggttcatgcaaattctggaaaagctctgttagggtttcgtcgactccgatctctgaatcggagctatggtaggtcagggacgcccacgaaaggatgctttgaaggggtcgggtagcagaggttttgctgtgccgaacagtaaagggaaaaggaaggtcacggggaatgctgggaaaaaaaggggtccgacttcctctgatttagtcctcaaaactaaatcaatggaagaaatactcggggttgtagagctagaagtgacggaatcggagacggaggaagaaccagatcgacctccacagaccttggaagatgtagcccaagtgctttcaccaagagcatcgctggttcatcttcaacgggatgatgaggtgcgttctgatttggtgagttttctagaggccacaaagagatgcgaaaataatctcaaggcaggtatgggcactactcctccaattttgcacactaatttaattattcagaatttgagtgtgaaatttaatgagacaaaaggggaaaacactgaggagaaaccattagttcagattgacatgaatgatgttgaagaggaaatcttatattggaaatcagctatggtctgtttgttgggttttgtgccctaaataaaactcatttcaatatcatcagattta

SEQ ID NO: 337758 - DNA, 1567 bp, Cannabis indica
atccactcgtagaggtgtcccaatcgcatcaacctttcaatcttgtccttgagatttttgcattcgttggtgatgtgcccgatgtcattgtcgtactcaaatcttttattgggatcccttcgggaactatctttgtataggggagacggtctccggtagtgcgtatttttcgtagtagcaaaatataaacgttcttgggagtccgctaactccgtgtactgagtatattggggagtataccctgttttctgtcgcttatcctccgtccgggtgctacccttggaggatcttttactccttgagccctgggaagggccggctaaacttgcagttggagcggagtgtgagcaggcttatcaaattatccctgagggatttccaaaatgggaagatgcgggggctaaggtttggccttggctatgtccgggagtagcagaaaattgtatgctgctcatcggtggagcttctgctggcacagtgcctgagagctttgctccgggcacgtatcctgctatcccggtgggatagtatcctccataggccactatttgggcctcttccaggttaatgtatttctggactctcttctggaagtcttgaaggtttgaagctccttcttgttgtaactcgttccagaatggagtccctgtacggatgcctgcttggagaagagcaagctgttgtccgtcatctactttcttggttttagaggcttcttcccggaacctctttatgaaattctttagtgtctctgtaggcagctgcttgatgttagtcaaggcgctgacctccagattgacttttcttgcggcgacaaactgtctccggaagttggtttgtaacttattccagcaacccacggatcctggttccaatttcttgaaccattcttccgcggatccgcttagagtaagcgggaagcacaaacacttagcgtcattgctgaccctcatgactgtcatgactcggttgaaccgtgacaggtgatcacttggatcagagttcccggtataagctgccatttcgggcatcttaaagtttttggggagctctgcttccaggatgtgtttagcacacggctcccggtcctcacaatcagagtcggagtcgttgcctttctgtctccaggagactcgggcgatgtgttttcggagtatggcaagttcagccatgattccttcgtttaacgttcccgtggagaccgcaggtccgtatttcttttggtctaggtgatcccaaagatcacgttggttcctgttaatctgatttcgcagatcaatgggaggacatttctggccccttcttcctctccctccgggctcttggtgcacggaaacactctttcggtcctttcgatcctgagggccaagactccctttttggagtttgcccctctgcagacctttccctttcgggaaatctgagcggacctgttgtggatcctgcacctttttctttttcccaggagtggaagtagggtttttcttttggttcccttcaccgggataccttatagggattggttccctagacttctgcttttgggtacttggcgaggattcctctg

SEQ ID NO: 337759 - DNA, 948 bp, Cannabis indica
tgtccgaaggccggaaccagctggaagaaatgtaagccgaagggtctaagggaacgggctctggaagaccagaacccatcggggaccgacctaggaaatctcctaagtgggaaaaataatattccttcgtatggtctccccaccgggtcgagggcatcctaaacctatggagacgctcatcgaaccctacaggcctaagattggcatagtcaccaatggaaggaacgtaatgtactgctaaaggagacttaccagagccggaagtgctggcgcccggagccccagaattcggctcctgagccgaaggctttggcctgggagccctcctctcagctgagtccccaatgctaaggggcttcccaacgatcgcctggcttcttctctcgactgggctccccacgtgcagtggcctcccggaagctgtctgagccttggagtaagctttcccctgagccttccggtagagatattcctggtacttcttctcagcagtagcaatgatatcctcccggaaggtcttctccgcggcgggcactctcacatttggacaaataaccctagaaaggttagagtcttccaccaattggtgcggcaggatgagcttggccttccggcaattcttcgtcgtgaccaggcccccgacgtcaagttccgcccggtcgtaagttgcaaagacttgggctctccggagaaagacctgagtgggtgcggtccgctcgtaggggggaatcctgacccagtccgtgagaagctccgagtactccactgctcggaagccggagtagaagaagaagcggtggcgatactccttaacgtgagtttgcctattataagggaccaccccatcattggcagggtgggcccgaaatccgtaaaaaccatccttaaatttgtccccctttttggggacagaaacaagttcataaaaatacaaaatctccgccggac

SEQ ID NO: 337760 - DNA, 771 bp, Cannabis indica
gacttgtcaatgcgacaacaagtgtatttctatgctcaggagacatttgcaatgcatcataaacgcttaaaagagcagggatgcgctttagatgagccaatatatcatattttggtcgcgtcatttcatcttcaccagtgcttttacatcttcgattgtcattggcgggttcttggttggccgaagatgaaggctttggaaggtcttgtttagctttttcaagctcttttgcttatttttccttctttgcaaaaaatttatgccgcatatcttgcaaagtaatttcatctacctctttttcactttcaggtgaggtagattaaggatcttcttttgttagcaaagtcatgcagcaatccgacacactgtcattacaaccagctgccttatgccgtaactcttttggtaaaaactcatccaaagttactagattttgttttggttgttcgaatttgtttcttttggaaatggccttttgctttccgatcattttcttattcttttgatcctttatatctggtctactccgaaatttgactctggagtttccagatggattccgaggtggaatttttgcaggttttttctgagtacatgtttgccatgtaccttccaaatcctcttcacaatcataccagtcctcccaaatttctagattaggctctgtcatgagctcatacaatgtaggaatatttgggtttcctggccttggcatgtctgagtgggcttggactattgtaacttccttgtcgacttcaaatgccatagaaa

SEQ ID NO: 337761 - DNA, 739 bp, Cannabis indica
acaaagggcaggtgatactcgttggagttctcatttaaaatctatttctagtttgataaagatgtttagtgcaacatgtgaagttttattgaatattattgaagatggtactacttttgctcaacgaggagatgcggatgcagcttatgagtcattaacttcttttgaatttgttttcattttgcatcttatgaaaaaaattctagagatttcaaatatactctgtcaagctttacaacttcagtctcaagatattttaaatgcaatgcatcttgtttcatccactaagactctcattcaaaaattgagagaagatggatgggatgaattagttgatgaggtgaaatctttttgtgaacctgttaatatacctgtgccagattttaatgctcactatactacaaaaagaggaagaagtcgtggtcaacaagatgcaattacagtggagcattattacagagttgatcttttcaatgcagtgatagactttcaactacaagaattaaacaacaaattcaatgataacacagtggagttactcattcttagttcagctttagatccaagagagatgcacacatcattcagaattgatgatatttgcaagttggtacaaaaattttacccaaaagattttacagaatacgagatggtacaactaaggacacaatttgaacattttgctcatgtacgagaacttcctgattttacagttttggcaaccatttctgatttatgt

SEQ ID NO: 337762 - DNA, 628 bp, Cannabis indica
cattatagtactttgcgttgaagagttcctggaacctttccaggtcatggttgtgacatcgtgaatctgcgacaccatgtcccaccagactagagcatctttttggaactgaaaggtggcacacaccacgctgtcattctcggtgacacccataaagttcattattcttgtgagcaccgttagccaatgttcggctttcatgatatccggacctcccagaaaaactggaggtgcctacttccggaacctttcatacaggggttccattctgttcgccgctaccactatctcggcctaagcaacaggggcaggtgtcgcaggaactttcggtaccggcactgcaggagcaccctgctgcctcaatctctgaatctcaagatcttgctcctctattctgggttgcatttcagcaaacctagtctcccaattatgggcttcctgattggcttgagcagcctgggcagcctgtggcgggttatcatcacctcgaccacgggccctgcccctgcgacctctaccccgacccctaatcaacgagagttggcacatcaggtcataatcaacgagagcttactaatgccgcttaatttggaaattaaaaacatgcgcctattttactatcaggcta

SEQ ID NO: 337763 - DNA, 1350 bp, Cannabis indica
tgggcattcttttctctggggattctttccactttgttgtctgtgaactcatggggcagttcccggacagttgctacatatgcagccattttttctccacgagtttgatattccccagacacttggtttaccaccaactgtgactcattgaaaacttctactcttgtagcacccacgacttttgctaacctcagccctgcaatcagagcttcatattcagcctcatcgttggaagctatgaatttgaaacgtagggccacctggagtcgaagtccgtcggagatatcattgccaccccagctccgaatccgttttcattggaggcaccatccacgaaaactttccatgctggggtttgtggtgtgggaacgtttgcactagcctttgcttcattgcactctgttatgaagtccgttagtgcttatccttttatggaagtgcgcggtacatagtgtagatcaaactggcttaattccatagcccatttgaggagtttcccggatgcctctggcttctgtaagacttgctggagtgggtggttagtcaacaccttgatcgggtgagcctgaaagtaaggtcttaactttcttgaggctatcaggaggcaaaaaactagtttttcaatcatgcgatacaatgtttttgttggaaattattttttctatcgcagagtattatcaagatctcagcccgaatgtccttcttgttgaatgtctttcttcacgatcttcgtcactatgatttaggtagtacttgctgtgtgtgggcactactctatcattaagtggcttcgaaacaatcaatgaagaagaagaaaggagagtggcggctaggttaagagtgaaggctcaggtttttctctgaaggaaacaagacgtaaaagtcactttttcctgaagccatcactatctatttatagcatgccacatagggttaagtttgaattatttggcattaaaataatgaaaatattaagtgataaaacctacaaaggtggtcggccatggtttagcggacttgggcctcacttttgcaattttgctgttttatcatttttgtatctcattttctcaaacaatttcaactattcaataactataaataattattaaataaaattggcaattatcatatttattaattagaccaaacaaagtatcttaattaacaaatatgcccctaaaaactctttctttacaatttcgcccttgcttagtgaaaaattcacaaatagacatagtctaatttgagaattataattgattaatcaaaaccaattaatgagtcttacaagtaatattgtctcaactagtgggggaccatgggtctatatatccgagcttccaataa

SEQ ID NO: 337764 - DNA, 637 bp, Cannabis indica
agctcagattactttactataaaaaaaataaaaccaaggctccaccggcgttctagaccgtttgctcgtccatagcccctcgcagtatacataccagaactgacccagctcatcaaacttacattcaatgttccctgtctattgcctgtagggggaaagtaagggggtgagctaaaagcccagtaaggaaatgcttatcatacaataccatataatatcacacatatcattaatgtatttattaagttttagcaatatcatacaccttattttataactatagccaaataactgtacacatgaaaacctttatcatataggtccatactaattgttcacaccatacacatatacagagatcataactctaatattatactcataacataatcataccaatactataaaataataatattggcattatcatagccattacttatataacccgggcctaacctggccctacaatatcatgggcctatgcagtcctatcatataataacatgggcctatgcagccctaccattgttataggataggatatctctatattcaacagtaacatcactgtatcatacccaccataacaatctcatacacgactcagtaaaatgcagggtagggtatctctaca

SEQ ID NO: 337765 - DNA, 1331 bp, Cannabis indica
gatgatttgttcgatcagcttcagggatagactgtgttttcaaagactgaactacgatcagattatcatcagctcagaattcgagaagaagatataccaaagactgcatttcgaaccaggtatgggcactatgagtttctggtaatgtcattcggatgacaaatgctccagcggcctttatggatctcatgaacagagtattcaaggattttctcgataactgtgttatagtgtttatcaatgacattctcgtatactctcaatcaaaagaggagcatgagcatcatctccgaatggtattaaagcgactcagggatcataagttgtatgcaaaattcaaaagtgtgaagtctagttgttagaggtatcatttcttgggcatatagtcggataagatggaatcatggttgatctgggaatgattgaatcagtagaaaatgggtcgaggctaaaaactgtgacagaagtgcaaagtttgctcagtctagcagggtattatcgacattttgtcaaaggattttctaagatctctatgccactaaccgagttaactaagaagaatcaacattttatatggtcagacaagtgtgaagcaagtttctaagagttgaaacaaagattaataactgcaccagtgttagccttgccattggatcgggaaaaatttgttgttgatagtgatgcatccagactaggtctaggatgtcaactgatgcaagccgacagagttataacctatggctcccgtcaactgaaggagtatgatcagcgctatccaacgcatgatttagagcttgctactgtggtatttgctctaaaaatatggcgacactacctttatggagaaaaatgtgagatttacactaatcataagagtcttaagtacttttttacccagaaagatttaaatatgaggcagagacggtggctggaattggtcaaagattacgactgcgaaattttatattgccccaggaaagccaatgttgtggtagatgctctaagtagaagaggtcccgggcaggttttcaccactgtgatgatagctcctcaactggcctcagaaatggttaaagatgaaatcaaatttgtatttggaaagttgcacaacttgacacttcaatctaatttgtaagaaagaattagaagggcacagttggaagatcccaagctaatcaaaattcaagatgaagtattggctggttggcctaaggacttttcaatctcgaataacaaaatgttactatataaagcttgagtttgtgttcctaataatggtgagcttaagtagaaatccttgatgaagcctacaccacaccttattcgttgca

SEQ ID NO: 337766 - DNA, 794 bp, Cannabis indica
tgttctccaacagatcaaagaaccaagcagcaaaatcattgtacacaccagtcggttttgttgctgcagcaaaaaaccagcaggaattcgaaaaattgcagcccagtaacacatgaaaaatagtctcaacatccatgttacacaaaggacatataagatcaacattcacatgctttgtttggagttgtaccttagttggaagacaaccggagcaagctttccataagaaatgttgaaccttgggaggcactgaaagttgccacaattttttccaaccattgtcatcttgagtaaaaagccaatttccacttgacgattgaagaaacttataagcactcttgactgaataaaaacccgaagactccatattccaataccaactatccacatctcgagaatcacttagctgaatatttctgattaagctaatatcccgctcctcaaacatatcattcagaatttccaagtcccaagacctctcaccaatactaagcaaattagcaacctgcttatcaaccaagcccggaggagtagtgaccacataagggttattatcacagggcagccatgggtcatttagaatgctaaccaaggctccacttgcaattgatcttcttgcacccttctcactaagtcttgagcagcccatatactccgccaaataaaactaggattatttcctaactcagcatcaagaaaagaaccattaggaaagtacctagctttgtagatttgtcccacaagagtgtctcccatggtgagcaaacgccacccttgttttcccaaaaacgaca

SEQ ID NO: 337767 - DNA, 830 bp, Cannabis indica
tgttggtctgtagggtcagtcgtgagtccatgaaacagccagagtgacatactcgtgtataagagtcattcattccgtgagtgtaaggacccaatagaggcttgaagaagggacgttacagttttgttataaatttacatatgaaaataataaagtatttgaattattaactcgatttaatagatattatttaaaatatttatgatatataatttgaattttataataagtattaattgaaaatatctaacaatttgtacctaattttaaatattctttctcagtaatataaatattttaaaatttcaagttttgacttttattttatcattttaaaattttaaaatattttattcataaataataattcaaaaagaaaaatataattataaataattttaaaaaaataaaatatctaaaatacctcaaaagatatatttaaaaccactgcacgaaggacagttatgttacctaattttagtataaattataatattatcatataatataaattaacattaacatcacattataaaagaaatatgatatataacataatttagcataataacttaatacgttgtaccacatattttgattgtatgcagggacggacccagtagtgcttatatgggggttatagtcctcactaacaaaaatattgccttttaaaaaattaaatgtaatttttttaatttgataattgtagactaaaatagtagaaaagcccccacaaaattaaataaatctagtaggagtgattataatataggtataaatattttttaatgataaataaaccccccacaaagtaaaaattctgggtccgt

SEQ ID NO: 337768 - DNA, 610 bp, Cannabis indica
ctacaggtgagtgcacacctgatctacctatgatgacacagagactaggtcgtgaaacaacaatatgcaccgaacatgatcaacatggctctcatcagtataaccacaataggcaaataataagcataacaaagaacacattcttttttattttctagaaaattcggcagcataacaactgcgtttggaataaacccaaaaacaatagcctgcataatatttgctcacaaaaatatatttggcactcagtgccccagaacactctagaaaaaatatgcagattaagttttcaatttttcaaataatttgtaaatcataaaaagttgaatatgtccaatattatacaacacatataaaaattaagtccaataatcaaattgagtccctacctctcccgtgtcgttaaacttttccaaaagacgatcttaagctcttaagtcccgagctccaattatttagtccaatcctacacattactctcacctatacaactaaatggttaaataattatcattatcgcattctacattcaaaaccgagtccaacgacatataatatgactatatttaaaatttggggttctgaaacctcacctaagcggtgcacatta

SEQ ID NO: 337769 - DNA, 1013 bp, Cannabis indica
agagcctctgtgaaaaagctcaggaaaaccctcccttgttttgaagaaaaaccacctccttcatggctgaaaatctagaaaatgttaacactccacataaggaaactagtcaccgtcctgggaaagagccaataggctccaggaggtctaccaacccgcggtccaaacggaccagccattccagggtgactcaacttgagggtggccctagtgcacgaaccacacgttcccgaagaacccaatccgacgttggtcctagtacgtggacaacatgctcgaggagaactcagcgtgggtgtggtcagaacctcgagaggagggatgaagagctcaatcgtcgaggtgcccagtctatgggagaacgtacttatgaaaaggaaaaccgccgcctgagacaccgtatagaagaggcgcatcgtcgaaatgctgagttagaatgtgatgtagcctcggccagggcggcacaggggacgcatgcttaaactcaacctgaacctggagtgaggagaccacgaggcagaactcgtggctcacgaaccaggagacaggaaaatgcccgaaaagaacaacctaggaaaaacgagaccccccttaaaaatcagaacgaacagccgaatgggagacaaccggaaactgatgaacgagaaatccctcatggaaatgaggaggatcttgggactcaaccgagataacggtttttattcacaaagaattcttcaaagctcatttgaatgttagcttctgacttgtcagggttgtaagccttgttgacataactggatgaagttaactgaagcattcccttagccagatgggcacctcgcttacttggtctcgagccaatccaactgttacacttagttttgttggaaattattttatactctaacactaagtgatttcgaaatttcaaggaagaagaagagtatgaagtggcggccagggtttagaaagtgaaggctcaggtttttctctgaaggaaagtagaagtcaaagtctaatttcctgaagcc

SEQ ID NO: 337770 - DNA, 670 bp, Cannabis indica
ggatgaagttccatcagatgtgggaacatgtggagggtcctcagaggaggtatgtgaatgtcctgtagagggaattaaagagagtgagaataattcatttatagatgttggagatgtagtgttagcaagaggaaaaatatcttcatgaaagtaaacatctctagattgaatgatctcttgagtttcaatttaaaggttataagctttcataccagggggtaacctataaaaatgtaaggttgagatctcggagagaacttgtgccgtttggtttctaatgtcgaagcaaaagcaagacaaccaaagactttgagatgagtataattgggagctttgttatatagtatctcaaaagaagttttcttgttaagtaatttggatggagtacgatttatgagataaacagcagtattaatgacatgactccaataaggtaaagataaatgagattggaataataaggctctaccaacatttaatatgtgttgatgttttcgctcaaccacagaattttgttgaggacggccaacacaagaattgttgattgagattcccttggtggcgtagaaggctgttagattgagctctttagcattgtcacatcgaacagctttaatgttgactgaaaattgagtggcgataagagcaaaaaattggggaataatgaaag

SEQ ID NO: 337771 - DNA, 547 bp, Cannabis indica
ttcttagaataggaagaaatagggggctagcttataaagcccggtaagaaaacaactaatatcaaaagacccttggtttaattaaattcttgcatggttagcttttaaaataaaatatctcattaccattatcaaaatgtatagacaaagtagagagaccacaaataatcacaaaatgaagtgtcaaatacatatcatatcatccactagacccctagctagctcagagaaaatgacatccaaaatcgggtagtcgcacctgataacaccataatattggggctcaaattcaatttactccttgtacagattctaacaggtgagtgcacacctgatctacttatgatgatacagagactgggtcgtgaaacgataaaatacacaaatcatgatcaacatggctctcatcagtataatcgaagcaagcaaataataagaataaaaaaagaacatattcctttttttttctaaaaaatccagcagcataacagttgttttttgaataaacctaaaaatcataacctgcataaatatttgtacaaaaata

SEQ ID NO: 337772 - DNA, 877 bp, Cannabis indica
ctgacgtggcatcacaagatggtgacacgtggactcaactctaagtatctactcgcaaaatatattccgaacaggatgactcgtatgcatactcgaagcaaagcgatcagcaatccacgcagagcgaccaacacttagcgaattcagctttcgcatcgtgagtcatcaaagaaatccctataacttggggatcagattgcagagatatggcaagctgtccaaatcccacgatcagtgtattttgtatttattatgcaatctttctgcttatatccattgtaacgagaagggacatacttcctctccaagctcatagccctataaatagtgatgcatgttcacagggcaaagggttcgaaagattttacttaagagatattatctaagaattcatatttagagatattgttgtaagagctataagaaaaggaactttctacttgttcttgagttaatacaaataatgaggattaggctattatcgaactgctcggggctgaacctctataaaattcatgtgtctttatattgctttactatatacactacaaaaaattaggcctatctcgacgggcccaacccttcgttattgctctatgtcggcggtcattgcttgccgtgaatttgagcgccgagattgagtatggtctatctcggcgggcctagcctgtcgagataagtgagtaatgtcggcgggcctagcccttcgagataggtgagctatctcgacaggcctagcccttcgagataggtgagcaatctcgatgggctaggccctcttcgatatgtcattttttttttaaaaaaaatatttttatttagagataaaatttcacatgctgccaatattattcatgtgtatataataaccaaattt

SEQ ID NO: 337773 - DNA, 832 bp, Cannabis indica
tataattcatatactaattgcttgaaaatgtgcattagactcaattagaggagcaacttactcagggacaaattcaggtccatggccaaaataatatcctaacgcaggcgcttgggacaccagagcatcttggacgtgtcaaggctgttgggtatgctagtacatgaaatgttgtttccttagttatacaaaaaaatcatagctaactttatttcatgatttgtaggttcctgaccaaggtatctaaactgttcgacaggaagaaaagggaagtttctaatgttgtggctcggcaacagaaggagattgataaattaaaagccaaaatccaatcccttaaatagaacaaaaacactgcccaacaagaggaagaaggagaggtggttgatcaggcgtatgttccacaacaatacgctagtgagtatgagggtcgaccacaaatctatgttgaggagtttatttccctcaatgagccacctctcctgtataatttcgatgaccagagggcccttgatcagcaagtatatctctgctctgacaatatcgacaacattgtgcctcgagcgtatctgtacgagcatcagggtccaatcactgtacgagcgtatctgatttcgaaaatgctggaaaaggatgctaaaatcccaatctcaataaaagggtgcatatatattagggaagtagcaaacatgttccttccttggcctaaatatctaattgcaacacccgaggtaacttttgttataaattaattattaatgattagtaaagtttgaatatcttcaatattcaaccatagtgaagtaggttctgcgaatatatgtgctgcggt

SEQ ID NO: 337774 - DNA, 561 bp, Cannabis indica
aaatattttccaatatgtatcatctgtatgttattagaataatctagcgtaaatcaaagagtaagttagaagaatatggaagtggtaaaaaaatttttggagacttgtattcaagaagtatctttacatggaagacttggaagtagtttaaagcctgattcgtggaataaagttagacaaggtttggaggctacttattctttctctgcaacacaaaagcaattgaagaatcattttgattatctaaaggataaatataaaacttggttgccaataactatgaaaacatgaaatgtttatgatcctacaactaatactatttttctgtccaatgctgaatgggatgagtacattaagattatttctctatatcactattttataatttagatatttaagttgcacgtattaaaatgcattgtgttttggtattggatataggctcacccaaagacaaaaccattaaaaagtgctcctttacccttttcggatctctgtaaagcactctttgatggtactactgcaaccgaattttatggttggagtcctagttgtacaatt

SEQ ID NO: 337775 - DNA, 1471 bp, Cannabis indica
ttttttttttttttatgaattagttatgattttttgaagttggaaaaatatctaggctagggtttctagcctacgcgcgcgcatgaaggggacacgaccgtgtcatctgtggctcgctcggacaaaatcccttcagacaagggtgtgtccgaagcttgccccccacctgatcaaggttgcacgcccatggtgttggactttatgccttaaataaaactctatttcaagataatcttttctattcaattattaataaagaaacagacttaatttcattacttgtttaacgtgttatttagttcatgtgattatttatttatttgatttataaattcatttaaatccttatcacactgttattcttgtttattgtgttgtcaacacagtggaaagtaatcaagattgtgtgattaaatgtattcctatgatttatcagtacatagggtttaactgataggataatctacaatgtagtttacttgcaccttggaaaagtgctatgtcctttccagggcattggttaaagtaagcttgggttggatgtatagagtatgcatcggaagggaccgatatttaacttggattagatataataaacttaccgtaatatctattcaattcaatatcacctagttgatcttcgatcaaatgatctcaatcctgagatggttatgttatagttagattgtattatttgtgttcttcaatctatttgttaaagtcaactaatggatcttctcgtgacatatatattaaggacatggctgttcaattgagtgggagcgctaattatagatacagaatctatagcttctatccgaacatagaagtgaaacgataatttccttcgagcttcgcttaatagagataaatgatagagggctcattttagtgattatattagttcattgaaatatcatttatagatagttaagtgttttaaggataaaatacattgaagggtgtaacagtaaatttgtctatactcaatgtaaatcatctatagatgatcattgattattaagattataacaaatagataatttataacgtatctagattgtggaacatatacaacgttctatataattgagagtgcaattccaaatctatagtggtgcaagaaggaattaataagtcaggaaatttacttggtaaattctatatctacttattggaaactcggttatataggcccatgatcccaatactagttgagacaaacttcttgtaagactcagttaattgattttaattattcaattataattctaaagttagactgtgtctagtttatgaattttcagtaagatgtggcttgattgtgaaaaaatagaattttaggatttatttgttaattaaaagactttatggagtctaattaataaataatataaatgacaattttatttgataattaagttaattattaaataaatagttttggcatttataggattgaaagtgcaaa

SEQ ID NO: 337776 - DNA, 704 bp, Cannabis indica
ggtgctctactgtgcaggaaagggtaaggctttagctgatcagccatgagttaggagttgggccaagaatgtacatgtccgagccatatcaaacaagcgggttaagggtctactagtgatgtattttgaaactctattttgccgcttaggtcggctgaaagaaaaagacttgtaataaagtttgtaaatatttttgggatcctaactattaaaaagattaaattattacaagttttattttaattctgtttattataaaagtttaaattctgcgctattttgattagtaatcccatttaggggattagggttttcataagtattttgggtagcgtgcctaactatttagggcgttacaatttggtatcagagcgccaaggtttttaaacttcctgtagaccggccgaacatgtacattcgtcgtcagagacaagctcgactcatggtgcagtaagtattgagagtaaatactttactgtttgtgtgatcatctgtttaccactttccattttaggcagtatgcaagcatctagagtatgtatgtgttatgtgatgccatgctttaaaggttatttgattaagtgaatattttatgaggtaaatagatgagttagggtttaaggcaataagtacgtaagtgtggtattggtgcttaactcgctggggttgttgattacaggggtactagtaatggaccctctgca

SEQ ID NO: 337777 - DNA, 840 bp, Cannabis indica
ccaaggcatgttggcaacagttgactgctggtgttaatcttacagcagttggttcttttgccaactggtttgcttcggtcctacagcaggtagatgaggaaaattgaaggctagctgcaatgacgtgttgggcgatatggaggcatcgtaatgaattagtttggtctaagaaaatccccacggttgagagcgttgttcatttagctaaagccctcctcacagattggactcgggctcaagatacaattatgattcccactgcttctttccttacagatgtagatggggatgaaacatggatcaaactagctgttaataccttgaagattaatgtcgatgttgccatttttttagagaatggaacttatagcttcgcaggaataattagagacaaaattggtgcgttggtcgaggcgtttagctgttgcattcaggagtgatgcagcccgaaatggtggaagccttgggtgttaaggaggcgctgagttggattaaggcaaaggagtggaaggaggttgtcattgaaactgatagtcttacagtggtgcaagcgttacgtagttctcttcctatggtttcatactttggaagtattatttctgattgtaagatgatgttaaatgatttgagagatgtttatgtcaattttattagacgttctgcaaatagtgttgctcacttcttagctcgagcatcctatttagttgttgatcgtgttatcaggagtagtgatgttactccagattttaatcatgtaatcactatggattgcaattaataaagatgatgattttattttaaaaaaaaattgaaatagcttgtataaaaataaaaaatata

SEQ ID NO: 337778 - DNA, 558 bp, Cannabis indica
caacagtcgtgcgtacagggtatacaataaaaggactcactctgttgtcgaatgaatgaacgttaaatttgatgacttagaaggacatgaacaagtgtgtgtcgaggatgatgcccctatcctctcttgatctagactagttatcactagaccaacccaagtgtatcctgacactcctacagagtctctaaacaaagaaccaggattatcaggtgatgtgcaagcaaatgtcagtgatccagacaggggacctgaagttaatagtgctatgaccaaagaactccaacagcccaaattgtacaaaagtggaccaccctcctgggtttagaaagctcatcctcaggaaactgtcataggagatccaaatgacaccatggtaacaagacagaaactgcagaaactgttagcattttcctgctatcttatacaaattgagcccaaaagtgtgagagatgctctattggatgagttctggttggctgcaatgtaggatgaaatgggaaactttaaaagactcgatgtatggataatggtccctcggcctgatggagcaaatgt

SEQ ID NO: 337779 - DNA, 1364 bp, Cannabis indica
aatccatgatccccagctggtgcaagatacttttattgcctactacagcagctactggtactaaaatggagaatagaagaggtgtgattccagggatattgaggagaggtccaatggtaaccaaattgcaatcggagatgctggagaagaattttagccatgaagaggtgaagaaggctgtatttagcatatttggctcgaaagctccgggtcctgatggctattccagttatttttaccaagataactgggataccattggtgatctagtctcacaagctatgatttcctttctcgaatctggcaagatcctaaagagataaactcaacaatgatcacccttgtccccaaggtaaaatgtcctaacactataaaagactttcgaccaatagcctgttgtaatgtcatctacaagattgctactaagatgttgtgctccaggctaaaagatgtgcttccttcccttatttcttcctcacaaggaggatttattaaagggagattcattggtcacaacattatgatttgtcaagacttggttcggcattatgggaggaaagcaaataaacaagttgcttgataaaactcgatcttcggaaggcctatggtacaattgaatggggatttattgaagaaatgctagaaggtttgcaattccctccaaaatttgtgaagctaatcatgcaatgtatatcaactcctaggtgttcattgatgtttaatggtacaattcatggattttttgaaactaggaggggtctaagacaaggagatccaatatcgccacttctttttgtaataggcatggaatacttatctaggctcttggggaagataggagagaaagaggacttttcttttcatgataggtgtggggaattgaagattaatgacttggcttttgcagatgatgtattgctattttgcaaaggagagacaaaaagtgtgaagcacatgctacaagccttgaaacttttctcaataacagctggccttttccccaatgctagcaatactgctctttattgtagtaatatggtggatgaagacattgagcagatcattagagcctcgggttgcacaagagggatgttgccctttacctacttgggaataccaatcaatgcaaagaaaatatctggagctgaatgtgagattcttgtggagaaaatgactgcaagaattcgtagttggagcacaaggaacttgtcttttgcagctaaaactgtgttgataaactctgtttcgatagctatttaagcttattggagccaaatatgtatcttaccaaggaaggttgttacggattttatgattaatatgcaagtatacgcaatcaagtagtatctcacgcaagtgaggtc

SEQ ID NO: 337780 - DNA, 693 bp, Cannabis indica
tcctccgtccatcgtaactgagggccacttaaaaaatttggagaaggctgggtatctgggcagacttgagtgcttcctcccttctccaaattaccaggcaacaagtctgaaggcagggtactgttcctggtcgggtgcccacacgaaataaggggcaatgttgcctttgcacccgtactttaacaggtttgcgactacttccacctttgtccgacccagttcacacccaagggaatcaagtacttatctgccctgttcgtcctctacgccattcaaggatggggtgtgccgtctctgcacgaaatcaactggctctttaatttgaagtctaccccaaagtagagcaagtcagggtacttctacttctctcagctggacgacaagtggctgatgggcaccgtgaatacgaaggttggcaaaattgggtattttgttaataaatactactttgtggccggtatggagactgctcatactcggtttcagcaaatccccgtatacttccgtcctcccttcacattgaggcttagggaaagggcccagagaattccccaactgccagaggcagctccgaatatcactttgttgaccacaaaggccaactttgagaagtaccacctttacccggcagaatttgtacctaggtccgtgaaggagaaatggaagaagtccaggccgagccaggctgaggga

SEQ ID NO: 337781 - DNA, 823 bp, Cannabis indica
tctctctctctctctctttgaactcaccccaagaactcgacccataaaccaccacccacaacctcggtcccttctctccacaaccaccacgaccacatatccaatgagcgtcgcaaacccaatgacttctccattaaccacgacttcaccatcggtaatgttatcaaatgaataaattgtatgattaatgtttgttatctgtgagtagatgttagatttagggtcgaaaaacgaccagatctgagttttgggcaaaaaatagtttttttgccaggcccgatagtggcccgatgccttcctattgttaaaatgagtaaatgttgaagaaaaggttcgatggtggtctaatggtagcccgatgatatggtctgatagtggtcccatgctttcctattgttaaaatgattaaaggttgtagacgaatgtgcgatagtggcccaatgctatagtccgatagttgttcgatggtagtccaatggtggctcgatgccttctaacttaatgaatagagcttaatatctatatatgtagaatatggtttgatggtagtccgatagtggcctgatgctacttttttttttatgtacaaaaacataaaaaaaaaaaataaataaataacaagtagcatcaggctaccatcagatgcaccaccattagtataaatagaaatgaggaatatggatagtaatttactatacagtgttcagaattggaataaattaatggagaaatgtaacggaataaatgaaaaaaaatcggaatcaatatttgtaatatgttgtttactaatttttttgggaaatagaatagttgtgatttatct

SEQ ID NO: 337782 - DNA, 829 bp, Cannabis indica
tccactggaattacatcgagcaattcggcttctctagttgaggccaaacgggccagtgcgtctgcgtgtgaatttcgagcacgcggtactcgagacacgactactttcttgaatttctgcatgagctcgcatacaatggctaagtatttaaccaatctcccgcctctggccagatattctccattcacctggcataccacgatttgggaatcgctaaacgcctgtagatactcgattttcatctcgagagcgagcttcaatcctgcgattaaagcctcatactcggcttcattgttagatgcagaaaactcaaaacgtaaagcagcgtgtaccttaaaattgctaggactgattaataagatcccgccaccagaaccttcgctgtttgaggctccgtcgacatacaatgtccacatctctttattggttatagcaacgtcgatttggtcttctatgagtgccacttcggtgctggggaattcaaggataaaatctgccaaggcttgccccttgatcgcagttcttggtttatacttgatatcgaattggcttaactccattgcccatttcaacaacctccctgatgtttctggttttgctaagacttgtcttaaagggtagtttgtcaagacttcgacactgtgagcctggaaataaggtcgcaattttctcgatgataataccaaggcgaacgccaacttttctattttgggatagcgtgtctcggcatccagtaatcgtttactgacataatacaccgggtattttcgcccttgatcctcgcgtattgtaccgaaactaatcgcgtatctgacactgctaagtagat

SEQ ID NO: 337783 - DNA, 706 bp, Cannabis indica
gatcgttgtaaagaccgcttagtttaatttggaaactagcagttaattatgtttaattatgaaaattatttatagatatttaaataattagttatgctgttatttttgaattctgaaatgcattttatgtcatatagcgaaatttcatatttttgcattttcggtgccgacaacatggaactcggtgtttggctcagtaaaatcacaacttagtatgttagtattttggcacagttattagacattgggaatgtcgggattggtcgggaatttagaatttcctaaaatacccttttagtaccctttatgttattttagtgtggtggggcaaaatggtcattttgccccaattatattttgtcatttagtggacttagaaattttttttattcagcatttatttttaatttgtggcttagataagtaatgaaatgctatgttgttcattttatcaaagtttaaagaaaaaaggaaatttttcaaaaaatcactattttctctcaaactctctccctctttcggcctctctttgagcagcaaggaggtggtgttctccttggaatttaaagctaattaaacaagagttagtgatcacaagtttttggtatgtttcctttagctttcttttaagttttataaagttttgagaaagtttgttaattgcatgtttaagaaatggtggttgtgactgttgtgtgagtttgtt

SEQ ID NO: 337784 - DNA, 1482 bp, Cannabis indica
  modified_base (1451)..(1451): a, c, t, g, unknown or other
aaatatcatttttagacttttgtgtttttgcaaaaattattaattgataaattagatattatattttctaaatagtacaaaatagtatcatgaactgattttttgttaatataaaagttaataataatctaatctagagttattatgacaaaactggatacattttctacatttattcatgctagaattttttttcaagtttattatgtatatataaaaaattatcgaaaattgagctcagtgtacttttttagaaaataaagagttgaatttgtcattttacaaaacagatggttcagtcgataacttttgcaaaatacagagtctaaaatggtattaactatttttaatagaaattataagtcttatcttgtaggttccatacaaaatgatctaaaatttttacacatatgattcttttctttttttaataatagtagaagatattgactaattaattaataatatatattgacaaaaaaattattgcaattatttgtgttgttactaaattcttttatgttaaatgttaattactaaataatattaattttatatgtaaatgctaattattttgctaaataaaattataaaatttcatatataattgccacacacggtgtattttttaaatataatagtgtaattattagactgtgtaatataattaataattaaacacttatattcaaccacgttttataaataatatttgtgatgtgcaatattatcataaaaaatattttgtttgaattataaaattttaataattgaccccaagaatttaatcctaactccactcctggcctggggatagttcagattgattgggttagttagtattatttttaagtcgcttaatataaaggtgacgaaatatattttcgtcagattattgagtttgtattatttgttaaattatgtcagtttagtttgagcagattattcagttgggacgacttacaattttattttgtcgtatctaaacccatatttttcttaccgagtggtattcgtgcctttaatgctcgtacccatattccttgtagcatttctcaatccataaagacctacccaaaactaaaagccctcttttctcataaaatcagaaataaataaagctccaaacaaaaacaaaaactctaatgacagactaaactcaaaccccttctttctctttatttcgtcttctctctctatctcactgactcggaagaagaaatctctctctctctctctctctctcacagtaagaatcatccacaatggcagagaaggaagaaccagaggaggaagaagaagaagtaaaagtgcaagtacaaacagaagaaatggagaatgtgaggaagcttttgagctctacattggcgtgagcttcagcgtcttcttggcattggctcccaagaattggatgcagttacaggagcaagcgagggagcgttaaggggagntggcgcaagcagaggaccagttgaggttgat

SEQ ID NO: 337785 - DNA, 483 bp, Cannabis indica
atttagggcacaaaacccgacaataatgacgctaaattttctttatttaatttccatttagtacttcgtgattccacatgcaaggtttcattataggatgcaattaattctagaaaataaagattgtgatacgtattcaaataactagttccaataatattttaatttaaagacaaagtaaactgattgtttccaaatgaacaataatatccaaacttgtccaacaaagaaacataaactaaattccgtctaaaagacgacacaccaaaagtgtctttcaaatccaaataaaaccaattcccaataacaatttaaaatgcccaattgcttccacttttaccgtttgtcgacaatcgcccacaaagatgtgtctttcaccatcacttggctttcggtagctcaggcaaccctccataaaaatacttatgtgagtagtagcaccaaaatctatccaccaagtgtttctaggtactgaactaaatt

SEQ ID NO: 337786 - DNA, 626 bp, Cannabis indica
tcaatattgtttttttgtcgtttgtcttgctatgacatgtttatcaatgactcggtaatatttcattttccttttaaatttttttatagttgttttagcattatttttaagtttagctactgttattaagtttttgtaatatttgttcactttttcttttgtgtttctttgttgttttgtttcagcatatgaacactatcttctattaccttaagaaaaaaggaaaatattcttatgatgttacaatgaattttgcaacaactgactgcctttttgatgattccattcaatccttatactacaaattctacaaagccaaggcaattaaaacaaagatgtctcacatccatgctactcacccaatagcgcattatataagaggcttgcgaattccgtgttctaagccttgaaatgaagtcgatcatgtcctattcatcataaatcttaggaaagaaagccattgggtttttggccgtcttgatttgaatgaggggattatatttctttataattctttgaggaccgccaaaatgaatttcgcagcaaggaatgcaatgaaggcttattctcttttactctctttgttttttgatctcctttgattttggaagaataggtcccatgtt

SEQ ID NO: 337787 - DNA, 578 bp, Cannabis indica
gttcataagttcaatggcacaaatgattttggactgtggaggaataaaatgaaggcattcctagtacatcaaggaatctcagaggccattgatcgagaagagcttgctgctcttggagatgacaagaagaaaatcaaagaaattcagaacaaggcacacagtgccattctgttgagtctgggagatgaagttctcaggaaagtgtcaaatgaggacactgcagtggggttatgggaaaggttggcatcgatttatttgaagaagtcattggccaacaagctctacctgaagaagaagttgtacacgatgagaatggatgaaacaaaagatctgaggaaacatcttgatgagtttaatcgaataatcttggacctgagtaacattggtgtcaagatagaagatgaagatcaaggaatactactgcttagcatattaccaaagagttatgaacaatttgtggacacaattctttatggaaaggaatctttgtctatgatagaggtaaaatctgccctgaactccaaagaaattcaaaaaagaaatgaagatagatcaaatggctatggtgaaggtttatt

SEQ ID NO: 337788 - DNA, 1051 bp, Cannabis indica
tccagtgtactacgttagcaagcggatgataggggccgagatacggtatccgttgattgagaagttagttttctgcatcctgatggcttcaaggaagttaagaccctacttccaggcccaccccatcaaggtactaacaatccacccgcttcggcaagtcttacaaaagtcgaaagcgccaggaagactcctcaaaaggataggccctagcagacttcataacagagtgcaatgaagcagaagctagtgcaaccgtgcaagcaccgcgaaccctagaatttaaggtatttgttgacagagcgtcaaacaaaaatagatctagtgctgggatagcaatgacattgcctgacggactccagctccaggcagccctgcgttttgcattcctagcttctaacaacgaagccgaatatgaagccctaattgcaggattgaagttagcaaaagccgtgggagccgcaagagtagaaatcttcagcgattcgcaactggtggtcaaccaagtctcaggagaatatcaaatgcatggagagaaaatggctgtgtatgtagctattgtccgggaattgttccatgagttcacggagtacaaagtggaaagaatccccagagaaaagaatgctcacgcagactgtttagccaagttggcgtcggacagtgagatagagagactgggcgtagtgcccgttgaacacctcgcggatccaagtatcagaattaaagatacggtggttatagtccagcaagagccaagttggatggaccccatcatcaaatacataaccaaagtgagttgccttaagaaagggccctaacgagaaggctacaaaatcatgcacatcgatatgtgatgatggataatattctctaccgaagaggactcaacatgtcgtacttaaggtgtgtatcagaccctgaagttagacaaagcatgcaagaggtccatgaggggttctgcgaagatcatactggaggtctagtctctcaaagaaaatattgagacaaggatacttctggcgaacaatgaaaaaagattgtatagactatgtcc

SEQ ID NO: 337789 - DNA, 383 bp, Cannabis indica
aaaataaaaaatggatgttatcatactcatccactgctctgccttgagtggatcagcaccaccctcaaagactggtgggttttgcttcctgaactgctcatacaacggttccaaacaattctcgacatttggtggcactaccaaaggtgccggaggatcaggaatatagtttagagaaggctgagctcggtgctctctcagttctcagatttgttcaccctactgccggatagtctcttgcatcacgacatataactcttcccagtttggtggtggtggagggttcttgccatcaccaccaacccaaagcccaactagctcgcagttactgtaacaccctaactaccttacgcctattacatgatttttaaacgtactgtgca

SEQ ID NO: 337790 - DNA, 683 bp, Cannabis indica
tatagatacgctatcagttatccattgttataatcccaataatcaatgctcctctatagatgatttacattgtatagggattaaattaccgttacactcttcaatgtaatttatccttaaaacacttagccctgtataaatgatatttcagtgaactgaaatgagcactcaacgatttatctctgtttagctaagctcgaaggaaaacatcatttcacttctaggagctagatagaagctatagattctatatctatgtttagcgctcccactcaattacactaccatgttcccaaaatgtacgtatcaccctggcaaaaaagtaggcttaactaacaaatcaaagaacatgtataatactcctgagatagaacctaaccatatcaggattaagatcattagatctaggatcaactaggtgatattaaatttaatagatatcacgttaaattatcatatctgattcaaggttcaatatgggtcccttctgatgcatcctccatgcatccaacccaagctttactttaaccaatgctctggaaagaacataacacttgtccaaggtgcaagtaaactatgttgtagattcacatatcagttaaacggtgtgtactggtaaatcaaggaatatatatttaatcacataatcttgattagtttccactgtgctgacgacacaataa

SEQ ID NO: 337791 - DNA, 618 bp, Cannabis indica
aagtgggggagatgtaatgtgcgtgccaagatggcacgttacaagctaggtgatgcccacaagttggccaagtggtggtcaagtggtggcgcatgttgtggtgcatgctgatgcttagtttgtatgcagtggcattttcataaatatcttcaatattgttcagaatgggatgagacttggtatttgccatttatttgggtctacgaatacaatgatgcaatcggattgaagaaactctgtggtttgggttacggttcgaccgtatatctacagagccaaaatcatgtatgttcttggtagaagtctaaaagctcagaatgctctttaagagggtaccctggtgtcagctctccaccaccccctggcaccttagtactaagtgagctactagtagtcagtggggctagtaggacgggcatatgaggaccacgaggggactcatatgtctccatgagttggagtactcatggacattatcgggctgacccggtagtgcgtttaagaagctgctagaggttaacgggtacgtttcccttggcttgccggtatgccgcttgcacgggacatggcctaaacttcaaagagacattgtggtgcgccttggccacgagtctcaac

SEQ ID NO: 337792 - DNA, 690 bp, Cannabis indica
aaaaataaaatggagtaaacttagttttggggtgtatttatacttttgggggtgtaaatataatctcactttttcaaaattgggttaagacgattataccctttgtaatcatttaaaaagtacctattattaaaaaagaatctttaaggggcaattgttatacccaaaattcagctttactttagaaagtgacacatgtcaatctcatggaatatgaatcaacagatataataacaattataaaattaaatgcaaaatggaataacttattaaatataaaattaatagagtatattcataactcactgactgtatagtcttaggcgagacaaggatacacaaactatcaattcatgtattgacgagagactatcttgcctaagaaggcataatcccgaggaaattacgcgtaatgtatagcgaggcatccacctcgctacatataagaaaataatgacgggacgagttggctgttgaaacacttagcatataatccacattatagtaactaagtgtaacaacttggaaacatggaggacatgattgtgcagtctgcaaggccttatggtcaaagtgcagttcttaagtttgctcagtacactagtgctcatgccattgttgaaaggcatatggatgaaccaagtcattattggtcatctatgtacaaagcgagatgcctctagcgagatg

SEQ ID NO: 337793 - DNA, 998 bp, Cannabis indica
gagttcgtggaagcacaggctgcgtatctttaggccgggagttgggttaggttggagacaaaatggctcatcaactcggagacgaagggagcaagagtgggcccgacaaagcgattaaaccagtccctcagggcatttatattcaggtcccaggcattcctaaaggcctcctcgcgcaaggaattttgctgggcttcccgcaagacctttttcaaagcctctacctcggcgttccctcttgtatactcggccatagcataattgtgcttggctatccagagctgttgtctctcctcatccgcaggaataggggtaagaatgatgttgggaggcacagtatactcctctgcttctggcagaatccccgagtcagagctgacggccagagtgttcaccctcttagtctttttagaagactctgccttcaccattttgcccttgcattttcggtccaggggggctaggatatcaccctcttcctcctcctcctcgacctttccgtcctcgtcgatcaagatgatttggcctagaggggcgctagaagaagaccttcctggggtcaccaactggtcagacgccggaggaagagcagagtcaggctgtaggtctgggcaagagtcgccaaaagatcctccaatggcttggctacttcaaaaagacaaacaaactaagtgtcagaatggccatgagaaaatatgcacatgaaaacaaagcggtaaaactagtcctaccttgactatgtaactcagccctagcaaagtcttgcaatacaatattggcttcatcatccccaagaaagatgtccaagggaagaaaccagctggaagacagataagctgaatgatccaggagaataggtgcaggaggtccggaccccatccgggatcggcctagaaaatgacctaagttggaaaaatagaaggccttggcatgatcaacccaccgggtgggggcatcctaaatctaaggagacgctcgtcaaattctataggcctaca

SEQ ID NO: 337794 - DNA, 704 bp, Cannabis indica
gagatgtgttctcagtgtagatgaagcttgtaaatcgttgtgtgatttactgcttgattattgattcatgtctataattcatatcttgaaatcaatcaatctaaagataatcaacttggtaatttggatcattaaaatcaacaagttgtactttcaattggtatcagagcctaaaattttctaaaaatttgtgttagatcctactcttgtatgattcttgatccttgattcttgattcaatcttaaggattgattctgtcgtcactaaacctctgagttctctctcgaagaactacagaacgtttgtgtgtctgttctccacttctttgtgcaggatggaaatgtttagagaaggaggttccaccttgagacctccgatgctggaaggagccaactatccatactggaaaaccaagatgcgtgctttcttaagagctgtagatgaaagcgtatggatgtccatagaagaagggtggtggaaaccaacgatgatggagaatgaaatcgtcattcccaaacctatgagccaatggaccacagttgaaatggaaagagcgaatttcaactcgaaggcccttcatgctttgtttaatgttgtctccactaatcagttgaagatcatagccaattgtgaaattactaaggaagcatgggagaagctgaaaattaaaaacgaggtaagtgatgctgtcaagaaatcaaga

SEQ ID NO: 337795 - DNA, 583 bp, Cannabis indica
acatacactacataccacgcacttctataaaaggacaagccctagctaacttcataacagaatgcaatgaagcagaagctagcgcaaacgtaccaataccacaaaccccagcatggaaagtgttcgtggacggagcgtcaaacgaaaacggatccggagctgggatagctatgatatctccgaatgggctttgactccaggcggctctactttttgaattcctggcttctaacaatgaagatgaatatgaagccctaattgctggactgaaattagcaagagacgtgggagccacgagagtagaagtctttagcgattcgcaactggtggtaaaccaagtctcgggagagtatcaaatgcatggagaaaaaatggttgtgtatgtagcaattgtctgggagttactccatgagttcacggattataaagtggaaagaatccccagagaaaagaatacccacgcagactgtttggttaagttagcatcagacagcgaggttgagaaactaggggtggtactcgttgaacgcctcacggaaccaagcatcaaagttaagatgttgtggctgcagttgagccagag

SEQ ID NO: 337796 - DNA, 1196 bp, Cannabis indica
tttgctgaagctatggcgaaaatgcgatcgaagaggggcgagaagctgaaatcggattcgaaaaaactcaagaaagatgggaatcgtgcggggcacatggagatgaaatcgcaaatcaatcttcctgatgaggttgaggcgtcagaaatctcagggagtgaagacgaaccagatgaaattgatttggggagaaggagctggggatcgaaggactttccagagccactgtctcctcgaagctctctacgggaaattcaaaggcaagaggatgtccagcgtgactttgtgagttttgttaaagctacagagcaatgtaacagtagtatctcaaaaggtatgaaccctattccccctattctgagatctgccagtgtagtgaggaatttagagaactcttttaaaagttctcagcaggatatgaaggtgaagattgatttagaggacatagaggatgagattaactattggaaaccatctttggtgtgctatgtgcttggttctaatccaccattgcacatccttgaaggttttgcaaaacgaaaatggtctgagaaagtggacaaagtaaagctattagcatatggggtgttcttgatcagatttcattctattgagcaaagagatgaagtgttgaatgggggctatattttcttcaataggaaaccggtcattatgaagccatgggacccgaattcaagtgttaagaaagaagatgtgaaattagtacctatttggatacaattagagggcttagagctcaagtattggggagagaagtctttgtttaaaattgttgggcaattgggaaagcctatcatggtagatgcgattacaagagaaagagaaaggcttatgttcccaaggattttggttgaggttagcattgaacaagacttaccaggaatgattgaatttgaaaatgaatatggcagcaacactacagtaacagtccagtacgaatggaagccaagtgtgtgtcaacattgttatagaatgggccatgtgactgctgaatgtaaaaagaaaactcaggccaagaaagaatgggttgtgaaggcagataatagagcagaacccatgaagaatacacaggatgaagatggttttcaaccggtatcaaaaggcaaaaagataacaatgcaagaagaccctgtagaaaccgaaatacagaatgtgtttagtattttagatggtac

SEQ ID NO: 337797 - DNA, 628 bp, Cannabis indica
taaattgcaatttatttgtaatagaaaataaaatattattaataataaaaaaaatgtattgcaacattatgagaaaaacagggaataaaaatcccaaactaaaattcgaaatccaaattgtttttaaactaaaacaattaattcaaaaataaataaataaataaatgagcttcatcttcatcttggacgatcttcatccctttgtccagctttccgatccaactcactaagatagcatctgagttcaagtagcttgggctataataagaagaaaaacaaataaacaaagttagtccagaatcaaaaatccaattggataataattcactaaaactcatcaagtttatagaaagaaataccttgttctttgcaagaagtttaggacattggggtttccaatggcctttctcattgcagtagaaacactttccttttagtgcatcaccagtagcagcagcctttttgttttgaactgttttcacagctttggctcgcttcttggtatttttccacttcttctttgatttgggtcttgaagtagaggctacatgtgcctcaggtttaaccgtcccattaccatttccagaattgtgaggtttaccccctttcttcttgggtcctccaatca

SEQ ID NO: 337798 - DNA, 997 bp, Cannabis indica
actacttcctcttgctcatgctgtactgttctggcataccttcctgggctttgccgaaatctcctgctatgtgcggacctccaataatgacttgaagatgtccatctattggtggtggtagtaaatattggttgttatcgcccctttgattttgatcgaccttgacatatttttgtacatgcggattattttttcagatcaaaaattcaatttcccgattcagattgttgcattcattggtgtcatggccataatctccatgaaaatggcaaaacttggtcatgtctctcttgcttaccgtttttcatgggtgcgggcttcttgtatagggctaatgacttagtagccatgtacacgctttctatatcttctgttaagacaaaaaatgcagtaaacttggtaggattctccctaggagcttgttcgattttaccagcaaactttccctttttcccatttccttgcctattgttgttgttggatcgtttaccacctgagcttgaattgcttgggtactgggggagctggacggatatcccagcagagggagctgcccccacagtatcgcggataactttccgcttcggtcacccgtgcaatcttagttgcctccgtcattaatctactaatgtaagctcggagaggttctcctggtctttacttcacttcgaccagatctcctaagtgcaacggaagttggcaagaagaggagaattttgcatggaatttcgaggagaaagccttccatgagttgaaccttccagacaccaacttgaaataccattgctgggcggcctttgagagggtggcaggaaaaactctgcaacatacatctcctcgtgctccttgcaggtccatttgcatttcgaaatacttgaggtgggataagggatcttccttcccagtgtacatctttcaggttggcatcttaaacttgtgaggcaattctaagacattaatctctagggagaaaggggatccacgtgctcggtctaac

SEQ ID NO: 337799 - DNA, 525 bp, Cannabis indica
cctgtaattcgtcgagcagctattctactcaggttggccggcacacctaaattcagaagcgaggtaagattagtataatgatatgcatatgtgtttacatgtttagcgtacatattatttatgcatgttagattacatcgatagtggtatcaatatatatagagttatattggatactagtatatgtatgtttggctcagataatgatcaacgctatcacatcaatatggcaagagtattactagcatattaagtatagagtgatattatggttgatagtattatgctatgaacgttctagacttagcactgtgttggacacggagataggattatggtttggtgtatgggcgcctgactattatccaggttattgctatgttattatttatgcttttcttactaagtctgttgactcacaattgctatttccatatgtaggtaagggcaaggctaaggctgagcaactatgagagcaagtagatggagattgtgttaggtattatgccctaaataaaactccat

SEQ ID NO: 337800 - DNA, 830 bp, Cannabis indica
tatttttgaaagctaatcatgaatttacattattttggaaggattttagcatactttggtgaaaattgtcaattttcgagagctcaattttacatggcagaacatggagctacacataaaagttgtagatctcgttctcagctttttggaacatcttgaatcatccaattcctagttatactgaagaagttacggttaaaatactaatctgaacaatcgacataattttttcagcaggaggctcttgccacagcgagcttaatcttttatttaaatcaaaggatttttatggcgtataaaataggacttctagggctcgtttggtagccgtattgtaatgtattatattgtattgtgttggattgtattgtattgtattgtattagtattatttaatacaatacaatgtttggtattgacttgtattaattgagtgtgtaaagttataatatatttttaatacactcgatctcaacactaactccgggttcgggtcccgggtaccgggtccgggtccgtgtctggggtccaggtctgggtccgagtccgggtccgagttcgggtccggggtccgggtctgggtccaggtaagagtccgagtccgggccggggtccggagtcctggatcctgggtctgggtccgaggtcctaagtctgggtctgggtcctggtccggggtccaggtccgggtctgagattggtgttgaccccacatcatttgtaaatattataatacaagctcatacaaactatttattatgtattaaataatacaacatacattgtattaaaaaatttggtcgtaataattaatacaatacattgcttaa

SEQ ID NO: 337801 - DNA, 638 bp, Cannabis indica
cactatattgagaaaatgtctttataataagattatgtatttcaatatatatttgagttaatcttaaagttagcataaagcatgaagaaaataatgtgagagtgatggttcaactacattgtgcgtagaagagattttgtctagatatgatgtgagaaagaaaaatactcaataatctttaaataaataaataaattcaaagtaatatcatttcaaacttttgtaaattatggtcaagtgaaaacttgacaaatctttcaaactgtaaaagatttagtaagaataacatctagctagggagataagactaaattaccgaatagattaaccattaataataaactagcaatgaatgtatgtattaagtttaaaaggagaaaaaatgagatgttagaaaattaaaattatatcgatatatagatagataaacaaattttattatggattgactagcttgaggcctcatactgagttcatctaattgtaacaaaataattaaatatcattaaaaaataattaattatttaaaaatttattataagaagagaattttaatttgtgtaaaaagaagtttaatttttgtaaaaaaataaaattttattgtaaatatgatagttaaatagcttaattgttaaaat

SEQ ID NO: 337802 - DNA, 705 bp, Cannabis indica
tgtgaaccatgcaatataaaaggatttcagatctttattaattagtaaacttgattattttgaaatgagttttatttagagcacaaaacccaacaaactcccacttgcactaatataaaactaaaagtgtgtttcaaataatctcaaccccttgatatccaaattaagtgtagtatgttgtattctctctgtaataggatctgacaggttgtattcaatacaaactttctccgccattacatttccttaatcacaaaatccttgatattgtgaattttctctctatatgtctactcctataggaatattggattctttactttttggaaactacatttctgttagtcaagaagtaacactagtagtttataaattattggtaaaatgccaaaaattgtatagaactttccatagactgaataagtatccttcctataacttttccattcagtctcactggtagagttacagacttcagataggtttttacacttctccaaaatcactgatccacccccagagtaatcaccatctcattagtagactttctagcatcaaggcaagtcttgaagcctaatttggtgtagtataatagtataaagtaccacccttatcaactaacatctagttcctcttcttgatcttaaaatttacatgatggtcttccaatgttcctttcttggattaatctgatacctactcatt

SEQ ID NO: 337803 - DNA, 1183 bp, Cannabis indica
aacccaaattaaacaaataaatatatatcaaatacatccaatggatagaaccgatccaatctaacatccaatggatgttggatcgattggatgacgaaattaattggatcggatcggatggtaaaatctaacatccaatatatgattggatcggatctggataggcctaaaaacattggatgtgatccaatgaacagccctatatatattattataaatttggttaaaaaataaattatggatataaataattggctaattagaatttttgccccctaaactttgacatgtaccaaattatgccccctgaacttttaaggtcgttaaaaatgccaatgaactattgagattgttgaatttaaggattttgtctaatttcattcaattttactattttagtgattgtttatatactaaaccatgctccccagactttgatatctaccaaatcatacccctcgaactttgacatgtactaaatcatggtccctggactttcatccatgttagactttttaactaaaattggaaaaaagttcttaaatccaacaatttcaataggacatttttaacaaccttaaaaattcagggagcatgatttggtacatgttacagttcagggggcaaaaatcctaattagccaaaataatttgtatcataaatatgtttaataataaaattcttaaatagttattacaatcattattgataatgttttatgttaaatatttattgaacatataattttaatacaatacgtattaaaagacattgaaacttaaaatatattttattaattattaagtaattgataatatcttaaccatcaaatatcttatttttcaaattgtttattttattatatttaatttattaaattataagattagaaatatctaaattttaaattaagatattatattatactatcttattagatattataagatatttaatgaatttaattattttaaataaactaaaaatttaaaaattagttagatatttgaatttcagttagaatttaaattatttacgagatttgttagattttaattattttctaacaacctaaattttaaattctagttgagatatattttaaatattttatttaaaatataaatatcttaaccaacttttcaattatctgttacatgtttgttatgtttgtttatttatt

SEQ ID NO: 337804 - DNA, 649 bp, Cannabis indica
atacctactcattactcccactcaacagcaggtgtttggtctaatgcatagcaaagcatatctgagacctttcactgttgatcctaaggaatttttttcttggcctttatcttttttggaatagttaaaactgcttgcattagagtaattaaatcaccaggtataccataagccacaagtttagataaactcaaacctatattactaagattaggaagttttgttaagtccattcaatagacttattattaaaatttcttttcttgtccttgtaatggaaaatcttttggttacttcatatgaatggttttaaccatagttctcttggctttgcttcttagttccttattctgaccatccatcacttgtttaaactaacaattatttcttataacatgtgtctcccaagtcataagagggtgagttccttgaaaccctctcactacgtcaaggtaccgtgactttctgtctaagaacataagtggtattgacctcatggttgggtcaagacaatagaggcagtgggaccatcttatatagaataagatgatagaacaatttggaatcaagataaaaatgtctcctctactttgctaatttgttttcagatttaatcatactcttagaaaagtagtatttgttgaagcaa

SEQ ID NO: 337805 - DNA, 1053 bp, Cannabis indica
aattgccgtaaaaaatactctcggacaatggaaaatagtttgacagcctatgcttcacaaatttctgtgcgaaacatggtatcatcaaaagtttctccgcagtggcgcatccccaagcaaatggtcaagttgaagcagtcaacaagacattgaaggatacactatagaaaatacttgaggatgctaaaggaaactggccggaggaacttcttgaagttttatggtcgtaccgaacaactgagaaaacaacaaccggacagaccccatttgccatagcatatggatatgaagctatgctgcccgtagaacttgaactaccatcccacagaagattaacgtatagccaagaggctaaccatgtactccttgccgaatcacttgatgaaattgaagagaggcgaaccacaacaaacataaaactgatggctcatcagcaaaaagtagctcgatatttcaacaacaagtgaaggctcaaaaattttttgtggaagatatggtcctaaaatgagtattcttaaacaccaaagacggtacgacaggtgtgctcagacctaactgggagggaccatattaggtaatcgaaattctagaatcggaagcatacaaattgggtaagtatgatgaaaaaatgcaactcgttctggtaccacggtattggaatggggaacatttaagaaaatactaccaataaaagtaccagtttggatgatcatatcaagtatgaaacacaagaatatttactcttaagtgaattgccttctaggcggaccacgcccaaaggttcggataaaatcttcaaagtactcaggtcagatgtccgtcattaaaagtacgacctttaaattcctgcaatttgttttatttcatgttaagctaaagattagattagatcaaattaatagctttgatgtaagttactatggtaacagacatattttcgatcaataaatgaataaagatgtttatttcaaaattcaaattgagttgaatttagtagcatgttgttaatttaccatcaagtccgtacaaaaggtttggtcgagcccaaaaccc

SEQ ID NO: 337806 - DNA, 681 bp, Cannabis indica
agaacactgataccacgtacaaatctctagtgtcaagtgatttaattttctgcaattatttttatattttgcgatttctggtttgtttctgtagtaacagaattacattctgctactgcagacgtttacagatttatgtttagtatatttttgtaatatttattgatatttgcaaaattttgttttttcatttggtatcaaagcgagacactaaactcttagtgtggtccttttaacggtttcgtgtgttttgtgtaaaatgtcattttttatagaaggaagtttgatttctagactaactttgctcaatgattctaattatccttattggaaagttagaatgagggccttcatcaaatctcaagatgagagagcttggaggatggttctatcagattggtcttctccagctgagatagatttcgaaggtaattctaaaataaaatctgaactggaatggtatagtgaagatgataaactttctgcctacaatagcaaagctttgcatgctatatttaatggtgtaggtgaaagttatattaagcttatattatcgtgtgaatcttctaaggaagcttgacaaatccttcaaactcagtttgaaggaactgttggaaatattttaccaggatcttagaatttactaacaagtatgttgtttaacatcctaaatctgaactt

SEQ ID NO: 337807 - DNA, 1199 bp, Cannabis indica
aagacatattttaaaggacaaaattgtcattatatatttaatattaaaaaataaaataaaaataattaaaattcattacccttaatggcattccttataaaattggtgggggaagttctccctttcttttctcctttatttaatcaagttctccctttcctaattttaataatgtaagtaaacaaatgtaagggaatgattaccttactattgattcccattacttattagtaaacatgccattgaagtgtatatttagtgcaagtttgagatatgggtttgggccccaaggggtacccagttttgcgcgcatgggtgaggactcatacactggaccaccacacatgcgcgcgcgccaccgccgtccgaccgacccaagttgggttggcgggtgaggtgtcactttattttttaaagaaaaattatttaatttaataaagatttattttttttatttattaattaattttaacacgtgatcagaagaggtaaaacacgatcagtcaatgatccgccttttcctcctcacgatccaactcctccacgaacgattttcttggatcgacttctatataagtcgtatcagaacaacgtaagaatacatcttttccaacattaaaaattcttttctttctaccttacgatttttctcagagcaaatagtagggtgttatagagcgatacagttcggtgcagaacatatcgtacttatacataggttgttttatcctggggacgtcgtggttgctagactgccgtgcacacttcgggcagagccgcgaaacgtcttaaagatagcgacattgtccgcgactcagccagattattctatcggtaattcgttccaattttattgtatttaatttcggtattaacaacctataaattatccttctcacattttttttaaagcaattatcacaattttactacatatcgttttaatcctttatataagagaaatgttactcttcaattgggtctcatataatttaatgtaataaattttaggtgcgtttggaaagcaacaatgtaattggatttgtgtgtatttggaggtaattacacaatttgacatgtttgtctgacaatgtaattacactgtaactgtgtaattggaagtaattgaggagttccaattacactctccaattctcatggcccccccatgagaattgaatgtaattacactgtgtaat

SEQ ID NO: 337808 - DNA, 996 bp, Cannabis indica
ttggaaagtatcgggggttgccctgagtgcgttttgagggcctgaaaagcttcttcacacttttttagtccaatgaaatgttttatttccttgtagaatttgaaaaaactctttacatttattcgaggaacgtgatataaagcgatttaatgtagcgactttacctgtaaggctttggaattctttcggtttggttggagatagcatctccaccaaagcttttatttttgcgggatgagcctcgattcctcggttatttaccataatgtcaaggaattttcctaagcccactccaaagacacattagagggggttgagtcgcattttttattgtcacaagattttaaacatggcctccaggtgaatgagacggtccttcacatgttgagattttacgagcatatcgtcaacatacacctccatcgtctcgccaattaaatctgcaaacatcatgttcacaagtctctaatacgttgctcctgcatttatcaaaccaaatggcattaccatataacaatacaaacctcgatctggattaatgaagcaggtatgctgctggtctggttcatacatcagaatttggttatatctctagtatgcatccatgaagctgagaagctcatgacttgcggtagcatcaacaagttggtcaatgtttggtaaaggaaaattgtccttaggacatgctttgtttaaattaatgaaatcaacgcatgtgcgccatgagccatttggcttgggcacctatacgagattttctaactagttaaggtagtgttgacttcacttttagccaacgacaatgagtctgttttacaagcgataaatgatttataataacaaatatatgataaaacaataaaaagacacaggaattttatagaggtttagccccgagcagttcggtaatagcctaatcctcattatttgtattgacttaagatcaaggagaaagattccttttcttatagctcttacaacaatatctcttaatat

SEQ ID NO: 337809 - DNA, 529 bp, Cannabis indica
atcataattttagtttcacaaagtctgctctttttcgagtaggtgtgcaaaggctaggttccagttttgacagtgagattggaagtgcgatagcttatggtaagtaattttgtgtgattgcagtttccatttcgttctggtttgggcctgctttagtttctagttgaaatttcggtcactttgtgggcgatagctttttggtttgcttggtttaattctaagtggttcttgattttttcagagtggttctaatgcgatttggtttgcttacaaagtggtcctttgtgatttgtttgatttgttccagagtgttttggcttagttatgatttgattcgatgttggtggtgtgttgattctgtgtggatcgacactggtgtttggcgttgtttgttctggtttgattgggattctcgttgttgagctttggttggattttggttgtggtggtgtgggttgaagtgtgggttttggagtggtcgggttgtggttgttggtgccattggtgtgtggagtcgagtgtatgtttc

SEQ ID NO: 337810 - DNA, 552 bp, Cannabis indica
tctatcttttctcttatccaaaaccttctaatatcgatgtgtttagatctctcatggtaaatgggattcttacttaaatgaattgaagattggctgtctgaaaacacaacagctttgccctttatcatctgtagttcacctagaattcctttgatccaaacagcttccttgaatgcctcggttgttgccatgaactcagcttctgtagtggaaagggctacaacaggttgcaattgagacttccagctcatgcaacatgagttcagttgaaaacagtagctagttagagattttctagtatctctatttgatgcataatcagcatcaacaaaaccttcaagttccaccttgatacctgtcctcttgaatttcagaccatagttagaagtagtctttagatacctcagtaaccacttgactcctttccagtgttcttcacctgggttagacatgtatctactaagtgtactgacagcatatgctatgtcaggtctagtgctaatcatagcatacatcacacttccaattgcttcagcatatggtatttcttcc

SEQ ID NO: 337811 - DNA, 541 bp, Cannabis indica
ctctcaactctctctctatttcggcccctccttgagcaacaaagacttggcattttctttggtaattcaagctgatttagcaagatttagtgatctcaagtggttagtaagattcttatagctttcatttaagtttcttgaatttttgagaaagtttgttggttgcatgcttggtttttggagttgtgttcgctgttaattgttgttgttgttttcagaagtttaaacatgtttaattgagtgaaatagaataggttttgaggcatgattagttgatttaagcaagtgtggaattttaactcaaaactatggtttttatggtaaaatgaggaatcttgttgctgtgattgttattactgtgtaattgtgttttctggagttaaattatgttggaatcggttagtttagtggctatatgaagggttagtcaagttttgagtttctgaactcaatcttgaacctttaatggtgaaatgcgtttctgtgtttgaagcttggttttattgcttgggttatgttatttggggtatttagaacaggt

SEQ ID NO: 337812 - DNA, 715 bp, Cannabis indica
caagttttatcaaaactagatgctttttgaagattgataaaatggtcaaatgaactaggcagttcgacataacataccatcctcgaacatccatcaagggccaagctttagctgacttcttgatagaaggtataactccagaagaaatccctcctgatcagcgagatgcggcaaccttgaagttatatgtggatggcgcatccaacgaacatggtttgggtgcaggggtgatattaatatcgctagaaggcttcaagtttcactatgctgtgagattccaatttgacgcatcaaataacgaggatgaatatgaggccttaatcgtcggcttaaagatagcagaggccttgcaagtcaaaaatcttatctatcatagtgattcacaactgatcgtaaaccaggtcctcagggaataccaggccaaaggcttgaaaattgcgaagtatttagagaaagtttggaaaaacttggaaagatttgattactttcaaataacaaatgctaagagaacaaaactccaacgccgatgccttagcaaaactggcctcgcagaatgatttggatgaactaaatctggttccggtagaaatactgagcgagccaagtatatgtgaaactgaagacgtcgagatgatagatagctctccaacatggatgacgcctattattaactatttactcgacgggcaacttctaaatgacaaaaatgaggtgt

SEQ ID NO: 337813 - DNA, 677 bp, Cannabis indica
atgcctcatcttcttttcttcaacatctcttctttgaatctatcattgatatgtttcaagcttttgaagcatttagaaacttttttatcctcacgtagtctttcacattataatctacttgatagcttttggatgtgtaacgtttcactctttgatgaaatagattcaattttgtactttgttgtgattcttaactctttaaatcatgaagaacacgtttgagtcttgaaaaacacatattttgatccattacacaccttggccggctcttgggatcttgtttaagtcctagctgacccatggtgtttgtcatgggggcaggatggttctagaatttgtcctaggaacctggccaattcatgcatgggtcacgagaccctgaccgaccctctcactactttgggaccctggcctacctaggccttggtcccaagctagtggccaattttttgtcctcttttgacctcgacaagaatcctgtcatggtcttatgaacgatacaacctttgtcacacatgtggttcccttagaaactttgtatgacactttatagtgagtctattatagtcaaatgctcaacttaagactcaacattttccaagttgttacactgttacacttgaaaccgtacttcgctaataccgagccttgtacaatgacattatctggaaagtacc

SEQ ID NO: 337814 - DNA, 527 bp, Cannabis indica
tcctaatcgacaatgggagttttgtgagtttattatttaaggaagccttcacggcaataggcctcacagaccgggatctctcaccaactggttcccagatcacgcagttcaatgggacaacacttatcccaatgggaaaagtaaggttgccagtcaccttgtgcccagacacacccaaaagcacttttaaatactgcacgtttgtagtggtggactgcccaacagcttacaacgcgatcctcggccgaccggccttggtggacttcggcgcagttacgtcaattaggtacttgtgtctaaagttccctactcaggaagctaggatagggaccgtgaggggaaaccaaagagaggccaggcaatgttacaacgttgctgccccctacccgtattgatggtccgcgaagttattgagccaggaatggtgaaagaagatgagttggattcccgtgtgggatccaaaaaaattgtagaaactatggaggatgtcaaggaagtatcagtatgtaactgttggaattatttta

SEQ ID NO: 337815 - DNA, 539 bp, Cannabis indica
aaacctagaatagcacaaaccagaaacataaaatcgagaaaatgaaaaatacaagaaaatctaggaaaaaggggaaaccaaaaagaaactgtaaacaaacctcagttcgaagaccaccaccaacattattgtttttttcagcaacatcttgagccattttttcttgggcacccacctttgatttcttcttaggaggtgctcgcccacgcttagacaatggaggagtaaaatcagagtcatcctcctcaataataggtcgtttacccttgttcttattagctaatgatttcaaacccattttagagcttttcttttgaacaagggaaggagatgatgaagaacgggtcacatccatgtttatatacagattgagaaacaaaaagaaagagggaaaacggttatgggattgagttactgggagttgaaaaaaatttgaagaacaaaaataggaggggaaatggatgtgggatcatggatatggaaattcagcaatggaggttactaattttttttaacaaaaaaactgaaaagaaatgaaa

SEQ ID NO: 337816 - DNA, 1064 bp, Cannabis indica
cttatattggtcgggcacaccaaaaagacatgaaaaatttgaagacactgctcgtcaacttggagtaccatacaccaaaaaaatatcacttgattgtgtaacgaggtggaattcaacttttctaatgcttagcacagctttatcctacaagacagtatttgaacgtgcaaggctgcgggagttgcgtttgaggtgtgcccttcagaaattgattggcaaaatgctcaacaattgtgtgataagttagagttgtttcatgaagtaaccgaattaatttctggaacaaagtaccctaccgccaatattttttttccaaaaatatgtgaaattaagaccaacattgaatcatggatgttatcagaggtgccttttattaaggacatggcaactcaaatgatgtccaagttccagaaatattggcgagagattcacgggcttatgtgtgtggcggttgttttagacccgaggtacaagttcatgttgctcgaatattatttccctgtaatttatggagatgagcaatatgtaactgaaattgcgaaggttcgtgagctttgttgcgagctactagaggagtacgggtctaagtttcctcatttgagagaaagaagggttcaagaagaaaatgtatcaacatcgtcttcaacacgccgattggatgccctttctaactttgacagatttgttagagcttcctatcgagtagagaatatgaagtctgaactggatttatatttagaggagaacttgatacctaggactgaagagtcatttgatatatgcaactattggaaggtgacgggcctcaaataccctttgttgagtatgattgccaaggatgtatttgctgtgcctgttagcactgttgcttcggaatctacattcagcactggtggtaggcacgtgagttcacatcgatcgagacttcatccttctacattagaagcattagtatgtacacaaaattggttgaagactgacaaaaaaggtagatattatttaacaattgtaaatatatatttatatacattttttcatttcttaattagaattaatatttattt

SEQ ID NO: 337817 - DNA, 981 bp, Cannabis indica
gtttgcctcctccaagttgagtccgagttggcaatttttcaacttgacgattggcacatatcttgttggatcgtaggcaccatcctcatcagtttgcctggtttgggctctaccaatgttcatttcaggtttttcataccctattcctagattttgggtcctccttgaacgtgtggtccgtgtacttgggccaccctcaagttgtgtcctctttgaacgagtggtccgtgttgatcgtgagttgggaggcctctgggagcccattagctcttttccaggacggtgagtggtttcttcatgaggagtatcaatgttttcttcgttgtcaatcatggagaaagttttctttatatatatattaggagggtctttttctgagcttttttcaccaaggctctcaatgaaagaacgaaactgttaacgcagattttcgttaactatattaaagcctaaatcgtgatggatttgcacagaaagtaaaagcagtaatggaaaaaataagaacacaaagcttctttacgtggttttatagttaaaattctgcatagtccatgagtctttcttattggatatttctaatataattctagggctttttccctgaaggattttccatcccttttttcagtgtaacctactcctatttatagttacattggagagcagttaattataaatcgagctgatatcttgcaataataatcccctgaaattgtgggatttgattacgtcccacgtaaaataaatgcggttattatttaaaaatcacacagctgtcattggtccgtttttactgggtcaatgcatacatgtattaaatacgtattaaagcgtatcgttctgggacatcacctaagaacatagcaacaataatcctggcaacgagccaaagattttcccatgtctttctgagcttaataatgtaaatcttgtcttttatgatattgaagacataatgctctatctgacaatggcagttct

SEQ ID NO: 337818 - DNA, 443 bp, Cannabis indica
gggagtataggccttttgaaaaatttctagctgatcaaggcatagtgttcaaacaaccttgtcctcatactcataaacaaaatggtagagttgaacgaaaacatagacatataactgcccaggtagactcatatcggataatatcattattgcccaggaggtcgctcactccattaagcttaaatctaaagggaaaaaaggatggatggcggtgaaattggatatggccaaagcgtttgatagagtagaatggccttttatcttggccatccttagaaagtttgatttctcgcctcgaataattcatcttatttctgcttgcatctcttcggccaccttccaatttaatgtcaatggcaaagtctctggccacgttatcccttctaggggtatccgtcaaggtgaccccctttctccctaccttttccttctttgtgcggagg

SEQ ID NO: 337819 - DNA, 537 bp, Cannabis indica
gtgggagggtttcaaggaactcaacctgttatgacatggaagacacttgtgattaaagttcattgttagtttaaacatgtaatggattgtcacaataatgaactaagaagtaaagccaagaaaactatcgattcatatggagtaatcaaaagttttctattacaaggacaagaaaggaacttttgaaattaagtctattcaatagacttaacaaaagttcatgttcctagtattatagatttgagtttatctaaagctgttgtttgtggtatgcctggtgatttacttactctagtgcaagcaacttactgtagtaagatgcagatgcatttttttaatggcaatcgatagaagtttctcgacctctagacgtaaattttatttatctaaggaaaagtttcaactattccagagaagataaatgccaaagaaaggaattctttagcatcaatagtgagaagtcttagatattctttagtatgcattagaccagacacctactgttgagtgggagtaatgagttggtatcagattatc

SEQ ID NO: 337820 - DNA, 2151 bp, Cannabis indica
cataagggagcccatttcacctattcggccttcccctcccatgctcggaaaagggaaagttgttatgtctgaaataagatcgatgtcaagtgctgatgaactttcgaatcttatttgtgcagtcaccttgcatattgctttgtcttgtttttgagcttcttgactttcatgccttatgtttctgatgtctattttctaaccatgttcttttttgttctgtgcagacatgtctcggcagatgctcgacgctctgaggaagagaataggcggaagctcaagcgccactccttcggccaagaagtctaagggcggtgaggggtcctctactaaggaaaagagaccttccggggaggtcattgatctttccaaggagcttattgctgcaaactcttttacccccaaagttgccaagtccaaggagtcttgaccaccaaaggttgggtctgaactagtcaggagtgatcctaaacgggtacgggcacctactccacctttgccggtgcttctagaggccaagaagggcaaggagatgctggcccattacatcaaccgactggttcctgaggtcagcgagcaactggctggtgctgacaatgactcttcttttgattttctggtgggcggagtcttgaaagagttcaccaaggtaagtcttttttgatacttccccttaatcttccatacttagctcaatatgctaaagtttttcgtttgtgtaggccagtctgaagttggcttacatttacgctcgggctaagtctgctgcttccaagaacgccgctctgtccgacaccctaaagatagaggcagacttggccaggaaggatgctaaagaagccagggtgaaagtcggagctattcggttggaattgggtgaagccaacaagaagttgtttgccgctcagaagaaaatcactgtgctgacaaaggatctcgaggctactgaccgttttgacgagaccatggagaccttatctgctgaggtgaacagtcttcaggacgagaggacttctcttcgagcagttcttcatcggatgaaggaggaaaaggaagccaaggagggggagctttcggccgaggtggacaggttgaatgagaaggtcaatgccttggagacagccgatctcgagctcttctttgatttttggaaggctaatccttgggccaatttcgactacttgggcgatgctaaggacatgtaccttgagtatcacgtgtctcaagtggcttatggcgaaactgaggcggtagcttcaacctccagtcaggccgctgatgcacctcctcttcaaacaacagatcctcctgctccggttggcaaacgaccacgaactttgcatctgtgttaactcgttgggcggagcacttggtatctttgaaaattggcattttttgcacttcttaacataggctcttgaatcttcaatcatcgttggccagaagtaaccttgccttagaactttcttggataagctctgtctggcggcatgatttccacagaattcgtcgttaacttcaaataggagtcgtccagcttcatcttgagtgacatatctgagcaatggcatcaagaatcctcttctgtacatgactccctgtactatgatataccgtgtagctttcctgctcattttctgggcttcgttttagttttctgggagttccccagagttgaggtaggctgctattagcgtcatccagtttaaggatgtatcaatcatttcaatttcttccgggccagtgatgctaggctcttcgaggaactggataggaaccaagtttgccttgtcacttacattgctgcttgccaatcgagctaacgcgtctgcagttgtattttcttctcttggaatttgtctgagaccgtagcttttgaattgtgcgagcagatcgtgtatttttctcagatatgctatcatcttttctcctcgagcttcatattctccggatacatgatttaccaccagctgtgaatcactacagatttcgatgtgttcggccttcatctctcgggctagctttagcccagcgattagagcttcgtactcggctttgttgttagatgctttgaatccgaacttgactggagcgtgcaggtgttgcccccaggcgtgacaagggcaatccctgcaccagatagttgatttgtag

SEQ ID NO: 337821 - DNA, 888 bp, Cannabis indica
aatgacatcactagaaattcataatgcccataccgtgttcaaaatgccatctttgctatatcttcctctcggactttcaattggtggaacccatatctcaagtcgatatttgaaaagatgatcgccccttgtaactgatcaaacaaatcatcgatgcgaggcaaaggatatttgttctttatagtcattttgttaagatctcgatagtctatacacattcgcatactaccgttcttcttgacgaacaacactggcgcaccccaaggtgagtaacttggtctaatgaaccccttgtctaaaagatcttgtagttgagccttcaattccttcaattcattgggagccatacggtatggagccctcgagattggtgctgtgcatggtgtcacgggccgcctatttggacacccccaagtaggtggaacgtgcggcacttgctggcacaccgagctagcaagtcagcctaaacgcgcctgcaggcaaacaagttcaaaggttaggcacgatacatgtctcgcacatgttgagtgcaaacaagaagcatgagcaagcaaacacaaagcgtccccaaggaccaatctcacacaacccacaagcaaacatatagacaaatggcacgcaatggcccaacaaaggcaacaaacaggcatcacaaagaccatatagaagcatacacaagaagcatggataaacatcgttttattaatatatggccttgatagggcaagggagtacacagctgggcccctatcatgctggtgacaaggtgcttcataagtcacctggtcacccccccccccccttaaagagcttattggggttttaagggatttccaggaacatagatgattttagctctgtagacatatgtgaaggaaatacaaagaa

SEQ ID NO: 337822 - DNA, 1145 bp, Cannabis indica
ataattcaagggacaaggatagaaaattttaagtggattcaaagttagtctcataaagtgagtgaaaatgattgaacgggctaagctcaaataggaaaactagggataggaaagataaaggtaagcttcaaaggcccaaacgatccgaaaaaaattgcctcatcattttctaaacaagcattgtcaaggatttctcttcaaaaaaataattcatgcaagttctatactattcaatcaatcttaccacaaaccaaagtaaaataattatgatacaatctaactattgataatttacttcaatacaaaatttttgcaagcatccaaattaattcaaagagtaaaaaaaaaattcagcacatggtttaaaatttcaatctattccacaaagaacaacaacagaaaaattgacataagcttaattaacaactaaaacaaataaaactaaataatgaaaaataaaattaagcccttcccccaaacataaaattaaacattgtccccaatgtgaagcaaaaagagaactcaccttaggtccaggccacatcaacaagtggttgacgcccataataagcctcatgcaagacaacttgaaagttgtttttgaaaattccctcaagcttggcatgcaatgagtttgaactaaaagtcgcaccaacaacaaaagtctttcgatgatgagcttggggagaaaccgttgttagctcgtagagaatacattatggagaatgtggtattagtggaaaattagattccattgcttgatcataatatagtgatattgacgacctcaactcaacaactacatgtgattcttcacccaataatgacacctctttctcgctttcctcaaataacctctcaattggttgttcagttttctcatgaccgtccaaatctttgactgtgacttgatcttcagtaagttcataattgaggatggatgattcttcatttacaaaattgagatcatcattttttgagcaagcgtccattgtacccaaatttttagccacttcaaaggattctttctcttcaattataagctcaatctcttctatatattcatcaaatggtgcttctactatattcaaacaattctcataactttcgttatttgagttattatccttaaaactctctgaatc

SEQ ID NO: 337823 - DNA, 680 bp, Cannabis indica
acctaaacctagtagttgcctataaataggctcagtcaaaataacaactttatcataactttgaataaccttttctgtcagaaaattctctcttgagaaaactgattcttcccttttctctctatagaagaaatctctctttctctttttttcttcataaatttcgaaccttagtgatagagtaactgcccacacacagcaagtggtaactcaatcatagattggaagactgtgaaggatcacgtttcgacaaaaggaaagaagtacttaggttaggtgacaaccatttatagtacaatttctatttctgcaattttttttttatttcgtgttaagctaaaaaatcagattagatcaaatagctcttatgtaagttactactgtaacaaacacatttttcgatcaacaaatgaataaagatagttatttcaaaattcaaatcgagtcgaaattatcagcatgtctctaatttaccatccagtgcgtacaaaaggtttggtcaaacccaaagcactgaacagataaaaattatatttgtaagaaataagtgaccaagagtcataagtatactcggtcacttggggggcactgttactgttgggtttgatgccctaaataaaactcatttcaatataatcagatttagttattaatatagatcagaaataacatttaatgtt

SEQ ID NO: 337824 - DNA, 592 bp, Cannabis indica
ggagacattaattctgctgcatcaatgtaaggttttcttaacttaatgtgattatttattgttttagaaagttcaaaattaagggtgttaaacaacatacttgtgagtagatctaagatcctggtaaaataacatataattccactgcacccactgtaaggtttcttaaactttatatgtgttgatttacagtgttttagaaattcatatttaggatgtcaaataacatacatggtagtaaatctagatcttggtaaaacatattcaaacatttataatatataatttgaattaaaaaaataatattatttttttataaataaaaaagcacacacatagtgatactttttgagagtagatgttacttttatagtctgacaaggtttgactttaaaatcttacagtgacgcgcggggagtgaaactaaatgggtttagtgacccacctaattggtcactaaatactatttttccagtcacggacattagtgacgcagtagacagatttagggaaaaaaatgtttttttctgtattattttatttctgatataaagtagtatatataacatgtacaataatcctataaagagaa

SEQ ID NO: 337825 - DNA, 562 bp, Cannabis indica
gatttcattttataaatcttgcacaatatccaagtacattactacaaaaaataaattaaaagtaagttagactttattaatacgtacatatgcatgcattcaatatttaaagtgaatagtaatgatcattaagggtatttgttagtacctccgtgtcattggattcaagcaaatgatactcggccatcttccatagagttagttttttatttggctccttaaattctaaagtccttttaaaaaatatattattatattgaattcttacgagtgagttcttgaggatgaaagtcataaatattgacatccaaaatgtgattgggttgaagtagatgagtgttgaagtttttgttgtatacataaaatccaactattttttcatcattagaaagaaatctaatcccatgtattaaattattaagggaaatttgaaaaaatatgtataaaataccttaatattttatgcctaaactaatactttccaacattgaaaacatatgaccacttttccaaaaccccaaaaatacccctcttaaaaacccaaaccctttctctctccttc

SEQ ID NO: 337826 - DNA, 1592 bp, Cannabis indica
cccagctaagcccagaaagcttccaacttcagtagcagattttggtgttggccaatcccaaacagcctcaatcttttcggatccaccatgatccatctttatctactatgtaccccaagaaagagacacgagataactagaattcacactttttgaatttagcatacagcttgtggtctcgtaaccgttccaaaatagctctaagatgcaagtcatgctcttcttttgactcagagtacacaaaaatatcatcgataaacacaatcacacatttatccaagtaatccttgaacacccgattcataagatccatgaatgccgccggggcattggtaagtccaaaagacatcacaaggaattcataatgtccatactgagtacggaacatagtttttgggatatcttcctcttgaattctcagctgatgatatcttgagtgaagatcgatcttgtagaagattgtcttccccttcagttgatcaaacagatcatccattcgaggtaaaggatacttgttcttgatggtaagtttgttcaactctcggtaatcaatacacatttgcagagacccatccttctttttcacaaatgataccggagcaccccaaggtgagtagatcccagattcaataattcttgtaattgtatcttcaattctttcaatttcgttggagccattcgatacagtgcttttgctactgtatctgctgccgaaaccaactcaataacaaactcaatctcccgggtaggaggcaatcctggtaaatcttcccgaaagacatcaaggaactcgcataccaatcttgtattcccaggccctgatgtcacaggttgactggtatccactatagtgactatgaatcccaaacaacctctgctcatcaggtccttagctttcgacaatgttattcttggtaaacgtgccccctgaacctcacccacgaacactgcttggttagcactatcgggctcaaacaccaccatcttccatttgcagtcgatcgttgcgccatactcagacaaaaaatccattcccaggattctgtcaaaatcagacagttgcaatacaattagattgatggtcaattcacaaccgtcaatccagtaggacaaagaccgaatccacctagtggatactccgaaggtaatagagtaccaaaccccgaaacatatatatcacatggcttatgaaaactttcaataactctactcgtcacataggagtgagtagctcccgaatcaaataacacagtataagaacaaccactaatagaaaacggacctgtcactagtgacggactagcatcagcatcagcctgagtcatggctaaaagtcgctccgggttctgtgtagtattcttcttaggctcctctttcttggcctgaggacaatctctaataaagtggcccaccatggcacactggaaacatgtcttggcccgacactcacctggatggtgtttcttgcatttaggacattcaggataagatcggagtgaggacccgcggccctgacggccacatctattgtaacaccctaactagcataggcgtgttacgtgatttttcaacatactgtgcagctcgttgct

SEQ ID NO: 337827 - DNA, 639 bp, Cannabis indica
ctgtgatcaaccctagaactacaactataaaaggaacagaagagaagagatgagatataccagaagcaaaaaccctaggttaccagatctgagaagattttcagctccagatgttgtttcaagttcatgcacaagaaacagaagaaagttagtgtgagaaatcagaaaataagagagaaataaacacagaaaacaaaagagagaaaaatttagaaataccagtcgatctgtgacttggatttctcacctgttgtaatattcattcttcatagtgcaagatctgaggtcgatcttcaaggcgagctcatcagaggacgtacccctaattttagggcgaacctctatatttctggtgtttgatttcttactctaaactactgtgttttggctaatctttgtgaatatgtgtgtgtgttgtgtctggggtgattttctgggttagatcgatcaagagatcgagggagatctctggttctagggtttgagaaccagagagaaggcagagagagagagagagagtttgaaactctcgaaggttcgaggagagaaatgagctagggttagctctgaactctcgagttttattcaaagaagaacgacagatcgttttgagatcaaacgatctgtcgtgttggtgag

SEQ ID NO: 337828 - DNA, 870 bp, Cannabis indica
catctctgaatggttctacaacggcttcgagaacataagttatatgccaaattcaagaagtgcgagttttggctatctcaggtgtcctttcttggacacattgtcagcaaagatggaattaaagtgtatctgggaaagatagaatctgtcagggattggccgagaccaaaaacagttacagaagttaaaagcttcttgggtctggctggttatcaccgtcaattcgtagaagggttctctaaaatttcaacaccctaaactgagcttactaaaaaaaatcagcgatttgtatggacgaataagtgtgaagcaagctttcaggagcttaaacagagattaatcacagctcaagtgttagccctaccttccgataaggaaaagttcatagtttttgtgacgcatccagacagggtctggggtgtgtactgatgtaggccgatcaggttattgcctatgcctctcgtcagttgaaagaatatgaacattggtactcgactcatgatctagaacttgccgcagtagtgtttgctttgaagatttggcagcattatctctacggagagagatgtgaaatttatactgaccataagagcctcaaatacttcttcactaaaaaagacttgaatatgagatagaggtgatgattcctaaatcttgagtaatcataaactcattttcatgttattattttttttttgattcaccagttaaagtttctcgtagaagatgattcttagaacttctgttttaggaatctaataatgtggacggctaagaacataatttacaattatggaattctgactttctaaacggattgaatgcttgttcctttaagtgttaattctagaactggaatgttgtgcacaa

SEQ ID NO: 337829 - DNA, 649 bp, Cannabis indica
ctcttcgtcctctattcttcccaggggttaagtactccttctcctcacgaagttgcctaattcttcgatttgaagtccacccccaaacaaggcaggtcggggtacttctatttctctcaactgggcttcaagtggttgactggcacggatgacaaggccatcagcaaaatagggcattttgccgatgagtacatcatggtgaaggatgcgagcattacccggactcggttccagcaaatttcgacatatcaccgtcctccccttactcttgatcttagggatagagctcaaaaacttgctcggttgtcgggggaagatcggaatattatccagttgacctccgattataaccttgtgaggtgcgggctctatctcgaggactttactcctaagtccgtggcggggaagaagaggaaatctgatgctggccgggccaaatgagctcataaggaggatgaactcattcaacttaagcgcgaggcaagttgaagggacgtgcaagggccaagcaatatgctcagagactatgaatcctgaagatgaagttgaggaagagcaggtgactccactgaagaggaagaagaaactcctggcctcgcccaggcctgttgaacatgcaattcgcataagggagcccatttcacctgct

SEQ ID NO: 337830 - DNA, 689 bp, Cannabis indica
ttattgtgctaatttattgtttgaattttgttttgatattataaattattctgaaatttttttaaagtttgtgggattttttttaataaaattagaaaaaaaaaaaaaaaggtgatgcctctattataaaactttcttacatagatattatagataataaaaattttaatggtttattgaacatttctatttgggtttggaacttattgtttactttcatgtgttgttggagaagactaaaaacacaattgtttttgttacttgttttttattttgttgcatgtatatttgaaatgaattaagaagatattttgtttcaatatttatttaatttttgatgatgtactaaaaaaatttgtattttaataaattttttaatagtaaaaatagtaatcgatttaatctgtactatacaaatacaaatagatcaaaaatataaatagaaattttcaaaatactattttttatgttttatatataattttaccacttgaaattttatttataaaaatacgcctataaaattttaaaattacaaaaatatacttttatactaaaaaaaaagaaaaataaattaaaaaaaaaaggtaaataccattttggaccctgtgttttgcaaaagttacagattggatcatgtgtttcattaaatgacaaaatggaccctgtattttctaaaatagtaaaaa

SEQ ID NO: 337831 - DNA, 1213 bp, Cannabis indica
ttgggtcagggcaatacgtacattttcgaaacatggtagtatgattgggtgggagcgctaaacataaatatggaatctataggttctataggtatttagaagttaaatgatgattgccttcgagctgggctaaatagatgtcaatggaagagctctggtttcaatgattatatttcagttcactaaaacattatttacaggtagctaagtgttttaaggatcaaaatacattgaggggagaaacggtaaatttatccctactcggtgtaaatcatctatatagaggatctttgactattgagattataacgattgttaaatgtgatagcgtatctatatggtggaacatatagagcgctctatatgactgagagtgcaattccaagttctaagagtggatgcaacaaggaattaataagttagggaatttactcggtaaattctggttcagcttattggaagctcagtaatataggcccatggtccccattctagttgagaccatactgcttgtaagactcagataattgattttaattaatcaattataattctaaaattagactatgtctagtttatgaattttcactaagcaagggctaaattgtgaagaaaagagattctaggttttatttattaattggaagactttattatgtctaattaataattatattaaatgacaatattatttaataatttattttagttattaaataattagttttgacatttaaatggttagaattggaaaattggcgtttttgagaaaataaaaatgaaaattataaaaattgcaaaatatcaagtggggcccattacaactatggctgaccacttgatatgctttttccaattaatattttcattattgtaatgccaagtaattagtaacctaaacctaatggttacctagaaatagatagtgatggctcacacttaacaagagattaaaaatcagaaattttgcctttagaaaaattgagcctcctatcctatagaatatagccgaacctcttctccctcttttcttcttcaattttcaaacgttgagtgacagagtgagtgcccacacacatcaagtggtatctcaatcatagtttggaagattttgaagaatccaaactgaagagaaggacattcggactcagatcttagtgatactctgcgactgaaaggatacaaggattaaagatctgagtggaaggagaca

SEQ ID NO: 337832 - DNA, 778 bp, Cannabis indica
aagtttgcctacaacaaactcgatgcttgatctgaccatgtcctcagctaattgaggtaatatccgaaccatactagttactctttcgggacccttcctactaagggcatcagccactacattagctttctaggatggtaaaagatctcacaatcataatccttaacaaaatctaagcaacgtctctgcctcatattcaaatttttctaagtaaagaaatatttgaggcttttatggtcagtataaatttcacatttctcttcgtagagatagtgcgccatatcttcgaagcaaacactacagcggcaagttctaggtcattagttgggtacagctgttcataatctttcaactaatggaaggcataggcaataacccgatctgcctgcatcagtacacaccccaaaccctgtctggatgcatcacaataaactatgaatttttctttatcagaaggcagagctaacactagagctatgattaacctttatttcagctcctgaaaggttgattcacactcatccgtccatacaaaatgctgattctttttggtgagttcggttaagggtgttgatatttttgaaaacccttctacgaaccgacgatagtaaccatccagacctaagaagcttctaacttctgtcattatttttggtcttggccaatccctgacggattctatctttcccgcatacactttgatcccatctttgctaaaaatgttcccaagaaaagacacctgagatagcccaaattcgcacttcttgaatttggcata

SEQ ID NO: 337833 - DNA, 755 bp, Cannabis indica
cttgagttggagtcccatcctttcgtaagcagccttgaacaaaatgtttgaagaagctccattatcgatcatggttctggccaccattttatttccaatctggacttccacgaccagcgggtcgttgtgcggaaatctaattttgacagcatcttcatcgctgaaagttatggttggctctcctgctcgtggaactttaggctttctttcttccacggccaggatgacttcttcttgctcgtgatgtgctgtccgggcatacctctcctgagctttgcccgaatctccagcaatgtgagggcctccaataatgacttgtaagtgtccatctactggtggaggtagcaaatctttgttgttctgaccttagttggtcttgacatacctctccaagtacgaattgtttttctttatcagaaattcaatttctcgcttcagattgtaacattcgttagtgtcgtggccgtagtctccgtggaaccaacaaaacttcgtcatgtcccttttgttggtatctttcttcatgggcccaagcttcttgtacgggattaacgactgagttgccatacatacactctctatatcttcagtcagaatagtgaatgcagtgtatttggcatgattctctcgaggagtctgtccggatttatcggtgaactttcatttcttcccgtttcctctcttgtggttgttgcttgaacgcttgttacttgagcttgaattattggaatagttgggaagttgggcggatgttc

SEQ ID NO: 337834 - DNA, 946 bp, Cannabis indica
ttgaaatctgatatggtgtagtctaagagtgtgcagacttcgtatatcgatccattatcacccaaatagagtcataataccctattgttctaggcaatcccaccacaaaattcatggtgatatcttcccatttccactcgggaatctttaaaggctgaagcaaacctaccggcctctgatgttctgctttaacttgcttataggttaagcattttgacacatattcaacaacatccctcttcatacccggccaccagtataaagctttcacatcatgatacattttggttgtccccgggtgtaaggagtatggtgttgtatgagattcatcaagaatctcctgtctgaaaacttagcagcaaacttaacttcacaattaagatcactactcaatttgcttacagaaagtaaattgcaatcaagctttggaacgtaaaggatagaatttaaaacaagacttggtgagattgttatagttccaattccatcaattctacaagacgaaccatcagctatgcgaacagtcctttcatgagagcacgcacttagaaaagaaaataaggatctatcacctgtcatatgatcagaagcaccagaatgcacaatccaagggtcatgaagtatttgaataacctgaagtgcatgagtgttgcattgtcttgcgactaaacagatggctcttaaagaattttgttctgccatggagaaagacatcaagacaacacaagtatagaacccgagaggagacaaaaagagagagaggacgccagaaaaaacgtcgctggagttggagaagagtctgagatgaagaaacctaagagagacgatgcggaaaaccactgctggagactgccatgcgcgtacacgcaccggcgcgtggagagtgtcgcgacagaagaaggtggcgcgtggggcccatgcgcagctcagatgaacgccagacttt

SEQ ID NO: 337835 - DNA, 770 bp, Cannabis indica
ttttttttttttgtaaagggaataatatgatcatcttataattatatgacacatatctagtaagatgggaccccctaagtttccttttcttttaagggacctaagttgcctttcacacttggcctataagactttgatttgcttttattattttcttcttttaaatgtgtactcagtctactgactatagaatatgtgctgctacgagttgcttctttagacttatttactatatttagtatgaataatgaagcagagtagaatagatggtgagttattaaaaattagagaatataaaggagaatataaaacattgtttcactataattgaaaagagagttcaaccctttaggtgacgtttggttggaatgaatggaataaaaagaaaataataattatttattttattttattttattttaaaggattatttaacaaatacacaaaaattacaaaaaatactgtttcgcggaattttaaataatttttataatttttttgattttatttacagaaaatacgagctttttatgttactcttattaatatgttgttgggttttcgttatttacatgttattttttgttgttgttttgatgttatttagatgctatattttcatgttacttttatgtatagtttattagaatatttctatttaaggaaataaaataatattattgattctgataaatgaatattttatattcattgaatctggacagaatcaattacgtaatattttatatatggtcagatttctatattca

SEQ ID NO: 337836 - DNA, 632 bp, Cannabis indica
ttttcatacataaccaaggtggaagattatagttcgccaaaactacaggccacttactatacgcttggctcatgttgccagatagattaaagccatcagcagctaaacctaaatgaacatttcgaggttcactagcaaaatcaggatgtttggcatcaaagtccttccacactacaccatgcatagggtgtcgcatcaccccatcatcttttgatttaccagtgtggtgccataccatgtattttgccatatgccttgaattatgtagtctcttcaatcacggagttaacggaaagtaatgcatccccttatgaggtaccttttttgctcctgaattttttgaagttatccacctactactgccacaaactggacatgaatctttattttcatgttcagtgtaaaataaacaacaattatactttcacacatgaattgactcgtaccccaaccctaatttcttcaatcttttcttagcatcatagtagtttgacgaaattttattttactttgaaaaagctagttttaacaacttcaataattcatctaatatattgttaggaatctttcctctaactttcaaatgcaataactttgccaaaaatttaagagaagatatccaatcacaacaa

SEQ ID NO: 337837 - DNA, 533 bp, Cannabis indica
aacgggagatcaaacctaatcgttaaatttaacagaacattctttttatttttaagtatattctgttaaaccaagaaatgccgttagatagacacttttaatatataaagatatatcatgctacttttatcacaatatatttgattaattatacaagctacaatactcaaaacaattaattataacagaattatatattcaatagtgattaccacttaaaaaaagttaggaggtctttcaaaaaaaaaaaaacaaaaagttaggaggtatttggtaataattttatttttaattttttaattataaaaataaaagtgaaatttatattgttaaaaatacaaaataaaagtgtattttataatttttattttttaattttatttaagtcaagtctagatccgtgtctggggccggggccgtagtctgagttcaggactatggctggagcctgagtccgggtccacaggtctgaattagagtcagagtccaaaatattgattaagaaaaaaaaactatttaaaaaaattttgaaa

SEQ ID NO: 337838 - DNA, 577 bp, Cannabis indica
tttcaaatgcaataactttgaaattaagagaagatatccaatcacaacaaagatacaactcgacctcaatctcctcaaataactcgtcgtgccattgatttgcattaggattatcatctatttcaattgacggttgaagaaagtcatccaccatcggaatcatctcatcaactttatggtcatcatcaacatcatcatggtcattaactataatagtagcacttgattctgcttcaccgtggtaagtccacttctcgtaaccagtaaaaaacccaatcgaatgtgtgtgcttttacaataggtaaagtttgccgcctattgttcacgcatcttatacacgggcacctaattctaccatcacaatccttacattttgaggccatctctaaaaatacatttagaccattctaaaattgtggacatctacgatttcgcaatgtggtccaagacttgtcgattgccatctaaagttttataaaaacatataagattttattgtataaagacaaaagtgaatgacacaattttataatatcttaagttaaaatattttatgccatttaatgatatttttttt

SEQ ID NO: 337839 - DNA, 520 bp, Cannabis indica
ccattcttggagtagagaaataagacaatattaaatatgtatgtttataaattggtacttatttggtgatgtgaaggctgagtgtaaatgctttccattatatatagataattgatgattaagggaggtaactcttagtgctaatcgaccaagaattgacattgttttcaattttggttggtatgtagtctgatatcaaagatttatatttatatctcattcatactatactgcgttgaatttagcatttattctccaaagtcaatcccacctttatatgttttcaaattagttgagtcaacatttatttcttatgcacttttctagccaaaactaacacccacaatactaaatcagaaaatgttggaaaaataattcacaatagcactattctatctttagtaattatttatctacaatgaactttaaaaataattaccaatggaaaaaaaaaacttataaattttgaaaattattttatcccatcattatactataataacattttttttccataaaa

SEQ ID NO: 337840 - DNA, 872 bp, Cannabis indica
cataaatactatttttctaacttataatttataaacaatcaaatatttcacaaaataacgaatttatgaatttgaaaatattatggttagaatatctataaaaatatctagattaatttcaaaatttattaattatttaattcatcttataagataattttaatataatattttaaattaaaaggataatgatatcttttaatttaaaatatacataatattaaaatatctaaccttataattaaataatatataaatattaaagaaattattaaaatttcaaaatctgaccataatttaaaagtaaaataattaattttgaatttaaacttcaaaatatcaaaaaattaataatagtctattaaaaattaaatattgttaatttagaaaatttgatatttaggtttaaatgtcaaaaatgatatttaattaagatgtttaagatttgaaattggaaaaatttgaaaagtgagaaaaaaacccaaaaaattcgagttttggtgctgatgcccaatagaaggttgcatgcagcctcattcgagcgtgcaggaggctgcattgcaaccctcgtgtgcgtgcaacagggtacatgggcggggtaattgtgtttgaagaagggccttcagcgggttcagacatcacttgtcctaggcacgcacgcgcgcacgtcatcttgtccgagtggctggtgtgcgtgcgattaagcctctcgacaccattgaatccataaaaatcaaaccttcataactttctcaatttttatcggaatcgagtttcgtaaaaaatcaaaattgcttaatatctcacaaggaatccaaataaattatttcatgaaatttttttgtaaatcacatacattcatcaaatcacac

SEQ ID NO: 337841 - DNA, 829 bp, Cannabis indica
aaaaattaaaaaatattgctaaacacactatttttctaagaattggtgctatgcatctcctaaaaaaatgcatcttatttatatttttcacttatggaaaatataatttattcataaaataaaaaaaatacataatttatacagcatataatatatattataaatatttagaagattttataataagaaatatttttaaaaaataatattaaaaataaaactcaaaccataatttattttagggaatatattgatttttttttttttttgaataataatgaaatttcattaaatcaaatcttctaaaacaaaggaagcaattacagtaggtaactcaacaccactaaaaaccataatttattttagggaatatattgatttagtaccttgacttttatcgaaaaatatatttgatattttgtgtttttaataataattatttggtaccctaaaccctaagttatatgtaatcaaatagtttttagatatatgtaatcaaataattaaatttgaatccagaatttataaaattaaagacaatttaattgtattgataaaattttatcaaaaaattttaaatttagggtaccaattatatgtatggtaaaaacacagactaccaaataagcattattaaaaatacagaataccaaacttatatttggataaaacataagataccaaatatgtatacaccttttattttagggaaactacctcatttattatttttcaattttttttttttcaaatttacggttttttggttgtgatttaagttgcaataggagtttctatgtagaattccataaaaattaaaaaaaaaatt

SEQ ID NO: 337842 - DNA, 938 bp, Cannabis indica
agttcgtacatccttgactcgcttaagactatacggtcagcaagttatagatatgccctattaattctacatttaatgagttattccattttaatatcctttaatataattgtcattatattcattgattcgtattctccaaggttgacacgtgttctcctctgaagtgctagccaaattttgggcataattattgctccttaaaaagtccttttcagtgaaaaggtgctttctaaatgattacggagggtattttttccatgattcattttaaaaaaacgcatgtcctctgattttggcagttttgtggcttcgaggcacatcagcatttaataaccatcttttgcactttttttaaaattttacccattggatcaattatctccttaatctgacggaaatcaagtcaatggtataaaacgaaaaaaggaaccaccttttcaatatctttgccattttaaaaattctagaaatttttcgagcttttctgcaaaaacccacacctagactttttgaagctttgcatgccatctctgactttaacattcttcttgcgagttttgtccgatttgatttttgacctcaagcattcagagagatcaccacactgttcgttgtaccgtcgattgcagaaccattcatcacgctaaaaatcgacttcaaacagtaagtgatcctctttctttgttttcttacatgttgtttatttcttatttatggctttgatcattgctttcttagtttgcacctttatctccttatctgtttttagcgatttagggttgaatttcttatgggtaaattttagggtttaggcagaccgtagacttttgggtttctcaaatttactagcttttggtttgattatctcacacgccccttgttgtgccttggtgcgctaagagtgggtgcacattgcccttgttgtgccttggtgc

SEQ ID NO: 337843 - DNA, 507 bp, Cannabis indica
ctccgggcaggcagaataaaaaataaacaagcctgaaatcaggcggtaagcttggggaataagtgggtatggcgcaaggtcaacaaatacaagaaaattaataaagtaatcttgaaggggaagcatggccccgcccatcaaatgcgtctggctccgggctctgaagcccccgtagttgtggttgggcgtctcctcgtcccggggtggccggtggaaggtcccagaagttgtaggcttgatgcctgccaccacgacaatgtgttccagctggtgagggcagatcaaagtggagcgacgctcagccgcttcccatccgttggcacaggacttgtgcccttcttgggccaccagactcttcatgacttcttccagtgtggccaggcgcttcgctcccttctttgaggatttagaaccggacgcagacattttggttctgaaaaagattgaaaaaatccagcagttaggccccaaaccaaaccctaattcaaaagagggaatgggggtccc

SEQ ID NO: 337844 - DNA, 707 bp, Cannabis indica
agggcaaataggtcttttccttgattgtttttttggcctctagtggaatttgggggctggttatatcttttattaagataaatatgatttaattaaattaggaaataagagcataattaaaagttgaaggaaaaacctagaattttctaagtctctctccttctctttcgaacaccaagggaaccagctgggaattcttgtggttagctcaaatttgtgtgatcttggctgattagaacactccaattcaaggtatataactctaggcctcttttccatgatttttcctaagcttaatgtaagttttatgcatgaacttgggtgtttagggtgttgtaggtttgggatgatttgttttcgtgttttgggattaggttgggagtatgttgttttatttgagctctaatggtaggctttgttgaggtttggctaaggtttgagtttatgaactcaaatcttgacctttaatggtgaattgatgttcagtgtttgttgatgagttttattgcttggttttagttcattatggtatgtacaggtattctggaagttattggaaagtttgggattgaattgaggtgtgggggtcagtttttcgggttcctagctcagaaccggaattctagttcctgggggcctgttgtaaccggtcgactagttggtgccgggaactggacttctggttgggaactggtctgtcggttggg

SEQ ID NO: 337845 - DNA, 747 bp, Cannabis indica
agggttccaaaaactcccccaactggcagaccggttcccaaccggaagtccgcttctgggtcaccaaccggtcgaccggttgctacaggtcccccagaaccggaaaaaagccccccatgacctcaaaagcaagccaaactctaccaaactttccagtatatctgtacaatgcatatacaacattttccaaccagtaattcacagaaaaaaccacaaaatcaaattatgccattaaagacctaaacttgagtttcaaaactcaagcttactcaattcctacatcatagctcaaaactgatatccagggcttaaaatcaactcaaaacaaccttagaaatcagactacacaatctttaaaccttaacagctcctataacacaaaatcacctcttgaaaccaattaaaacttgagaaaaactataactagtgagcaactagggtttaccttggttagttcctcctccaatccttgctgaaaacacaaaatccagcaaagaattccctatgcttggctggtacgaagagagagaagagaaacagagggttttttcttgatttatttcataaattccttattttccaaaacgagaaaatgcatttctcatccttagctttggctgaaacttagtggccatgggtcacacatctaggcagccacccaatcccctaattaaaattactaatttgccgtttaggttataacttaggtgtttctaaagctaggggtaaaatggtcaaaatccataa

SEQ ID NO: 337846 - DNA, 1062 bp, Cannabis indica
atttttatatttaagttcctattgtaatatttttaacatttaaaccatttaactataatatttacaataaaatttattttattttttacaaaatttagacttccaccctttctaaaataaatttttgaatacttaattaatttttaaaaattacatctaattattattttgcaacaaccgcttgacccatcttcctcctttataaaaaaaattttaaaaattaaattttcagtttgtcccaacctaacattatatgaattttctacttcgatacaatctcctacatctatgccacaaatccatttctctattcaacaagctacagttagatttctccttgatttttaataatttgctagctatttcttactgatatgcttatttgtgaaagcaacaattttaattaattggtaatctactttgataatttttctaacaatctttagattgatgaagatgattttaacgaggagagaaaatggttaacaatcattaattttatagttgttattacatttctttacttaatttttcattttttaagagaaaaaactaaataacttgaatcaatcttggattgacacactaatttggcacttagaagtgttaaaaaaataagattcatgagcgtaaaattacctctaattagatgttatttatactatttttttattaattaaggttatgtttgtaataactttaaattataaggagttttgttgtatttatttcaattatttaagttagaaaaaataattgctaaaagatatttacttattaacaaattgcataaaattaattaataattatcagtaatgtaattttaaataaaattaattttaattaagtttttataaaggaataaagtatcaagttataagttttttttttttaatttctaaattaatcacaaccattcaacaatgatctcatggttaaaattacatgtaacaatgatggtaaaatatttgatgtaagcattgaaacctcctcctttattatatatgtatatatatatgtaattttttcaaaattaatgtgtataatttagtaactagtaac

SEQ ID NO: 337847 - DNA, 815 bp, Cannabis indica
atcaagaacacaaaatcaagattctttccgcgccaaatctttaagaaacagttatcagtgacaatggcaaaattcgatggaacaagagacttcgcattgtggagagaaagtttgaaagggatcctaatgcatcaaaaggtctacaaaattcttagagatgagaagttattggctaaaaagaaactagaagagaaatagaaatgagagtgatggcggattacacgatcattatgtatctgtcaaacaatgttcgaagaaaactcatcgtagaaaagacagcgaaaggagtctcgaacaagttgaaagaattatacttaatattatcaattgttagcaaaataatttgctagaaatgttatactgttttaaaaagatttcttctatttctttaaataataatattgacagatttaataaaattattgtaagactggctaatgtaaatcacaagattgattaatttatataaactattacaaactaccatcatcatcatcatcagtttctcttcatctgataaaataaacaaacatatattccccattggggtacaccatataatatcacccttccattattttatcaatttgatattgtatacagtatagttttattgttttgaaaccaaaagtatatttttcatccaacaatttgtttaaaataaaactcttcctcaaactttgatcttttgtagctactctacaagaactcgatctcctatctatttgattttccatctctctcgtgttagtatccacaattttgtattttaattaatttgaagtatattatttatgttgagaaatactaataaa

SEQ ID NO: 337848 - DNA, 1163 bp, Cannabis indica
aaaaatatatatatttaaaacggatcggatcaaatccgatccgtaaaaatatgaagcggggcaggtcggatctaatccaagatccaataactatccgaacgttcggatcagtatttatccgtcagatcggatcactgacccgatccaaatgaatggatctttttgccatgcctaatttgtggtcaccacgcagcaagacaaagtctatccaagaaaatactaaggcaaggatatttctggctgataatgatggaagattcaaaggcctacgtgaagaaatgtgacaaatcctagagatttttcaagatcccccacacaccgcccaacaagctaatacagatgcaaagtccatggtcttttgccatatgggcaatcgatctgatcagacaattgcccaaaggtaagggtggagtacaatatgcagtggttgcaatggattattttacaaagtgggcagaggccgagcctttagcaacgatcacatctaaaaaagtattagactctgtggtgaaaaacatattatgcgattggacttttgcacaagattgtttcagaaaatggcaaacagtttgatagctagatgtttacagatttctgtgtgacacatgtaatcataagaagtttctctgcaatagcacaccctcaatcaaatggtcaggtcgaggtagtcaacaagacactcaaagacaccatgaaaaacgacctaaatatgctaaagggaattatccggaggaactaccataagtattgtgttcatcttaaacaataaagaaaatagcaaccggacagacaccatttgttatggcctatggttatgaagttatgctgcccatggaattagagcctttgtcccataggagattaacctacgatcaaggagctaatcatgcccttctggtagaatcacttgaagagattaacctattcagcgtgggacttgacttcaggtcaaagagccaattagtgtcatgcagggacagctcaccccatccttgtgtggcgtagaggatgaacacgacggacaaatactagaggcacttgtgggtgaattgggtcaaacttatatgataataccctgcagtccttttgaagtagggaagtaagggtaacattaaaccatgctaggtatgaacgcccgaccaagtgcagtaaccttcccttgg

SEQ ID NO: 337849 - DNA, 872 bp, Cannabis indica
aataaatgcgtaattatattaagtaccaaataagttagacctcaagatcattacaaattaagttaattggtataaaagacggatctaccataccagtcacattaccactaaaagtccatttagctacattatgggcaacaaacttataaaatctgaaaataaataaaaagttacaagtaatcaaaaggtttgagagcattttacattgaagcacataattattaatactccaaacataagaggttcctttcaaagtattgatcgtcgtttcagagtcgctctcaatgatcacaaaagaatgcttcccacgtgtcgctgattccagggctaacagacatgatgcatcttctccaatgagatgattaaagaagttgagaatattgctagccacccacaaaatcaactcctcatgatccctcaccaaggccaccacacacattgagtcgctactaactttaatatcacagttgattttgacccaatcgtccgacggggggaccaagcaggaggcgtgaaaatcaccaacgaaggaaacaaacaagggccaaaatatgcataacatgtaaaaatatagtcaatacaatgcttaatgttacaaatataattattagaatgaaccttatcgttctgggttttccaaattgtgtccactataattgaaacatacaaaacatttctttgaccttcactcctttatccttcaggctccaaaggaatttgacctaatcccacattcgagccccaaacttaggcattggcatcacgccccagggggaagaccttcagaggtgaaaagcaaatttacaatacaggaagagatgttccatagtttcctctttctcaccacaaaaggggcaagacacatcctcaat

SEQ ID NO: 337850 - DNA, 638 bp, Cannabis indica
aaggatactagagttaggttagtttttttttttcttctttttcaagtggaattggttagtttaatgtttgtgtaaggggaatgtgaattaattatacgatatttcttatttatttgtttactaaatattgtaatatattataatgaaagaaactagtgggcccacttaaattaaggagaaaacaaaagaaaaaattttcttcctatttttacaaagaataatttttcttttccttacttatttatttttatttttattttacaattaaaaattaaaaagacacttttcaaaaagctataaataaaaatacttatactttttaacaataaaaatttattcaaattttaccatttcgattacttttctaaattatgtaaacaaaataaaattattctaactttttctgaatagtttagtaagtatgcaagaaataataaataagacacgattttatgtagttcactaattaaaatcaacttagtccacaaatcagtgttatttctaagtattttatgagtacaaattttgatagagtttctaggtgttaaatttgttgtacttttttcattgagtgaactactatttatagaagtaggtgttgggttttgtgccctaaataaaactcattacaatctgat

SEQ ID NO: 337851 - DNA, 506 bp, Cannabis indica
tggggtgaaaaaccagaaatcaccatggctgccaggaaaaaaggcaggccgtttttctgggtgtctgaaaaacggccgaccgtttttcccagaaagggggattttgggtttttctcctcaagtccgatctgattcggggtgtctttcggagtggaattcagggtgttttagagatggttaagctagtttgatccgggggaaagtagggtgtgttcgattgtgagaattagagttgattatcagaaatttgattaaggtttttattgagttttggttgtcgtgacataggaccggaatcgcctagcttgttttccactcaagtcggcccgtacgcttgaattcagaactaaggtaagaaaagtggtaagcaccgtatgtggttaaatattaatggctgaaaggttatggccttgattattatcaagactttgattaaatatttgttgagcctaggttatgacctagggttggaaacggttaataccgttacgagtaattactcttga

SEQ ID NO: 337852 - DNA, 625 bp, Cannabis indica
catatgaagtgaaacttgctttccgaacgataagcatgtgctttagttgtatgtcaactagatcgaagatagtttctctattgacatcttcaatttgaataaaattatttgcattgatttattttatatcttttatcttattttaattattcgtttacgatgcaaattaaaatgattcattgaagtcaagtatttgcttgctattatctcagtggcactcatcattttcatcattctcttctcatccataatttaatataatataatttaaatgtagtaaaaagtaatagtcaaaaattaggaaaaaaatcttccacaagacaaagagtagatgttcttacataaaaaaatatagtaaacaattatgctttagaatacaagttaactaaaaaattaaattatattattatggtttactaaaaacaattagcattttgatatataaacaaattgattaaattattattaaacataaaacacgtagtaaataattatgcaataacattttatcaaataatttatatgaaaaatataatacaattctctcatataaaactataaccttataagaaaattaaatcaaagtaaatttttttctttagttgcactttaaatttctaatcaa

SEQ ID NO: 337853 - DNA, 768 bp, Cannabis indica
tcaaggatgcacaagaagcgaaccgctaggcgcgcaccgggttagctgggagacgtactcgccgatcatctccgcggcaaaaggagccaaggtaggcccgaggaaacgattgaaccagtctgtcagggggttcaggtttagatcccacgggttatggtagttctgatcgttaagggaattttgcatctcctctcgcaaaaccctcctcaaggcctccacctcagcatgcccccgggagtactcatcaagggcataattgtacttggctatccgaagctcccgcctcgcctcatctccgggaaccgtagtcaacacaatattaggaggcactgtaaattcctccacctcgggagggatcccggaatcatggctcggggccggagtgtccaccctccgcggccgtttaggtgtgtcctcagctaccatcttgcctttgtgtgtgcgcaccagagaaacctcttgctcttcttcaccttcttcaacttcctcaggaagagcccattgctcttcttgaccttctctagcttcctcaggaagtacctcctcctcatccactaagtcaatagtgtttggaggggcactggaagaagctttcccggaggtgaccatctgggaagaagttggaggaagggaagcatcaggactgtgggctccagcaaggatggccaagatcgcctccgatgggattagctgctagaacgagagaaaagagttaagtgttagaatctgtgaaagcagtaacactaaaaagcaatcaagctagtccta

SEQ ID NO: 337854 - DNA, 803 bp, Cannabis indica
ttgtgatgagacaatatgtatttatagagttagggaatgaacttagttacataatcctagttggactgggtctgctcatcaaaagcttcagttaactagaaaagctcacacttctgctttaactagactttacacacacagttgttaagcccattaactattgatcattgacaatatgagctaacacatcaaaaagctatccaattaacctaagttttaataaaaccaataaagttaatgtaagcccaaatatacgtctaacattctcccacttgagctacattaattctaatacatatatcttatatatcaaaataattttatttgaaaacgaatcatgggttggacaacacaaaaatatttgtggctactttaaaaatgatagttctttgatagcatctaaacataccagtccaatttaacttttaatattgaactatgacaatcatattactttcaaatcaacaaaagatatttataatcacaaatactaaagtgttaaattgacacagtcaataaatctagtaatgtggtaagaaattatattcaacacgtgattaataaaataacaagtgattaataaaataacataatttctttatcaattctcaatttcactgataccatgatatttaataaataagccaatgaaattaatcctacactgctaattaataaataagtcaatgtcactaaacatgcttaaaaaattaagccaacaaaatatcattgtcattaagtaaataaacttaaaagacaataatcacaacaagatataatctacatgctttcaattcaatcat

SEQ ID NO: 337855 - DNA, 543 bp, Cannabis indica
tggggcccttcaagaacaatctctagaggtggtgccaggtactttcttactttcattgatgatttctcaagatttgtttgggttcatattttgaaaaccaaagatctagccctgaaacagtttgttgaatggaaaaccatggttgaaaaccaaactggtaagaaaattaagaagctaaggactgataatggtttagaatattgctcagattctttcactgattattgcaaaagtgttgggattaataggcacaaaacagttcctagaacacctcaacaaaatggcctagctgaaagaatgaataggaccattttggagagagttaggtgtctattaatccactctggtttgccaaagaatttctgggctgaagctgtctcaacagcttgttatctgataaaccattgtccctcctctgctataggttttaaaacacctattgaggcatggacagggagagatgcacactatgaacacttaagggtatttggttgtgtggcatttgctcatataaggcaagataagcttgaaccaagggctaga

SEQ ID NO: 337856 - DNA, 521 bp, Cannabis indica
ttaatcaatttacagctcacacacttgatgacactctctaagcactgagtgaagctttgtgagtttggttttcgagattaacaactttggttgtttcttaagtgagttaaacacttgcacccacgaatcctcagataagttgagagtggtcacacgtgtaataccaatcaagagttatgatcaagaaggccaaagaggatttggtatagcaagtgaccaatgaaggcacttctctgatcacttggggggcacatatgttatgttatgttatatgagagccatatgttacaatagcattcaaattttgttttgcacatttgtgtaagtactttcatggtaataataactttaagaagcagtggcattactcctagtaatcaagtttcttaagacatggtgtactgtgcaagtgttaaatggtcaagtggtaatagataaagtaaaatatatataaaaatattagaatcgaagttttattaagttggaaattgttaggttatttttagcctaagtttcgggtc

SEQ ID NO: 337857 - DNA, 869 bp, Cannabis indica
tggagttttaaactcaaactttggtttttatgagtgttatgttgttcagcttgctgtagctactgtgattggttgttattgtgttctgaagtttagatatgagtttttatgttgttaaatgcatgaattaggggctgttagaagggttagtcaatttttgagtttttgaactcaatcttgaacctttaatggtgaaattcatttctgtgtatgaagcgttgttttatcacttggaatatgttcattggggtctaattagcaggtctggagagtttggtttgaattggggttgaattgcatgagttatcaaaatttgaacctttcctgcactgaatcggaattccggttcagggaggcctgtcggaaccggtctaccggttggcttccaggaatttttcccagaaccggaattccggttgagaaaccggtctaccggttggggcaaatttgggaatgctagtttttcccatttttgtgttatttagggtattgccatgttatttatcgatagggaaacttctagtttcaagtttaagtccccgggaagtgatttagcgtgtcacttatcagtgttgtgattattatgatttaggatcctataattcgccgagcatattgttccattcaggttgactggcacaccttaatttggaattgaggtaagattagtataacagtatgcatttgtatttacatgtttagcgtgcatgttaggaagcctgttagattacattagatatgtatgttgacttcgtaccattcgacaatatcacatcggtacggctagagtatgaatagcgtaccgagtataggctgatattatggtcgatggtaccgtactgtttgacagtatcacatcggtatggtca

SEQ ID NO: 337858 - DNA, 576 bp, Cannabis indica
acaattataacaccacctacaaacaaaacaatcaaggtatatgatagtgtggaatattgagtttattttatcaaacagatatttaaatacaacctttgtttctttagttacctaacaataaaattaacactaaaatataatttagagtgtttaatcatttagtttagttttgacaatccaatttaactttcaagtgtattgttttagagtattttgttgcaatgacagctcctatctttgagaaagtatattcgttttaagttgtagtatatatgttatatctataaactttaaatctatataccaacaatttaattttattacatataaaaaattactaagatttctttgtttgttaggaacaaacaactattatggaggaacaaaaaacacaggagaatgttaaaatgcaggtataaaaagaaacacttaaattatttgtgtatattgtgatttaaattttttccatctttattttacactatggtatattgttgggttttgtgccataaaaaaactcatttcaatataatcagagttacttattaataaagatcagaaataacatttaatgtt

SEQ ID NO: 337859 - DNA, 530 bp, Cannabis indica
ctttaatattaatttagaagctccactgcaccatccaaggtgataggtcctgacacaccatcacaaattattatgtagtagtactatataatatatccttctctcaaaattattgaacaataataactttcccatggagatcgaaatcccatcatttccagttgttcttttctattcattcatcttcttcttgttattactggcaataaatgtaataataataagaaaaactattcaatcttcaaacctcccaccaggaccaaaggcactacccatagtgggaaacattcaccaccttattggctcttcattaatccatcacacactcagagatttagccaagaaatatggacccttgatgcacttaagaattggtgaagttccaaccatagtaatctcatcaccagaatatgccaaacaagtcatgaaagtccatgatgttgtttttgcatcaagaccctcaattcttttttcgaaaatcatgttatatgatggtgctggtctttcttttgctccatatggtgagcatt

SEQ ID NO: 337860 - DNA, 1241 bp, Cannabis indica
aattctctaaaataataaaattaaacacataagagtttagaaaatcttacattgatgcagcggaataatatgactccttccgctcagatctctaacccgtgttcctttctatcgcagagtaataacaagatttaagcctagatctccttcagtttggttaaccactgtcttccacactatgattgagtacttaacttgctatgtatgggcatggtactctatcactaaggctagaattggtgaagaacatcaagaggtgcaaaattactatagaaaggagtctttcatctgctagttgacaaagaatgaaaactaggtgtagagtggttgaagggttgttgttagatgagaatgagaacatcatgttccttttatagtatttcaactagggtttaggatttgattatatggattaaaaaagataaaataatgggcaaaaatcacactaagtgttggctaattaatgtgggtctcactagttacaattttgccactttttttttttttttgaataaacaattttgccactttatttcaaccatttatcattctttcaataatgtcatattttccaatttcaatcctataaatgtcaaaactatttatttaataattataattaattatcaaataaagtgacaatttatcttatttattaattagactttacaaagtctcttaattaacaaataaaccccaaaacctcctttcttcataaataagacatagtctaattttagaattataattgattaattaaaaccaattaactgagtctgcaagcagtattatctcaactagtgtgaggaccatgggcctatataatcaagcttccaataagcagatctagaattaccaagtaaattctctaacttattaatttctccttgcgccaccatagatttgaaattgcactcttaattatatagaacgctctatatgtaccaagatataaatacgctatgaattatccattgttacaatccaaatagtcaaagatcctctatagatgatctacatcgaatagggataaatttactcttctatccttcaatgtattttatccttaaaacacttagctacctataaatgatatttcagtaaactaatataattactgaaatgagatcttaatcatttatctctattaagccaagctctaagaaaatcattgtttcacttctaaacacttatagaagctgtagaaaggtcttaaatcttgatacatcttgttagtgtcg

SEQ ID NO: 337861 - DNA, 625 bp, Cannabis indica
agtaaatagatcttggtaaaataatttccaacaaacgctatgccatccattgtggagggagttcaggtggaatttcaagagtcacaaattggatttctagtattggtgcgagttggcactggctgaatttggaggcatgaatgtattcttttagggctttgaaggatggtttaataagtggtttaatggatctagtaaaggaggaacgaatcttagtgaaatattgatatggatttaagagaggaagagaatctaaggtaattttagtttcatctggaacataaaaaagctcacaaaggaagtctaacttatttgaagtcgattttctacacgaggggcaaaagagtagggaatgagcttgagcattcattgaagttagccatattgtaaagtagagactcgtccatatgataatatgagttatagctcttaaaccataagggttcctgctatatgctaagcgtcatcaaatataaagatatctaaagtaatgttctcacaagaattttcacgacttacaactctatagtgtgacttacaattatgaatgatagattgcttagttacctttgttagagattttattacaatgaaagaaaatcaagacattacaacactattgcaa

SEQ ID NO: 337862 - DNA, 573 bp, Cannabis indica
actagagtatagtgtatagttaaaacttggtaattctatattaaagatctcttactttaatacactaccgatttgttttaatcatattgtataatcttaattctcttgtacaaccttacaagattatacaatctccatatgaataaggatttttaagatatttattaattatacttctataattaaattattcatttatgctataattatattttatatattctataatatattacccattaaatacttacttaggcataaattctaacaacagttctcaaccaagaatctataactataaaaaaaatttgtaacattaactattttagccttaaaaaaaaaattaataattaagtgcttaaaatttaagtatttttgtagcaaatagatataattgtgtgtatatatgtatagagaaaaataggatcataatccccaatattttcattttgttagcaattaatctttaaaactcaaattttgatgcatggcaaaaccccaaaattaactttctgttagcatttagctatttttattctatttttgtaccgttagttgtcatattggactatc

SEQ ID NO: 337863 - DNA, 694 bp, Cannabis indica
agaggtattaatttaaatttttctctttaaaaaggatttcattatgagttgtttttatgaaattgatctttatattctataacttgtatgtcaataccaatttatatttatctatttatcaatcttttatgtgttttacatttattattgatacaaaatttatggtataataatctccgcaaaaagataataccacataaatacttgaatttaaattcaatgcttttgtataattgtccattcttaaacaattattaagattttgtttgataaagatcttgtgatctgatttgggtgaaagaagttattaatatatgcagttcaaagatcttttatattgaactctagattatattcaaaacaccacagaatctctataacacacatattttgattagacatagatataatatgctaagcaaactagaaaactagtagaacttattcttgatcttgtatctggtctaatagtaatagataccactaaaagtccctgggcatagaatcatagtaccttatcttagtgggaggatttttcaagtccgttattatttggatgacactaatgaattacaataatatgttcaagaaagaaacttttttgaaataaaactaagaaaagttaatctaaccattcacgtgaatagtggtaaattattaaaattatgaggataagataggaaatcttgcaatg

SEQ ID NO: 337864 - DNA, 518 bp, Cannabis indica
catcatttttcgagctttgttccggtcatttggaagttctccgttattgaggtaagcagctatgggtgtcctccaatttggtgttgtgtctatcattttgatttcttctgcacagtttatgctaggctcttctaagaatatgatttagactaagttggccttatttgtcactgtgctgctcgcgagtcgtgccaaggcatcagcagttgtattctctactcttggaattttcctgagggtttaacccttacattgtgcaagcaggccttgtatctttcttagataggccataatcttttctccacgatccatgtactcccgtaaagcatgatttactaccaattgtgaatcattacagacctaaatgtattctgcggatacctcctgagccagctttagctcaactatgaatgtttcatattctgcttcattgttagaggccttgaacccaaatttgattggttcgtgtaggtgtttccccctaggtgtgatgagggcgattcatacactagaaagct

SEQ ID NO: 337865 - DNA, 625 bp, Cannabis indica
ttccaattcggtttttgagcattttgctttattggtaattaacttttacaatagaaattttatttttacagtccttgtggagacgatacttgttatttatcattgtattacttgtttgtgactacgttcacttgcgtatatctaattttcacaataagtttttggcgccgttgcttgggactgtaaatatattttattgtgatagtcaattagcttggaaattggtttattattttgttcttatttttttttgactcttgtgcattgagaggtgaatattttatatgaatgagtaccaagaatttattaatactgatctatttcctattgatcctgaaattgagcgcacattgagagaaagaagaagagtacaacaaagagcacaaggggaaatagaaatgatggataactaaggagatggacagtgagctcaaagagaaatggcccctaataatggtcaaaatgcagtgatcatggcagatgatagagatcaagtcatccaacagtatgaaacacctcttttcaatgagcttaattcgggcattgtgaggccagaaatttaggctccacagtttgaattgaagccggttatgttccagatgcttcaaactgtgggacagtttag

SEQ ID NO: 337866 - DNA, 708 bp, Cannabis indica
tgcactaattaaagtattatggagaaatagtaaggttgaagaggcaacctaggaactgagatgaatatgcagtagaaatatttggagttgttcaggtaattttcaggacgaaatttctataaggaagtgataattgtaatactctacggttagtaacccgattagtaaccctagctaggttaagtatgtattaataagaaattatgttattatatgatttaatatgtgaaactattatgatttattacattttaagaccctgttggtgtgttaggggcatttttataattttgatctgagatgggtaaaatcgtaattttatggtatactgtgtttatggactatagtattatattttatgtttattctgtccttctgcaggtattttctgacaagtcagcgcggtatagttacaaccgtgtattttgggccgaactgggtttgggacccaaaatatatttttgggatttatttatggtatttatgtgataaatgagaaaatgtgatttatgtgatgtgtgtgtgtgtgtgtgtgtgtgagtggaatgaccaactttcccttttttatgtttatgcccatatgtgagccttaggagcatttcggtcttttggccaattaagttaatattcaacaaaaatcagatttttagcaaattgaaaactattttttgggtttgcttctccgaaaattgacctctttctctctct

SEQ ID NO: 337867 - DNA, 1480 bp, Cannabis indica
ttttgggtttgaccaaaccttttgtacgcattggatggtaaattagcatcatgttaggaattttgactcaattttaatttttaaataaacatctttattaatttattgatcgaaagtgtttatgttaccgtagtaacttacattagagctatttgatctattctaatcttttagcttaacatgaaataaaacaaatttcagaaattagaaattgtactttaaatggtggtcatccgacctgagtactctttcattttatctgaaccattgggcgttgtctgcctagcaggccattcacttaaaagtaaatgttctttcagtacttatatggtcgttcgacctggtactttattgttagtattttcttaaatgtgccccattccaataccgtactactagaacaagttacattttttcatcatacttacccaatttctatgctcctaatttgagacttttgagtacctgatatggtccttccaagtgaggtccgggtacacctgtcgtactgtctttggtgtttaaaaatactcttcttaggaccatatgtcccacaaagaatttccgagccttcacttgtttgttgaaataacgagctactttttgttgatgggtgaccaactttaaatttgtcatggttcgcttctcttcgatttcatcaagtcattcagccaacagtatgtgattggtatcttggttgtatgccaatcttctgtgggatggtggctcgagttctatgggtaacatagcttcatatccatatgccatagcaaatggggtctgtctggttgccattttctcagttgttcgatatgaccatagaacttcaggaagttctttcgaccaatttcctttggcatcttcgagtcttttctttagtgtatccttcaaggttttgttgactgcttcaacctgaccattcgcttgaggatgtgccactacggataaacatttgatgataccatggttcgcacaaaaattagtgaaggattggctgtcaaatggcttgccattatctgaaactattttgtacggaaatccaaaccggctgattatgttcttcaaaataaagtcttgaactttctataatgtaatggttgcgagtatttcagcctctgtccacttagtgaagtaatcaaccgctaccactgcatactgcactcctcccttgcctttgggtaactgctcgatgaagtcgattccccaaatggcaaagggccacggactttgcatctgggttaactcgttacgcggagctcgatgtatcttcgaaactttagcatttgtcagatttcttaaaataggactttgaatctttaatcattgtcggccagaaataaacttgccgtagaattttcttagataaactctgcccggcggcatgatttccacagaatccatcgtgcacctcagataggagccgtgcagcttcttcttcagtaacacatctgagcaacggcatagagaatcctcttctgta

SEQ ID NO: 337868 - DNA, 728 bp, Cannabis indica
ccgcaccgcgcggtttgggaaaaattcaaaccgcaaccgcaccgcgaagaatttcaaaacgcatttttttgcggtgcgggcggtttgagcggtttgatgtacacccctagtttaaatgcttttttctatcaaaaaaattagaatactctgggagctagttttgttaatgcggttttagattgcttaaataagggtgttgattttttggatattaatactactcttattgctttaatccccaaaaagcagcatgccagttctctaaaatattttcggcctataagcctttgtactactatgtataaagtcatctctaaagttttagcgaatcgacttaagttagtcctggataacattatctctccttttcaaagtgtctttatttctgggcgtattatttttgataacatccttattgcccaagaaataattcatgccatcaataatagaaagcatggtaaacgtggctgggctgctcttaagcttgatatggctaaggcttttgatcgtgttgaatgtcactttttggaaagtcttatgttccactttaactttcctctcaattttgctaacttaattatgaaatgtcttactactactaatctttcttttcttcttaatggtgaagtttatggatctcttaagccttcgagaggtcttagacagggagaccctttgtccccctatctttttatcctctgtgcggaaggtttatcctctcttcttag

SEQ ID NO: 337869 - DNA, 461 bp, Cannabis indica
ctctgagtaatttcaacacccaataaatacttgagcacccctaaatccttcgtgtaaaacttataatgaatgaaagacttaagagatgagatgccttcaacatcatttccaatattaacaatgtcatcaacataaactactaacaaaatgataccagtaattgatcttttataaaacataaaataatctgacttacttttcaacgaaccaaatttctaaacaaactgactaaatttaccaaaccaaacacaaggactttatttcaatccatataaatattttcatggacaacaaactcgccctaactccccttcgagtaacaaacctaagatgttgctctatatgcacttcctcctcaagatctccatgaagaaaagtatttttaattatcaagttaattcaaagcacaataatgattagctaccatggaaaggaacattcaaacagatgtgagtttagaa

SEQ ID NO: 337870 - DNA, 1545 bp, Cannabis indica
aataagttttatttagggcataaaatccaacagttacttattcaactttgcatgtagcttatttttttttatgagttaaatctcatttacaactgctacttttgactttcctttcttacgagaaagattctttaatcaattatttgaaaaaacttttaaaattttaaaaaaacattagtgtagtgggtttccaatatatcatgtatttccagataaatttcaattaatcattcacacacatatatattcccctcaggtaattttgaagaataaaactttgtaattacttaaaaaattattcagctttatcaataattgaagttcaaaatacgacattagaaatacagattacaacatcagtttactggtagtaaggtcgcaaatgctccacgttccagtggttctttattagcgggtcgttaagccgagcttatttgtaaaccccggttcctactattgcctcgatcgcataaggaccctccctgtttgggttaaatactcctacagatgcatctctcgtatttgcaaatactcgccttagcaccaagtcactgatgttgaagagcctcttcttcactttcttgttgaagtatctagtcactcggtgttggtatgctgcactagtgatttgtgactcaatacgtttttcctcaagtaaattcaaggacaatttcagtagttctttgttttcttcttgattatacaaatctcatctatgggtcgcaatattgacttttattggtagcattgcctccgagccaaatgctagcaagaatggagtatgccatgttgctgttttctcagttgttctatgagcccaaagtacttgaggtagttcatcgacccatctacctttcgcagcatccaacttcattcttgtagttgttatccaattttttgcactatgacgtggaagcatatactggtgacacatggaccctatttcttacacctggctagagaaatgttccgaactaagcttagcatgcacctgcacagatagagtcttcccgaccgagcagggtaaggatagacagtacgagcagcgtatcaacacttagcgattccaagattggcatcgtgaagcaagaaagcaatccctataatccagggatcgtatcagagtaatatggcaagctgtccaaatcccacaatctatgtattctaaatttgtaatgtgtgttattaccaattatagacattataagcaaaagtgaaaccttccctcaatcatttagccctataaatagtgatccattctcacgggtatgggggtcgaaagaatttcttcagagagatctaagagtgcatactctgagatttcattgtgagagctttaagagaggaaacattgtattctttgttcttgagttaatacaatccaaggggagtaggctattaccaaactaacggggtcgaatctctttaaaatcttgtgttctttactattcattacttcatcttttatcttaattatacttcctatcgcttattatttgactcattgtcgttggctaaaagcaaggtcaacattttggtgctttc

SEQ ID NO: 337871 - DNA, 512 bp, Cannabis indica
caagcatgcaccaagcgcttcgacgatgacattttcatggcttcgcaaacaaatgcccagaacatcaagctcgatttttaccccaagcctgaggaagtccttgttcgcttctgggagaagaagaagagacttgacgccttgctcgaggagcgtaaagggcctcatcttccaccccggcattgatcaagccaacccgttattactattactatctattttctttctttttatatttacagtctcttttccctcttttcagacaattttaatttttatctttaaggggagacaatcttaaggcccgtccccaggcccttagtgtttttttatggcctgttattgggttcggacatctttacatttatgcttaaatacatatttttctttaactttgctaaaattttggcctgttttacatttgcccgtgtgatatgccttacttccccctgagtggcatgaaaaaattgtttttgaggcactcagctttatacataaatttggaggttgcatat

SEQ ID NO: 337872 - DNA, 528 bp, Cannabis indica
ataggggtttctatgtagaatttcgtaaaaatacaaaaaaatactgtcttgaagtgtaaaaatgaaaaaacccctttattttttttatcgaataatttttaatgcatttgtgttatgggtttttggcaactcgacctagatcatattcgaggcatcttcgacagctttggagagaattctgaactgggatttcttctctctgtcgaagacaacaatggactcacttctaaccaattctcccatgaaaacaacttgctgatttgggaccacgaagaaattctcagtaatggcgtaattgtggatcatggtcggaaccggtaaagagatttccacgtcaggagattttttccccattgggtgagaatttaaggtatttaaggtgaggtttctgaacgacatcgtaactaagaacgaaaatgttaggccttttattggcaatttagttgtcaaaatattttttaattaatgtacatttctattgagcatttaaattttttttattacattgattttgtgcctctagttact

SEQ ID NO: 337873 - DNA, 558 bp, Cannabis indica
tttagctgggccctttgcacctggcaccagctcgatttggtgatcaactcccttcttgggaggcagtctctttggaagctcgtctggcatcacatccttgaattcatctaacaccttctcgattataggtggagtggactcctccactttttcgtcgtacactgtgggaccgatgaaaaatgttggcctcttcttcttcaggcccctcttcagttgcagggctgatagtagcttgacttctgggggctgtctcactttagcgggcaccattgaaggattatcacccatgattaggagattccctattgatggaattggaatggccccccttctctgctagaaactccattcccaataccacatcgaagtcatccatacgaatagctacgaggtcaagttgttcctcccatccgtcaatcttgacattcacttttctggccactccaattgtggccatggctttcgaattgactgccttcatgtgacccgtatctttctccaattttaggcccaccctcttagcttcaatttcggaaatgaagttgtgtgttgcgccag

SEQ ID NO: 337874 - DNA, 563 bp, Cannabis indica
tctctctctctctctccctaaacttgtctttaaatctgaagtatgagctttggagattggagatcagaaatcccttgaaagagtagagacactcctatgtatagttgttggtagggtcctctttaagttggtattaaagccaactattacaactaaaaacagatttcttcagattcatctgatgagtgaatagatggacctattgactttgacaaattaagtgagtttaatcccaacaaggcttaacatatgtgtaaagtttaattaaagtaaaagtgtgtggttttttctaattacctgaagcctttggtaagctcatctttctaactttataaatacatactgtcatcacaattgtataatcagataaaaataaaatttcttttaatttagagatttaaagaagaagacttagttgattgaattgtactatcaaacttgagataatagctatggttcaattatgtatccctaattattatcttattattattatattatatattatatattttaatctcaaaatttaattaaaaatcaatctaattcaattatatttatat

SEQ ID NO: 337875 - DNA, 738 bp, Cannabis indica
caataataaccgacggatttaattataactgaaccgtcaaatattagatatttaattgtaatcagattagatattatttttaaatatctaattaaatggaataagatattggatgtggtgtaccaaaaatttaaagaaatgttaaagggcaccagtagtgcctagcaccttcctatgtgtaatatcgctattggtctaattaagtatcgggtcccatatagtttaatataataacttttagggagtatcgctagccaatcgcaacgcgacatgtcgagaaggtgctaggcaccggtagtgcccaatagcaatgctcaaaaatttaatacatataaattaatattttcatttagtttcaccgagtaactagattttatattgttatacattcaatagacaaatgtataaatacaaaaaaatactaaagggtacttatagtgcttcacacttttgtgatgtataatattattattgatgcaatttaatatcaggtcctacatattttattttaataaagattataaagaattactaattaattttaaaacgccacttcataataacgctaagcatcttaattccccataacaatactcataaatgtatacatattatatatggtgtcgcatttatttcaaggctaattagtaatttttcctcctccctcgaactttgacatatactaaatcgtgctccttgaacttttttggttgttaaaaattcaccgaaactattaag

SEQ ID NO: 337876 - DNA, 816 bp, Cannabis indica
agatcctggtaaaataaattccaacagaagctagcccttcagttgttacagatcatctcttggtgaataactcttatttctttgtattttttgattcaagggccactcattcttatgtgacggccaaatttgtttatagattgggtagatcgtttgatagttatgataaggggtttggaacgctactgcctggcggagaattatttatctctaaaaggaagattaggtctatgtcgatcaaaagtgaggatagagagttgagtgctaatttagtggaattgggtttagcaaattttgatatcatacttggaatggatttcttgtggaagtactctgctagtattgactgtaagcgaaagatggtgatcttccaacccgagagcgaggaaccatttgtatttgtgggatcattttagggatcttacattccagtgatctcagtattgaaagctaaagatttgttacaagatggatgcctagggtttttggcagttgtattggataccagacagcctgaatcaattcggccagaggacatcagagtggttcaggaatttttagatgtatttcttgatgaactttcgagtttaccactgtagagagaaatagattttgttattgacttagcaccgggagtagaaccagtttctaaggcaccttatagaatggctctgacagagcttaaagaattaaagattcagcttcaggggatgcttgacctagggttttcacgatctaatgtgtcaccttggggagctatgctattgttaaaaagaaagatggatccctatgcatgtccattgactaccgagaatt

SEQ ID NO: 337877 - DNA, 916 bp, Cannabis indica
aatcacgtaatacgcctatgctagttagggtgttacaacccaagtagtcaaagttggcctgaggattagccttccaaaagtcaaagaagagctcaagaccggctgtctccaaggcattaatcttctctttcagcttcgtcaccttagccgtaagctcctcctccttagcttccttctcctccttcacctgatgaagaactgctcaaagagaagtcctctcatcgtgaagactgttcacttcagcatacaagctggtgtcgatggtctcttcaagacggtgagaaacctcgagatccttagtttcttgttggcttcacccaactccaaccgaacagctccgagttccgcgctggtgtctttagcatccttcctggccaagtccacctccaccctcatggtgttggacaaagccgtgctcttcgaagaagcagacttagcccgggagtaggtgtaggccagcttcagaccggtctgcacaaagaaaaaacttgagtatttgagccatgtaaagagacttaaagaagaatatcaaggaagacttaccctggtgaattcctttaaaactccgcccactagcagctctaaagaagagtcattgtcagcaccagccagctgctcgctgaccccaggaaccagctggttcatgtagtgggcaagcatctctttgcccttcttggcctttggaagcatcgacaaaggtggagtaggtgcccgcacttgttcgtgttcacttttgacaagctgagacccacccttcggtggttcagacctgtccaagcttcctccccgagactccttggacttagcagcttttggggtagaggggtttgcagcagttagctgctcgaaaagatcaatgacctccctaacaggcttcttttccttagaagaggaccctgttggaaatattttacca

SEQ ID NO: 337878 - DNA, 973 bp, Cannabis indica
ctaattttgttggactagataaacacccattttatgtccttggatactatgtccaacatcaaatggactagaaggatttatctagtccaactttaatggacttaaaatgaagtttttgtagtagtgcgggggtaattctcttactttaaaaatcatgcggcaagggtattactggtcgacgctgcgacgagacgctttaaacttcgctaaaaaatgcgacaagtgtcagtggatagccacatatgtcaaccaacctccaagccacttgcactccatcacaagtccttgaccctttgcggtttggggcatcgatctaattggagagttacccaaaagaaaaggcagagtcaaatacgccgtagtcgcagtcgactacttcaccaaatgggatgaggcaaaagcacttgcgactattacagcagccaaaatacgcgagtttgtatataattccatcatctgccggtttggcatcccttacaaactcatctcggataatggaaagtaatttgattgtaagaaaatgcgacaattgtgcgatgagttggaaattaaaaatgcgttttcagcagttgcttatccatagagcaatgggcaaattgaagccgtcaacaagataattaagcatactatcaagggaaaacttgaagagcgtaaggggatatggggagaagaactttcgcaagttttatggtcatataacacaaccccccgatccacgattggcgaaactcctttctcgctctcctacggatgcaaagccatggtaccagtcgaggttggggtgggtttcctatgaagagatgttttcaacattacctagaacgaggaaaaacaattgctccacctttttagaagaaaaatgcgaccaggctcacttgaaaaatgcggcctatcagtagcgtactgctcggtattttaattctaaggtcaaggagaaaattctgcgagtaggggatttggttcttcgaaaagt

SEQ ID NO: 337879 - DNA, 678 bp, Cannabis indica
acactcaatctgggtatgtccatgatccttgtaagtaacataaaattttctctagtgctacacaatgatgaattgttggagaagacataaactggttaatgacactaattggaaatgtaatatctggacgagtcacagttagataatacaactttccaaccaacctgcaatatttctcatgatcttcaaatggttccccatcacgtgtaagatgcacaactggattcattggagcattacaaggctttgctatcaatttgttgtctcagttatcacatcaagtacatacttcctttgagatagaaaaatactttgtttactctgagtaactttaatacccaagaaatacttgagctcccctaaatctttcgtgtgaaactgatcatgaatgaaagacttaagggatgagatgtctttagtattatttccagtaataacgatgtcatcaatatacaccactaacaaaatgataccagcagttgatcttttataaaacacagaatgatctgacttacttttcaacaaattaaatttcctaacggcctgactgaacttatcaaaccaagcacaagggttttgtttcaatccatataaatatttgtaaaagacaacaaacttgccctaactccccttgagcaacaaacctaggaggttgctccatatatacttcttcctcaa

SEQ ID NO: 337880 - DNA, 391 bp, Cannabis indica
taaggtttctcatactttatatgggtttatttcataactgttttagaagttcatatttagggtgttaatcaacatagctgtgagtagatctaagatcctggtaaaataatttcgaacaatagcaagtattcacattgtcttccttagtgatatgcacgatattatcttaatatcattacaactataaggggagtatgtcattaccaatatctaagggaccgaatctctataactccttgtgttctttgtattacttaattttcctaattatttcttggtgaccaattcatttatcagactctgagtcggttggaaaattctttagtcaacaactactataaattttgtgtctctctaaattatatactgttgggatttattttaccaggat

SEQ ID NO: 337881 - DNA, 811 bp, Cannabis indica
gctcccttgcactccgctccaaccgctagcctagtggatccctcccagggctcgaaaagtaaacgatcctctaaaggcagcacccggacggaggagaaacgccaaaagaggggatacactccccagtacacctagtacaaggagctgacggactcccaagagcgtgtgtactttgctactaggcaaaatacgcactaccggagaccacctcccttgtacaaggatagctcccggagggatccaaacaaaaggtgcgagtaccacaacgacattgggcatagcaccaacgaatgcaagaatctcaaagacgagattgaaaacctgatccgattgggccacctctatgagtggatcaagaatcggctgccccacctcaatccagggcaggcgacagggggtgtttcacagggaacaccagggggtgcagcaggagtattggctccagttgctcccgcgggcgatgcccaacacatccccggtttgccgcccagacccaacgcgagggaagccatgatctccggaggaccccatattggaggaaccacccgcaaagaactaaagcggtacgcgggggccgcaaagcacaatgaggtttgggaggttactcaactcccagctcaaaggccctgaatgatggatcaacccattatgttcacagaagaagacgccaaggcggtgcgcttccctcatcatgatccgttagtcattgagacccccattgccaataaagtggtggccagagtcttgattgacaatggaagttctgtgaacttacttttcaaggaggccttcactgcaataggcctgacgg

SEQ ID NO: 337882 - DNA, 785 bp, Cannabis indica
acccaaaccagtgaatctgcactgctgggcattatttccacatattttcagactatctacagcagctctgggattgatactcatgcaattgactctatcttggatgtaattccaacaacaatcgatgatcagtctcgagaagcactttcagcaccttacacggcttctgatgttctcaatgcactaaactcaatgagtgatgataagagccctggatttgatggtatgtctgtcatgtttttcacaaattactggcacattgttggctctcttgttacaaaagcagttctggatgttcttaacaatggtgcggatcctactctcctaaacaagacgatcattacactcattccaaaggttaaaaaacctcaactcattacacagtaccggccaattagtttgtgcactgtcctctacaagttgatttccaagtcgattgtattgagaatccagcctttcttgccattggttatttcagagtatcaaagtgctttcatgtctcaacgattgattactgataatgttctcatagcttttgagttgctacattcacttaagaatcgaaagcgaggaaaacaaggttatgctgccattaagcttgacatgtctaaggcttttgaccgtgttgaatggcactatgttgctcaagttatgttgaaaatggggtttggttcaaccatagtgaatcttattctgcgatgtttgcagtctgtttcttattcttttttactgaatggaaaagtacttggagatctcacccctacacgtggaattcgacaaggtga

SEQ ID NO: 337883 - DNA, 534 bp, Cannabis indica
tgaaattggataatcgagtaaagagctatgtgctttttagtgtaaaaaaatgcaagttttgaacctgcctgatttttggcctacctattgaaaataggtagtccatttttcacaggtaggtagttcgttttttccagaatttgttttgaaatgcgtgctaacggctataaacgactacttttcaccccaacactatataaacttgatttttactcaaaaatagatgttggctgagaatttatgtcatacacctaacatatctaagtgagattaatgagcttccaagcttaaaatccaacaaacactcttcacacaatttgagccaaaatttgtttctattcatcttgagtgtgcttgcttatcactctaggtttctattgtattatcatatttctagagtgattttgcttgtaattttaaacacattttcatattgtgattgaggtgaggttggcaccgatattgtaaataacctggttatagtgagattgacacttcaacaatccgagaaagaggttaatagtcctcgggggt

SEQ ID NO: 337884 - DNA, 913 bp, Cannabis indica
cccctatttataatgacatagggtggcagttaattacaattaaatacaaatcccagaacaatatttcccaaaaattgtgcgcttttaatatgctccacgtaaataaatgcacttattatttgaaaatcatacaactgtgatttaaagcgcttttaacgggtcaacgttgatctggatttagatacgctaaaaagtgtatctcgctggggtatctcgctaggtacatgagcacacaatagcaacaataaccctggcagcgagttggagctttttccaactcttttcgaggttgataatgtaaatcttgtcatttctgcctgtgaagacataacgcttcatctgacaaacggagtttttggtgacaaggcgaacttcaacagccaacatcatttgaatgtcagcttctttctgagagagctgatgcgacgtagcagtggatctcattgaaggatgtttggagctgattagtgaaggtagcaagaatatgtcttcctatagagagataggtgtcacgccaattgctattcatgtccttcaagatgttatacttagttagtatattgtatattatacgctaagtgttctaacaaccaacacgtctcgtatcgggaggtagatgcctcgctatgtattatcattgtcctcccttgaactatgtcctctgatgcaaaatggtttctcgtcaatacgtgaatctatagtttatacatctttgtctcgctcaagactatacaatcaacgacttatggatgtgctctatcaactctgcattgaatgagttattccattttatatcctttaatataattgtcattatatttgttgatttgtattctccaaggttgttacgtgtcatcctctaaagtaccagccaaattttgggtataacaataaccaagcatccaataagtag

SEQ ID NO: 337885 - DNA, 863 bp, Cannabis indica
catggttgaatccgcaatactggcttgtttaatgcttctccagactacaactcatccaccaagagtaaatactaaccaagatatcaacttttgactatcttcgcctgattaaaaataaaaatcaatatatctagtaagatttaactctccactgaatttatacaagcatgagatttcttttttctaaaaatgctggagaatgtgatttatagctatccaatgttccaaacttggactagattcataacaataaacaatccctacaacatagcatatgttgggccttgtacacaacattgcgtacatcaagctcccaactacttttgcataagggtactttctcatgtcctcttcctcttaggagtttttagactttgatccttacatagagtaattccatgtctggatagtagttgtcaattcttggaattctctattaagtgtctttctagcaccttatcaatataagttgcttgagaaagtgataatgttatcgtctttctatgtatatatattttgatcccgaaaacacatcttgcctctcccaaatccttcatttggattttatcaactaacaactattttacatctgataatctttctacattatttctaatagtaaaatttcatctacataaagaactaagaataccactatattacccttaatgaatttgtacacacaggctttgtccttgttgacttcgcttttagccaacgacaatgagtctttttgataagcgataaatgatatgtcgtaatgagaatatgtaataaagcaataataagacacataatttcatagaggttcagccccgagtagttcggtaatagcctaatcctcgttagttgtattgacctaa

SEQ ID NO: 337886 - DNA, 1365 bp, Cannabis indica
gggggtagtaaggcataccacacagacaaatgtaaaacaggccaaaaagtttagcgaagttaaaaagcaaagtatgtatttaagcataaaaataagatgtttaaacccagcaataagctcaaaaaaatacattaagggcctagggaattccttaaattgtctccccttaagaaaaaaaaaagagatagtaataaaagcagtaatgggtgatggttggcttaatcaacgcgaggtggaagacgaggccccctccgctcctccagcaaggcatcaagtcgcttctttttctcccagaagcagacaagaacttcctcaggctttggatagaagtcgagtttgaggttttggccattagtctgccaggccataaagacgccatcatcaaaggtcttggtacagtgcttacagacaacaggggccaggagctcatcccttttcgcctttttgagggcctgatctttaaaatccctgagctccttcacctcaacggtcaaattttccgttgtctgcaaggcagatgcagctcctccgttgactttagcctggcagtcagatctttgactgcctccttggcctccctcagttcgcgcctcgctttggccacggcctcgtcccgggtcttcagctcctccaccttggcctttaacgcctcatgatgcctcctctccgcctgtgcctccctctgttgggcttcctcccagaatgctttcctctcagccaccaggtccctcagactcttcatggcctcgtccatgcccccactcggacatgacgtacccatggacaattaaagtctttgagaggtggtcggtcttcacagcgatctggaaggataagaaaaaaagagataagggttaagcatgagagattagatgccaagcattcctaaaggcctcctcgtgtaaagaattttgctgagcctgaatttgatagattgagttcgtggaagcgcaggctgcgtactgtttggccagaagttgggtcaggttggagataaaatggctcgttaacttggaggaaaggagcaagagtaggaccgacgaagcgattgaactagtccgtcagagggtccatgtttaggtcccaagcattcctaaaggcctcctcgtgtaaagaattttgctgagcctcccgcaagacctttttcagggcttccaccttggcattcccacttgtgtactcggccattgcatagttatgcttggcaatccgaagttgctacctttcctcatctgtggggacgggagtaaggatgatgctgggaggtacaatgtattcctcggcttcaggtagaatcccggaatcagagctaacagccggagtgtccaccctcctaggtttttgggaagactcagcctccaccat

SEQ ID NO: 337887 - DNA, 519 bp, Cannabis indica
agcctaatatttttttttatttttttattttgggctaccggaaagtgtgggccctaggcacgagcctagcccacttatgcctagggccggccctgaaaatatgacatcaaaaaaagtatttagcaatagctaccaataatactttttaacaattctcttttaatttatatcaagagaaatcaatattgggtaagttaaaattactcttatgacattcaactcgcaaaatctcacttaatttttgaaataactgattccatacagtgggaggccacaagttgttatgtaggggcacttgaccccacttaagttttaaaagattacatttttatataaattttttaaataattttaagtttgcccacataaaatttaatttttagtagttttatcttttaaactttatgtattttttaaatttttatttctaataattttatgtttattcccataaaatatataaattttttctttttattcctataatttttaaaaaaaaattccccaacaaaattatat

SEQ ID NO: 337888 - DNA, 529 bp, Cannabis indica
caaacaaaggactagaatttcaatctatttaaatttaacttctaatattttatttttattaaaaatacatatgtcaattctactaccgttatatacatgtaatccatgtgcataaatacttctctttccacaaaaaattcaagataaccatagacttgcataactaattcacccccacctaatgtaaactaaagtcatgtagatcaaaaagactttatatacatgtatcgttaggtttaggtaaatagtggataagaatgccatttaggctagattcacatcataaacttacaaatctaatcaaaatacaaaaccttcattataatttttttttcttcccaacaaaattttttttaaatttgatatctcattgttcacacaattaaagttataatcctatcaaatttatctcttgctattagtttttttttttctttaatatgatttttttttcttttaaagttgttttttaataagaagagaacttttcaatgtaatatacttggatcataattctctatgcacatac

SEQ ID NO: 337889 - DNA, 825 bp, Cannabis indica
ttttagttttttagggagttttaagggagtagatgacagatttaatgagaaaagatagagataagtttatagtaatttttttttaagaagaaatagtgaggtgagaagaaaaaataatagttgagtttattattgaggttggttgagatgaaaaaatgaagaagagaagaagaaaaatggtcttaaaggtgggaattggggctgggtgtttatgttgtatttaggttagtatattagtcatttacttcattagttaataaaaaaattaaaaaattaaaaaaattttataaaaaggttatttagcaaaattaattttgaaagaaggttatttagctaaatatctcaattttacccccacattacattacccctcccctctctcttcttctcatcccatttcactctagccgaactccccttcactacccaccatgatttttttttttttttctcttcactcattctctaatcattttcttaacttcattacactatattatactacactacaagcttatctacccattttctttaaaatttggagggagcatcatacaaggagcaacattctacaagaaatgggttttttttttgtttgtgtactcttgtttgttgttgttatatttagtttagaatgttgttttgatgcttgatttgtggattgttgctgttattttgctgttttttgtgttaaaatacttgttggctgtgaaaactagattttttcaggtttttggaagttttttcgtctgacctgatggggtccgatgctggcccgatggggggcccgatgccctgtcaataaagtggaaaggggtgaaggcc

SEQ ID NO: 337890 - DNA, 1033 bp, Cannabis indica
ttgtttagcaattaattagggtttctgttttcacgtaatctttagggtttaggcataatttaggtttatgatattccttaagcctctagtttaattaatttcatccaggaattgggattgttctttttttctttttttgtagaaatctcccagtctagttcacaagtgtattttccagaatccttagaaacagaatatcctaaacaactagccatcccatacaaacccaaaaatttccaacctctgtccaaattagaaatgaatgatactagaattaaagaccatctgattaagtcaaaccaagaagagactgccaattgttctaggtggttcctccacgagatttctgagggccaacgtttttttttgcgatacgcagcctggcctgaacccacaataatagcttctattccacttgcgagacctctatttttacccgaagtcactgttgcttttgaaccaggtgaccttgagtttgaaattatgtctcctaagcctcgcaaatcaaagaccccacaagatcccaatgttacttttgaggccaaacttatcgaatccaaggttaggtcgattggcgcctatgtagacggtatcttaaaatcctgcggcatcaagcaaaggaaaggttgtgtcataaggtctgtggaacctggggaattcagctgctttcctctagaaagggtaatacgcgaggagtgtagtgggcctagcacgagtaattattcctcgggcattggagcctagagcctggaacctcgagcacatcaaggctagggcggtccttccccttagggattattttaaagagtactgcaactacctcaaggtatccccatttcaaccgaaccccatctcgtataggatccttgcgagcctgaaggtcctataccacattttaggatgggagtgcctcactcctttggagatagcctacttctactcggtcaaagaagtccatgcgaggaagaatgctgtaggaggcttctactatcttgggacttatactcgtgatcgcaagatcatagttaggttg

SEQ ID NO: 337891 - DNA, 642 bp, Cannabis indica
atccttgattcaagaaatcttcatcaacttctaagaatgtcccaacaatattaccaacccaaatagatatagcttccgacttgctaagaaatggtaagtgatgaagttggacccagaacggagaatggtgtaaggaatcaactgtgacgtttcgcagagtagatggagagcatatgacgatgtggtggttttgaaagttccatggctataatatgagtgccatcttcttatctcttagacacccaaaagaaaccatgaacaggccagagtgatgatcagtgatagtaacagggtaacaccctttccagtgaccaatcattttaatttgaaaagtctttcgattaatattttttgaaagataaaactctggcgaaaagagtattatcatcatgttcagtaactctcgtactaatagtggtcaatagttcaagaacctctttttaaagatcagtaagtgatatactaggcctagtggatgaaaaaaaatattatccattagagcagatgtgaggaaaaataagtagcaaggaaaatcagatagggatgtgttcgaaagatcataacaggggaaggaaaggaataactcacaaaattaaaaaaatccagaacgaaaattgaaaaaaaaaaaaaaaccataaaaaa

SEQ ID NO: 337892 - DNA, 534 bp, Cannabis indica
aaatactaccgaaagagatccaaatagagtctcaatttcaaaaaacacattgtgacattgtgtctttaactaaggataggttttccttttaaatgaggagaaaggttgtcactcgttgcaacctaaaaaaaaaaattgagcatagcaaaaaaaaaagctaacgctcaagaaagaaatatagcaagcaaaaagcgaatgctcaaaaaaaaaaaaaataatagagataagaaaaaaagaaaatggctcaaaaaaaattaagcatagcagaaagctaaagcttagaaagattgagagcaaagacaaaagcaaacgctcgaaaaaaaataagcaaagcaaaaagctaaagcttaggaaaaattgagcacaaaaaaaaaactaacgctcaaggaaaatagagcaccgtagaaagcaaaagcttagaaaaaattgagcaacgtgcaaaaaggctaatgctcaagaaaaagttgggcaaagcaaaaaggaaagcccaacaaaaaaaaagtgaaagctcaaagaaaaagagagcagcaaaaa

SEQ ID NO: 337893 - DNA, 511 bp, Cannabis indica
tttccatcttagtaataatttctgttatcccaaatttagcactctaacgtggcatcacgagaatggtgacacatggattccaattggagcatttgctcggaacgatatgccaagcaggaggcctcgctggcacatccagtatggaatattcaatgagccttgcagaatgatcaacacttagcgaattcagcttaacgcatcatgagtcaccagctcaatccctacaactcagggatcaacttacgtggatatggcatacacacgatcccattatcagtgtattcagcctcaatcccacgatgcttgcattcagcattgatcacacaatctgtaaagcccgtattttaaatttaccaaactcgaaagattaactttaatataatatatctttataactttatgggtcggaatcccgaatatcaaaatacactttaaaagtattttactaatatataggtacaacttttttttaaaactttagctagcatgcaacctcaaaataacagactcc

SEQ ID NO: 337894 - DNA, 572 bp, Cannabis indica
caattcacaaccaaaacttaaatccattaaatagattttccagtaattaaatcaaaagcttaaaacacaattcatgcattaaaaatccaatggtaaaaaccccaaaaattcagattaaacatcataaacttcaaagctccaacttaagcaaaatcaccaagaacttcaagctcaagaacttgaacttgaacaattaatttcaaagttcaataacagaataaaaacacaataaaattccttttaaattctgtctaaacctaacccaacatcaattcaaaagatccaagtacaaacatgctcaaatcaacaagaaaacaccaacatgcatctcaagaccatcccaacctatttcatgcttttcaaccataaaatcacagcagcaaattcattaaatttcagcaatagaaaaactacctcaagcttcaatgcaatgatcaagccacaactcctcaaacaattcttcaatttcaagcttgaataccaagcaaatcaccaatttttcaaccaaatacaaagagagatagagagagagagggaagggggctgttttagggttaaggtaaatgcagaaa

SEQ ID NO: 337895 - DNA, 1106 bp, Cannabis indica
aaaataatttccaacagtctattggctccccagtctcgttgtatcccgcaaagtttgggggtgcagcctcctcctcttcctctacctcggaaggactaccaggacggatatcgccctgttcttctatctcctggacttcagcgtccccttcgtgatccccctcctcttggacgggcgaatcttgttcggcgctgggtagggtagcgtgctgggccacgtgagggtcagacgcgttgactttacgcattgtctgtttagttcgagccatcatcctgtggctgaacagggagattgaattgaaatgtctatcgcttgaagagggcagactagaacaaagacgagggtaatcctcgtacaggagttgaagcaaatcctggtcaatttggtgttcgcttccccaaaactcactagggttgatctacaaaagacaacacgcgagatgagtgtttggtcgggatatcgaacaataaataggcaaatatgatgaccaggagtactcaacaaattaaagaatagaaatattcgacgataagtcaaatctcagaagtttgaaattttcgagatttagggcaaaaatttcacgaagctttgagtaagcaaggtgaaagacagacattgtgcaatcaaaagacaaacatcatgaatagtgaagtcacataaatcattgcaaagaaaaatcgtagagtttctgaacctagggttttttacctatcctctacatcaaggataaaatatcatccagaaattaattgtgcaaaatgaaagtaggagaaatcgagaacttactcactgattgacgtctggattcagtctgcacgaagctgagcaaatggttcttgtgaaaatttcacgacaaactcgaagtgaaaaatctctctttttgctctaaacttgcttaatggaaaagttggagaaaatgagtttgtgaacaatgctcagtcgtatttataggcagaaaaacaaaaaggggtaatcatttcaaatacctcagatgcctcggttccccccaaaaagaaaatattggaaatcaaaagcaattaagtgtaaccgtcaaacgtggtgagagaaaattggatttcaaaacattaattgcgtcagagtattta

SEQ ID NO: 337896 - DNA, 478 bp, Cannabis indica
aaaaaatacgttagctaccagtacatgtattcaaaagtttatcttagtacaaatataattagtacctaaaattgagaagttagtctaccttgaacaaatttgaaccaatccgtaaggtcaattttaggatgcttttcagggacatataccaaccattgtaaatcattttcttctaatgcaggcataatgacgtcttttgtctttctgttcttgaagtcttttaataacttcccaacaaggatcagacaattatgtttgaaatcatcttgtactataaaactcgtctagttttaaggaaaacaaacatgattagagttaacatctgaatgaatcaagcacagattaaaattctcacaaataaccacttacctgtatatctttcaaaatcttatttttttgcgtagggttgacatgcttctaatttttatagcacgactgtaacaccctaactatcttcggcgtattacgtgatttttaa

SEQ ID NO: 337897 - DNA, 560 bp, Cannabis indica
aaaaaaaaaaaattagggaatttagttattatcgatgggttttcaaaaagttcttgataaaagtgagaatttttattttgttgttagtttatgttggttattgttgactaaattatacgataggttttcgataggattaagaattagttttgtagttgtcatttttagtaattgtctactgactatcgatgggttctgaacaggttttggataagacttagtattgtatttttttgttatcatgtctgcattttatttttgttattattgtattgtttaattttttttggatatcactaataagttgtgttttttttttctctgttgtgttctgtctatttcttgataggttttcgattggttgttgatatgtttccaataaaattctaacatttgctatgttttctttcttcaatagcaactgattgttatgattcatctcccagatgaagaagcgtatgccaagacaatcacttatgatgctaagatagtgattgagatgggtgtcgatgagacgcatccttaatatgatgcccaagaccttgctgttttcgaaagcc

SEQ ID NO: 337898 - DNA, 648 bp, Cannabis indica
ttttaaaagaaaaaagaaatataagaattaaaaatgcataaatctcatatcatatatatatttttaaaaatattattaactaaataaatataatttaataaaaatgagaagatgaaagataaaattaaaaaaaaaatatcaatcaatttacatatatccaaaataaagatacattttataattagtaatcataataattttatattttaattttatacctatctcaataccaaacaaatataaagagagttactatcatctctattcatcactgtccatccttctcaaactttctatctttctactatatatttttattacatgtaggcacaatatttttttgggaaattatagtaaatggccccaagtcatacgactatgttagtttatgtcctcatttcaaaaaaatatagtaaatgaccctaaatcataagactatgttagtaaatgtcctcatttcaaaatcattaattttttttattatttttttgaattagaagcaaattattaaaacattatgatatatctatattagttttgttaaaatcttttttatttaaaagtattgtcaatttttttttaattttttatgagttgttgtaggttgttggtatatagattttattgtacggtatatttctattttgt

SEQ ID NO: 337899 - DNA, 529 bp, Cannabis indica
ttcacacttgactcaagaagattatcacatatttcttttgttttttttttcttcttccatttttacatagaggcacaacacataataactttattatatatttttttcaatctcttactaataatatttatttccccacttacaacaatttatccccccaaacttgcttaaaggcttatggcataataaggtatgtttagggtgaaaagagttaaggataacgaatttagcttagttaagtggtgaaaaaattttagaataggttaaggctcaactttggatatactaggataaaacgtttccggtaggcttgaaaggctcaatcgatccagaatactcgcctaaatcactttccaaacaaaaatcaccaaggatttcgcttcaagagagtatgtcaaacaaattctattccatgtcaagtcaatcattccacaatcctaatagaaaaaaagtgatatgcgtcaaaaacaaatgttttacatatatatgaacaaccttctaatacacatccaccttaattcaaacagtt

SEQ ID NO: 337900 - DNA, 664 bp, Cannabis indica
tatggaaaatcgtaaaaaataaaaatataaaaaaaattctttaaacgtaaaaatataatatttttacaaaaagtagtgtcctatgaaattatcctttaataatttacataagttacatattgatttgttattaacaattaggatatgtatggacaaatcatatatattttatgtaaaaaaaacagttatatattttaatgagaaaattactcttactatgggattttaaaagttctaatgatgatgttatttttataagggagaaatatcgcgtattgcgtattggctgggaacgttcaagaagcttctgcgataacccaccgtcgagtccaggagcatcgccggcggcttctgttcggttcagttggccggcgtacaaccgagttgagtcccggagcgtcgccggcgtgttggtttttcgtccaggagattctgcgataacaagtcaagaagagagttgaacgattgcttccgtgttcttgaacgacttggatgcaggaattggatgactttgtttcagtgatttactattattagttatattactgttgttgatcgaaggcagcaaacgggttctttgtgttactgttattagtttttgtttttagttctttagtttttccctttagttttttctggttcgatttttgttggttcttgtttt

SEQ ID NO: 337901 - DNA, 2173 bp, Cannabis indica
ttctttgttgctttcgggattctgatgctggtggtacgattatggaggacagtacatgggtggatattcctattgaggaggaagaggaggctatcttgtcttatgatgctagtgctaaggatggtaatgactacgtgacaggtggtgtatcgttggaaggttcttgactgaaagaaaaattgattttgaggctatgcaacatatgatggctgtattgtgccagctggggaaggggatgtttgtcaaggaattagatactaatcgctatctctttcaattttatcatgagattgacatccaaagtatgatgaatcgaagcccctagacttttaataggttcttgttaatttttaaaaggttacagcggggggaagatccaagattggtttccttgaatgatgtttatatgtgggtgcaattgcatgatcttagatcggggtataaaactgctatagttgttaaggatgtcgcaaactatattgggaagtttgttcaattagatgaaaggaatttcatgggcttatggcgggattatcttcgtgttcgtgtgactttaaatcttacgaagccattgaagagacgtatatccgatactcaaagtacatttctacaacgccgcttaatctcagataacatcatgattgcctatgagattattcatcatttaaagagaaaacgaagagggagggatggttatatggcacttaaacttgatgttagcaaagcatatgataagcttgagtggggctacctccgtgctatgatggtaaggatgggttttaatggtcattggattaacttagttatgtaatgtgtttcttctatttcctataccatttcacatagagggaaggagttggggctcattgttgctcaaagaggattacgtcaaggtgatcctttatcaccatatctgtttattctttgtgctgaaggtttctctagtttgttacgtagttataaacaacgtggtttactcacgggatgtaaaattacttgaggtacgccggtaatctctcatatggtctttgatgatgatagctatatttattgtaaggccattgacgaggaagcgtataatgtgaaggagctgttaggtacttatgaggtggcttcgggacaaagaattaatttaactaagtcttctgtattttatagcaagaatattggtagtgaggtgcgagattctatctgtgctagttggaaatttatgtggcagatgaaaatggctattacttgggccttccttgtttggttgggaggaataagaatgttatccttggctttcttaaggataagctttggaagagaattcaaggttgggaagggcgtattttgtctcgtgtgggaaaggaggtattgctgaaatctattgcacaagcattgccgaattatgctatgaatattttctcttgccattagacacttctaaggagttagagcggcttatggctaagttttggtggcattcgaattcgcgcggtggtaaaggtcttaattggatgagttgggagcagttatgtcgtcataaacatgcaggaggattgagtttccaaagctagagagactttaatttggctcttctgaggaaacaatattggcgattgttcgttaatgatgactctttggttagtgggctctataaggcaaaatattatgcttatggcaacttgttttctactgaattgggagataatcctagtttcatctggtgaagtattcttgaaggtaaagatctagtacattcttgtgcttaaagaaaaatcgctaatgaggaaaatgtatccattcttgcagatccttggcttccacatagttataacaactatgttgttataaggcaccctactcttgtgaataaatcggtcagccgcctctttcaactatgtcatgttcccgtcaatgatgactgtctgttgtgtaacgctcatgcagaaactgttcaacatgcgttggtggagtctgagtttgctaaagttacttggaatcacagcatggttgacgtcggggcaggggctgcaacattcagcagctggctgttggggatctttggcagagggcacgaaggtgaaatggaggaaaaggctgtggtgagttgggctatttggcgcgcgcaaaatgaatttgtttggcaaaagaagagttggtctacatcaaatattgttgcatcagc

SEQ ID NO: 337902 - DNA, 681 bp, Cannabis indica
aaacaagcacatcttaaataatttttaaggtttcaacaaactgatatagtgtcccggtaggtgaaattcaaaggaattattaattgaatagagtagtcagctcatctaaaattgacaccattctagcaaccttttatccgattaaaacaagaatcaaacgttgtctcggtaggcgacagctaaggttattcttattttatgagcttccaccattgtttcatactttgtaaatttatctctaagtagtcatcgtaggggacagtctaatagagatgaaaacttacaaaatacttatattttgagatcattacggtgttaaccatgtaagaccaataatagagatcaaatatccttataactcaagctcattatttttaagaggtgtattttcatttgatacttattttaatatatttgtcttaacatatatttctttaatcaaaattcctaatttagataactctaaatataaattttaatttaatatttataaaattataccctaggaagatctaaaaagtaaaaatttattttccattcttagtattaattttccaataaatattatgaaaattacttaatttaagttggttcaaaattaattatataattaattttttactcaaatttaattttttataaattcatactaattgaaatcaaaatttaatgtattaaaaa

SEQ ID NO: 337903 - DNA, 807 bp, Cannabis indica
taaaatatatacatatgaattatttgaattgtttaattctgtgtgagaattcaaacaggttgatatgttatattctatacacatgggattttatttgttaaaatttttaaacagtttggtaatagttgcaaaatcgttttgttacagttttgacacttcttaaataattagtacaaaaataacttcttcattaaagttttaaaaaaagtcagataagaatacataagtaattaaaggaaaaagtagcaatgaaaaaacagtgaatacaatacattgatagtcaattttaaaatacaagtacattgtttgtatatagttggaaaatagtttctatatagtcgtgcgactgtatataaaaacttgaacaattagaaaaacatacaacttctgctgatacaaacatatagaataaacatattataaggattaatgtcaaatatcctaaaagtttaaaaccagatccagagtataaaaccaaatataatacctagattcaaccaataacactaactattgtctgataatagattcaaccaataacaccaaatagtcaccaaatgaaaagaccctacttttcaatttagaagccttagaagacttgctttgcttctcatcctcgctatcaatgctttcatcaattttcctttggccatatgagaagaaaagggcagcaagtcgagtacgataaacttcgatgtcaaaatccgcaggaacatcttttccatgaatgaagaactcggcaaatgcagccacatatgctccgcaatcactataaaaatagaaaaaggaaaaacagtttagcaacta

SEQ ID NO: 337904 - DNA, 1378 bp, Cannabis indica
aacactcagataatttttttagcgacggatccccaaaaaaagcgtttttgggaccgtcgcgaatttggccttttgtagtagtgtcggtgaaggagcatcccgaggtaatcaatgtggttggtcacccacaatacttagggatgaacgtaacacattagttactttttaagatagctgccttaattttcatatttggaaatcccttctcgtagaccgaattgctcataggtgtgacagctggtaccctagattccacgtccagattaactgtaacgagtcatattatggtatagccgagcaatatggcaccatgacagatagggtaagccatatagatgcaagctgggatttagaaccaattgagccatttgatatattcaagatcacaagttgtagggattttagtggatactacggcccttctaccccctattctagtgatagctcgcctttctagtggttttggtaaatttcttaggtggaaaattacactcaacgcttccctttcacttgtctttaaataatttaacactttattttgcctcacagacatgcgttttgaagatgttatggaccggaaagggaaggaaaggggaactgattcaggagttcctacagataccgaggtggagccttctgaaaggcgaaagaaaaccactgcccataaaaagaaggtagtgtccgagcccattgaccttgaggtctccgagcaacaccaaagcacctcctcttgatacaactcacgcctctgcctcctcgagctaggccattaaaactttgtctgccgccgcggggaaggctggttctgaatttgctcaggtgtttaggactgcctgctggcgccaactcaaggctctccttccccacgattgggatctaatcaatcttggggatcaagaagagacgctttcgtggaacttgcattatgccctcatggtaaatttgttgtattaatctatatttttctttcttttttttttctccatgtttcttatattcatttgcttgtaattcttcagacttcttccctctctttttcttccgattggcgactcctggagcggctcaaatacctggagggcgaggttcaaaagtcactagcccaatgcgaggtcgcgattaaacaatagaacaacgctcggcaggaaatcacccgtctcaccaacaaaactttctatgttattgatgatgatgatgatgatgataatggttaccacaagcttcaaatgtttttttctttttaatattttttacttctaacttgaaattataaaacttacttgaaaaccaaaatactgagttttccttattcttaagtgtttcacttgaggaaaatgttttctgtattgagtttttatggtttctttcactagccaaa

SEQ ID NO: 337905 - DNA, 1201 bp, Cannabis indica
tagcttcatgctatactttttttttaaaaatattttaaagcattccgcgaggtctgatgtatgatccttatcgatttcaccaacatatcatcgacataaatctccatgtttcgccctacttggcttgcaaacatttcatttactagtcgctgataagttgccccagtgttcttcagttcgaacgacatgactttataacaataaagtcccatgttggttacgaagcttgtatgttcttgatctgggacgtacatttttatctgattatatccagaatatgcgtccataaatgacataagctcgtgtctagtagttgcatccactaactggtcaatccggggaagtgggaaacaatcctttggacacgccttattaagattagaaaaatcaatacaagttctccaagttccgtttggttttgggaaaggaacaggattggctattcacgagggataaaacacctcgcgtataaaatcattgaataataacttgtcaacttcctattttagtgccccttgcctctcggaatccaggggcttcctcttttgtctcttatttactcgtcgaattcctcataggctcgggtttactgaaggctatcttttgctcgtgtgcgaggtaaatatttttctgagtttcattaagctcggtataaatagtatacactggcacatatttgtcatgcttcttttgtttctttctatccttcgatggttccctaattccgtcctttcttttcggaccaaaagcccccgagttaccaattctcatcgaagtagttcctgttgaaacattgctgggcttacctcccgagcttgttttcaataagttcatttcctttcgggtttcttccttctggacaaacacctaagccctctcgttgaacttagtgatgcttcttaccggacgtccttgtaaatcatcccacaactcgcccctggcggttaatggatcagtggagatccctgcctgaagggctgtaagttgtgtgatgtcatccaaatttataaccctagcggcagtcgtgctaaaatgacttaagtacgccttaagtgtttcgtcaggctactactttatattggttagtgaggtcgcttcaggtcgcttatccctagcggcttgaaagtgcttcttgaaatccctagacagctgctcccaagaaattattgaatgatgagtaagttgggttttatgccctaaa

SEQ ID NO: 337906 - DNA, 835 bp, Cannabis indica
caaattacaggaactgtaagtctttggtaagactttctccaccattacttcctatgtgttcataaaacattatgcaacatcactttctatatgtattactcatctagggatatcgatactgaactctttactgcttattaagtacatctgaatatacagaagacaaatctctaattctatcccaaatggaatagagataacacagtttagaactttcttcagtttgaataactttctagtgctttcgaaagcaacaaagttatttagcttcactgatggagcttaaattatgatagataggttttgacatccttctagaataattccaccacccccagagtaactaccatatcgaataagatatgagttggtgtagatataaggattctaatatacacctttatcatcttacatataggtcactttcagagattcatccttgattgtctcctaatgttccttgtttgattacatcttagatggctaccactcaacactaggagtctggttaagttcgtacacagaagtacatttaactattagttcttagggacatcttgttgggacatattgtcttagtttgaaactataagttccttctagactaagtcatcaacatagcattctagtattaacatgaatgtaaaatacttgcttaagattaagtaataattagagataccataaaacatttcataagaactaggaattttgcctaagtcattcgaatagactttgcaaaattctcctatcttatcctcaaaattctgataagtttctatccatatgaatggttagatttactttctcagttgtatttaaaattcctatcatg

SEQ ID NO: 337907 - DNA, 561 bp, Cannabis indica
aataaaatgtgatacttagttttttacgtatttttcttcatatttttaagttaatattgaaatttatgtgtgtaattggatatctaattaaaaaccgatccaatccaattagtaattagattggattagattggattttgaggtctaattgaattgaatcggatgatgatttttcaaatccaattactgattggattagatcggatgaggaaaaaatggtggattggatcggatgctcatccctatatgtagggtttatttatttaataagactatgatattttaaaatatattcgagggtaaatactattttggaccctgtgttttgcaaaagttaccaattggaccctctgttttgtaaatgacaaaatggaccctgtattttctaaagttatataaataggacactgaactgacttttttgtcaaaataaacttaataataatctaatctagagatgttatgacaaaactagttacattttctgtatctgttcgtgttagaaattgtcttaaagttggttatatcaaaaaataaatttttaaaaattgagctcagggt

SEQ ID NO: 337908 - DNA, 1125 bp, Cannabis indica
aggaagtacaaagtttgactggtaagatcgccgcactcaacaaatttgtttcaaaataaaaagacaagtgtgttccattcttcaaaatcctccgaggaaataagcaatttgagtggacataggaatgtgaaaaaagctttttaggagctaaaagcgcaactcgcaaagcctcccatactctcgaaacctctagacggagaagaacttgggatatacttagttgtaacagagcatgctgtgagtgccgtgctgattagagatgaaaacaacatacaacacccagtctattcattagtaaaagactcatttatgccgaagtccggtacccattgatagagaaactcacttactgcctgattctaacaacaagaaagttaaggccctattttcaagctcatcctgttcaggtatagactgaccaaccgttacaccaaatattgcaaaagttggacgcttctggacggttactcaagtgggcagtagaattgggtcagtctgaaattactttccaaccacgaacaacaatcataggccagaccttaccagagtttgtggtagaatgcacaggcaaagaagaaagcataacagaaggcaacctcgagccagtacaaataccttagccaagtaacactgaagacaagccgacttggaaactacatgtggacgggtcgactacagatcaactatctggagcagaaatcgcccttgtaacacctagggggcagcacctacacgctgcagtcaagtttggatttaaagcatccaataacgaagccgaatatgaagctttgatcgctggcctaaagctagcccaggagatgaaagccaaacatatcaaaatctgtagtgattcccagctggtggtaaatcacgtatctggagaatacgaggctcgcgaagaaaaggtaacaacatatctgagcaaaatacatgacctgctcgcacaattcaaaagctacggtcttagacaaatttcaaggaaagaaaacacgactacatacacgttagctggtctggcaagtagtaatgtaagtgataaagcaaacttggttcctatccagttcctcgaagaacctagcatcaccagcacggaagagatcaaaatgattgatacttcccaaaact

SEQ ID NO: 337909 - DNA, 1094 bp, Cannabis indica
ttcactaatttttgtgcgaaccattgtatcatgaaaagtttctctgcaatggcgcatcccaaagcaaatggtcaagttgaagaactcaacaagaccctgaaggatacactaaagaaaagactcgaggatgctaaaggaaactggccggatgaatttcctgaagttctatgatcgtattgaacaacggagaaaacgactaccagacagactccatttgccatggcatatggatatgaagcaatgcttcccgtagaactcgagccaccatcccatagaagattgacatacaactgagaagcaaatcacgtactccttgccgaatcacttgacgaaatcaaagagaaataagccatcttaaacttaaagttgatggcccatcaaaaaagttgatggcccatcaaaaaaagtagctcggtatttcaacaaacaagtgaaggctcagaaattctttgtgggagatatggtcctaagaagagtatttataaacaccaaagagagtatggcaggtgtactcggacctaactaggaaggagcatatcaggtggttgaagttctcgaatcaggagcatacaaattgggtaagtatgatgaaaaaatgcaactcgttgtactaccaaggtattagattggggaacatttaagaaaatactaccaatagaagtacaaggtcggatgaccatactaagtactaaacaaaaagaacatttacttttaagtgaatgaccttcttggcggaccaagcccaaaggttcgaaaaaaatgaaaaagtactcaggtcgggtgaccacaatctaaagtacaatttctaatttctgtaatttgttttatttcatgttaagctaaagatcagattagatcaagttaataactttgatgtaagttactacggtaacaaacacaattttgatcaatacatgaataaagatgtttatttcaaaattcaaattgagtcgaatctactagcatgctgttaatttaccataaagtgcgtacaaaaagtttggtcgaacccgaaaccctgaacagacaaaagagcatacttgcaaaaaattattagtgaccaagagtcataagtctgttcggtcacttggggg

SEQ ID NO: 337910 - DNA, 746 bp, Cannabis indica
caggggtagggcacgtggtcggggtgatgctaacccgccacaggcttcccagggtgcccaagttgctcaggaagcccagaattgggaaaataggtttgcagaaatgcaagccagaatcgaggaccaagataatgaaattcagcgattgagacagcagggtgctcctgcagtgcctactccaaaaattccagtggtacctgcccctgttgtccaggctgaacaagtggttgcagtgaattggatggaacctctgtatgaaaggttccgcaagcaagcacctccggtttttctgggaggtccggacgttatgaaagccaagcagtggctaacagtgattacaagaattttgaatttcatgggcgtcactgggaatgatagagtggtttgtgccacttttcagtttcaagaagacgtactggtccggtgggacatggggtccatgattcacgatgtcgcgacgatgacttgggaaaagttccaggaacttttcaatgccaagtactataatgaggtcgtcagaagtgccaagagaaaagagttcactcacttgacccagaaggaaaacatgagtgttgctgagtatacgacccagtttgatcgtttagcaaggttggcctcgggaattgtgccaaccgatttcagtaaaaaggaaaaatacatgatgggttgaatgcgaagattcgacatgatttgatgattaccaccgacgacaaaaccacctatgctgaaatggtagataaggcact

SEQ ID NO: 337911 - DNA, 616 bp, Cannabis indica
gtttaaaaatcacgtaaacacacctatgctagttagggtgttacaattattttcaatttctgtatgatgagcccttaatgcgtccatctctttgtctctccactcggtaaacatacgcctttgttcctcgaacgctagatttaccactgcgtgaagatcttcctgatcatgatgcagggtattggtatgaccttgcacgagtcctagagcagcatagagattttgtaactcagtgtcatctccaatggtcatttgagtgttggtaacaggcggaacgactgtgttatgaatgccctggttgggtgctgaactgttattcccagtctcttacacaccaggcgtgatttcatctatagaagtcattacaccgtgacccacgtttgttggctgttcaggattaacaactggcagaacccttgcgcttcctgggttctgcaatgcaggatccactgcctgtggatttgctgaatcaaccaggcccctacgagtctgcaccaccatcgcacttgtggttagattttgaataaagagcgattcttgagttcaactctcaatgaaagcaccaaaatgttgacctcgcttttagccaaacgcagtgagtcttatttagtaagcg

SEQ ID NO: 337912 - DNA, 518 bp, Cannabis indica
tataattatttaaattttatcttacttaaaataaaactgtggatcctaattaaataatatattttacatatttatttaaaataaaattattattattattattattattattattattattattattttaaaaagatataattttgtaatttaagaagcctttgaaatatttatttttcaacaaagttgttactttaaaaaatgtctttatctaaatttctccatcttgtcttgttggaaggtggcataaagatcttctttatggtgtaatgattctttttaacttgacaagaggaggatatcgcatgctgtaattgcttcaaataaaccaaggactttcaaagtttctaaatttttcataataaataaatcaaaaaacttagaagagagcacatattaatctaggatatatttagtcaaacttatttctatttgtttacttatatggggtctgtgtaatggaattgctaagttttttatgaatccaatattttgatgctttctcaaacaaacaaaaa

SEQ ID NO: 337913 - DNA, 552 bp, Cannabis indica
atgattcagaatgaataactccaataatgaaagttatgggagttattgatacaatgaaggagggtcattagttgaatacaatgaagataatgagtccacaatcgaagatcaagatccctttgaagtaatattaactcaaaatttggctacatcagattcttacttgataaataatgaatgtcgtggagcgaatgaaatcattgaagagaatgaattcatccatgatcaagaaatcattgaatatgaaatcacaagcaagggtatggatagccaagtggagagtgagcaacaagaagaaaggttgttagatgaaagtgtagatactatgacattgattcgacttcatcaatgatattgacaaataaaccaccaatggatccatatatttcatcaacaccatattatatactctacaagctacgaaagacttctccccaagctcatcatccaaagtcttatgttgttgctactgactttgattcaaactcatcgcttgccaagcttgaaggcaagtacaacaacaatttttaagttgtcttgcatgatgcttat

SEQ ID NO: 337914 - DNA, 1152 bp, Cannabis indica
taattgtatccaaattggcaccattttcacatctctttcttaatgcttgaattcgggtcccatggcttcataatgactggttttcgattgaacaaaatataacccccattcaaaacttcatctctctgcccaacagagtgaaatctaattaagaacactccgtatgctaacagttttaccttatccacattgtcattccctttccgttttgcaaagccttcaagtacatgtaaaggtggattggctccaagaacataacacaccaaagaaggcttccaatggttaacctcatcttcaatatcttctaattcaatcttcaccttcctatcttgctgagaattcttaaaagaattgtctaaattcctcactacagttgcaaatctcagaataggaggagtagagttcatacctttggataggttactgttacattgctccgtagccttgagaaagctcacaaagtcgcgttgcacatcctcttgcctttgaatttctctgagtgagcttcaaggagacaaaggttcttgaaataggtccgcctggttcgaactcaagcaccttttcccctgaccaaattcgtctggttcatcctcacttccagtaagtttgagcagttcaacctcgttgagaaggttgatttgagattgcctctccatttgaacacctcgctttccctggttcttcggtttcttagcatcagatttcattttccccgctctcttcgactgagtttttgccatggctttagcagagtgctgcatggcctaagcagagagaaaatacttggtcttgttttgttttgatcctcggtcaacattttggtgctttcattgagagctgaaggaagcgtctgaaagtagacagtaacaaaacaaaaatggtggagactcgaaacacacgtcaacctcgccctcttcaagatgctcaagacccaaacgatgaggacgaggcctcaagggcgaatgtgggatctgaggaagaagaaggaacccacgatgacgagtatgaaggaaacttcgacgagtacgacgcctacgacgaaagaagctacacatagctggtactcttgagacaaaaggttgccgatcacgaggctgaaatcgcagcccaaaaagaacaaaaccaaaaaatgcaagaggtgatgttggccat

SEQ ID NO: 337915 - DNA, 822 bp, Cannabis indica
  modified_base (11)..(11): a, c, t, g, unknown or other
tttttttttanattataaagacgaagaacaaattctattttctctcctatttactacggcgacgaagaatcaaattatcgctatatttattcctttttctacttcttctgccaagtgcaggataaccccaagggattgagggtttttttttctaccaattggggccctcccttcaccacccccatggggatggtctacagggttttttttctaccaagtgcagtatactatgttaaatattcactggtgttctactagtattttttagttgttctactgttgttttgagttgttctgttttatgttttactagtgttttataaaaacacagtattttttaaaacttttccgtgtgacagtatttttgtaaaagttaacccaaatttcagtatttttgtaagttttccaatagtttcttggtttgggagatcaagtgggcttgcccgtttttttttttctttttaaaaagaaaaacaatagttagtttaaggaaagaaaagaaaaaaaaaacatgtcacttttatgatagcatagtaacatcacttcaaatattcaagcttttgtttatatacggtagagcgaaagtaaaaaaataagcacaatataaggaaaaatagtaaaaaaaataattttttccttacaagagtaaaattaaaagaaaataagaaaaaacagtatagagtgtaaattcctattaaataatctaagtcatgtgatttagatggttttttttttgggcttttttcagttttaaccaaaaaaagtaacaatattacaaaaatactttcagctgaccaaataaacaaatatacaacccaaata

SEQ ID NO: 337916 - DNA, 631 bp, Cannabis indica
aacctacttcactacggatgaatatttaagatattcaaacttaactaagcatgcattgataattaattataataacaaaaagttagtgaatgcatatacatatagcaagttaaaatctgatcaacaccaaaatatgccaaacctcaacaattagctcacaatctacaatataatgaaatacaaagaaattaaaattttaattatttaataacttactattaaaaaaatataacaaattactagttactaattatatagattaatttttgaaaaaaataatatatatacatatataatcaaatatatatcactctagcacaatcttaaaaatattatttctaaactaattaaatccctcctacctcattctcattcacaataaatatacatacttttaaatatattacttagaatatatacaatataattacacaattaataatatagacacaatatatataaacatatattcaataaaacagaaaacatatacatatatatatatatatatcatatatcaagttaataaatatttaccttattaaaagacaatctcgtgaccaattgcgacaaaaatccgaccgccatgcacaaaaaacaacaacataatgttaataaaatagaaaaaatc

SEQ ID NO: 337917 - DNA, 669 bp, Cannabis indica
ttttcttaccttggtttagaaatgaagagtacgggccgaccttagtggaaaacaagctaggcgatccaggtcctatgtcacgacaattaaaactcaaactgtaggtcagcaattgccaaacgtcatttccctaggagaaacggaagaggacccagcgatgaatacttcccaaactactaatggtcagcagcccaatccccggttacgagttttgctcgtgggccaagcgttaggcgagcagaccttgtccggtaattcatcaggaggagtcatacctgacgtttcccaccaaactagtggcgctattccacctgtcaaccaagcgaatcaatcgctaaggacaccaggctcttttgtgttcgaaaggttgggagtaacccatgacctaaggaacgatctaaatagaagaaggggaatagacaaacaaaatactacaatgatcgtgaagcctggagcccgtactgaaatcctcgctcagaaagatgttgacgtattccaaattgaccagaatgctgagcaagtcagcccagccgtacaggccgagcttgacgaattgaaaactatgtttcatggcatggctgaacagcataataatgatcttgagttagaccgagctcgcggaactcccttctcaccagagatcaatctcctaccactgcctcacaagtt

SEQ ID NO: 337918 - DNA, 873 bp, Cannabis indica
taattgcctttactaatctatattttaacatgcagtcattacaaatgtatcatatcacctaaacaggtgagcctatgccacaacctggcaccaatgtatcgcatcacctaaataggtgagtctgtgccacaacctgacacccatgtgtcactgccgctacctaactaggatcaccgacaggaagaaacctaacaacggtttcagtttagagtcatgactttatcacggttgcctcataggaacaacctgaacactgatatccataaatcatattgcctaatcaagcaagcccatgccatagcctagcattcatattgttgccccccattttgtccaaaatacgtggaccaacctgactgtgacacgtggattgaagaagcaagactttgggataattcgactaagtctccttgatcaaaaggatcagcatttaaaatgcctcccaaagaaggcatgagggtttcacatactcccgaagagcaagactataacgaagcacctctgaaaggtatcaaatcctatctgaacagtcacctcgcatttaatgccgcatgggagaaggcgtattaaaactgccataagtattaaagtctgacggcgtaaccccccttctgcagctactacgctatgattaatgagcctagtgacggctactttatgagaaagcacatcagtcaagaaaggataatggattacatccatctaacccctaaaaagcctagggattagaccatgcatttcctatgatgtacttattgggaatgtgtgcctttactgaataatacagaaagacatgtacctcgagttctggggatcaccccacaaaaacactataaactacccccaaactcattaaggcaggggtcaagaatt

SEQ ID NO: 337919 - DNA, 736 bp, Cannabis indica
ttctatcatttgcattacctgtccaatcaacatcactaaaacaaaccagattagcatcagtgtctttaaaaaaacaaatcctaaaattaagagtactattttcatagcaaatgattcttttctcagaagaaatatgagattccatgggatttccttgatagcgagcccaaacacaaaccatataacaaatgttagaacgattagcagtatgacaaagcaacctacccatcatactttgatacaaagtaggatctatcattactcctcgtttatcttttgataatttcaagattgtgctcttaggattattatcatgtttggctctctcaagaccaaacttcttcaccaagttctttgtatacttactctgaaaaacaactgcacccatgctcattttaaactctagtttagttgcatttctgggagaaagacctgcacttcagagttagaagtagatccaaaaacaagatcatcaacatatgaaaaaataatatcaaattgaatgtgtgtaatgaactgtgttttaataacatttccttttctataaccatgagagtgtaaaaactcagatagacgctcataccaagcacggggtgcttgtttcaagccatacaaagcctcgtctaaaacatgatcaagaaggtgggaatccttaaccgttccattttattgtggggttttaggagcagaaagattatgaaaaatactataagatttacagaatttactaaacaca

SEQ ID NO: 337920 - DNA, 543 bp, Cannabis indica
aattcctaaaacaatgaaataaacacataaaagttgtagaaaaaactttacattgatggcagcaaaataatatgactcctatcattcagatctctaacccttgatcctttctgtcacagagtatgatcatgatttgaaactggattctccttaatttgataaaaaatctacactatcttgagtattaccttgaattgtgtgggaaataactcaatcactatagacttcgaaaaacttaggaagaagaacacaggaatttgaatatgaagactggctctgcttattttctattttgtctaacaaagagaatcagttagggttagggttgtctcattgttatgaaaataagagccaacatattttacttataaggtagcttttagggttaggttttgaattaaaatggaattaaagaaaagataaaattggctttatttaatccatcatggccgaaccctatgtgggcctagtgaattttaatttttctattttattgaaacttaactttttttttcataaatgccatattttaattctaactct

SEQ ID NO: 337921 - DNA, 1214 bp, Cannabis indica
tttgacgaaagaggggtcaaactgttataactccctctccaaacctttttgacggaagaggggttgaatcattataacaccttgatcaaacctttctgacgagaaagggatcaaacaactgtaattttttgtttaaaacctatctgacgagaaaggaaaatcaaaatttaggattagcgcataaagttgaatactaacggctcgcgctaagggaaagtattaaacaagacgtcaaagggtcttgaaaaactacctaaacctaacacgtgggtagagaatctaagtactcatgtaagcaatgaaaatatatacaagatgacaagttcattaaaaatatatttaagtttgcttaaaataagatcatttctgatgatcgcgaggaggaatcagtgatggctcccaggttgaaggtcgagcagataagctgctcgcgcgcaaagtaagaaattaactacttagcatcagaggaaaatacgagcagtggaaacccctgataaactttatgcatgtgattgtgtaaattctgaatgaaacacaagaaaatatccgcacattaaagttcaaacttaaaagtatgaggcataaaaaaaaaagagtgccaccaggggcaaaccattgtcttagccaaagggccattttctaaaagagaaaagggagaaaaataaataaccaattctacatgctgggagacttggacagatcttcttcttcttcctcgacctcgcgatcttcctcctccatccttgtcttctcgcaaagggctaaagtttcctcttccttctcctccaagaagttggtgtgcatattagggttcgccatccaggcccgatatacaatgcgaaaaccaaccttttcgcacctttctatggtctcgacttctttttcagcaagcttcttctcaaactcatcagcttaggctttgacggtcttctcggcctcctcttttgccttattggcttcctcttttgccttctcggcttcctcttttaccttctcggcttcctcctttgctttcttgacttcttgcttaaggtgggtattgtcccgttgggcgtcgtcctaatgcttactcaaaaccttgcactgggatagtaatttgtggacctttccctccaagtattcgagccgctcagagagtagtctattggaagaaaaagaagaaaaagaagcctaaagaattgcaaacagattaatatgaaagaggtataaaaaga

SEQ ID NO: 337922 - DNA, 547 bp, Cannabis indica
taattataattaattatcaaatagatgtacaatctctattatgtgataaaggagctgaaacttgtgaccacttattctttgaatgcccctttgctattgattgtctacaacaaatgaaacatggctgggatggaaggctccagtaacccgattgactagcttggtgagaagcattgagcggaggaaggtttctacctttcaaaagagagttatggcagctgcacttgctgcattggtgtatctaatttggaaggctagaaacatgaagtttgggcagcaaaaagaggaaacctcgaatgttcttatacagcaactgaaaaacacttgtaaaaatacaatacatagtgtatggcctaacaaagtatcactagaagatctatattggtttaacacattgtgagtttgtgaattgtatagaaacttttcaggctcttttcaaaagagtgatgtttaggatgtaaaaatataaagtttattggagtaatgaagaacacttgctgatttcccaaaaaaaaaaaattaccaaataaaattttcatatatgtaa

SEQ ID NO: 337923 - DNA, 588 bp, Cannabis indica
ttttttttctattttttacatttatataggtctttttatgcaatatttttgaaagaaaaaaatgtggaaatcccatatttctaaaacaataaataaatttgataaaatttgtaataattagtttcgtcggaaaagtcactggcgccgaaaaaagggacggtgccgaaatagttattgtcactggaaagtcatcgaaaaagtcatcatcgttggaaaagtcaccgaaaaagtcatcgtcgccggaaaattcaccgttgtcgaaaaattcattggaaaagtcactagaagtaaatgtctcaaatataaataaaaatagaactagttctataacataatgaataaaaataaataacacaaaataattcaaaccggttataattgaaatataaccagttctgtaacataatgaataaaaataaataacacaaaataattcaaaccagttataattaaaatagaatcggttctataatagtgttataacgaataaaaataaataacatgattaacccaaacctgttataactaaaatagaaccgtttctataatataatgaacgagtatatttggagtagatatggtatgagt

SEQ ID NO: 337924 - DNA, 700 bp, Cannabis indica
ataagttagagaatttacttaataaattctagatctgcttattggaagctctgttttatagttctatggtccccatactagttgagacaaacttcttgtaagactcagttaattgattttagttaatcaattataattctaaaattaaactacatctagtttatgaagtttcactaagatatggcttgattgtgaagaaataggattttagggtttatttgttaattaatagactttgtggagtgtaattaataaatattataaatgacaattttatttgataattaatttaattattaaataaatagttttgacattttataggattaaaattgcaaaagtggtatttgtgaaaaatagataaatggttgaggaaaatggaaaaaatctaactagtgttgggccctcttcatggccggtcattaggtgtcattttttccattattttatcattttttattccaaataaatcaatcatgaccctaagtgaattagtataaaaaaaatgtctcattatccaactaatgcaaccaatgactcttaacctagttttcatcttgtcatgcaactagagaatttgagacttcttcttcttttcttcttttaattttcgaaatcccatagccttcttcacaaaacaaattcagcctttacccatagaaaggtagtcctcaatcatagtgtgtaagactgtgaagaa

SEQ ID NO: 337925 - DNA, 544 bp, Cannabis indica
ggttatatcttctctgatttgacatatctttcttgtccatcttgataagaaattacgctaagtgttgggaaggttcctacctcgctatatatatattttttttgtgatatttgtaatgcgaggtgatcttctcgctgtatgaaatgtgaggcatcttatgttgatacactcacttcgctcggatggatgaatgtccctttcttttcagtatattctaaggcatgcatatgtctctttaatctcagatcaatagttactattcttgtctcactattgactataaagtcaatgaattttgaatattatctatttaacctttaattaataaacgagttatttaatatgcatttaatgatgtcattgtatcatttagaattgttttgtattccttctgttggacacgtatcaacttctaaagtgtagccaaattttgggtacaacactttgttaatcacatgatcaccaataatacatagaattgtggaacaccctaagtctttgtgtttaacaagacttttatattgaattatagagctgacttgtt

SEQ ID NO: 337926 - DNA, 629 bp, Cannabis indica
gtgccatgatatttatgctcgtcggagcttgtccaacagtgaggggtagccggatttgtcctagaggttgaactccttgaccggagacaccatagacaggctggaggcatggagttagatccttgagttggagccccatcttctcgtaagcagtcttgaacagaatgtttgaagaagctctgttatcgatcatggttctaaccaccattttgtttgctatctggactttcacgaccagtaggtcgttgtgcggaaatctgatcttgatagcatctacatcgttaaaagttatggttggctctcctgctcgtggaactttggccttcctttcttccacagccaggatgacttcttcttgctcatactcagttgttcgggaatatctctctcgagcttttcccgtatctccagcgatgtgcgggcctccaataatgacttgcaagtgtccatctactggtggaggtacaagatcctggttgttttgaccttggttggtcttgacatacttctacatgtgcgggttttttttcttgatcaatattctatttcccgcttcaaattataacattcgttggtgtcgtggtcgtgtcttcgtggaaccgcaaaattttgtcatgtcccttttgttg

SEQ ID NO: 337927 - DNA, 754 bp, Cannabis indica
atatttttgtcaattaaatatgccaaaaatggaattaacaaatttgacacaaaaacataaattaaagtagtaaaataaataataaaaatgtctatatgtaatagtgggaacttaatgttgctaaagaaataaaattttggggatcaatttaccaaattataaagtttggggaccaacttgccaaaacttatacaatttggagactaatttaccaaaaaataaagtttgaggaccaacttgccaaaacatacatagtttagggacttgctgtacaaataagctaaatataaattgacactttatttacaaaaatacctccataaggtgtggacaacatttattgcttttatgtgattttaattactaaaatacctcttacactatcacttacacaatcagacgatagttggacggtggttgctgcgtggttgcgtggtggttgcatcactcgaaagtttcaatcagacgatggttgtagggtggttggccgaaggttgcatcacacgaaggtttcgatccgtagaaaatttctaggtggttgctgggtggttggccgaaggttgcatcagacgaaggtttcaatcagacgaaataactgttagcaaaatgtttatgcaactgttatgaaacattaaaaatcagaacagtgtttccacgtacgcaactctatctacatgtctctttatttttttattttttgattaaatgacagaaaaataaaataaccttgatatttttgtaactagaattcaca

SEQ ID NO: 337928 - DNA, 865 bp, Cannabis indica
ctgttattaggcaatagacacttggtctcccgcactcaataatattatatctcaccaatagtcatatatacctcatactagtagtgctaggcgtcattgatgtttgttttagatcattaattatgtttaaattttgaattataagaaggtaagtgttctttttaaacgtttcttcccttcattcttgaaaatttattagaaatttttacatgaaaatacaaaactcaacttttattacaattttaccttcacaaaagtagggtacctttcatacgatggttgccccttttttgtcccaatatacgtgacagtcatgaaattggtaagtgggtcttaagatcaggaagtaagataaatttaaagagaatttatctagattagatggtggtatttgggaagtacctctgagaattttaactgcatcctgatgccaaggtattttattcatctctgagagctaggcaaggccattttacatcacagtcctatttttatatctcatttttttatcattctttttctctcttacaaaaaaaaaaaaacttaagataggcaaggccattttacatcacagtcctatttttatatctcattttttttatcttcaaagttgttgttatttatttatttattttttttgtttaactaagagaacttgtcaacataatgtacttggatcataactcactatgcacatacaccctttccaacataattctaaaaaaaaattatctcatcccacttacatcatatttttctatttagtatacaacaacctaattttatggcgcaaaatagggtaaggataatttatttaagttcatggctcataatcaaggataaatatgctatttagtttttaaac

SEQ ID NO: 337929 - DNA, 828 bp, Cannabis indica
aaattagggttttaatccgaaaaatttctagttaaggtattcatttgatttcaattgtcgtgacataggagcgggatcgcctaggttgttttccacccaggtcggcccgtacgtttgaattctgaaccaaggtaagaaaagtattatgcaccgtttatggttaatgactaaaattgtgatagtcacgattttgatcgagattttgacatgcatttgatgtgacttgattatcatcgaggtaatggtatgaaatgattattatcgttgtgactcgattatgatcgagtaaaagatacggtcattactgttatgagtaattactcttgaaaccgcagttaggtttcttacttatcgttcgctttattgggcagcgatagtgacatattcagctcgtagttaacgagttgtaaaaaggggtacccggactgtatgtttatgatattgtgttaacgtgtaatcatattgatatgagacctattcaatagttattttttatttcacttttcttgcagagtctctgtgactcacgagtgctttatggtgcaggtaaagggaagacaaaggttaagcagccatgagtttgtggtcatagcagcgatgtacatatcagtcgcagcggcacggcccagtgaacaggatgctctctttttaaaatattttgggattacaaagtttatgttgtaaaagcactattgaaccagtttatgaatattttgaaaacagggggaccccgtagttaatatcacttatcttatttaaattattttttttatattttgaattttaactattaaaaatttaattacccacacttttagtataattata

SEQ ID NO: 337930 - DNA, 553 bp, Cannabis indica
agaagaaatggcttgctgcaatgagagaggagatgcattccttgaagaagaaaagaacttggattctggtgccaagaccaaaagacaaggaagttgtctcctgcagatggttgttcaaagaaaaagagggaatgtcagagggtgaacaacctagatataaagagagattggtagctaagggattcacacaggttgagggagttgattacacagatatcttctcacctgttgtgaagtacaaaaccattagaatgatgttagccattgctgcacacaatgacttggaagttgagtagttggatgtcaaaactgccttcttaaatggtttttaggatgaagagatattcatggagcaacaacctagttttcaggtggaaaatggcaaaactgatctggtctgcctgcttaaaaggtcattgtatgggttgaaacagtcacctagacaatggaatcaaaggtttagccagtttgttcagagtattggtttttcaaggttaaaatttgactcttgtcttactacaaggaactagggacacctaaggttgtctaccta

SEQ ID NO: 337931 - DNA, 879 bp, Cannabis indica
cattggttcaaatggcgccttttagcatcttgaacactaaggataaggtcacaatttcttattctcaccttgaccgctatcttgaccaccctagaacttttttgtcttgtccgataattagtggttcatttagtttttgcttcccgatctactagtaagctggcttcatatattccatcacatatagtggtacaacaggaagtgccggtaatagaagaacagatacaagatgagcctattgtcgtttaagatctcgaatatatttttccttattgtctaatcatatcttgcatagcagaatttacatattccaaaaattatggcaataaagaattctctttattatcgtttgccccgagcccagatagctcgttaattagactatttgattgcccttactgtataccttatcaaatatttagtccacatcttctaaccatttaaaacttaaacggatatcaatatcaatatgcatataccatacacatattcttatcaaaattatcactatgctactttccaacatactttataatagcctaggcaggtaatccaatagcaaataatataaacacttactataccatgagtcgacttgtcctcgcagcaaatgtacatattcaaccagtctttaggacctttgaaaccatcactgctttgataccaatgtgtaacgccctaatctatagggacgccacgtgtgtgattttataaagtagtttaataataatcgaataattaattattaaaaatcgtgataatattaaaaatttgactaaaataaaatctaaaaacgcacattataacgacataaaaagtgtgttccagggatccctgttataaaaggttttgctaaaaaaatatatacgacaaccattt

SEQ ID NO: 337932 - DNA, 614 bp, Cannabis indica
taaaaatataataccaaataatctaaatcatgaaaactcatagatagtaacaaataaagtcaaaactgatttgaacgattttttacactaagaaaagaaacatattttcaaaagtaataaatgcacaaacaaaatcaacttcaaaaatactacacacataatttttatctattttatcaaatatgccaataaagaattttacaatatctcccttcgacatttgatggataaaaataagaataaaaacttacaacacaaatattaaaaataagtgtagagataaataaaccctctgcaagcattcataacttatatcaaacatataaaagaaactaaaacttaactctttctcaaaataagaaggtccagagttaaacaaaacaaataaaactatgttattagtatctactgtcctcttttatgtcttttaaagcagccaaggagccaaaataataaagaaactgttggaatttataccctaaaagccagcaattaatggataatatattagataatattattattgttattatgttttttcatcattgtgtattggaaatctaaataataaaaatacaagaggagaattgaattaatatttctattttatactt

SEQ ID NO: 337933 - DNA, 944 bp, Cannabis indica
ttatcttcttccatgtccagaacataaaatcagctgggaagatgaacttgtcaaccttgactaacacatcctcaatgactcccctaggatgagctagtgatcgatcaaccaattgtagagttactgtagtaggttttgcctcaccaagctgtaatcttctgaaaactgacagaggcatcaagttaatgctggctcccaagtcacacagtgcgtttattccttcaattcttccaatggtgcaaggaatagtgaaactcccaggatctctgagtttgggagggagtttcttttgcagaatggcgctacactcctcattaatgccactgtttcatagtcctccatttttctcttcttagacaatatctccttcatgaacttcacataactaggcatttgttccaaggcttcagcaaaaggaatgttgatgtgtaatcttttaaagacctctagaaattttgagaactgcttgtctagattggtctttcagagtctctacggatagggtatcttcacatgatgatctatactgattggcggagactgttgttgtggtgcaggactatcagtagccttcttctctgttgatgttggagttggtgccgattgatctttaatttcttcatccactggttgtaccatatcaggcccatcatatttctttccacttcgcagggtaattgccttacagttttctttaggattaacttcggttgtactaggcaagtttccctgaggacgagttgctatctgagttgccagttgccccatctaagtttgtaagtctttaatggaagatctagtctctgtcataaattgcaataataaatctgtctgaagaccagaatttctactagagctttgttgctgagtttggtgttggttctgatttctctgttgtaaaacccactattcctttgatttcctccttgattaaactcatagtt

SEQ ID NO: 337934 - DNA, 1185 bp, Cannabis indica
ggcactatttttggccaacaattaagggtgattttcaccacaatatacaaaaatatttttattgtggaaaaataccataataaatataagagtaatttgcggcataaatacctaaattttatgccgagtaatagataaatacctaagtcatatttttggcggtaaaaataccttccgttacacttttggaacttccgtaggtacctctccgttaactgccaaatcagtacctacgtggcagcccctgataggtccatatcatttaatttttatttttttctaacaattttaaaattaaaaaattatttaaaattaaaaaaataattaattaaaaataaacatatattataaaaaatcaaattttttaacgtaaaaaatgattttataattttaagaaaatcataattttataatttttttataacaaaaattataattttaaaaaatcattaaattctaaaaaaaataaaatgaaaccctataattatgcatcctcaccctttctctctccttcaatttcttcttcctctctctcttcaatcgcaagaaccacgtccagatttgattgggccatctttgactattgtcaaagaaaatgaagctcaccatgagcttgagagatccttagaacccctgaccctgccaatctcccttctcttcgtcgacatcaaaggtggacagaaacaacaccagcacagttggacatctctcttcatctacgcatcatgaccttcattgtcttttggtatttatcttctcattttcttaggtacaaatctgactaagatctgaatgctattttgaacccaaaaaatttctctgggtgtttgttcttaggtttctgggttggagtccggtaagggaggaagagatgagtttttgttcttcattttttttcttactttcatgttggaaagagttagggaagatgattgaagatgaatttcatagagttttgcttagaaattttctaggttcaaaaaaggattcaaattgccaatgatttttttttcttcattttgttgagataatggatgaaaaacaaaagagtaatttgcgatcctggtggtgggaatctcgtccataggttgtggtagaatgcctcatcggggtcgggtagaggtgcgccggagatgaaacctgtgagaagagagaggagtaagcgataggttgaagatgaagaag

SEQ ID NO: 337935 - DNA, 1012 bp, Cannabis indica
acatgcccgtagcatgtcctctaaaatttggatcgtcctctcagattgcccatccgtctgaggatgaaatgtcgtgctgaactttaactgagtacccatagctcgatccagactctcccagaatcttgatgtaaacttcggatctctatcaaaaacaatggactttgggacaccatgaagacgaacaatttctctgacatataactcagcatactggttaatggagaaattcgtccgaacaggtaggaagtgcgctgactttataaacctgtccactatgacccacatagagtcaaattgtcccgtggttctaggcaaacctaccacaaagtccatagcaatatcttcccatttccactctggtatattcaatggctacaataactctgcaggcccctgatactcagcctttacttgctaacaaataagacatttaacaacatactcaacaaggtcactcttcatgcctggccactagaacatggctttcaggtcttaatacatctttgttgaccctggatgaactgaataaggagtcgtatgagactcattcataatttctttcttgatacactcatccatgggcacacaaactcgattcccaaatctcagcatttccgtttcatctactgagaaatcactagccttcccagccgaaaccctagcttgagtttttattaattctcaatcttgcacttgtgcttctttaattctctctaaaagagtggattggagagtaatattagccaattgccccacaaccaactcaatcttagctcgagtcatctcatttgctaactgttgggagatttgcttcacagtgttcaactgactctgaccctttctactcaaggcatcaataaccacgttggctttagcagggtgataaaggatctcacaatcataatccttcaccaactctagccaacgtctctgtctcatattcaagtccctctaggtaaagaagtatttcagactcttgtgatcagtgtatatctcacatttctcgcca

SEQ ID NO: 337936 - DNA, 1718 bp, Cannabis indica
aaaaataccccaacctgccttgcttgggggtagaccgtcaggtcgaagaaccaggcgacctcgtggggggaaggagcatcctatcctttggaagcgtagaggacgaagagagcggacaggtacttaatgccctttggagtgatctgggtcgggcagaggccaaagaagtccgccacatccctgaagtacttgtgcaagggcatcagcgccccttgctggccgtgagcccccgaccaggcgcacattcccttatcaggatttgtggtgcaattgtcgtgggcgagaatatagaagtccagctcgcccaggtacccgtcctggtcgagagtttggaggggtgcctccgaaatcttggacggagaacttacccacctggcgccgaaggcaccctgcctcctatgacgaaccgcctcagcaagctcctcactgacgtagtccacgccctcaaccaggacgtccccgtcagcatcaactggctgcccaacctcattgtgctccctgaagtcagggggtccaacctcttcctctccctccgcctcggaagggcttcccgggcgcacctcgtccaactcctcaacctcctggacctcggcgtccccctcacggtcctcctccatcgagacggccgaatcctgttcggcgtcgggcagagtggcaagctgagccacttgaggatcagaagcgtcggctagacgcgtggttttcttcgtatgagccatcatcctatggctgggtacgaggtcagaagaatttccttcactagaaggaggactagcacaaagacgaggatgaaccttgtgcagaagttgaagcaaatcctggttgatctgatgcccgagttcccaagactcacctgggttcatctacaaaagacaacacacaagatgagtgttggacggagtatcaaacaaaaaatgagcaaatatgccgaccaggagtactcaacagattaaagaacgactatgtttaaaggaaattcaaaactcaagaagtcagaaagttttcttgagttagggcaaaaaagttcgtgaagcttggaataagcaagatggaagacagacgctatgcagttcaaaaataagctctacggctgaaagcccacataaagacatggaaaagaagagtcacagaagtttctaatcctagggtttcctaagcattctttctacatcatagttacattcaaagcacaaacatgcaaaggaaagcataaagggaatcagaaacttactcaaagattctaatgtctgagttcaagcaaaccagcaattgtctgtaggcacttcggcaactttcacgccagaaaactctctcttttcgctctggagtttatttaaccacgaagggtgataaaatgagtaatgtgccagtacgatgagtatttataggcaaaagggtaactgtatacaaatgaaccttagacacctcgacttcccgcctcaaaagcgaatataggaaatcaaaagtaatcgagcgcaaccgtcaaccgtggagagagaaatttggattttcaaaatattaattgtcagagcactaattagccaaaaaccgaagggacgcccagtcagcttcacatcgagtctcgaacggtcatgctcgacacgtgtccccatccaaaggtagagccagctcgcaataagtctacacgcaacctcggaggtcccgtacagacttgggggccaaatgttatcccaaatttggcactctgacgtggcatc

SEQ ID NO: 337937 - DNA, 782 bp, Cannabis indica
aaaaaaataaaattataaccagtttcatgaggcattatgtgtcatgaggtatttgttgtggaatttgtttttgtttttttttttcaatttaggttccaatattttaggaactaattttctctttaattataactgattctattttaataaccgctttgtgttattatgtgttatttgtttttattcattatgttataaaaattagttctatttttaaatataatcggtttaaattattgcgcgttacttgttttattcataatgttataggattggttctattttaatttataaccagtttaagttattctgtattatttgtttttatttattatgtaataaaaccgattctatttttatttatatttgagacatttacttctgctgactttttcaatgacttctccaacgacagtgacttttccagcaactttttcagtaaatttcctggcgacaataatttttttggtaccgataacttttccgttgaaatttattattaaaaattttatcaaatttatttattgtatatttttaatttctcatattttaaacattgattattttttaattctatatctttttatgttatttatttatgggatataaaagtaaactccattaatttttcctgaaaaacttaccttaatttttaatatctagagactaaacatgtgtttgagcctctatgcagggacggacccagatagcccccactaataaaaataattgtcttttaaaaattaaatttaattatttttaatttgtataattatagacta

SEQ ID NO: 337938 - DNA, 652 bp, Cannabis indica
ctcagatcgggattggaacttgggactttgacccaacctagacatggacgcaggacgcgaacccacaaccggagcgtgatctgaacctagactgaaattcggacccgaattcaaattcagaccaggactcgaactctgacctgaactaaaacccaaactcgaactcagaatcgcaaatggaactagaactgaactaggactagggccaggacaaggacctaaacccaaaacagaacccagatcataacccagacaaagacctaaacccgaaccgagactaggactcgaacccgaacctagacccggacccaaactcacacaaaccggtacctagacccagaataaggatagggacgtgcgaaatagaactaggactaggaccttgtgcccgacccagacccgtacttgaacctaggacccagctcgtggctcagactgggacccgagattgggatcctgatctggatccagggtttggaaaaaacccgcagtctaattcttgatttgggacccagccgtggaaccgaaccctgacaaggaccctaacccacacctggacctgaaccatgtcccaaacccaatagtggacctgaacccgtaccctgtgaccaaaaattcgaaccaaaaccagaagttgaccgggactcgaact

SEQ ID NO: 337939 - DNA, 601 bp, Cannabis indica
atctttcgagatctaacactattatatttgtctagtggatgacaatcttttggaatttgtcccattaaaaacaacaaattaagtttgaccaacaatgaagactcaaaatttataactacaacaattaataacagaaaacaacatgattcaatataaattaatacacattcagaaattattaaacatttagcacgtaataaagacatgtgaaaatacaaaacaaacacatcttaaataatttccaagatttccaacaaactaatatagtgtccagtttaggcgagagtgaaagatatcattcattgaatagagtagtcagatcatctaaaatggatactattctagcaactttttgttcgatcaagataaaaatccagttgttgtccggtttaggcgtgagtcaaggctattctatcttatgaccttccactattatttcataatttgtaaatttatctctaggtagtcaacgtagcggagagtctaatagagacgaaaacttacaaaatacttatctttctatatctttacggtgtttaatattcaatgtaagagcatctatatgggggacgaagtctagcgtctcgaggtcccattgaaa

SEQ ID NO: 337940 - DNA, 849 bp, Cannabis indica
ttaatatgttttattttggttttttgcaaacatatttactttacttgttattttctaaacttgtgtacggatttaattgaaccaataatttatttctgtttattgatatttatagtgtcaaaatgtacaacccacaccccaattctcatctagaatatgcctttaggaatgaactccaaagtgtgaagatgactcctggtcagagtatcacttcacacttgctcatgatgaacatgaaattctagaaagcagctatgctgagaattgttttatctagagagcaaagagttcattttattctcaatagcttatcacctgagtttaaccaacttgtgattaacaattggaactcgttcgacatagacaagttggacgctgaattgcgtgcttatgaacggacattgtcacttgcatggatgtccttctccagtaatacagataaaggcaaacagaaagctgaagatattgagaatgattcctccgacaatcctactagttcaggctcaattgagaaaaatagagaaagtgattccacttcttcagattatcattcacaacagattgaaccatcaataagaataatccaagaacagtcaagcagacatattattcaatattctaattgtgaacagaaaggacattttaaatcaaattgtcccagacttctcaacactaagaacaatggtaatgctttaaattttgaatcatgtgtttcagagaatgataaattcatttagattgttgattttgggtctactgttaaatgccaaaatattacatattttatatgacaaaaatacaaaaaaaaaaaaattaattttttaataatattttcaagaaattaatgca

SEQ ID NO: 337941 - DNA, 1000 bp, Cannabis indica
tttcctcttagacaccctaccccattccttgttggaaacttcaggcatgaatggaatatcgacgtaacaacctttaagtcatacaaggctggtcggcctaacatgacgttaaaggctgagggaacgcccaatacaagaaattgtgccattatagttatgctcgtcggagcttccccaatagtgaggggtaggaaaatttgccctagaggtgcgactccttggctagagaaaccatatacgggtagaaaacagggggctagatctttgagttggagccccatcttttcatatgttgtcttgaataagatgttggaagaggctccattatctatcatagttctcgccaccatcttgttggctatctagacttccacaaccaacaggtcattgtgcagaaatctgattttgacagcatcctcatcattgaatgttatggtgggctctcctgcccgtgggattttcggcttcctctcttctatggccagtattacttcttcttactcgtgttgtactgtttgggcatacgtctcccaggctttgcctgaatctccagctatgtgcgggcctccaataatgacttgcagatgtccatctactggcggtggcagcaagtcttggttgttaaggtccctctgattttgaccggccttgacatatttctgtacgtgcgagttatttttccttatcatgaattcaatttcccgcttcagattgttgcactcattggtgtcgtggccgtagtctccatgaaattgaaaaaacttggtcacgtctctcttgctgacattttttttcatgggtgtgggcttcttgtacgggctagtgactaagtggccatataaacacttcgaggaaaaagccttccacgagttgaactttccaggtgccaacttgaaataccattgctgggcagcttccgagagggtggcaggaaaaactctgcaacatacatctccttgtactccttgcatatccatttgcatctcaaaatacttgaggt

SEQ ID NO: 337942 - DNA, 824 bp, Cannabis indica
ttggtcactcccgggaggtcttcctccagtgcccctttgggcactattgtcttggtagacgaggaggaggttcttgaggaagctgaagaaggtaaagaacagcaagaggtcaccctcgtgcgcaagcgcaagggcaagatggtggaggaggagccttctaagcgcccccggagggtggacactctggcaccgagccatgactgcaggattccctccgaggtggaggaatatacagtgcctcacggcatagtgttgactccagtccctggtgacgaggagaggtagaatcttcggatagccaaatacaactatgccccaacgagtacagtcggggcatgctgaggtggaggctttgaagagggtcttacgagaggaacaacaaaacactctcaacgaggaggccttccggaatccgtgggacctaaacatggacccgctgacggactggttccatcgtttccttgggcccaccttggctccttttgcctcagagatgaccagcgagtatgtctccaatctaactcaattcccacccaaacgatacgctgcttgtgcctccttgaactccgtctaccaggttcaagacatcagcaacgccatggctgcagtaagtacttgtggtttatttctttcctcgatattttgtctaaggcatttgatctcactctcatctcccttttcagattactccggagaccagccgcctttccaagaccatagtcgatcatggcttcgtcatgtccgaattcgggggcatagacgaggccgtgaggatcctgcgggacctttccgctgaaaggtgggcgtgttgggttttatgccct

SEQ ID NO: 337943 - DNA, 519 bp, Cannabis indica
ccttccgaagcggaggaatacaccgtgccgcacgacattgtgctgaccccagttcccgcggattaggagaggcaaaatctccgagttgccaagcacaactacgccctggacgagtacagtcgggggcacgctgaggtggaggccttaaagaagattctgcgggaggagcagcagaaaactttgcacgaggacgccttccgaaatccatgggacctgaacatggaccctttgacggattggttcaaccgctttgtcaggcccaccatagatcccttcgcctcggagatgaccagccagtttgtctcccacttgactcagtttccagccaagagatatgcggcttgtgcctccttgaactccgtttaccaggttcaagacatcagctctgccttggccgcggtgagtatttgtaatttattcccttctttgatattttgtctaaggcatctgatctcattcttgtttctttttttagattattgccgagaccggctgttggaatttattttaccaggatct

SEQ ID NO: 337944 - DNA, 881 bp, Cannabis indica
ttgcaaaacaactgtgagatgcaactcatgctcttcttctgactcagagtacaccaaaatgtcgtctataaacacaattacacatctatccaagtagtccttgaacacccgattcataagatccatgaatgtcgccggggcattagtgagtccaaaagacatcacaagaaattcatagtgtccataccgagtactgaacgcagtttttgggatatcttcctctcgaattctcagctgatgatagcctgagcgaggatcgatcttgggaaagaccatcttccccttcaattgatcaaatagattatcaattcgaggtaaaggatatttgttcttaatggtaagcttgttcaactaccgataatcaatacacattcgcagggttccatctttcttcttcacaaacaacaccggagcacccccaaggtgagtagctcggtctgatgaatcccagattcagtaactcttgcaattgtatctttcattcttttaattcaactggagccattcgatatggtgccttaaatactggatccactcccgaaacaaattcaataacaaattcagtttcccgggtaggtaacaatccctgcaaagacatcgaggaactcgcataccaatctcatattttcaggccccgatgtcacaagttggctggtgtccactgcagtaactatgaaccccagacaacctttgcccatcaggtccttagctttcaatagtgttattcttggtaggcgtatcctttgaatcttacccacgaacaccgctgggttggcactattgggctcaaacaccaccatattccgcttacagtcgatattcactccatattaagacaggaaatccattcccgggattatatcaaagtcagatagttgtaa

SEQ ID NO: 337945 - DNA, 507 bp, Cannabis indica
caataagcattcaacatacataaattcagaactataaaaatcataatcaacaacaagtaccataaaccattaaaaagagaaacatagttccaaagttgagaaacaggaaaaaaaaaaactaaaaccaactaatacgaaatacgaatgaaactcaataacagacctaaaacaaactaggaaataatatttatcaaagcacaggaaccatacctaaaagcaataaaatctaaaatatggcaaaactcaataaaatgcaatacaaacctcaaacattaaatgaggagcttgattcttcccctttttacaaacaacaataggactctccttgattttctctcctttaattattttagatttcttcttggaaggaactcaacaaaatcgtcatctaactttcttcttcctttcccttttttggaaatagatttcaaccccatttttgaaatttgagggtgtgtaactgtaacttttttcataaagggagatggtgtaatgaccgctctagta

SEQ ID NO: 337946 - DNA, 874 bp, Cannabis indica
aggcctggtcctcgctcaaaatagtaatcagctaccaagaagaatacttgggaatcttgtaatcacaagtatattccttatcagcaagaaggcccactgatcgcaggttggcctcactcaaaaggaaattgcatgaccgaagaccgtagggaagagttatcagtcgcctatgcctactaaccatctcgagggtaggagtaggcctcgtcatgagagctgtcaaaataaataaaacatcagtcataaacctgaaaaacaaagattgatgtaaatgagcaagaagagaacaatcacttacgaagtttacaaaacatggttgtgtcgatgggggaaagaccagacgtctagaagaacttcttcttgaaggatactttatttggcaagtctacaataattttaggctcgctagaatgagtaccgagatagaaaaagtcccctacggcgttcttccttgacggaatggccttaactgagtaaagatactcaatctctactggtgtgtgacacccccagttcagaattttgtataagactttcaaactagcgagaatcctataagagatgggagtcaactagaatggggcaactccaatgtgatttatataatctttgaagtagtcccggagaggaagcgtggcccctgcactaatatgttcaaggctccagacgcccatactagtcgaactactggtactagtctcactgctggtccccgggttactgctggcaatacgcgcagggggtgactgttggaaatattttacactcaagggatttcgaaatatagagaagaaaagagagagagggagtggcggcttcagagtgtttgagtgaaagaaaataatgcagtaatgtgtgtgtgaaacctgaagcc

SEQ ID NO: 337947 - DNA, 538 bp, Cannabis indica
ttctggttggaaactatagaattttagggttccatgatactatttgaataagtgtacaaagtcaatatagtatttcttatcagttaaagcggattactgtgctaatctatttgacaaaaaactagatcaactctgtcatgcttcaaaagtaattatctcagattgagatttaaagtgtacatttaaaggctgagagagtcagtgacaagcatatgtgatagattttgaggtttcttgaagtaaacatcattcactgaatgagtctttatataataacagttattagagtactgtgaatgtggcactgatgcgatttaaagtttcaagttcgcacgttgctttatataaaggatgaaaaagctatactgatctaaagtatagaggcattaaatttcaagtggggaattttatctttcttcaggttgttccaatgaggggaattcagaaattgggaagaaaggaaagttaagtctcaggttaaccggtccgtcgaatttctggaaagggtaggtcgggtagcttattagctaaacatact

SEQ ID NO: 337948 - DNA, 550 bp, Cannabis indica
taatgtaagcccaaataaaaagtctaacatgtaattcaatgttgataaaaatctccaaatattatcatgtgaatgtaatttatttatattgttgttaggttatatatatcttctaaggggtatatatgtaatttaatgataaaaagcctaaaatattgtgacttttatttaagttatagatatatatataataatattataaaattaataaacaatattctgttaaagttaacgtagaaacctaaaaacatcgttaaaccaataattctattacatagccacactttatatacaatagatatataaaattttgatttgattgatgttgtcactttgtgacaagtttttttttatttatttttttttacttaaaattaatgatgataaagatgagacccattacgtattctcatttcattttttcatcatatttcttattctttctctctcatcatcatcttcttctttttcataggtttcttttttttgttgtttccaaaattcatacacttattatcattttttctcactattctctctctctctctct

SEQ ID NO: 337949 - DNA, 649 bp, Cannabis indica
caccgggtttttcacacaaccgcgacattcacaacatgctcaaaattctcaaccgagttctttggagagtctaatgcaggattatatggccaaaaatgatgcggtgatacaaagtcaagctgcctctcttcgaaacttagagttgcaacttggacatttggccaatgaattaaaagctaggccgcaaggttctttgcctagtgacacggaaaatccaaggagggatgggaaggaacaatgcaaatccattcacttgaggagtggcaagaatttgaaaaattctgaggaggaaataaagggtagtggggagcccacttcaatccaaatcgacgaaaaaattgagtaaaaaaactgcccaggaatttgctgataccagcctagttgatacagcaaagggtcagcaacctgacagtcagcaatccgcaccagtatgttctagtcctaaaccaccccttccatttcctcaaagatttcggaaacagcagcaagatgggcaattcaagaagtttttagatgtgttgaaacaactccatatcaatattcccttggtagaagcgctagagcagatgtcgaattatgtcaagttcataaaagatattttgacaaagaaaaggaggttaagggagtttgaaactgtagctctcaccga

SEQ ID NO: 337950 - DNA, 505 bp, Cannabis indica
gaccgttttactaaaagttgttctgggacgaacgcccaggttgacatccagcgcccacgttgacatccagcgcccacgttaatatatgacgttaacctagatgctaggtgagtgggaaaacatgctagtggatgtatcttttgatttataagtgataacatcattaacctagtttttgtgttttagtgaagttgttcaccagttcttggagatattgctattttgcaaaatcaggagactcagaactgcctgatttgcaagagagtcactttgccgaaaaagtgaaaatatgaagttctgaatttgacttgtctgacttcatagctcttagttactatgaaaaaaaatgacaaatgctcgagacagaatcagaattggataagtaaaacccaacccactaggtcacctgtcaacttgggcgctaggtgctctttctggagctttcgggaagctgttttgacactttcaaggttctttgaatgggggacgaggtctcccaccccgt

SEQ ID NO: 337951 - DNA, 473 bp, Cannabis indica
atttttatacactttaactttttattaaaattctcttaaagataaaagaaattttactaaaaaaaaataaattaagtgtacataaaaattaaaatataaaagaattttaccgtaaattgctctttatacctattatctcataaatatattaatctagtttatatatttagtgatttataaaacaccataatatatactagcgtgtatgcatgtatgattttcaacactacttgtagctagtttaatgatatagaaattgattagtagtgtaatgcaatactaatatacttaagtcatcgttcttaaatttttaaaataaaattacaattgtaatgagataatatttatttataaaatttaataaaaaaaatactaataacacaaaaaccttaactttactcatcaaatagctttatatttcactaaagttatttacacttctatttcaatttagaatttatatatatatatat

SEQ ID NO: 337952 - DNA, 1519 bp, Cannabis indica
gttcctatttctgagtttgggttacagatcgagactggaatggggttctaggtcccgacccttgttttgtgtccctagtcttgttccatgttttggtctgagttctggttcgggttcgggtcctgagttcaagtttgggttaggatccgggtctagctgccaattcttctctatgtctgatttggagcccgggtcctagtccggttacggttctggatctatgtccaatttcagttatgattcaaagtccatgtcctagttccagtcccaatcaaattccgattttggatccaattttgggtcacagggtacgggttcgtgtcattttttgggtttaggtcctagtcctggtcctagtcctttttcggttctagttccatttgcgattctgagtttgagttcaggtcagagtttgagtcctggtctgagtttgggttcgggtccagattttagtctaggtccggatcaggctctgagtgtgggttcgcgtcctgggacttggtctaggttggatgcgagtcccaagttccaatcgcgatatgagtctggatttagttctgggtctacgtccttaattctgatcctagtctgggtttgagtttgggtccgggtgcgggtctagctttgggtctgattttgggtgtgggtttgagttcgggtccgagtttgtgtccgggtttgtgtccaggtctagaccctcatcaaggtctaggttctggtccaggtccaagttggggtcccgagtgcgggtccaagtttgggcctgggtcaggatctcgatccagatctaggtccagcatttcgatccgagtcagggtcttggtccgagtccaggttcgtatccggatctctatctaggtccaagtctgtgtttgagatcgggtcccagatgttggtccaggtccaggtcttagttccggtctggctacacgaccgtttctgggcaaaagttgaagtctctgtttaggtctgaggctaggtctgtgtttggttctaggtctggatccgggtcctagtcacggtcctagtctttttatggggtccttgttcgacgattcttgtttagtttctaattttgggtcccaggtctaggtgtgggttcgggttttgttcttcgtctgggttcttgtcctttgtctaagtcccagatgtagacaacgactactagtctgttccaggccccattacccaaatcccgagtcaagttttggatcactgtctagggtctcagtctggttctggttcaggtcccaagtcccatttctatttttgggtttgggatcgagagtgaggtgcggttctaggtcccgaccctagttctgtgtccctagtatggttccatgtttgggtctcagttcaagttcgggttcgggtctcgagtccaggttttggttgggatccaggtccggctcccaattcgggtctaggtgtgactttgagtctgggtccaggtccggttacggttatggatctaggtccaatttaagttatgattccaagtccaagtcctagttccagt

SEQ ID NO: 337953 - DNA, 770 bp, Cannabis indica
tgattagcaacgagctgcacaacatgtttaaaaatcacgtaatacgcctatgttagttagggtgttacagatattattgtcaattgtatagtcatacaaacgttctagactcagtacgtgtgggacgcgggatacggttatgattgggtgtatgggcacctagttataatccagtttatgttatgatatgattaagattttcttactgagtcagttgactcacagttactgttttcatgtataggtaagggcaaagctaaggctgaacaatagtgaggttgagcacatatcgggggtggttagacttggagtgtttgaacttcgggacagcgaaatgtattttgattagtcgctagtcgacaagttttgtaattaatatgttgtattttggttgtaacttttgaaatataggatcccaacttttgtaaagtttattttattttaattaaatctctctctctctctctctctatatatatataaatatatatatatatattaacatgtaaaattttcctagcacaacaaaggaaatatgttaatacatatattactattatttaaaatagtaaaatataaaatcaataaccaccatgctcatccatggatgattttcacataaatctcttacccttgtattcttaaaatcttgatttatcttctcttcctttgaaaaaagataagcttttgattgtaagagattttattacaatagaaaaaaaaatcaagacattacaactctattgcaatataatacaaggaccaacaaa

SEQ ID NO: 337954 - DNA, 871 bp, Cannabis indica
atgattctctcggggagtctgtcaaaatttatcagtaaactttcctttcttcccgtttccttgcttgtggttgtcgcttgaacgcttgccacttgagcttgaattattggaatagttgggaagttgggtcgatgtcccagtggaaggagccttcgacttgcccggcttttgttcaccttctgctcgttgaatggcttcttcgagcttgatgaagccttcggctcggtcaaggaaatcactcattgagtctaccggcccgttcttccttatatctttccaaagttcaccaaggacttcaatgcccctcagtatcgcagataactttccatcctcggctacccgcgaaactttagttgcttccgtcatgaatctactgatgtatgcccggagtagctcacctggtcgttgctttacttcgaccaaatctcccaaaggcaatgggagctggcgcaaggaggagaattgcgcatggaattccgaagagaaggttttccatgaactaaactttctaggagccaacttgaaataccattgttgtgcggcttccgacagagtggcggggaagattctgcagcatacgtccaccggtactccttgtaaatccatttgcatctcaaagtacttttagatgggaaagaggatcttctctcccagtatacatcttccacgttggcattttgaacttgtgaggcagtgccaggagattgatctctggtgagaagggagttcctcgtgctcggtctaactcaagatcattattacgctgtccagccatgccatgaaacatatttttcaattcatcaagctaggcctgtacggttcggctgacctgctcggcattttggtctatttggattacatcagcatcttt

SEQ ID NO: 337955 - DNA, 785 bp, Cannabis indica
tatttagtcccacgatttatcaagggactggatttaccctaacgtgatatcagcgatgtgatttactaacacttttataagtagaatatttccagggcattagcaaagaaaactagtacagatgtatcgactatacattggactagatcgatattgatagtggaaaagatatctaacttacagttatgtcttttctaagtcaatgtcacttagttgatcttaggccaattgatctcaatcttgagatgattaagttctagcttaattgtattatacatgttcttttatttattcgttacaactaaccaataggatcgcccaatacttgcatcttgggaattcggtagttcaattaagtaggagtgttaatcataaatatggaatccatagcttctataacttctagaagtgaaacgatggtttccatagagcttggcttagtgtgataaattatggagtgcttatttcaataactatattagtttgctaaaatattatttacaagtaggtaagtattttaaggataaaatacatcgaagggtaaaatggtaaatatgtccctactcaatgcaaaccgtctatagaggatcattgattgtttagattgtaacaatggataattcatactgtatatttggtagatagagcattttatgtaatcaagagggtaattctaaatctatactggagtcaggaggaattaataagctaggaaatttacatggtaaattttggatccacttattaggagcttggttacataggcccatggtcctcgcactaac

SEQ ID NO: 337956 - DNA, 701 bp, Cannabis indica
taaatttgaaagtttagaaatgatactgtcttaggtgaacagtgttccaactgttgcttatatcacatccatctcatgcttggagtttgtaggctccttgtccgactatccttgagatcttgtaaggtccttcccatgttggacctaattttctagctcctgcttctctcgtattttggacaactttccttagaaccaaatctccaacattgtactgacaaactctgatgttcttgttaaaatgttgctctactttatgttgatacgctgcgacccttatcaatggttgttctctatgttcatataatgtatcaagcgtgtgaaccatattttgccagtttttagcatctgttgtgtgttcaaatcttgtggttgggagccctacctccgcgggaatgactgcttctgttccataagttaaggagaaaggtggttccccgatggaagtctttgccatcgtcctatatgcccataacacccttgggagtttgtttgctcatattcctttggccttgtctagtcttttctttaaagatgccaccactgtcttgtttgttgattcgattgcagatacctaggtgttgagagtgagagttgtattccccattcattacaaaagttttgaaagtctaggcgtatgaattgtgagcacttgtcagtcactatttcttttggcacaccgaatctgcatatgacgttct

SEQ ID NO: 337957 - DNA, 523 bp, Cannabis indica
caaacttaaacaaatagtgcttatcgctttcccctgtaactcatcctaattttcaatagtcatactctcaagcttctttctttgtagtgcctttaggagcccttgttgtaccaacacatctttcaccatgctctgtcataaattgaaattattcttcccattaaaaagctcgatctcaaattttttggaagacaccatctttgacattgttggtgtagatctaaacctcggctctgataccactttttgggaaaaataataaatttcaagcacaacgaaataacaaagaaacgaatcaaaataatttaagtttggtgaaatgttaggctatttttagcctatgttttggatccaatttatgtgcatttttagctgtgttgggacggaattacgcttgttttctatgttttcaggttctttggagtaaaagaggtctcgggtgcagaaattcattaaaagacgtgctgagccgaagaaaaacttaatttttgagttttttgcatatctggccgcggcgatgaag

SEQ ID NO: 337958 - DNA, 782 bp, Cannabis indica
attgtattagcatgttgtgtacttcacaactttattcgcaagtggaattgggatgatgaatttttcgaagaggacatggaaaatgaaataggaaatattgaaagtttgaacaatattgattttgattcagattcagatgaagaacttggtgacgagccaacagatgatgacaagcaatatatgtttaattttagagatagaatgactcaaaatatatggaacgtaagagcaattagatagtcttaaaaaataaactttattttaaatttttgctagtttattttatgaagagattattatttatttatatattattaattgatgaaatttatttttaaatattataatattaatttactgtgtaattactaactgtcttgccaaacatgatattaggaattcacatgtaattaccagtacttgacatccaaacacaacatgtattttaaaatacaatgtaattattatacagtgtaattactacggaaatttcattaataatacataataaaactctcaatattaaaatttatatcttctactaatttgtataaaataatgccattattttcctaaattacccaaaatacctttttgtttaattttccctcccttactgtctctctcttcctcttctctctctccaccacaccaagaacccaactagtgtgatagaactaccgatagaccatgattcccccaaacggctacaaatccactcaaaggcctaaatctctctcatccccttcctcaatctcgcatccgtttctctctctctctct

SEQ ID NO: 337959 - DNA, 797 bp, Cannabis indica
aatcccttagcattatttatttatgccataaaaaagtaaactcttacaattttcccatatattgtgtaatttctactttaatatactaaataaataaattttcttattttatgataaaataataataaacaaataagaaagagaagatgtaaaggatgctatagtatgacattctttttcattctaatggtaacatcaattaaaaaaatgttttttttttcagttttaacccaaaaagtaacaatttacaaaaatacttctagttggccaaataaacaagtatacaacccaaataaaaaaaaaatacacaaataccacttacacacaccttcaatctaggatccatgcttcctcggcaaccatcgcgcaaccatgcgataacccaacgcaaccgaaacaaaaattcaaccaaaaagagagccatcattaatttcggcgacttcacctgagaaaacgatcagaatcaatcaaaacatgggctatttcaaattcatgaaaaaattgtagaaatacttttaatttgcataaaactaatgtcttgacttgaatttttagatccatgaaatgcagatctcaaaaagttgaattggagttcccaaacaatccaactcaagtataatctaaaaaaaattacatcaatactatactaaaatgtttattctggtatatttttgttgtttttcaaatttttaatggtgaatttgttcatattaaattatgaagagacatgtctagatagagttacgtacgtggaaatactgttttgtttttaatgttttcataacagttgcattaca

SEQ ID NO: 337960 - DNA, 672 bp, Cannabis indica
gccggccctgatgtcgatgcatgtgaagtgatgatgtcaagtattatcctacgtggttagttatgaacttctttaatataatgtttcttttattgaatctttaatataatgttttaatgttaatttacaagattttttgggttttgaatatttcaaacggtagtttattaggtatgcataatgaattgcttgtattaaatgatattgtattatattatattatattaagttatatattatatttttattatataatattatgttaaatattaatttatattaaaatattatatatttatgtatcataaaaattaatattatatgtaattttatataaattaatataatttaaattataataatataccatacaaatagagtgtactaaataaatatgggaaatttgaatttccatgcctaataaatttttccctaaatgtaaagttagtaaaattggtgatatatgacaacatttctaaatttcttaaactacccctctcatttgaaaccctctatcttcctctctcttcgtctctctcagcccaatcccagccgcaacataaactctcaaagcaaccagcaaccgaccgaggcaccccgtcccaccgtgctcctttgacgctcaaccccgacccacccacgccgtcgactccaactccgaccaagcagaac

SEQ ID NO: 337961 - DNA, 710 bp, Cannabis indica
agaaggctcacatcagcagcagcagcagcggagagtatgtattgcaagcaggcggcgtgccaacagttagcagtaaatggaagagtttctttactttcgaggaaacgccgactgtcttgagctgtgatacaactccaccgtctgtgtacctactcaacatggttgtgggggtggttttgttccttgtttttgttagggaactggtgttatttggaagctgttgataaaattcagtacaaattaaaactgtagttcttctttttgcttgctgttgtctaagttttcctctttacttggggtataaggaataatggaggttgtacttgatatagaactatgaaatttcaacagaatcgaccataatcaatagtttttaactggggttttgtatatactatttggttcatgaactttaatgtttactctgtataaccatatatttctctagttggctatagtcattgacatttttattgttaagtatatgtataccattttttacctttataagaaggtaaaatatggtatactaaacagcactggataaaatattgtttatattgaatccaaaagttatatcttaaattgttcttcagttctatatgattttgtttatgttttaagtgttattggcggtgaaatatatttgattctatacattttaatttttttttagcaaaattcttcttatatttatttatttttttttt

SEQ ID NO: 337962 - DNA, 879 bp, Cannabis indica
aaaaaaatcccatgaaaatcgcatttggtggatggctgcccagtaggctacacgtgtagccacgagaggctgcaaacagcctaggacgcgcgctcatgagggaaactgcatggtgatatgggtcgcattcctcggcaggcgcagcatcaggacacaggcggatgcagggtgcatcctgtctgaagctgtgcgtgcgtgcgcttcagacaagcatctgcctgatgcttccccgcgcacgtgtgcccgtcttgtccgagtgactggtgcactcgatgcacccactcgacaaccatggcatccaatcttccaaaattcacaacttcctcaatttttatcggaattgagttccgtaaaaactaaaattgcttaatttttcacaaggaatccaaataaaatattttcagagcgaaaataaaaatattttcatggaaaaatttcgtaaaacacatacattcatcatataagcacataaaccatcatgaaaccatccaaatcaataaacacatcgttttaattcatatttcatgaaagtaaatcattaccatggctctgaggccagttgttggagttattttactaggatctagatttagtaccaaatatgttgtttaacatcctaatatgaatttctaaaacaatgaaataaacacataaaagttataagaaaccttacagtgggtgcagcggaattaaatgactccttccgttcagatctctagcccttgattccactctgtagcagagcattatcaagatctgaacctggatctcttcctcttcttccttgaatttggattattcacagtcttacatactatgattgatgaccaacttgatgtgtgtgggcacttactcaatcactaatggctgaatattatt

SEQ ID NO: 337963 - DNA, 1157 bp, Cannabis indica
aatttataacattatatataatcaatgaaaataaatcaaagtgaaccatgcaacataaaatgttattctgatctttataactagtaaatctgattatattgaaatgggtttattagggcacaaaccaaaaacctcaaaccaaaggcatgactttataacaataaagtcccgtgttcattacgaaacttgtaagctcttgactagggacatgcattttgatctggttctatccagaatatgcatccatgaatgtcattagctcgtgtccagcagctgcatccaccaactggtcgatacttggtagtgaaaagagatccttttgacatgctttatttaaattgaaaagtcaatacaagttctccaagttccatttgattttgggacaaggacaggattagatatctacgaggggtagaatgcctcgtgtatgaagtcgttagtcagtaacttctccgcttcttctttgagtgccccttgtctttcagaatctagggcttgtcttttttgtctctttgctgggtaatttgggtcgatattcaagtggtggcaaataactttacggtcaattcctatcatatctgaatggctccaggcgaactgatcctggtttgccttcagaaaacttattagctgctattttagtttttcatccagttttttcccaatgaatacacactttgtgggattttctagatctaaaataactttcttcaattcctttattggtttcaactgattcttttcatcttgaattcgaggatctagatcctcatcccgcttctcgccttcctccgttatgattgccattaactggtggccagcctttttattttgttagctctatgcgatagcattcacaagccaatagttggtcacctcgcactacacctacacccaattggtgtctgaaacttcaaagataggtgtttaattgaactaactgttggaatatgttttacaaggatctatatttacaaccatgtacgttatttagcatcctaaatatgaatttctaaaacaaagaaaataaacacatataaagtttcagaaaaccttacattgagtgcagcggaataataatggctccttccgctcaaatctctaacccttgtatcctgtctgtcgcggagtatcaccaagatctgagcccgaatgtc

SEQ ID NO: 337964 - DNA, 987 bp, Cannabis indica
tattttctttctctaaattataatattacataatactaatatttcataataaataataatatattaatattattaataaaagtttatttataatagttatcttattattttttagctattaagaaatataagtcaaatcacaaatacttctacttactctaatatttacactattaacttattataatatttccatcaaactcacttatccttcgatcgagtccataaggtcaccaaacctgaaaatatttttattccaccaatcactcatattatattcactatatcaatctatataattagtaaattacgcttatttattcacttataacaaaattaaaatttatattgaaatagattaataggatcataatctcacttattacatgattagcccataaatatatatatataaaccctaattatttaccattggacttattgtgatattacattacattagtggcagcggaatataatgtctcattccattcagatttctaacccataatcctttctgtcacaaagtatgatcaagatctgaacttggatctttttcagttgtcggtattctacacaatcttttacaaaggtctgagtactgacttgaattgtgtgggaactttctcaattcactatagggtttcaaaaataataaaggaagaagaagaggatgatttcgaaaatagactagaggctctttctttattttctaagttgtctgacaatgaagtctgataattgattaagaaaataagagcatcttattctatttctaggatatctcctaaggttaggttaagaattaaatgaaattaaaaaatattaaataatgactttaaaaaatatgaaattaaaaacccttgttggccgaaccctaaccctacacggtttcaattttttcattttatttaaaaatatcttttatttcacaaatatcatattttaattctaactctataaatgttaaatctatctatttaataa

SEQ ID NO: 337965 - DNA, 603 bp, Cannabis indica
gtaattttttttgatttttagaactcaattacaattgtacaacatagttccatagttgtttttaaatctgtacagttttttatatatcgaaaagtgtttcaatttttaaaatttttacttacatgtcgctacaacatcgttaatatgtcgtttaatgtcgaaaaaatttagtttctgagtgtttggtttcatgtcgctaaagcaccgcgaagatgtcgttaaatgtcgatagaaaaattatgttttgactcttcagttgatgtcgttaacatattgcaaatatgtcgcataatattgatacaaaagatgtttccacattaaatggtaattaatgtgtgacatttattatctcgcctaaccaattacttcactatgtggataacatgtcgcccggtgtcgcgacatgtcgcgaaaattgcccagattgctttgtgcatgacaaacatgtgtacaattgtgtaattcaatttttacatttattatcccaccttcccaactactagttttgtctataaaagtaattttctatctcataagttactatatttttctttaattttttacccctacaagataattctcttagcaatgtctactagaagg

SEQ ID NO: 337966 - DNA, 716 bp, Cannabis indica
gatctctatgtctagtaaaaccaaacatgtataacattctctgaatttctctatctgtcatacccgaacaatacaaggctgacttttccttgttagtgttcaaaccagatgtaagagaaaatagcttgagaccttgcatcatgaagtaaatactcttgaaatcacctttacaaaataatagaatatcatccgcaaagctgagatgattaagtctcatttcagaacacctctcatgaaatgcaaactcctcctttttccccactttaatcaagattagatatttcatacctaaaacaaacaataagggggacatgggatctacttgtctcaaacctcttttagcctcaaaaaagccatgaagagatccattaaatctctttgattgattgtagaatgctttgcaatgatgtggcaccaataggtggtacaattaaaagaatgaaacatgatgtgactaaaaataataaaatcgtgattaattataaattattattgagtaaaatatttatggctaaaggtattagtcacaaaatttataatttattgtgattaaatgtaatttgaatcacaatacttattatgactaaaattaaattagtaatacattgtatataaatattatattttaatcgcgagcacttttttattataactaaaaatcacatttaattataaaaaaatttatattatgagtaaaagattattactaaaagtag

SEQ ID NO: 337967 - DNA, 768 bp, Cannabis indica
gattttgtaaatctgtccactatgaaccatactgaatcatacattcctgtggttctaggcaaaccagttacaaaatccattgcaatatcatcccacttccactcaggaagggccaaaggttgcaacaaccttgccggcctttgatgtttagctttgatttgttggcaggttaagcacttggacacaaagtctaccacatctcttttcatcccatgccaccggaagtaggattttaaatcctgatacatttgggtggttcccggatgtagtgaataaggtgtggtgtgagcttcatcaaggatctcttttttaagctcgtcaacactaggaatacaaattcgtgctttatacaacaacattccattattcgagattgaaaagtctttaggccgactagccatcacctcatctcaaaccttgattagctgaggatctcctagttgtgattttttgattctctctaatagatcagattgaagtgtcaagttatgcaactttccaaccacaaactcaatccttgcactaacaatctcagaagctagtggaggagctattaaaattgtggtgcaaacctgcacgggacctcttctacttagtgcgtcagccataacattggctttcccggggtgatacagaatctcacaatcatagtctttagcaagttctagccaccttctctacctcatgtttaagtctttctgggtgaaaaagtacttgagactttgattgttgggttttatgccctaaataaaactctgtttcaatgta

SEQ ID NO: 337968 - DNA, 591 bp, Cannabis indica
tgaccagtgaaccgagtataggctggtactgtaacacatcggtacgggctagagtatgactagcagctggagtatgaccagtgtaccgagtataggctgttacttttcaatagtaccgtcttatgaacgtttaggactaagtatcgtgtgtgacacggctgttagggttatggtcaggcgtatgggcgtctgatcataactcaagatttatgtatgatatttgattatccttttcttactgagtctgtcgactcacaatgctatgtttatgtgtaggtaagggcaagggtaaggctgaagaaccgtgagagcgagttggtgaagcttgtacatgtcggggcagttggagcgtacgatcttcgggacagcaaggctatgtttgtaattagtcgctaggggacaagtattttgtatagtcagtgaacttttgtaaaatgttttgtaatcgggatcccgaatatttttgtataaatattttataagtttaattaaaaagcaaaaattttaattaatcacgatttccaaaaacctcgttgattagcaaagagctgcacagtatgtttaaaaatcacgtaatacgcctatgctagt

SEQ ID NO: 337969 - DNA, 330 bp, Cannabis indica
agatcctgataaaataattccaatagttttgtcattagaattacattttagtatttttagtatagcagggcaatatagttagacattggaaatgtcgggaatagtcgagattttagaattgaccaaattacccctaggtagttctaagactttttggttaaagtaggggcaaaatggtcttttgccctaattggagttttatcttctaatgacctatagttagtggaataatctgagttttttttgattaattagaataaaataataatggtttttattcatatttattttaagaaagaaaaatcaagaaaaagcttctctctctctctc

SEQ ID NO: 337970 - DNA, 1022 bp, Cannabis indica
gcaaaccattaagtcattctccttagcaaaggatgagagggcaagccgatgatgaactcgagaaagaccgtctacacgtagctcggagaaagagcgactacacatagcttgagaaagaccggctacacgtagagagccttgatctctgcacagacctcattcccctcatcatcagaggatcccatttcctgaagccgagatctatttcccagcctcagggaatttctcaacactggagagaggctgacacaaagatctcctggcacaggttggggtcttgggttggctggattctctgatagaaaccacgcaaacttccttcccagattcacctgaaaccatgccaatcttcctctggaatccttcatcaacctgaagaggatctttgagatcgcccacaagacctataccctctgggatcacttgtgaggattggccatggcaagctacggggttcccctagtttggattggtcggaagctcctcagccctagaatccatcgtttccggctccggttgaggcttgaagtctgtaggaacaaatggaaaatggttggtgcatatgggtattatgagtctggaaggataaacttctgaactcagagggtcattgcaagctaaggtatgtgttacttttctcctgtgcctcgctactcacctttagcgatatatggtttctcaatacactaagtgtcagtttgtgcattgattcctcgcctaagaccttacagttagtgggttacaaatatactctgatacttgcataattaatgagttattccataaaaagatattgcaccgattcacattccttttaccttaacacgtgtcctccaactaaatttcgggtataacaacaacatctacagttgagattattttttatttattttagtttttttaattttttagaaaggaaaaattaaatataaataaacacaaatttaaagttttttatgacatttctcatgaaattttaccatatttgtaagttttttgtaaaaaatgtcatatttagtgta

SEQ ID NO: 337971 - DNA, 854 bp, Cannabis indica
agaagccccttaagtgttggctttgttaaggcccacatagggcggcttcttgcccccaccagtccaagttgagtgctataaaggcatccattgctcaagagaagcaaggatgtggggaagataatgaagatgaagactgcgcacacatgagcaccgttcgattgatggctgctcttagaagcatggcatgggaggaaagaaagcccttggaaatggatcgatgtttgtggaggccactttaaatggtaagcaggataagagcgtgttgattgacattggcgcaacacacaacttcattttcaaaatcgaagccaagagggtgtgcctaaaattggagaaagatgcgggctgcatgaaagcagtcaattcaaaggccatggacacaattggagtggccaggaaagtgaatgtcaagatcaacagatgggaggggtaacttgaccttgtagccgttcgcatggatgactttgacgtggtattgggaatggagtttctagcagagaagggggccattccaattccagcaacagggaatctactgatcatgagtgagaatccttcaatggttcccgctaaagtgagacaacccccagaagtcaagctactatgagccctgcaactaaagaggggcctgaagaagaagaagaggccaacatttgtcattcctcccgccgtgtacgatgcaaaagtggaggagtccactccacctgtaattgagcaggtgttagatgaattcaaagatgtgatgccggaagaactcccaaaagactgcctcctaagaggggatttaatcaccaaatagagcttatgcggggtgcaaagtgttgggttttatgccctaaataaaactcttt

SEQ ID NO: 337972 - DNA, 1044 bp, Cannabis indica
ataaaattacttatatagatttgattcgttacattatgctgatatgtaacgcttgttatccaatatatttgttttgatttaaccttctacggtaaaatttacaattttttttgtacgaactccaaataagatgattcaaagatttaaaaaacttaaaaagtaatctaaaacttctatttctatttgtgctttctacattctgatgagaacacgtaaaccatgtgagaatttacatagtcactagtttgatgtgtgtgtgaaggaatggaacaagagttcaatttattgtttcatgaaaacaaaatgtaatacaaaagcaaatatataatattagattattagattatttctagtggaaaaagtaaaaaattgtgttttatttggaaaaataaataattataatatatttgtattaatttttagtattatactttaatacaaaattgtgaaagagatatttgtagaaaaaccctcttaacatttgtaattgttacacatataaccctaataaaaaaaaagtggcgacaaaagtactttattttatgattttgttgcagtcgtactattttatggctgttaagtgccaattaaactcgttaagtgccagttctatttaatatgtggtctaataatatgtcgccacacgtttctaggttgacacttaacggccaaaaaaagtacaactgcaataaaatcgtaagataagatacttttgccgtcactttttttttattagtgtcatatgcgtaacaattgtaaatattaagagagtttcgctgcaaatatcctattgtaaaactatatacgagatttaatatttaattaaaaaatataataataataataataattttaatataaaaaaatctattatttaatgctagaattaaatataattataaaataataaatttattataatacaaattttgcatcataattagagacggttaatgtacgggggatgcaattcccgcctccatctccgctacctatttataccactatccctgccccatccccatctaataaccaacggattcg

SEQ ID NO: 337973 - DNA, 627 bp, Cannabis indica
actaagcgggctttacagaaccaatttgccatgacgtatagatatgaaactatactccgcgtagaactcaaattgccatcctacagaagattcatatagccaagaggctaatcatgtactcctcacagagtcagttgatgaagttgaagaaaagcgaactgcggcaaacttgaaactaatagcccatcagcaaaagataggtcggtattttaacaaacaagtgaaagcatggaaattatttgtgggagaaatggtcctaagaagagtatttttgaacaccaaagacagtatggcaggtgtgctcggagcaaactaggaaggaccatatcaggttgttaaagttctagcatcgggggcgtaaaaattgggtaagtatgatgaaaagatgcaactcgttctagtaccaaggtattggaacggggaacatttaagaaaacactaccagtaaaagtaccaggtcggatgaccatatcaactacgaaataaaagaacatttgctcttaagtgaatggccttctgggcggaccattgttggaaattattttaccaggatcttagatctactcacaagtatgtttataaacatcctagataagaactttctcaaacgataaattaaacacatat

SEQ ID NO: 337974 - DNA, 877 bp, Cannabis indica
aattgtgctggcaaaaaggtcaatattttaccagcgcacatttggagtggctaaaatctaatttttaccagcggttttacgcgctgggaaaattcatttttgccagcgcttttcattttgtgctggcaaaaattataataccgatgttcatttgccaaccctttttgccaacacatcattagtttttattttaccagcgcaatacaaacttttgtgctggtaaaagtgacatttcatgtagtgctcggcaataaaaccagaacaagattttgcacacgagactccaacttcttggggatggggtagaattgggttcaacaataaaacctaagggttgtcaggatcgaaggtgactttgtgcatttttgcgcaatcctttttcctttatcttgggttttaggctcaaagatctcaatagtaggagcttggggattggatgcaaggatgttctcaccagcagaagaaggtggaagggttgaagattgtgatttatcctcattcttctttttttcttggagctttaggttgttttgaagaacctttagcatttggagcaactcgtttacttcccattttcactaaaagattggggttgtttagtactttcttggaatccatcctgagatctatattttcaaaggaaaagggaacaagtaagataaattgacaaaagaatatatatacagtagaacctctatccaagaatacacttgggactaagaaaataatattctaattaagaggttataactaaatagagttacacttgaaaaaaaaaatcaaaatatcaaaaaatatcaatataacaaaaataccaataaacaattcttaatactatattatattaaaattattttcgagtacacataatatttat

SEQ ID NO: 337975 - DNA, 767 bp, Cannabis indica
cgtataaactcttctgcctttgctgcccaaatagactcattataatatttctcataaaacaaggcccggaaggcttcacaggtcatgttattcaggtcatgaccctgagagacaatctcccaccaaatacgggcatcatctcgcagcatataagtagcacacctgacccagtcattatcctcaacccgcataaaatcaaaaatggatgttatcatactcatccattgctccgccttgagtggatcagcaccaccctcaaacactggcaggttctgcttccgaaaccgctcatacaacggttccaaacggttccctgcatccggtggcactaccagaggtgtcggaggatcaggattagggtttagagcaggctaagctcgctgctctctcaattctctaattttctcaccttgctgccgaatagtctcttgcattgcagcatataactcttcccagtttggtggtgttggagggttctcgccctcaccaggagccccgagcccagctagctcgcggttacccctaccagtccgcctcgggtgcatatctatacacctgcggtcacattctaggtaataacaatactaataagtatttccatatattatagtcctgcccataccattccgatatcaacacaattcagataatcaggcaatcagaaaattaacaaactatcttttaactaaaagaaactaaaccatgagttgatcaagtccttacagccaatgtacatatcaagccagtcttcaggatctaaaaacctt

SEQ ID NO: 337976 - DNA, 903 bp, Cannabis indica
agtgttaagttaatggccacataataaaccctaattagtctagatcattaaattttattttttatttaaaaattaatttaaattaccaataaaaataacacgtggataataacttgttaacacagatttttgttaaccaaatttgagtctcaccgtatcgatttcacacacaaaaaataaaagctgtaaaaaaaaataaaagcatgaacaaagggctttttacgtggttttgcagttaaaattttgcatagtccatgagtcaatcttgtccatatttctaattatttttcaaggcctctcctgtatgagttttttcgtcctgtttttttatcttattttccactatttataattacatagtgggcagtaaattacaaagttgactgtaatatgtttacaacaatcatccctaaaatcatcccagggttgtgagcctcgctagcgttgacagggtgaagttataggatgcattcccatagcgagacgggcacctcgattatttggtctcgagccgatcaaccgttacacttagtttgtacactaagggctttcacaattgatacatgtcgctttcgtcttcctatgtgtactgtccttgatccctcgctattcgcttccagcgacatatggtttctcactaatataataagtgctagtttgtatattccttgcctaagacattacaatcaacaggtttcaaatatactctgatgcttacctaattaatgagttattccataaaaaagtgattacattgattcatattccctttatcttgacacgtgtcttccactgagatggtaaccaaatttcgagtataacaatttcctcttaaaaagtttattttagtaaaaagtgctttttaataattacagagggcattttcgtcaaaatcccttcttg

SEQ ID NO: 337977 - DNA, 520 bp, Cannabis indica
gcttcttcccttctccaaatcattaggcaactaatccaagagtgggatttgtgcctggtcgggggcccatactaagcagggcgccatagggcccttgcttccgtactttaggaggattgtagattactaccatttctatccgacccaatttacaccaaagggcatcaagtacttatcccccctatttatcccctacgattcccaaggatggggtgagccgtctccgcacgacaccaattggcttttcgacttgaagtcaactcccaagcggagcagggatggggtatttctacttctcctaattgaacgagaaatggctaaagggtattgtggactccaatgtcagcaaaatagggcattttgtggacgagtactacttcgtgcagggcatggatatcgcccacactcggttccagcagattccctcgtactgccgccctcttttcacattaggactcagggagagggcacaaaaaaattctccaactgctaaaggatgctcgaaatatcactttgttga

SEQ ID NO: 337978 - DNA, 454 bp, Cannabis indica
ctttctttacttgagggcaatctttcttgaaatgccccaccatgcccacatagaaagcatgtattccggttgcattctcctgggtgatgtttcttgcaacgtgggcattcaaggtacgagtaacccaggcgtccacctctaccttggttcccacggaaccgcttgcctttgccctgaaccaccagatgccgaggtaatcttccttctctgatcagtggtggagtcaccaccatccctacgataaacagaagtaggaaaagtgggggtcacaccaacactcggagtctctcggggctcctgaacggaatgttaccgcccctccggccctcacgggctttctcaaccactctccgcaaaagtatgttcgcttcagtagtagtaatcaccaaatcctgcctaatctttgcactcaaaccgccaaatactttcttcttgctaaagtcagttggcacga

SEQ ID NO: 337979 - DNA, 870 bp, Cannabis indica
gatggaggtaaggccaaccgataagcaacttgcccaaccgtttcgagtatttcaaaaggtctaataaatctaggacttaacttgcctttcttcccaaagtgtctgattcctttcattggggacactcgaagaaaacatggtctccaggttggaatgtaacatcttgacgtttagggtctgtataacttttttccctgctttgcgaagcaagcattcgagctttaatcttatctattgcctcattagttttctggaccaactcagggtctagatattttcgttctcctatctaatgggttggggaacgacatttcctaccatagagcagctcataaggagccattcctaaggtgctttggtagttattatattggagaattcaatcagaggcaaatacttactccatgaccctccaaaatccatgacacaagttcgtaacaagtctttaagtatctgaatagttcgctcagattgcccatctgtttgaggatgaaaggtcgtgctgaatttcagattagttcccatagccttctgcaaactcacccaaaacttcgatgtaaatttaaggtctctatttgaaacgatagacttcggtaccccatgaagtcaaacaatttctttcacatacagatcagcatactgatccatcgtataggtcaccttaacgggcaagaaatgtgccgattttgtaaagcgatctaccacgacccaaactgagtcgtacattcccatggttctaggtaaaccaaccacaaactccaccgtaatgtcttcccatttccattctagaagtgataacggttgaagtaatcctgcaggtcgctgatgctctgctttaatttgttgacaagttaagcacttagtgacata

SEQ ID NO: 337980 - DNA, 593 bp, Cannabis indica
ttttcctcaaatagactcttgaattgatctcaagtcataacactgacatcacgagtctgtcccacaatatcccaccagacacgggcatgatcttgtaacatgaaagctgcacaattcagtctctcagttcccatcacccccatattgtcaaggatacaggtgattgcactcatccactactcagccttaaatatgttagtacctcccagaaaagtcggaggttgcagcttcacaaaccatttaaacacgtaatctctatgcggcattataaacccctggttacctaccactgacacaggtgctgatggcaacacttgctcaacaggggcagctagtgctggttgccttaatcgacgcaactcttcttcttgacgaagtataatacctcgcatttcttgaaacatctcctgccagtcagcaggaggattagcattgccaatcccagcattatcccccgaattctgcggaggtgtaggcggtgccggtggattcgtttggtcaaccccaggctctacttgctcaccctgtggtctagatgattgcggagggtccattttacaagtacccctataatcaacaaccctagcgagtta

SEQ ID NO: 337981 - DNA, 636 bp, Cannabis indica
agaagaaactcccaaccacgcccaggcccgttgaacatgccattcgcataagggagccatttcacctgttcgcccatctcatccctatgctggaaaagcgaaggctgttatggctgagatatcaggtgatgatggacttctgactttctgggcgggcagtcactctgcgctttacttctttttcagcttcttgactttcatgctttgtattttctgctggtttttgctaaccgcgctatttttgttctgtgcagacaggtctcgccagatgatccacgctttaaggaagaggatgagcggaagctctagcgcctcccctccggccaagaagtctaagagcggagaggggtcttcagagaagaggccttgtggagaggttattgacctttctgagaagctgactactgcgtatcgttccactcttaaatctgccaagtctaaggagtctgggccaccaacatctgggtccgaactggtcaggaggatcgagagcgggtgtaggcaccaactttacccgtgcccgtgatgcctgaggccaagaagggaaaggaggtgatggctcactacatgaaccggctggttcctgaggtcggtgagcaactggctggtgctgatgactcatctctggatgtgttg

SEQ ID NO: 337982 - DNA, 1516 bp, Cannabis indica
aagttcttcccaatgtacacacaatttgtgggatttcctgggtggagaataacctcttccaattattcgattggttttagcaggtttctttcatcttgaactcgatgatcaagatcttcgtctttcttctcgttttctttcgccaagatcatcatcaactgatgactggcctttctatgctgcaactctatgcggtagcaatcgcgagccagcatttggtcacgcaccactcccacaccatctgacatttgtaatttcaaggataggtgcttgatcgaactgactgcccctagtccgatcagtgttggatgacccaacaatatgttgtaagccgagggttggtcaacgactaagaaatcttgcataacagtagtagataaagatgccttacctaaagttaatgcgattatgccaaggctggcgatactgtctctggtgaatccgcaaaggttcaccatacaaggccttaatttttccttttcgagccctattttttttagggtctccttataaaggatatttaccgagctgacattgtctattaacactctcttaatccttatattagcgagctgaatggctatcaccaatggattgacgtgagaatacctcacatttttctcatcttcctccatgaatgtaatgggaggttcctcgattttcaccttcttggaaagttctggggaaaaaaccgactgctcgttctttatttctttcacatatcttttctgggcgttattgctttcccctgcaatatgtggccctcccagaataaacagggtgtcctctccttccataggaataggttgcaacccctagttatttgggttattgggcagattgggctggttgtatccctagccctatcttttcacatactgcctaaaatggcctcgagcgataagactttctatctcgtctttcaattggcaaagtttttcggttgtatgtccaatatccttatggaatttacagtatttgttaggatctcttttgctcctcgaattcctcataggctcgggtttgctgaaggctaccttctactcatgtgcgagataaatattgtcctgagtttcattaagttggatataaatagtatacacgggcacgtatttgtcatgcttcttttgtttctttctctccttcaacggttctttaaatccatcctttctcttcggaccagaagcccctgagttatcaattctcgtggaaacagtacctgttgaaacattgctgggtttacttcccaagtttgttttcaacaagttcatttcctttcgggcttcttccttccaaacaggagccctttcgttgaactttgtgatgcttctcaccgaacgtccttgtaagtcatcccataactcaccccctgcggttaatggatcagtagagatccccgcctgaagggctctaagttgcgtgttatcatccaaaatttctaaccatagcggcagctgtgctaaaacgacttaagtatgccttaagtgtttcgtcgggctgctgctttatattggtt

SEQ ID NO: 337983 - DNA, 669 bp, Cannabis indica
tcatcccataccaccagaaatattgcttcaaatcttgttacattttggtggttcctggatgtaatgagtaaggggtagtatgagcttcatccaaaatttctttcttaagctcggtgttattagagacacacactcgcgttttaaacaatatcattccactgtcagagattgaaaagtccttagctttgcccgctaagacatcttctcgaatcttaaccaattcaggatcttctaattgtaccattttgattctttccaacaagtctggctgaagtgtcagattatacaatttctcaatcaccaattcaatatttgccctattcatttctgaggctaactgaggagaaatcatgatcatattgaatacctgatcaggtccttttcgacttaaggtatctgccacaaaatttacctttcgagggtggtagagaatctcgcagtcataatccttgaccagttctaaccatcgtcgttgcctcatatttaaatccttctgagtgaaaaagtacttgaggcttttgtgatctgtataaatttcacacttctcaccgtacagatagtgacgccaaacttttagtgcaaagacaaccgctgctaattcaatatcatgggtaggatatcgttgctcatactccttcaattgcctggatgcataagcaatcactttcc

SEQ ID NO: 337984 - DNA, 811 bp, Cannabis indica
atattatattaaaataggttttatttagggcataaaatctcaacaaactcccacttgcactaacataaaactagaagtgcatttcaattaagtcattgtcttgatattcatatcaagtatagtgtgtttgactatacccatataatagaaattgtaaggttgtagcaagcaatagctttctccaccattactttcttttgtgttcataatcaattatagaacatcatttttctatatgtattactcctctagggatactgatttctttactgcttgataagtgcatttgaatatatagaagacacaactctaattctatccaaaatagaatagagataaaacaatcaaaaactttcttcagtttgaataactttatagtatcttttaaaagtaactcaattatttaacttcaatggtggaactaaattattatagataggttttaacacccttccaaaataatttctctactcccagagtaatcaccatctcacatataaagttttgagttggtgtagatataatgattctaaatacacctctatcatctaacatatgggtcacttttagagattctttcttgattatatctctatgttctcttgttggattacatctttgatggctcccactcaacagtaggagtttggtttaatgcatacacaaagtgcgtatttaatctcttacaattggtacttagggacatcttgttgtgacattttatctttatctagaaataataaatcatagcattctagtattaacattaatgtaaaatacttgcttaagattaagtaatcactagagatac

SEQ ID NO: 337985 - DNA, 527 bp, Cannabis indica
tctggctcattcacggttaattctgcttatcatttagctcagtccaaggtcctcaatccctctccttcaacttccaaccctaatccttataaggattggtggaaaactctttggaccttgaaaatccctcctaaaattaaacacttcacttggaaagctttcaaccaccttctcccatgttccttaaacctgttccttaaacattctatcccttctcctgcttgttctttttgtgggatggaagcagaatcagtttctcatgctctcctttactgtaccaaagttaaacaaatttggcatcataccatctttaagcagttttttcaagaccattccaggcttgatattaaagacttctatcttctcagtcttttccagcttcccaaagaccaaattcccttgtttcttggtataatctggcaaatttggaacatcagaaatgcctgcctctttcaaaaacactcccctcaggctaatgttcaagaatcggttgtaagttttttgcaggactaccaggaagcccaagc

SEQ ID NO: 337986 - DNA, 745 bp, Cannabis indica
caggattctcccggggagcttgtatggtcttgccagtgaattttccttttttcccattcccttgtctattattgttgctggaacgtttaccatttgagctcgaattgcttgggtaatgggggagctagacagatgtcccagtagaaggagcttttgacttgccaagtttttgttcaccttttgctcgctgaatagcctcttcaagtttaataaaaccttctgcacggtcaagaaaatcactcattgagtcgactggtccgctcttccttatgtccttccaaagctcaccaaggacttcaatgcccccaagtatcgcagacaactttctgtcctcggttaatagtgaaactttagtcacctccgtcatgaatctgctgatgtaggctcggagaggctctcctggtctttgctttacttcgaccagatctcctaggtgcaacagaagttggcgagaggaggaaaattgagcatggaactccgaggagaaagccttccatgagttgaactttccgggcgccaacttgaaataccattgttgggcggcttctgagagggtggtaggaagaactctgcaacatacatctcctcgtactcgttgcagatccatttgcatctcgaaatacttgaggtgtgacaaaggatcttcctttccagtataaatcttccaggttggcatcttaaacttgtggggcaactccaggatattgatctcgggggagaaaggggttccatgtgctcgatccaa

SEQ ID NO: 337987 - DNA, 542 bp, Cannabis indica
taagtgatgatgagaaaaaaaattaatatttagaatgaatgttttgtaagttgtaagtatttcaaaaaataaattaatgaaaaataaatgaatacttgtaacatttcagtgtgggggaatagtaagttttatgaaaaaaaaatacaagaatgaattgttgaggagagtgattggggaatacaaacgaaaattatttgagagaatattgtagatgtatgctatggtgtgatttgagaccaaattaactttccttatctacctttcaccctagccttacattataagcctataaagtcctattgatctttagattatgtgtaattactttcgtggagaatagtttgataattaagcttatggagtagatttttattgaaatacacatttcttttgagatgagcattgattgttggcatgcattaattgatttgaatgttagtaataatatgattagttgattgagcacacacacacagcataaattgagtttgaaaaataattatcttgagttgaaattctaatgattgaagagtttgaatttt

SEQ ID NO: 337988 - DNA, 1001 bp, Cannabis indica
aaaaccgacgctgaaagggcttaaaaactgcctctaaagggggtttttgtagtagtgtgaaaaattatgattccaactgatgtctcaaggagttctttttggtgaagcttgcaagctccatctagccattaaattggatcttcaagcactctcagagtttctttaaaggttcttatgataaatatgacacatttaagtttgaccaatttatatggtatttttttttttgtttttaggtctttttatggtatttgatatgccatatatatgtaaattaggtttttaaatcccatatttaatgtttctatttgtttaggtagttttatttgttactgatgttgaaaaaaacaacggggtttgctgctggtgccgaaaaatcaccggagtagtggtaggtgccaaaaaagtcatcagagttgttgtcgacgccagagaattcgtcgaaattggcattgttgccagaaaaattactaaaaaattaccaagaaactagtttcttgaagaagaaatcggttggtttcttaatgaagaaaccaatttcttgatgaagaaaccactttcttagttattttttcgttgacaatgccaattctgacgacttttatgacactagcagctactctgccgaccttttcggcaccgacagcaaacttcagaaaagtcatcagaattggcatagtcgtcagaaaaattaccaagaaactgatttcttggtgattttttggtgatttttctgatgacaatatcaattctgacaacttttctagcgttggcagcaactctgatgacttttctgacaccggcagctactctagtgacattttcggtaccgacagttaactccaaaaaaatttgtcaaaattagcattgtcacttgaaaaattactaaaaaaatctccaagaaattggtttcttggtatttttttatgatttttccagtcataatgccaattccgatgacttttttagcgctgacagcaactctggtgactttctcgatc

SEQ ID NO: 337989 - DNA, 552 bp, Cannabis indica
tgtctaataatgtcaccaaaaaccgaaatatcttctttatggctagacagagcatcagtaatggctttgcaatctgtttccacctcatggactaaaaagtgctcgttgatacaccactgaagcacggtgaggagggattttgcttccagggttgggaccgaacctcctcctgagtgaggttgggctatggcagcaactaccagaccatcgctgtttctaatgataccgccgaagcccgctttcccgttggcttgtgagactgctgcatccacatttagcttgagaagacccgcagctgggggagaccaagaagtaggaggtgacatctggctagggcggggggaggatgtggggatccgttgggaggaatggtagtcttctaggtagcttcgagccaagctgagaattacgtgatctgggtcgtgagcttgatcctttagagctttgttcctgttaaaccagacaagccaagcagtacaaagaaaaatctctacatcttttttggttagggaagtgtaaatcatatcagcgacatcatgaaataatatttct

SEQ ID NO: 337990 - DNA, 568 bp, Cannabis indica
aaatcataccttaagctttccctcttcaaggattttctatcctgctgctaccggagtttagatcgttaagttttgggttgaaaataaaaaaaatagatataggaggagaaaattttatcaaaaaaaaaaacgagagtttcgttcttcgttctttactgttatatattaaacttaatatatataatagatatataacaaaagtgataaacaatttatatatataaataatattataataataatatatttgataataatataataataatgttaataagaattttattattaataattatcttatattttttagtcattaaaaaatttatacttttaaggtatttggccaatttaaagtattttaaaatacctttgtatttttaaaatcttatcttaataatcccatcaataattttaactaaaaccgttgtgacatttttggcctctaatcaggtctccacggtcgccaaaccgaaaaatatttttatttcacaaataactcatattatatccatgtatttcaaataaatctccgtaattaataaattccgcttatttatccacttat

SEQ ID NO: 337991 - DNA, 939 bp, Cannabis indica
gggttatggaatttgaccattttacccctagttttgagaaatacctaagtaatgggtttaggggtattttagtaaaatgccaaatgaggagttaggtggctgcctaggttgttgacacctagaaagttttatttcagcaagggaataattgggaaaatcctttttgcattttgagaaaaatcaagaaaacctaaattagagagtttatccttttctctctctttctttgttcggccaactcaaaaaccagaggaaaccatccaaattcttctcaaattctgaaatcaagctggataccaagtgttcttgaggttgaggtaatccctagctctttgctctttgtgtttttaagctttaaatttggtttcaagtagtgatttttagtgttagtggctgttagggttggaaatgcttatggttcgaattctaagcttaatttgagttaactttagttcctagcggctggttttggtgtttggattaggttttatgcaagtttgagccttgagttcaaagctttgatctctaatggcataatttgattcattgggttttttttgtgctttattggctggaatatgttaagtataccctaatgaggtactctagaaggtttggttgcatttggtggaaaattgaacaagaaattgaaagtttggggtgaactggtgcaaatcggttagccagttttaccagacctttaaaaccggctagccggttttggcagggtccccaaacgcttcattctctcgattttgtccatttcagtgctgtggttggatgttgccctatttctaaagtttgagtaacctctagggagtataacagaacctaaggttgtgggttcgggtttcccgggattagggttttgatcatgtaatttacccggtttcataatgtgattagggcatccatctagcacgagactttccgttcagg

SEQ ID NO: 337992 - DNA, 1305 bp, Cannabis indica
tcccatactttcttgatcattagctcgttaagtactttctcctcttcgagttgatagattgtgggttcttgattgcctcgaggtcacacttgcttcttcacactctgttctttccccttgagtgtggtttgtcgcatttcccccattagggtcttacgagtcctcattctatgggtttgggaagaatgctggtgatttcttgcaggttacctacgttaacccagttgagtcctaagatcctcctcattgtcatgaggaatttctcgttcattagtttccggttgcctcccatcttgctatttgttctgattttcagggagtatctcatttttccagggctgttcttcctgggcattttcttgtctcctggttcgtgagccatgaggcctgcctcttggtcttctcactcatggttcaagttgattttgagcattcgtcccctaggacaccctgatcaaggctgtatcacactctaattcagcgttctgacgctacgcctcttctagacggcatctcaggtagcagctttctgtgtcataagcaccttttcccattgactgggcacctccatgattgagttcttcatccctcaccccagggttcaggccactatcacgctgagttctcctcgagcgtgttgtccgcgcactcggaccaacgtcgggttgggtcctctggcaacgtgtggtccgtgtgctggggccacccttaggttgagtcctcctggaatgggtggtccatctagatcgcgggttcgtagaccttctagagcccatgggctctttttcagaacgatgattagtttactcatgtggggtattaacattttctggatttttagccatgaaggagtttgttcttcttcaaaaaaagggagggtttctctgagcgctttcacagaggcgctcaatgaaagcaccaaactattaatgcatattttcgttaaccaaatttgagcctcacagtaacgatttcacacacaaaaaaaaaagatatacaagtagaagtacgaacatagcgttttacgtgattttgcagttaaaattctacatagtccacgagtcaatcttattcatatttctgattattttcctattgtccttttgtattatttttttgtctccttttttaatcttgtttgccaatatttataattacaaagtgagcagttaattacaaagttgactgtaatatgtttacaacgatcatcccctaaaatcacggggtttgattacatatcatgtagtgtaaatgcggttatgatttgaaaatcatatagctatgattttctcgcttttactaggt

SEQ ID NO: 337993 - DNA, 905 bp, Cannabis indica
tatttccaaaagcgtgtgatttcttctttctgcaactccactttgttgtggagtgctaggggcattcagttgggattcaattccaagttcacttaaattatctttgaaccgtatatccatatattctccacccctatcagtatgcaagatctttaaagttttacccaattggttttgagccaatgcttgaaatttccgaaacttctcaattatttttgatttctagtgcataaggtaaatatgacgatatctagagtaatcgtcaatgaaagtgacaaagtactcataaccacctctggctttgacattctgtgggtccacaaagatctgaatgcactattcctagtggtctttgccccactctcccattgcagagaaagaatattttgtcattttgccttataggcaagattcacaaactggtaattctcctatgatatttttcaatggaccacctttggttaacctgggaagtctatcaatagcctatatgactaagacgtaagtgcaatggataagattcgtcttcattatcgatcttttgctttttatgatttctaggtttagctatcttgaacaatttgttattaagcgcaaatggttcatctggtctataaacataaagcccttgttccatagtagcaacacaaattagaatatcattacaagaaataatagaattaaaacttgaaaaattcaacttttattgttgcaactgtaaatatgaaacaaaatcaagtttcaactaaaatttggaataagcaaaacattatctaaattcaaaattctgttccgaaactttagttttcttttcctctggctgtaactgataccatttctccattaccaactttaaatttcaactctccaaattttaaataattccaattttcaagcagctgcaa

SEQ ID NO: 337994 - DNA, 1093 bp, Cannabis indica
agatgaaccaaaacatacacaaatgaatgaaaaatacttctgtttctttattgatgtcgaataaattggattacattgaaattgagttttatttagggcataaaacccaacatacccttgatcacaagattacaaatctgactaatgctaagtaaattaacttttagtccctcaataagcataacatttttcaaccttggtaacccttcaaaattgagagttcccatactaatgacatttcctgttacaccattaccaaatgtgacctcaccacattgcattggtctaatattcactaaaaaatcattgtcacctatgatatgtctagaacaaccactgtcaaaataccacatttgaggagcaacacttttatcaaaaaaaccatctagacatttttctttttcaatctacttttgtttatgtttctttttaaaatttttcaaattactgaaataatttgttttgtgcaaattttgcatggtgaaacatttatgttgaatatgccccttaataccacaaaaatgacaaattggaacaaacattcttacctgagatcttatcctttatgaacttactggagacgttgcttctgcaaaagatattttagtagcagcagatttaaatttgcagaagcaggtaaattcgctaaaacactagattttttttttttaaaaaaaaaaaaatccagaactttcagtaccaattgatccaagaccagcaaagcctctttgacctgcattttaaacttcctcaaaaatagaagatccaatgttaagcatttgaatatttttgttaaaattttcaagttccttctttaatacaataattttctcatcttttacacacaaatcagtctcatattctttaattttcaattcaagagattcagtttgatgagacaattgtttatttatttttgacaataatttattttcagaagtaacatgtatccacttttcatacataaccttgtaagacttagtcagtgactcctcacagatttcagattcatcagaatcagaattttctttttcaatggtattattcaaacataccaatcttctttcacttgtgaatcacaaaaaaacttaga

SEQ ID NO: 337995 - DNA, 884 bp, Cannabis indica
cagagagattattgtctcaggtgtaggccttttaagttttactaaatttacttggactagtcatcatgattgtgaattagtggttagaagcagctggtctacgatgatggggtatgaaatagttcaaaaataatgattgtggttgtgcacttcagcaatggggtaaaagaagtttttggcaatttctttactcgtattaaacattgcaattgtgatcttaagcaatataaaagagaagagatgaagaaggaaagagattattttttgaagctaaaaaggaactctttgttgttcttaatcaaagagaggtgttttggagacaaagatctgaacaattatgacttcaagtgggagaccaaaacagtaagttctatcactctaaagctgttggaatttgtttaaccaggatctagatttactaccatgtatgttgtttaacatcctaaatatgaatttctaaaacaatgtaatttaaacacataaaaattttgagaaaccttacagtgggtgcaacggaattaaatgactccttccgctaagatctctaacccttgtatcctttctatagcagagtatcactaagatctgagcccgaatctccttctcttgaatttggattcttcacaaccttacacactatgattgagtaccacttgatgtgtatgggcacttactctatcactatagggtttgaaattatgaagagagaaagagaagagaagggttcaaatagcatagggaagaaggctcaaatttttgactgaaggcaagtgttcatcatcttttgatttgaggccaacagtaactatttaaaggcaaccacctaggtttaggtttgaattatttttcattaaaaaaataaaataaatggtaaaataggatgt

SEQ ID NO: 337996 - DNA, 515 bp, Cannabis indica
aggttccaccaaaaaggggcgggacgcggcatgctcagagcatgccacgacatctgggtgcagaacccagaaaccagcaagcaaacttcgaattttcagcaagaaatctcaacctaatcacaccaaattctcaaccaatttacaaattgacctgtataattattaacacataatagatactcattttaacatattacatgcattaaaattccagaatttagattgcaaaagccaaatcaaaatcatgcataaacatggcacatccaactctttgaacaagagcatcaccttcaactatttctacaattttccagccaacacaacatcacaaaaacacatgattcaatactagaaaatacccaagaatcaaaatccatgctcaagagcttaaatccaagggttaacacactcaattcatcaagattataacaacacttaagaacatgcaatcacaagggcaagatacaacttaaatcatgctttttccataacaatttcagcaagataccactatt

SEQ ID NO: 337997 - DNA, 561 bp, Cannabis indica
caagccctattaaccaaacctttatcaagagtggatttaacatggttccttccagattggtggttgtcccaggtcattttgtcaccgtggattggcatgttaatcaaaccccgggagtctaccagatcagagatgaacgggatgaactggtccttactggaagacccttcacgttctgaatcactaagaacaaaattagtatctcccaaaatcaaccacagaccgctgaatctatccccaatttgcaagaaatcaacccaaaaattcttctttgcatggaagtacggagggccatacacatgttacgaaaatttattaacactacgcaagtatacgtaatcaagtagtaaactcacacaggtgaggtcgaaccacaacgaattggattaactactactaaactatacctataattctatttggcaaattgtaaagaattttgattaaaaagaattaaaagaaattcagaaaacttataacacagttagagtttaatcaagatgagataatagggaggagaatcatgttgttgtttacccaaatcgttaatgcctaattgct

SEQ ID NO: 337998 - DNA, 567 bp, Cannabis indica
gggcataaaacccaacaccgacacgagttcgtaaaaatataaaattttaggcgggctagatgaagcccagccttgagctacataaaaactaaataagcctaaaagtaggcggtacgcttggggaatgagttggtaaggcgcaagggcaacaaaacctaaaaagtttattaagtaatcttgaagcgggagaatggctcaggacatgaggtgggtctggctccaagctctgaaaccaccatagttgtggttgggtgtctcttcctctcgaggcaggcgatgaaaaactcaagaagcagatggcttgataccagcaacggtcacgatcttttccaactggtaggcacaagtaaaggtcgagcgaagttcgtccacctcacaaccattcgatcgacaggtgtagttctcctgaacgacagggcccttcatcacttcctccagggtagcaagagtaactccccccttgcgggaagatttggttccagacgcagaagtagacatttagttctgtagaaggaaaaatgaaggagttagcccccaaaccaaaccctagtgttaaaaaagggaatg

SEQ ID NO: 337999 - DNA, 620 bp, Cannabis indica
attcctctcttcaaaacaaacagtcggtctcctttctctccttcttctcttttctttgaacagcaaaccaaacccagccgagcttcttcttctccttccttttctcttgctgcagatcaacaccagccgaaacaccttgtgtttcttcctttcccttgctgcaacacaaacccagccgaatcaccttgtgtttcttcctcttctctttcaagctctgcaagagctttcacacaagaacctacacaaaatagacaaccaaaaaaaaataataataaagataaaataatctttgtctgttgatgagagtagacccgaaaacaaagtgcaaaaaaataaatgcaaaagacaaagagattgatttcggagttcccctcaaatcaagggtacatctccgtcaagcttccctcaaagatgcttgattcttcactatgcatgtccaaaccgattacaggatttggagattcctagccacaaagttcagtaggtaatctctattctttctctcttttcttcactttatttttctgatttacataaccaatatctctcactaactctctctattttctctcttgtgtctgaggtgtattacacaaggaaaacaaaggttgctgcctttt

SEQ ID NO: 338000 - DNA, 485 bp, Cannabis indica
cgttcgttgttccgtcgattgcaagaccattcatcgctccaaaaaccaacttcaaacagcaagtgatttctctccttattttttgacatgcttttaattttgtgtttctgattttgatcactagtttctttgttagcacctttgtcacctctttggttttagcaattttagggctgaattgtatttgggtaaattttagggtttaggcagaatgtaggttttcggatttctcaaatttataaacttctggtttgatgaatttcatccaagaattgggattgctttgtctttgctacagcaatgtcccaatccccaatctggttcagaagttcattttttagaataattagaaacagagtgtcccattgaacttgtcgtcccatataaacctagaatttcagaactcaaatccaaaatagagataaatgatgaaaaattagggaacacttagtaaaaacccatcaagatgacattgtcagtcgcca

SEQ ID NO: 338001 - DNA, 771 bp, Cannabis indica
atgtattttggtcagctttgtaattaactgccactatgcaattataaatagtggcagataagatcaaaaaggggtacgaaaaaactcttatacaagaggccctaaaaatttatactcagaaatctgaataagattgactcgtagactctgcagaattttaaatgcaaaaccacctaaaaatcctagtgttcatattttatttttctatagtttttactatttttgtgttgaatcacaatcgtgaggctcaaatttagttacaaaaatttgcgttaataaaattctattaagtgtagagcatatataaatatatacatatatatttgttcatgattataatgtcgtcagcatagtggaatataatcatgattatatgttcaaaattttacttcccatgatttgtcagttcaatagatttagacttacatgataatcggcgataaggtatacttacaccttggataagtgtttagtcctttccagggcattgacaaagtttactagtatcaaatgtatggagtatacattggattggaccgatattaaatttcgataagatatcataaacttatcgttatatctttctaagctaacatcattggttgatcttaggtctatggatcttaattctaatatggttaggttcagcgtagtatattatttatattcttagagatgttcgtgaatgctaacaaatggttctggcagatatttacatcttgagaacatggtagttcaattgagtgggagcgctaatcatagataaggaat

SEQ ID NO: 338002 - DNA, 897 bp, Cannabis indica
aaaatattaattttatttacaagcgttaaacgtaaaaaatcataatgttgcaattttatttaatacttgaaaatattcataactggctagtttttgtacaaaagataaataaataataaataaataaataaaaataattgcgacattaatttaataacgtaaataaataaaacaaagtgccctagaccggccgcaattatatggccctcagtgagttcacacacacaaacatccaaagttccactcgccatcgacattctagactttcagttaccttggtctgcacatggtaatttgataagggtgagctactaaacccagtaagaaaatgtgtgtcagatagtcacataaataaaaataaaatacaactaaaatgtacatgcacatatttacataaatagcaatacataacttaattttatcactagtaactaataaatagactctaagctaagtcacataataatgattacgccggagtccgactttggcaaataaacctgagctattggactaaatggtagagggttgggttcagtaaaatcgtacccactactaaatggccccctaccaacagtcaagtatttaaccattatcttctcggtcaaaccatgtcatataaactataatctacctaatttaaataaaatcaaactactattcatatttaaataacataacaatcagaattaaataatgtgaatcttataaacacactatttacatacatacttaaataacatgaatattataaatatattatttaaatatatatctttggcaatggacatgctctaatgctgtaaacatacataaataacatgaatcttataaacatattatttaaatatatattatacagtacattaaataacaaacaataaagagtcaggcaga

SEQ ID NO: 338003 - DNA, 1915 bp, Cannabis indica
gggatttttatgagcagtttattaatataagttcaaaaggaataactgtcatattagaaatcttataataagagcgaagaccactagtttaaaggacgaaaaaattatcaagtgatcaacctgagagatattcattctttttttcttttgatgaataagatcattgtattgcttaatcaattaattggaaaccattaaaactccaattacaaacaaacggtatattctataccccagtacaattaccctttaatattacttaacaattcctatcctcattagaaatcttacaaggaaaacgtaagctagtctgatttcacaatcattttggattcttcagactgtgtgattaacctaccacaacttttgtttccataaagtaacatttctaacctgccaaagattatagactaccgttgctaggatagataaaatcattctcttatgaatgttggtcatatttttagttttggaaatccacttcaacaactttacaagaattaccgttcacattccaattgagctagactttaactgtaaaaccctcactaacttaggcatgttagcgtgattttaatcgtactgtgcaactcgttgctaatcaacaagattaacgaaaatgtgattaattcaaatttgcttaattaattaaaaacataaagtaacacaatcttcacctgctcgctctcacggctcctcaactttagccttgcccttacctacacatgaaaatagcactgtgagtcgacagattcagtaagaaaagtataaacaataacatagtaataacccgaattatgatcggatgcccatacccccaaacataacccgatccccgtggcccgcacggtgctgagtctagaacgttcgtacgactgtactattgactaaaatatcagcctatactcggtacgctagtcatactctagacgtactgatgtgataatgtaaagtagtatggtactatcgaccataatatcagcctatactcggtacgctagtcatactcttgacgtaccgatgtgatattgtcgaattgtacaaaagccaatatacatatcagatgtaatttaacaggcttaactaacatgcacactaaacatgtatatacatatgtatactgttatactaatcttacctcgtttccgaattcaggtgtgtcgaccaacctgagtggaataactgctcagcgaattacaggctcctaaatcacatcgattacaacaaaggtaagtgacacgctaaatcactttccagggacctaaacttgaaactaaaagttttcctatcgataaataacatggcaataccctaaatattgcaaaaatagaaaaaactagacttcccaaaactgccccaatcggtagtccagttccccaatcgaaattccagttctgcagggtttcttgggaaccaaacgaaattccggttcctacaggttcccctgaaccggaattccggttcagtgtaggaaactttcaaaatttcatatctcacccaaatcaaccccaaaacacttgaaaccttccagacaggttctaaacatcccaataaacaaattcaaggtgacaaaacactacaacatgcacaaaaacaaaacttgccattaaagagccaagcttgagttctaaaactcaaagcttgctcaaacttaataacagcccatacaactaatacaattcaacatatttaaacctaatttaacttgtgaaaataatatcaaacaacaacaaccactacggaactccaaaaacccaaatcatgcaaaaaaccaaaacgaaactcacgagaactaaagagagagttgccaggagctatgatcttgcgagaaaacacaagattactgaagaaaaatagaaccctatgttgggttttattgcctaactaaaactactttacaatctgattagttatc

SEQ ID NO: 338004 - DNA, 492 bp, Cannabis indica
agggcataaaacccaacacgtaaatcttcctccacatttctttcgaataataaggtgagcaaagcgtgtacacacttgtattcattttttaatgtcgcagcacatgcatgtaggcaagggagtttcaataacgtaaacacgcctcaggtgcatgttctttcaactagcttcacatcaccacctctttcattgttaggtcccctaccaatgttatacaaattggctccattacgttggacgcgcttgaaccttgaattttcatgaatttttgccaattctttttcaaagagcgtggccaaaggggttgtacatttgtctgcatttttgaggtgatcaacgaaccaacattgcagtgtgaacctgataaattcaactaaagtagttattggatatttcttgaactcttctgtaacactgttgaagctttcggcagcgttgctggtcatgatgttgtatatatcacccaaacaataagggtgagcccacttctaa

SEQ ID NO: 338005 - DNA, 541 bp, Cannabis indica
agagaaggttttccatgaactaaactttccaggagccaacttgaaataccattgctgagcggcttcagacagagtggtaggaaagattctgcagcatacatctcctcataccccttgcaaatccatttgcatttcgaagtacttgagatgggaaaggggatcttctctccccgtgtacattttccacgtcgacattttgaacttgtggggcagcggcaggggattgatctccggttccgcgtgctcagtctagctcaagatcattatttctctgtccagccatcccgtgaaacatatttttcagttcgtctagctgagcctgtacggctgggctgacctactcggcattctggtcaacttggattacgtcagcatctttctgagcgtggatttgagtacgggctccgggctgcacgattgtattaacattctgatcgtttgctcccctccttctgtttagatcattccttaggtcatgggttgtccctaacctttcgaacacagaagcgcctggttgccttagcgattgattcgcttggtt

SEQ ID NO: 338006 - DNA, 1247 bp, Cannabis indica
tccaggagacccaacctgaggttggtcccaatacgcgaacgacacgttcgacaagagctcaacatagggagagccaaaatcctagaatgagagatgaaggacccagtcgtggaggtgctcagcctaggggtgagggtacttacgaaatggaaaactgccatcttaggcatcgcctggaggaggtaaactggcataacactgcattagagcgtgatgcagctgcaactagggcggcacaggggaataacactcaaaatcaacttaaacctggagtgagaaaacctcgaggcggacctcgtggctcactaaccaagagacaggaaaatactcaggaagaacaacctgaggagaatgaggttccccctaaaaatccaaacgatcagccggaaccctctcatagaaatgagaatggtaggcaacaaaactagcgaacaggaaattcctcgtggaaatgaggaagaccctgaaacacaactcggggtatgtaggtcatcggagaggcatcaccaatgttcttccggaacccataaagagagggctcatacaaaccccagttggggaactacgacaaaccacactcaaggggaagaacagggcgtgaagaagcaagcgtgacctcaagggctcaaggacccacagtgtaataacctaggttaagaaatggattagcaaaaccctaattagataattatgaataattgaggaattatagtattatatagttcaatttatgtgaattaatatgatatataatatggtaagaccccgttggtgagtcaggggcattttagtaattgtgacccgagaagggtaaaatgatgaaattaatttaattacgtgcttgatggaactatattattatatagtatgcctgtgctttcttttcaagtgtattctgacaggttggcgcggtatagtcacaaccgggtatttcgggctgaactgggttcgggcccaaaatgcaattggattgagttaattggcattttatttaatatgagataatctgaatttttatttggtattaaatatgcatggaatgacataaatacccttgtgagggcgaatatatgtgctttggccctaggggcattttggtcttttgaccttttatttctcatttagtaaagattgatttttgggaaattaaattagaaaattctggtgttattcccctctcaccccacccctctctctctctctaaccctctttgatttctcttgatttgtttggtgaaattgcttga

SEQ ID NO: 338007 - DNA, 792 bp, Cannabis indica
gaaaaacaaaagaaaagtcatacgcttaagcctacgctcttagggttgatgatgtacaggacggtgcaaaccaaggagttgttgatggtatggttcttatctcacactcttgggctcatgtgttgtttgatactggtgcatcacattcccttatatcattgatgtttgttagtatgttgggtttgtattgggaaactttttttcctgcgttgcatttgagtgtacctataggaggacacggtgaggtatccaccatatgtaagtcaatttgtattgtgtttgagggacaaaagttgtttggaaacttattagtgttgcctatggggcaattagatgtaattcttgatattgatcggttgtctaaataacaagccattatggattgttcacgcaaaagggtgactcttttaacagctagtggttatttcattatttactgagctaacatgagtgttgtgagacaaaatcctatcttaagggcatgcttaggtgaaaagagaaacttagagtgttatgggaatctgtttgcgatcgagggtgagtctacgaatttagaccagttcccttagatatcaatggttagtggttttccagatctgtttccagaggatttaccaaggttaccacctgatagggagatcgaatttcgcattgaattaattcccggagctcaaccagtttctattgcgccttactgcatggcacttgcagagttggatgaattgaaaaaataattagggtggttaatggataagggttacatcagacatagtactgttggaaattatttta

SEQ ID NO: 338008 - DNA, 715 bp, Cannabis indica
ttgcattcttattttaaatcgaaattatccttaacttattcctcttagcttattaattttgaatttgcttacatagtatatcattggatgaatggtttataaatcatctgcttataatgtcattctattttcttttataaaattgaatggtacaaatgactataatcctgacattctatcccgaaatgatttaatcctcgatcttagaatctcctacttatatatgcttactttaggcaaattaaacttacagttagattagtagtggtggtccaggctagaatcattactcattgtatatttggtataaatttaagtctttaactttaaattttagattccaaattgaaattttatatttctatttctagaatacaatacagttcaactttcacaagtgtttaatatccatttgctgtcaatggattcaaattgtatgttaaagtatggaatatgagtttagaattctgtgaccaggatccacttgcactattctaagaactctttaatgtaactagacctaagtcatcgaaagaccacaaccacatattttataaatctatggcatttgtatcttgttcatagtggttttgacaagatcattctctgcaaagagtcaatatgcctatatccactgaaagtaaatcatctatattcgaagatggatgtacattcaggggtggatatgagttttcgttatgttcttaagacgatc

SEQ ID NO: 338009 - DNA, 585 bp, Cannabis indica
aagtgtcactaaaaattgtctttccagtcaccctcattagtgacgcgcgttgaagtgtcactatacacttttagagttactcaatgtgtgtcactaaaacccaattttttagtagtgtcattttggtgaaagtcgtaggttttgattatttcattaaaccttttgttccaagagcgagaagcttgcttaagtccataaatggacctattgagtttgaaaactttctcttcctactctggatgcttataaccttctggttgctccatatatatggtctcttcgagaatttcgttagggaaagttgtcttgacatccatttaccaaatttcataagtgaaagcggaaactatggagagaagtattctaatggatttgagcatggcgaccagactaaaagtatcctcatagtccacaccttctttttgggtataacccttcgcgacaagtctagctttaaaagtttcgacttctccaccagcatctcttttcttcttgtaaacccatttacattcaattggatgataatcatcaggtgcatctacatattcccagactttattctttttcatggaatccatttctgaa

SEQ ID NO: 338010 - DNA, 725 bp, Cannabis indica
gtcagccagttgtctgtaaaatgaaaaataattctaagtttaaggaccgcttggccggtcatgatgtcttaaaaaagaccttgtggccgaataagatacataaaaagagaaggataaaagaagaagtatttaaacagttggagtcccaggctcttggtttggatcttttgggccgataggagctgggggatctgttgtttgaacgggaggtacattagcattttggctggaggaagaagtagtcgcatcaagctcaccataagccacttgggaagcgcagaactcgagatacatgcctttagcttcacccaagtaatcaaagtttgcttgagggttagccttccaaaagtcataaaagagctcgaggccgactgtctctaaggcatggaccttttctcccagcttctccaccttggatgtaagcccctcctccttagacttcttctcctcttccactcgacggaggacagctcgaagagacgtcctttcatcctaaaggctattcacctttgcagataaggtttcgatggtctcctcaagtcggtcagaagcctgaagatccttagtcaactcggttattttcttctgagcagtaaaaagcttcttgttgacttcacccatctccatccgaacagctccaagttctaccctggcgtcatcagcgtccttcctagccaagtccacctccgccctcatggtgtaggacagagccgcgttcttggaag

SEQ ID NO: 338011 - DNA, 683 bp, Cannabis indica
aactaagcgggctttacaacaggattcaacctccgttgatgctcaatggagttactacagccagcttctaagagtatcttgtgcgtgcaaatcgttcgactaatgccttttatgtctgccatagtccacccaattgctcttttatgtttcttcaacacatctagcaacaaaccttcagcttcagcctctaattacgctaaaataattattggcggcgtttcattctccccgaaataggcatattttaggtgacttgacaagagtttcagctctagctttggtggttcatggatagaagattttggaggcttgaaattgctttccttccactctaaagactcaaaaggtctcttgaatttaggaaaaggttgcattggctctacccaagcaacttgagtttcttcatcgtcactcaaagcttcaagctcttcaagagaacttatcaacctttcatctttccacacttccttgtgaaaactttcagccacaatagaatcaattacactcaaatgggagcattcttcgatctcatccagaaatctcacagcattgaacacattaaaagtgactttttgatcattcaccctcatagtgagttccccattttttacatcaatcaaggttctttcagtaggaaggaatggctgccccaaaataataggaacttctctatcggcctcata

SEQ ID NO: 338012 - DNA, 1542 bp, Cannabis indica
aaaatatacaaagtgataaaacccttaaagtatatttaagtttgcttaaggcagattataactgcaattgcgaggcagaattgatagctgctcgaaaatcataaagtttagtagattacgaactacttaaataagaagattacgagcaatggagaaacccaaaagtactgtatatttgatcaaaatatagttgtttacattgtgaataaaaacgcaagcaaatataattgtattaagttcgaataaaaacagtacaaggcatttaagataagaaaaacctaagactagttacaaacttgtctttacaaaaatgccactaagggcaaaccattaagtcattttcctaagcagaggataagagagaaagaccgtctacacatagcttggagaaagaccagctacacatagacgagaaagaccgtctgcacgtagagagcatagatactctggtttggattggttggaagctcctcagccttggaatccatcgtttccgactctaattgaggcttgaagtctttgggaacaaatggaaaatggttggtttatcttggtattatgagtttggaaggatgaacttctgaactcagaagggacattctagtaggaaaaagatgatccattctgaaaatgaatctcaccaaaaagccagaggtttgtgaaaaatgacaagcttgagccgcctttttatacacaaagtccagtgacaagaaagctaagtattgagaaatccaacggttgggagaagggcagaatatgaacagaagattcataatgactctcgagaccgtacaaccaccagaatcaaaggatgcgttttatccaagaaaagattttgacgaaaatgccctctgtaattattaaaaagctctttttactaaaaaagaactttttaagaggcaattgttatacccgaaattcggctggaagacacgtgtcaagataaagggaatgtgatgccattgcttttaatggaataactcattagttacataagtatcagagtatatttgtaacccgctgactgtaaggtcttaggcaaggaatcaatgtacaaactggcacttagtatattagcgagaaaccatatgtcgctaaatgtgaatagcgaggcaccaaagaaaacgacacgtatcaatcgtgaaagtccttagcgttcaatgaacaaactaagtgtaaaagttagatcggctcaagaacaagtaagcgaggtgaccgtctcgttatgtgaagacttcatacaacttcatcccgttagcattggcgaggcttaaaatcttggcgagccagaagatagcattcaagtgagccttgaagaattctttgaggataagaaccgcgatcgaaaccagacatacatcgtcgaccttggaaggaagaatggtcccaactcgctattgagatcattggaaccaagcatctgtcgagacatctccagatacaacagctaaagacgtgtttaatacacgattgttttgacccagtaaaaatgggaaaatcacagctatatgattttcaaatcataaaccgaatttacactac

SEQ ID NO: 338013 - DNA, 601 bp, Cannabis indica
attgattagtgaacatagcttaaagaaaaataaaaggattgtccaatgattgtgaaaaattcaagcacaagtttcattccaattttgattactccaagtgtttgtgtgaaaggccttttatcaaaatattacttgcaatttaaatcaatttatgtaaatataaattaagcacaaaatctctaaagtgacaaattctcataggtttgtttttcatctctctctccactaatgtaaacaaacacaaaaccaaagatcaaaaagactttttcaagcttgtaatgtaaggcttaactgaaggtagttaagagaagtcatttttggctcaaatcacctaaaagcaccttaattttcctaagaccaaaatgagacctcacacttacttcctcaaagaatatcccacaaaaaatttgagtattaatattgccattatttattgccccaaaattttccaaaataatgtgctcccaggagttatagcaatgccttagcatagcattttttttctgtctctgctccagaatgctgaagcaatgctataacacctgggacttcaaggttctaaaaaaaaaatcctgctctttttttacaaggggtggcacaa

SEQ ID NO: 338014 - DNA, 1525 bp, Cannabis indica
aacaagcacagcaacaaaactcatcaattttccatagaaatcatagcttttgagttaaaaagatccaaacttggttaatccatctagcatgcatcaaacctactttaatccattcattttaaccatataaaccacagaaaacatccataaatccagcagcaacaacaacaaaaaccaagcatgcaactatccatttttcctcaaaaatcaagaaaacatcaagaaaagttaccaaaaatcttaccaagagtttgagcttactacaatcttgaaaatcagcttgaaacacaaaggaaaatcccaagattccttgctgctcaaggtgggccgaaaataaagagagagtttgagagaaaatggtattttttgaaaaaatttcctttttctttaaactttgataaaatgaacaacatagcatttgattaattatctcagccacaaattaaaaaataaatgttgaataaaaatatttctaagtccactaaaggacaaaatatcaatggggcaaaatgaccattttgcccctccatactaaaataacataaatgagatactaagggtattttgggaaattctaaattcccgactaatcctgacattcccaatgtctaaataaaccgtcccacaatactgaaatactaaattgtgatcttactgagccatacaccgcgttccatgttgccgggcaccgacaatgcaaaattatgaaatttcactatatgacataaaaatacattctaaattcaaatataacaacataaataattatttaaatatctacaaataattttcataattaattctcaattaattactaatttccaaattaaactaagcggtctttacagacatcttctgcttaaactcgttcaaatcggaagacccttctggacttaacccagtaattaaaacgaactccttcaaaccaaaccgtacaactctatcccgaatcagaaaccacttctcaaaatcctccctctcctgatgaacctccctcactaaagcaaggtgaggcaagacaatgttccacttaatattgcccatcttcagaaattgagaaaaaggcgttgtgaaaaataacgccttttgagaagcggtgagatttccattaagctcatcaataactcatgggttattccaaatctgaagtttacttgcaaaacggtgctcgagtttcatttttaagtaaacatcttgcaaaaataaccagtgataaaaaaagatttagacagtgaaaaaaacaacaaaaatatgattaagaaataactggtttcataaataaaaaatacacatgaaaataaaacaaaatataaatgtaaaaaagaaaaaaacttaaaatacttaccacattggaaaaacttgtggatttcttaatggattcttcaggaatcaaaggactagggcccttcgaagccacacatttcacgccagcacgtgttacacgacgtactggcggcttcggaacatcagaatcagccaacccagcctgaaaaaaataggaaacaaaaattaaatatatacataa

SEQ ID NO: 338015 - DNA, 852 bp, Cannabis indica
gtttgatgttagttaatgaggatgcgccaggtcgacgatctctagtagcctgaaattgccttttgaaatccttcgacaattgttcctaggagcttatggaatggttggtgaatttgtcaaaccaactacttgcggctcctgtcaaggaagttggaaacaatatgcaacacaatttgtttgaaacatttcttgctcacattatggtgttaaaattgtttaagtggtcgaccagatcagtggttctgtgatattgcgagacatgcagatttttaaatccctgagaaaattgtgagttcaagatatcaaggtggaatggttcagtttcttcatctgaatcatatcctggcagtttgacatatttttcatcttaatatttcctaaatttgtcctctaattatattactcacaattgaatgggattcacaggttgttgatttgcgttttgattaagatgattacacatataaggtgcattttgattcaagtgctcacgagggtctggttgccttcgattcaatctctagcaaagattaggttcacgatgcctttgctcataattactcattgacctagtccctgttggaatatattttactaggatctaaatttactaccatgtatgttgtttaacatcctaaatatgagtttctaaaacaatgtaaataaacacatataaagtttgagaaaccttacattgggtgcagcagaattataatggctccttccgctcagatctctaacccttgtatcctgtctgtagtagagtatcaccaagatctgagcccgaatctccttctcttgaatttggattcttcatagccttacatattatgattgagtaccacttgatgt

SEQ ID NO: 338016 - DNA, 688 bp, Cannabis indica
taaaaaaataccgtctgacagtactttgtaaaaaaatggcaaaagttagtataacatataaatttccctaatttaacctacataaactaaagttttgacaaaaattcttgtagtgataatgagtgtattttttggttgtgtacaaaataaatttaaagtatatatatgtaaataaatttattttgtgtattattttagtgtaatatatataatgatcatattacaacaaatttcactttccaaaaaaaatatcacaacaaaattcccactgtaataatttatcttttctatagtataatttttttacatgtatatatttatttatctatattattgtaaatctatatatatattgtcttatgtttaatacaattataaatttttattaataaaatcatgtgtattatttttttttgtagttaacgttatttgtgttttatagtttttctgatattaattaattggtttatttttttttttatgaacttgttaattgttatttaattttttttaaatacagttaataaaatattaaataaattttttttaatggttatgtaattaaaaatatgtttaaaagttaaaataataattactattaatatttaactttacagcaacttgttaggttttatgccctaaataaaactctatttcaatgtaatccatattattcaatatcaataaa

SEQ ID NO: 338017 - DNA, 1077 bp, Cannabis indica
agtaaaaagtccctgtggagacgaactttgattacttatcattgtattacttgtttgtgattgtgtacacttgcgcaattataaagcaatataattttcacaacaaaaagcaattctgacgttgggtaaaaacaaaggctttgccacaggaataaaggacacgctaggtggttctggccaggctgcttctcaaaagaatcggtgtttgccttcgaatatttcttgcaagaagagcctgtagcgactagagatatcttcctattgggttctcactatgtgctccctaaccctaacatcgtttagctctaatttggaggtgggttttgagggattgggttcatatgggatggccaattctgtaggaagctcagactctaaaacttcttgacaataaattcctgaaccagagtgggacattactaccagcaaaaagcgttgcaatccctggagagaattttatcaaactagaaggtaatgagttggagatcttaaaacaaccaacatattgcctgaatcctagtatgaacggttttaaccctaaaaaactactaaaaccagatgagatgataacgatacaaacgaatcaagtaactgatccacactatgtaataaacatgagaaagaagaaagtaacttaccatttgaagttagggtttgggacgatgcctggcaattccgtctgcaaaccttcaaacaaagcaaggatcgctttaagaaaatgaagtcggaggaaattagcaggaaaaaggtcaaagacaaggatggcatgcaagtctctggacaggtttaatggtgatccttaacgaagaagtttaagggtttttcccaaactttctgaaatggtgcaaaggtggttcccttgaactattttatacccatgataatgatttcaaaaaatatttgatccaatggatgtgattcgaagcggaagtggaaaagataatcatttaattctgatgtacctcgaaaccacaattgccaaaatcagagggaatgcgtcttttcaaagacagaggaacgtgacgaaaataccctttgtaatcattaaaaagatctttttaaggagcaattgttata

SEQ ID NO: 338018 - DNA, 603 bp, Cannabis indica
gtgccttttgtgatgaaacttaaaatcaatttaatgtgtatattcgtactctaagaagtgataatgccaaaaagtacaaatctagtttacttcaatcttatatggtttaaaatggcatgcttaatggaacttcttgtgttgatacttcatctcaaaatggtgtaacagaatgaaaaaataggcatctccttgaaacagctagaaccctcttatttcaaatgcatgttactaaaccgttttggaccgatgctgtttctactgcatgttttttattagccgcatgccatcttctatttttcatggtgaaattccttacaatttttttttctttctaataagccactatttcctagtgagccaagaatttttcgtagcactttgtacgtgatgttcgcccgcatataactaaatcagatcccaagtcattgaagtgtgtatcccttggatattttcgtcttcagaaagggtataggtgttattgtctcgatcttaataaatatcttgttcctatcgatgttacttttatgaaaaatacatcttattttttatcttcacccactcctactggttagggaggaggatgataatttgttggtatattct

SEQ ID NO: 338019 - DNA, 663 bp, Cannabis indica
taatggtttacactaagtacacaaccattccatcattctgaaattttcctatcactaaagtatatccctagaaggacttaggcaactactagtgtaataccctacatgtaagaaatggattagcaaaaccctaactagataattatgtataattgaggaaattatattattatataatttaatatatgagaatttataggagttatgctatgttaagaccccgtgggtgagctaggggcattttagtaattttaactcgagaagggtaaaatagtgaaattaatttattaatgtgcttatgggactatattattatatagtatgcatgtgttatctttttcaggtgtgttctgacaagttggcacggtatagtcacaaccgggtatttcgggccgaactgggttcgggctcgaaatgcaatttggttaattaaatgacattttatttgatatttgataatccgaaatttatttgggaatttaattatgtatggaatgacaattatgcccttataagtgtaattacatgttatttagccctaggggcaaaatggtcttttgaccttgattttctacatttaataaagaggtaaaattttgagaaatggaggaattttttggtttatttggccccttacctgaacctccctctctctctctctct

SEQ ID NO: 338020 - DNA, 816 bp, Cannabis indica
aaaatgttgacttcgatacactacacctaacttgattacaaactttgtgtcagagcaaacctaaaaatctacagtgatagtgtcactactacgagtgtccatcgacaccactaagtagaaccctatttcggtatcggttagttatttcgttacgaaactagtgactccagtacactacacctaacttgattacatactttgtgtcacgagaccccaaaacatctacagtgatagcatcactacgtcgagtgtacattggccccactaagtagaaccctatttttgtatcggttagtgcttttgttgcgaaactgatcactctggtacaatacacctaacttgattacatactttgtggcacgggacccctaaacatctaacataatagtgtcactactgcgagtgtacatcgacataactatgtagaaccctatttcggtataggttagtgattttgatacaaaactggtgactccgatacaatacgcctaaattgatcacattactttctgtaaacgggaccctaaacatctacagtgataggtgtcacgtactgcgactggtacatcggcaccacttagtagaacccctattttttggtatcggtttagtgatttttgttacgaaaactggtgaaatctggtacactacacataacttgatttacatacttttatgggcacggggaccctataaaacatcaacgggtaatagtgtcactactacgagtgtacatcgggcaccactctgtagaacccttattttcgttataggtttagtgattttgttacgaaacttgtgactccgatacatacg

SEQ ID NO: 338021 - DNA, 994 bp, Cannabis indica
ttaaacaacatacttgtgagtagatctaagatcctggtaaaataaattccaacacttatgtatagcacatgattgagctaatgcatgaggcagagacacacgggaccatcattgacgaaaggactcaagtgagtatgacctttgaggtgctattttcgtgctttaaggctttcaccacaaactatgtgatgaataagctagagctcaacatgactcaatttttgaatgagttgatcgtatttgaaaaccttaacaaggataagtccaaggaaggtgaatcaaacattattgaagaaaaatccagctctccttcttattctgacaagaaaaggaagttgaaagtaaggacaacattgatggctagcccaaaggcaagaagtcacgcaaagccaagaagaacaaaggcagccccaagtccaaggaaaaaaaggtgaaaggcatgtatttaaattgtgatgtaatgggacaatggaagaaaaatataacaagtatctctctccgagcttaagaaagttaaatgtgatttattttttcttgaagctaacttagtggaggatgataaattcttatggattgttgattctgtagccactaatcatatttgttcttctatgcatctggatacttgaatagtcaagggagctggctgatggggacgtgactgtgcgtgtgggtaatggagcacaagtgtctaccaagggtgttggtagagtccttctaaaatttaataataatttttttgttattgaaaaatgtttattttattcctgaatgtactaggaatattatttctgcatctctttttcatgaacaatttttcaatgttagttttattaataatgagattactatttccaagaatgttatgcctatttattctgcaaaacagagtaacagactttatgtgctcaaggcaagtgagcaattaattttaaacaaagaattgtttagagcagcattgcaacaacaaaataagaggcaaaaagtttctgat

SEQ ID NO: 338022 - DNA, 1059 bp, Cannabis indica
gcccctcgagcaaccttgcaccccgaatcttcccaaccattcatagtctcttatcaaagtcgagaatccttctgcacatagaaggaaaagatagggtgaaaggggatcaccctgtcgaaatgtaggaattataggcccaatttcatgacccccccaatgtgattgtgtaggagacagagacagaactaacacactgcattaacaacttcaccacatgctcatcaaatcccaatctcctcaacatagcctgtaaaaagccccactccacccgatcataagccttgctcatgtccaacttaagtgccataaacccctccctccccacttgcttccttttcaaataatgcatcacctcgaaagaaattaagatattatcagttatcagtcttccgggtaagaaagcgctttgagtttcagaaataacactaggaagaacaactttcaaccgattggccagcaccttagaaacaattttataagccacattacacaaagcaattgctcttagatcactcatgctttcgggtttagacttcttcgggataagcacaatattcatttcttttaaatgatcagaaaattcaccaaaagtaaagaagtgttgagctaaccgaatgatatccttactaatgatatcccataacttctgataaaacccaagattaaatccatcaagaccaagagatttatcaggatgcatttgaaagagtgctttccaaacctcctcagcgtcaaccggaatagtaagagactcattcatagcagtcgacacccgattatgcacacaagtcgtgaccctaccccaatcgatctccgaagttgtgaaaaactctctaaaataatcttcaacgacacccgataagccattttcccaatccacccaaatcccacttctatttttaagagacaaagtctaattgttttttcgcctagtactcgcacaagcatgaaagtacttagtgttttggtcaccagattgcagccacaattgtttggatctctgcttccagaagacctccttctgggcgaggtcttcgaacaaacgattttgagcctcct

SEQ ID NO: 338023 - DNA, 767 bp, Cannabis indica
tcccaagttccaatcccgatctgagtctgagtccttggttctgatcctggtttgggttcgagtttgggtccgggtacgactctagctttgggtctgattctaggtgtgggtatttgagttcgggcccgagtctgtgtctgggtttgtgtcaaggtctggaccccaatctgggtctaggtttgggtccaggtccaagtttgggtcccgagtgcgggtccaagtttgggtctggttcatgatctcgttccagatcaaggtccagcatttcgatcccactctagttcttggtccgagtccaggttcttatccggatccctatctaggtccaagtctattttctagatcggctgccagatttaggtccaggtccgcgtctcaattccagtctgggtacacgaccgtgtctgggccccgagttccagtctcagtttggatctaaggctaggtctgtgttcggttctaggtcttgcaccgggtcctcgtcacggtcctagtgttattctaggttcctggttcgacgattcttgttcaggttctaattttgggtcccaagtctaggtcagggttcgggtttggttcttcgtctaggttctggtcctactctgagtcgcagatctagacatcgactacttgtttgttacaggcaccgttactcgaaactcgagggaagatttggatcattgtcatgggtctcggtctggttcttgttcaggtcgcaggtcccatttcagagtttgggttctggatcgagagtggggtgcggttct

SEQ ID NO: 338024 - DNA, 812 bp, Cannabis indica
tcaagtgggcggtagagttgggcgagtacaaaatccctttccaaccccgaacagcaatcaaacccaagccttggcatactttgtggtagaatgcacaagcaagaaagaaagcataccagaaagcaaccttgagccggcaccaatacctcagccaagtcacaatgaggacaaattgacctggaaactacatgtagatgggtcgactacagatcaactatctggtgcaggaattgccctcatcacgcctgagggcaacacttgcacgctgtagttaagtttggattcaaagcatctaacaacgaagctgagtacgaagctctaatcgctgggctaagactagcccgggagatgaaggccgaacacatcgaaatctgcagtgattcacagctggtggtaaatcatgtatccggagaatatgaagctcgaagagaaaagatgatagcatatctgagaaaaatacatgatctgctcgtacaattcaaaagctccgatctcagacaaattcccagagaagaaaatacaactgcagacgcgttagctcgatagtcaagcagcaatataagtgacaaggcaaacctggttcctatccagttcctcgaagagcctagcatcactggcacgaaaaaaatcgaaatgattgatccaaactggatgacaccaatagcaccctacctcaactctggggaaatcccagataaccgaaatgaggctcagaaaatgagaaggaaagttgcacgatatatcatagtagagggagtcatgtatagaagaggattctcgatgcctctgctcagatgtgtcactcaagatga

SEQ ID NO: 338025 - DNA, 1075 bp, Cannabis indica
caagcaaatcaatcgctaagacacccaggcgcttctgtattcgataggttgggaacgattcatgacctaaggagtgatctgaacagaaggagaggagtagacgatcagattgtcacgacaatcgtaaagcccggagcccgtgcttaaattcccgctcagaaagatactgatgtgattcaaatcaacgagaatgtcgagcaggtaagcccgaccatacaggcacaggtagacgaactgaaaaacatgttccaaggcatggctagacagagaaacaatgatctcgagctggaccaagcacgcagaattcctttctctcccgagatcaatcttctggcgttgccccacaagtttaaaaatgccaacatggaaactatgcacaggaaaagaagatcctctctcccacctcaagtatttcgagatgcaaatggatttgcaggggatacgaggggatgtgtgttgtagaatttttcctgctaccctttctgaagccgcccaacagtggtatttcaagttggcccctggaaagttcaactcatggaaagccttctctttggaattccatgcacaattctcctcctcttgccaacttccgttacatctgggagacgtggtcaaagtcaagcaaagaccaggcaaacctctccgagcatacatcagcatattcatgacggaggcgaccaaagtatcatgggtaactgaagatggaaagttgtccgcgatactggggagcattgaagtcctcggtgaacttttgaaggatataaggaaaaaagggccagtagactcaatgagtgattttcttgaccgtgcggtgctgaaggcttcatcatgctcgaagaagccattcaacgagcagaaggtgagcaaaagcctggcaagttgaaagctgcttctactggaacgtccggccatctcccccattacccaaataattcaaactcaagtggtaaacgttctaacaacaacaacaggcaagggaatgggaagaagtgaaagttcgcaggaaaatgcgaacaagctccctgggagaatcaagcaaagtacactgcattcactatcttaactgaagacatag

SEQ ID NO: 338026 - DNA, 1538 bp, Cannabis indica
gtggatataatatgagttatttgttaaacaaaaatattttcaggttcgacgaccttggaaacccgattggaggccaaaaatatcacaacaattttagttagaaatattgatgggattattgagataagttgattttagaaataccggagtattttagggtactcgaagttggccaaataccctagaaaaagaaatttcttagtggctaaaaaataataagataactattaataataatttttttattaatattattattaatattatatattattattattatattagttttatatatataaaaaaaaacttatcgtttttgaatatgtatattatataagttacagtaaatataaacataaacgaatgaacaaatcctcgttctctcctcttcgacaaaaccttctcgatctatattcgttttcctcgattttcaatctgaaacatagtgatctaaactctggtagtagctggatagcaaatccttgaagagggaaagcttaaggtatggtttaatttcgttttaagtttaaaaacgattggttttatataggggctttatgatttagagtggttatgaagattctaacttcttagaattgttctttggtacctatgggactattttggatgtttacttgttgaatttgaggtaatttttttattagaaatcgagtttggaactttttaaagcatagttcgaacgttaatggcatttttcatttaagggctcgattttaatttctgttacgtaaggatggtaatatttatagtatatatgcaccctgtgaagcttggagtgatttggataagttttggtagtgttttgatgagtgcaaaaattgagattttcgtgtttcatagtttttaaaaattcctaggagatcagaaatcgtatttttatcataacttttgactcaggtgtccgttttagacgttctatataccattttgaagcttgcgatgagatttacaatatggtgtatgttttagagccaaaatataagtattattttagtgtctttataccgcatgatttggcaaaaacccctaaattgtcttatatatgtattaagcagtattttgagataaacacttattggtttaccatttttgtgacatagggccgagatcatcggggatagttctccactttggttggtcgatatgtatgaacctggattaatggtaaggaaagtatattttactgcatagtacgttatattataatacaattaatagtgttatgaattgattagtattgagattgagatatagttaatattgttatataatgaaaagattgattggttaagcaatggtaatgtatgatactatgaatgtgatatacagactcacctgattaggtggtgcaatactcctagcgacgtagcaggcataggtacgggcgtcaatgacatatgagtaccgagtgtaggtatatactcacctgattaggtgatgcgattttcctagcgacgtatcaggcacaggtacgggcgtcagtgacatattagtaccaagcataggtacagact

SEQ ID NO: 338027 - DNA, 712 bp, Cannabis indica
ttcaagagaatgcatattggtacccaacatattcaaccaagtgtcaatcatgcatacttattcacaaagtcattaccaacatcaatacttgagaagatggttcacaagattgaaagtttttgattagaagatctctacgaatgcctaaatgagggagagttaatttacaatgtactttttttcctttgaccaagttttttcaacaaagtttttaataagacaacctttatgaacatctaaggggagtgttattaaatattattataattatccaaattaatacattaattagtaccacaaatgctttattatatttccttttattttattgtttagtttcctatcattttagttatatttttgtataaatagagggtttaacccattagaataaactgctaaaaattctcaattaatctctcattttttttttctttatcttctcttttttcctatttttattttattttatattatttataacagctggttaaattttttctcccttatatacacttaaaaagaaaaggaaagaaaaaaaaagtcttatgttggctaaatgagaagggtgtagtattgatgaaaatatatataatatataaataatagataaaattaatagggaaatttgattttttatgcttacatttggttaaaattgtttttctaaacaaataataactaatatttgtaaaatatgacaatttttatg

SEQ ID NO: 338028 - DNA, 2677 bp, Cannabis indica
agaaagtctacatctgggatagtttttactcttggggatggaggagtcgtttggagaagcactaagcaaactgcaatattagactctaccatcgaggccgagtacatagctgcggctgaggttactaatgaacttgtttggctaagaaagttcttctcaggacttggtgttgttcatggaatggaagctacaagagaagaaaacacataaagaggaaataccacatcatcagagaatatgtggcaagaggggatgtactagtggagaaagtggaaaccgaagacaacttagttgatccattcaccaaagttttggctccaactatatttgaaaagcatagattgaatttaggattaattgaaatgaactgatagttttatgttagtgcaagtgggagtttattgggctttgtgccctaaataaaactctatttcaatgtaatcttttttattcaattatcaataaagaaacagatttaatttaattgcttgtttaatgtgttatttagttcatgtgatcatttatttacttatttgattaataaattcatcgaaacccttatcacactatattcttgtttattatgttgtcaacaaagtggaaagtaagcaagattgtgtgattaaatgtgttgacctcgcttttagccaacgacagtgagtctaattttgtaagcgacaagtagtttaaaacaaattgaaatgtaataaagcgaataaagacacaagaattttatagaggttcagccccgagcagtttggtaatagcctaatcctcgttatttgtattgacttaagaacaagaaaaatagttccttttcttagagctcttacaataatatctctgaatatgaattcttagaccaaatctctcgacccttttcccagtgagtatgaatcactatttatagggctataagcttggagaggaattatttcccttctagttacaattaatatgagcagaaagattgcatagtaaatacagaatacactaatcgtgggatttggacagcttgccatatctctgtaaagtgattccaaagttatagggatttctttgatgactcatgatgcgaaagctgaatttgctaagtgttggcatgctgcgcggattgctcatcgctccctctaaaggactttttctgagcagatgtgtgaggtgccctgttcggcttgtgtcttgcgagtaggtacccagtgtcgattccacgtgtcgccatcgtgtgatgccaggccagagtgcagaaatttggataacatttgcccccaagtctgtacaggacttccaaagttgcgtgtagacttcatccgagccttttttgcgtttggatgggtgacacgtgtcagatgcgtctattcgcgactcaatgtgaggctgactaggcgtctctttggttttcggctaataaatgctctgacgcaattaatgctttgaaaactgattttctctcaccacgtttgacggttgcaattgattgcttttgatatcccatattctcttttgggggaaccgaggcgtttgtccataacctcatttttcaccaaccttctttgctaagccagttcagagcgaaaagagaggtttttagcttcaagtttgctgaaaaatttccacgaaaattgttcattcaggtttgcataaactgaatctattgcacatttactttctgaatgcgatcttaactttgctgtagaagatatgttgaaaaccctaggtttagaagctctgcgatttttctttgtaacgcttcatgcaacttcgccattcataatacttgcttttttgaactgcttaatgcttgtttttcatctggcttattcaaagcttcatgaaatttttgccctaactcacaaaaatttcaaacttctgagttttgacttttcgtcgaatattttcattcttaatatgttgagtactcctagtcggcatattttcctatttaatgttcaatatcccgaccaaacactcatctcgcgtgttgtcttttgtagatgaacccaggtgagttttggggaagcgaacatcgaatagaccaggacctactataattcttgcacgatgatcatcctcgtctttactctagtctgctttcttcaaacgacagacattttgattcaaatttcccgtccagccacaggatgatggctcgtactaagcagacaatgcgtaaagtcgacgcgtctgaccttcacgtggccaagcatgccacaatgcccagcgccgaataggatccacccgtgcaggaggagggggatcatgaaggggatgctaaggtccaagagatagaggagcaacgcgatgtctgtcctggtagtccttctgaggaggaggaagaggaggaggctgcaccacaaactttgggggatacaatgaggctggggagctagttgatacaggtggtgacgtccttgtcgagggtgtggattacgtcaccgaggaacttactgccgcggtccctcagaggagacagggtgctttgggcagcaggtgggtgggccctccgtccaaggtcagtgaggcacatttacgggatctcgaccagggcggctacctaggcgagctggactgttttgttcctgcctataacaatcgagccaccaaccctcaaagggggatgtgtgcctggtcggtgttggaattaattttaccaggatctttgatctactcacaagta

SEQ ID NO: 338029 - DNA, 1095 bp, Cannabis indica
agggccgcatctcgttggaaatagtaataatacctaaaaaagatacatcaacgaaataaagaatggacaattgacatttgctctagaaccactaaaaagaggaaaattagatgaaccttcgattatcttctcggaggaagacacaaaacatgtgcagtatttgcatgttgatcctctcgtccttacagttcagctcgccaacaaaagagttaagagagtattgttggacaacgggagctcagtcaacatttacaaggatgcactgaagaaaatgaggttacaggatgcgaagttgaagccttgcatggtaatcttatgtggattcacaagtgatagtgtcgccagccaaggcatcatagaactttcattaactgtaggagagccaccattatcaacaacgctaatgcaagaattcttagttgttgatcttccattaggttacaatgtattgatgggtcaccctgcattgattggactaggggctgtaagctcaatcaaacacttatctctaaagttcccaacataagcgggagtaggagtagtacaaggcaactaattgttggctcacgaatgttattgcatagaaggggagaaggaagatgaggatctagatcccaggatccaagacaaaaataacaagctcaaacctattgaagagctggaagaggttattttagatccaaataatcccacaaaatgtgtgtacattgggaagaattcggatgaaagactaaaataacaattaattgattttttgaaataacagagaaaatagcaacgggatacactccattctcattagcattcgactcggaggcaatgttaccagtagaagttaacattacgacccgtaggcgtgaattatataatcaagaagaaaaccaagaacttctgaatttttccttggacttacttgaagaaaaacgtaatgagtcgcaaataaccaattcagcttatcaacatcgaatcatgagatattttaacaaaagagtctaaaaaagacttttaaaagttggagataagacgagtatttactgttgggttttatgccctaaataaaactcatttcaatacaatcagatttacttattaata

SEQ ID NO: 338030 - DNA, 551 bp, Cannabis indica
ctgcgcagaatgtttcgaaccaacgctcctggcctcgatgggcaaagcctcaggcgcctcactagaagaagttgtggcttggctagtttttggagcaggctccttgttgagtgtgagggcaggaggatggatctagacctgatgcttagaagcctcgagatctatggtctgtgaggcatgctttttgttagcagtaatcttcctgggccttttaaggggctccacgttaacgtccaaagaggttttcgaggcaactatcctcttcttcccctttttgcttgaagtgtggagaagatcctctagatccatatctgcgagataaatgtgttaatatctattaaataagcagaaaaggagaaaatgggaaatgaatccccacttaaggaatttaccataatcataagatggcaaagagggaggagtactatattattcactaaactccctagatcatgtgatcataaatatgtcataggggtttagtggatctaaggtccaatctggatggctcgctctatccaacatggtcccatattgctcggcaatcccat

SEQ ID NO: 338031 - DNA, 677 bp, Cannabis indica
gcgattttcctagcgacgtatcgagcttaggtacgggcgtcagtgatatgaaaatacctggttatgggatagatcaaaaccattgtttggtttcttccaggcgtaggtacgggcatcagcattatatgataagtatcgggcgtaggtacgagcttctctgattagacgatgccatatattggtgtcaagttgtggcacgagctcacctgattaggtgatgcagttatgtgatatacgagtgcaggtttttagcacgagctcacctaattttgtgatgtagttatgcgatatatgggtgctaggctatggcacaggcttgcttgattaggcaatgcaatacaggattatcagattaaagtttcgacttgcctaattaggcaacgtgatgtaatgaagatggttactttatgaggtaacacgtatatataatttatataattaaatgaatatgaattttattattggtataatggttttttattaccaaatatttgtatactggtctttattcatggaagatgccagtagtgatttggatttaatcttatgaacaattcgtggtggtttgattctgattgtgtataaatgatagtattcgaataataaactatatgattattattattacttttcttgttgagtccttgtcactcacgggtgctatgtggtgcaggtaa

SEQ ID NO: 338032 - DNA, 797 bp, Cannabis indica
ttcaacattacaattttccaataataaaagtgaacaaccaactaccattacaatgaagatgttatgaatccgtgttggtcaaattaatattaaatatttacatttaaaacctgatttgactagactgtacaacctatcaatgaagatgactttgtgaatgcattggaaaaaggcatttggataaacccaaccaaatggtgatgtgagttcaaatttcaaatgaaatattaaaaaataataattaataatttccaaggtattactaattacttcatagttatatgtaattattttactaatattttaccatcaatccgtataaggtcacatcagtagggtgtacgatctactttgaaaaccctagctcataccatatcaaatattaaaacaagagcagaacacgccaaaatatcccaataagatttttaaattgaaaatattttttcatttgttctcatcaaacccaaatatgctccgcatgtcacgcattattgaaatttgattgtgacgtactgtgtacagactttgacgtacgtattttaaaaactttcaacatattcaaatacgctgcgaatgtgaggacttacgtagaaatacgttattagaatatataataaatcatttatatttggtaattaatttgtaggaaccactttcgctataaagatggaagttatttttgtgagttatgaagggtacaaagttaggtgatatgtcatccacttattttattatggaattattttttaaaatttgacattgcaagtgttattcataacttattggaaatagtgaaa

SEQ ID NO: 338033 - DNA, 785 bp, Cannabis indica
agcgtaacatgcaggtctgtgtcttacaaaaaaaatgtgaatggcattaatgtttatataatgtgttaattatgattattgatattttaaactatcttactgggcttggctcacgagtgctctactgtgtaggaaaaggtaaatctatttctgatcagccatgagtgcgagagttggatgatgtatgtacatgttcaggccattctagaccaagcgggttggggtctatcagtgatgaacgtttgtaactctgttttgccgcttaggacagctaatggaaagacttgtagtattttgtaaaatatttttgggatcccgagatatgtaaccttagattgtaaaattaaattattataagttttattttcattctgttttagtttaaagtttaaagttcccgcacttttctacttagtaatctcgtttaggggattaaggtttcttaatcacattgggtagcatgcctaattgttagggtgttactgtttggtatcagagcgctaagatttttaaacatcctgtagacccagcgaacatgttcaatcattgtatgagacaagctcaactcatggtgttgtaagtgttgagagtaattgccatattgcttatatgatcatttatttaccgctttccattttaggcagtatgtgagcatctagagtatttatgttatatatgatgccaagtttaaaatgtttatttatgttgaatggaatagttgagttagggtttgagccaataagtgcataagtgttgtattggtgcttaactcactggggttgttg

SEQ ID NO: 338034 - DNA, 856 bp, Cannabis indica
tggacggaggctgagcccctcgtttctataaccagcaagaaagttcttgactttgtcgtaaaaaacattatctgtaggtttggaatgatggcaacttgatggcaacttgatggaacccaatttgatggcaacttggtcactgaattctgcgaaaggaacaaaattaccaaaagcttctcgtcagtatccaggccttagacaaatggacacgtagaagctgtaaataaaaccttaaaggatactatcaagaagaagttagacactgcaaaagggagatggattgacgagctatctcaagtactctacgcccactgaactaccgagaagacagcgacgggacacactcctttctcattagcatttggctcaaaagcaatgctgtctgttgaagtgaacagatcgactcacagaagagagttttataatcaagaagaaaaccaagaacttttgaaattgtccttggatctacttgaggaaaaatgaagtgagtcgcaaatcaccaacgcagcatactaacaccaagttacaagatacttcaacaaaaaagacaagacaagactattcaatgtcagagacttggttttaagacgagagatgcatctataggagtgttcaacccgatttgggagggtccatatgtcatcgaagcagtagttggagttggagtttataaattggctcgactcaacgactcgctaataaactactactggaacgtggaacatttacgaccttactactaataaataaatgatgtaactcacattactgatgtaaaattcaacttcaattatgaataaagagaatcatttatattaagtaattacaaagtgttattctttaaaaattacttaag

SEQ ID NO: 338035 - DNA, 506 bp, Cannabis indica
taatttttagttttaatttttttgacataataattaaaatatattttattttatttaataggttaatttgtaagaatatgaattgaaagaaaaaaaagttaaaaagacctaatataattaaagatataaattctatataaaataaaaattattaaaaatatctttataagtttttgtatgtaaataaaattcccttaaaatgttcttttctttatttttttaaggctaattagcaatttttccccccgaactttgacatgttctaaatcatgcccctcaatttttttggccgttaaaaattccccctgaactattaagattgttaaatttaaggacttttatctaattgtagtaaaaaaattctaatatagatgaaagttcagggggcatgatttaatacatataaaagtttgaggggcatgatttgatagatatcaaagtttggggagcatggtttagtacttgaaacagtgaaattgaatgaaattagacaaaaatcattaaat

SEQ ID NO: 338036 - DNA, 1082 bp, Cannabis indica
aggctgaaaagttaccatctttctcttgtaatcaatactggtattgtatttagaaagcaaatccatacccaaaataacatcaaagtcccctaaatttagttctatcagatcaaccgataactcccttccttccacaaatactagaagggatctcacccactagagataactagctctccaataggcaataaagttctaaagcctctagcaagtacatcactaggcctattcaacttctcaattattctacttgaaatataagaatgcgtcgcaccagaatcaatcagaacagtcaatcaagtaccatcaacagaaagctgacctgtcacagtggaagggccagcatcagccttggcctaagttagggcaaacactcgagcaagcacaggtgtatcatccttcttttgctctagtcgcagcagctgtggacaattcttcttcatatgacccactaccccacagtgaaaacatgccctagcctgacactcgccctatggcgccttttacatctcgaatattcaagaaaagtccgctagttttcgtccccaccacgccggaaaccttggttaccttggaaccttttgtttgggcctgtagtttatggttcattaggcctcttcttgcgattaccaggatcattacccctaccagaaccaacatcagatgtctgcttccatgaatctcttcttgcaatatttttctttcgtatctgatcttctgcaccctcagcagccaaggccagttcaactatctgtgctaagtccgaacaaccacaacttgtttagcagcaacaatcacatcccgtgtaatgtgttcatccaatcctcgaacaaacttttcctttctagcagcttcagtagccacttcatcgaagcaaatttttccagtcaatcaaacttagtggcatactctgtcaccgtcatgctgccctgagtcaatcgtataaatttttctacctttgttgcctagatagactcattataatattgctcataaaacaatgttcggaaggcatcccatgtcatgttattcaggtcatgaccctaagacacgattgttggaaaattattttaccaggatct

SEQ ID NO: 338037 - DNA, 671 bp, Cannabis indica
cgtacatccaagtaaagcctacgctatacaacccataaaaataaatatccaagatatactgtaacgctttgtctcacaggaacgccacgtgtgtgtacttttacaaattgatttataattaatctattaggttaagaaaagtgtagtttaattataacttttggattaaattaaaacataactattaaatcaaagcactgttggatttggggatcccctgtttgcaaacccttacattttgtctcaaaatttatattacaaaatagggttacaatataatacataattaacaggtggatcctgtccataggaagccaaaacaccacgattgatatgtacatcggtgggagacctctgtctcatgattgaccataatttcttcctccttacccgcaccatgaagcacacgtgagtcacattgactcagcaagaaaagctattaaaccaagacatggacaaacataagtaatcacaacatgacataatatgtgttgtgaaaatttatattgatttataattgcgcaagtgtacacaatcacaaacaagtaatacaatgataagtaatcaaagttcgtctccataggaactttttactaaataatgcgaaatcaactaaaggcaatttcaagaatttcaaataaaaataagacaaagtaacaaattaattcaag

SEQ ID NO: 338038 - DNA, 966 bp, Cannabis indica
aataggtccttttggaggaaaaagaacaactgttgggcacaaataacagggcccaacgctaaggtttacacttggggctggccctgcgcctagattgacattttgtcaacctcaaccatttaaaaaatggagttttcatgaattattttgagcatctttcccatatttagaaaatattgagattcaactatttttggggaccaaacagaatttccgaatgggaaaaactgggacctagcgaccagtttgacattttgtcaacttgggttgtttccgatcaatttcaaaaaaaaaagtgttttgggaattttttcgatcataatgaataaaaaatattcaagtaaactcaaagtgaaaaccacaaacccgagtccctggaaacgggacccattgcccaagttaacctagggttgggcccagtgcctaggttgacaattaacctaggacactgccttcaattgctcaaatgccaaatctaatatgaccattgaatctgacatggtaaaagacgggggaggagactctgtcctcaagttcagaagccttggaagtatcaaaaacagaatcccaggagctcgactgaaagggcccaacgcccaggtcaacaaatggccttgtgtactggattttgcttattcgaatctcatgtcatttcaaattttcatctagtttttaacaaatacaataatctatgaagttagaggaatcaaattcacaactttgcatttctcatttccagcacttctagaaatgaagagtttcgagtctcccatttctgcaaaatagcaacatctccgagaatcgatgactagctttgccaaaacctataaatggactaagtggtgtcaatctaacacttgggcatcttaaaggacatccctgctgggttttgtgccctaaataaaacccatttcaatataatcagatttactaattaataaaagatcagaaatcgcttttatgttg

SEQ ID NO: 338039 - DNA, 512 bp, Cannabis indica
tttcataattaatcataaacaactgcgaatttccaaattaactaagcgggctttacagaccctgtttgggaattcaacaggaggagccatacctgacggatccaagcagaataatggtgttattccacctgtcaaccaagcgaatcaatcgctaaggaagccaggctcttctgtgttcgataggctgggaacagcccatgacccaaggaacgatctaaacagaagaaggggaaaagacgggtagaatactacgacaatcgtgcagcctggagcccatactcagatccccgctcagaaagacgctgacgtaatccaagacggccaaattcccaagcaagtcagcccagccttacaggcccagcttgacgagttgaagaatatgtttcatggcatggctagacagcgtaacaatgatcttgacttagaccgtgctcgcgaaactcccttctcaccagagatcaatctcctcccactgcctcacaagttcaaaatgccaacgtggaagatgtata

SEQ ID NO: 338040 - DNA, 559 bp, Cannabis indica
gttctggtcctagtctgagtcccagatcttgacaccgactactggtctgttcgaagccccgttacccgaatcccaagtcaagatctcatcactgccgcgggtctcggtctggttctggttcaggtcgcaggtcccatttctgagttttggtttgggatcgagactcgggtgcggttctaggtcccgaacctggttttatgaccctagtctggctctatgtttaggtctgattttaggttcgggttcgggtaccgagtccaagtttgggttgggatccatgttcggctcccaactcgggtctaggtctgatttggagtccgggtccttgtccggttacggttctggatctagtccaatttcagttatgattccaagtccaagtcctagttccagtcctggtcaacttccggttttggttccaattttgggtgacagggtactagttcgggtccacttttgggtttaggactgggctcaggtccgggtgtgggttcacgtccttgtcagggttcgggtcaagggttgggtcccaaatccagacaccgactacgggttttgt

SEQ ID NO: 338041 - DNA, 675 bp, Cannabis indica
tcgaaaattataagagcaaaaaagaagaagaagtctcaaactctctagttgtctcataagatgtaaactatgtttagagtcattagttggataatgagactattcttttctttttatactatttcacttagggttaggattgaattatatggaataaaaaatgataaaataatagcaaaattaacacttagtggccgaccatgatgtggaccctacactaattatatttttgccattttctcaaccatttatctattatttcacaaatgtcatattttctaactctaatcctataaatgccaaaattaattagactccacaaagtctcttaattaataaataaaccctaaaatcctttttttcacaatcaagccataacttagtaaaaattcataaataagacatagtgtaatttagaattataattgattaattaaaattaattagctgagtcttacaagcagtattgtctcaactagtatggggaccatgggcctatataaccaagcttccaataaacagatatagtctagaatttattaagtaaattccctaacttatataacacttatccaatgtgcaagtaaactacattgtagattatcctatcagttaaaccttgtgtattgataaattagaatcttgattactttccactgtgttgataacacaata

SEQ ID NO: 338042 - DNA, 805 bp, Cannabis indica
aaaaaaaagaactataaaagtaaaaataatgaacacatagttttacgttggtttgtcagttaaaattactgcatagtccacgagtcaatcttattctagatttcttgattgtttcttcagggccgtctcttttattgagtctttttcgtccccctttctgatcatgcttaccactagtgtgcagttaattacaaagttgattgtaatctatttacaatgattatcccctagaatcatgggatttgatcacaaatcacgctaagtaaatgcaatttttatttagaattcacacagctgtgaatatcctgcttttagctgagttacttgatggcgagcccgaagctcgtcatatatctttctacgacggtttgatattgcttttactacaattctgacaactacagtttctggtgtcgagatgactctttctcgcatgcattctctcttacagcgagatggacgcctcgctacctatcactttgatttacccatctacttatacttagtttgtataccgtgtactatacgctaagtatttttgttgtcattatatctcatccacgtgacaaggtcaatgcctcggctagcacgctcgcagctacatggtttctcatcgaggcacaagtcaacaattagtatatttttatctcgcataagactgttcagctagtcgagttataaacatactctgcatattgtgcttttaatgagttattccacgtcaagtgtaattgggattacgtgtttgagttctttattcttcctagcttgacatgtgtcttcctctgatgtgctcactgaattt

SEQ ID NO: 338043 - DNA, 1465 bp, Cannabis indica
ataaggagaaaagtaaactacaaaatacttaccacagtgagggagtggctgagatcctggacttggaagatggagttcaaggatgcacaagcagcgaaccgcctaggtgcacaccgggtaagctgggacgcaaactcgccagtcatctccgcggcaaagggagctaatgtgggcccgaggaaacgaccgaaccagtccgacaggggatccaaatttagatcccacggattctggtattccgggttgttgagagtattttgcatctcaactcgtaagatcctcttaagggcctccacctcagcatacccccgggagtattcgtccatggcgtagttgtgtttagctatccggagctcctgtctcgcctcatctccaggaaccggagtcagcacaatattgggaggggcagtgtgttcctccatgggagagaccccgccatcaagaccgtgggccggagtgtcagctctccgttgccgtttgggctcctcctgggcaaccattttgcccttgcgtttgcgaatcagagcaacttcttgctcttcttcactttcttcaacttcctcaggaagagcccggtgccctccttcaccttcttcaacttcctcagaaaagccccattgcttttcttgaccttctcccgggagcacctcctcatccactaagtcaatagtgtctggaggagcactggaagaagcctttagagggggggggagcttctggagagtgaaccccagcaagttcggccaagatggcgtccatggaaatgcctgctacaacaaaagaaataaggcaagtgttagaacatccgtgggaaacaacaaacactcagatataacaaacaagctagtcctaccctgactctctaattcggccctagcaaagttccgaatcttaatactggcaacatcgtctctgagatagctgtccgaaggccggaaccagctggatgaaatataagctgaagggtctaaggaaacgggctccggagtgccagaacccatccaggaccgacctaggaaatctcctaagttggaaaattaaaactccttcaaatggtctccccaccgggtcgagggaatcctaaacctataaagacgctcatcgaaccctacaggcctaagaccggcatattcgccaacagaagggacgtaatgaactgcaaaaggagacttaccaccggaggcggaagtgctggcgcccaaagccccagtgttcggctcctgagccgaaggctttggcctaggagcccttctctctgccgagtccccgatatgaaggggcttcccagcgatcgcctggcttctcctctcgaccgggctccccacgcgaagaggcctcccgaaagccgcttgagccttagagtaggctttctcctgagccttccggtagagatagtcctggtacttcttctcggcagtggcgatgatctcgtcccgaaaggtcttctccacggcaggcaccctca

SEQ ID NO: 338044 - DNA, 681 bp, Cannabis indica
aatatatttaaatggtaatttgtgtaataattaattatgaataagttagaatttagataaagttagcatttgtaattagaatagataaatgataggtttgaagatagaaaagattgttttatttaaggaaacaaaataatgacaaaaaaatcaaacccatgggcccttaaaggggattttgaccatggacttattttagtgtcattatatctttcttaatcaacccctttagttctataaccctattatgtccctttaaatagaataaaatggcttttattctaaagtctcgctagactctctttcatctgataagttgaatgaaaggcatagctattattattctattgataaaatttgaaattctctttaattttactctcaaattttgtgctcctaggtgttgagagattgcccacaaatatcaaagcaataatcaacatagtgagaaagactatgtagtgtaattgtcatctgaaggagaatccaagttcagatcttgataatactttgctactgacatgaattaagagtaagagatcgagtcttattattattcttccatcactgtaaggatttcttagtctctcatatgtttatttatcatatttaagaattttatatttaggatgttagattataaaattataatcaacatacatgttagtacatgtagatcct

SEQ ID NO: 338045 - DNA, 581 bp, Cannabis indica
tttcacttttagtcacaaattttgttgtgactaaaagtaagattttttgtagtgtgagactgtcttagtgcaaatgggtcaaactttactttgggacatgagctagacataccacgaacatattagagacatctgaattagattcagagaacattcatttttgagcacccagagcacccagcgcccaagttgacaattttccaaactgggccacttctaagcattagaccaaaaatttgactcgtgcatcttctccgtcttcatcaaaaatgaggaaaaagtgctttaggggaagaaacaaaccaacttggtggccaaaagaagggactcgcgcccaggttgacacttggtgttggcccatctcccagattgacattttgtcaacctaaggcaattccaaggagtttttttcgaaaagtatttaggttatattatctattttcatcaaatattaagattcaattatttctagggagcaaacagaagtcctattttcatatatctttatatattaaaagagcctatctaacggcattcttggtttaacagattatacttaaaaataaaagaatattctgtta

SEQ ID NO: 338046 - DNA, 1287 bp, Cannabis indica
cttctctctccctatctggctgaccactccctctcttcttcttcaatatttcgaaatccttagtgtatgagtagtgcccacacacatcaagtgatacctcaatcatagtgaggaagatcgtgaagaaagatcatcagcaaaggagtttcagcatcaaagattcagagaaagagatccaggttcagatattgataatgctctgctacagaaaggaatcaagggctagatatctgaacggaaggagtcattatattccgctgcacccaatgtaaggtttcctaaactttatatgtgtttatttatcgttttagaaagttcatatttagggtgttaataaacatacttgtgagtagatctaagatcctggtaaaataatttccaacaatttttgtattaacaaacaacactactctagagtttagtttctacttttttaaaaaaaaaaactgggataaaaaatataatttatatatgccttatattatttaaataaatgcatataaatttaaattttaaatcaaattaataaatgaaaatatgaaagaaaaaaaaaaaagttcaaaatttgtataacataaatttttatatattttttattatatagtgattaaattataatagtattatcattataatagaatttgaaccattcacagcactttaaaatttataatttattaaaatcgttaattctattttttttttctacagctcagttgcaactgttttttctcacaatacatctataattattttttcccatagcaccactgtacaaaactgacccttagttacaagtgtattctagatagaaattctactgtaaatatgtaagctatgtaactatatgtgggattatatatgtatttgttctaagaaaaagatagttgaaacttgaaagcactagtttgtagaagagtattattattggacacaagtggtatttagcatcttttaaaagtaacattttataattggttaatgatctttaacaaatttttatattaaattacataaattttattatttaattgcaataataataacaactaaaagggccttaagccttattagtccctttgagcacttttgttttagagtgatgtttgtgacttttcttcttttcttcttttcttctgtttgattacgtcacattatatggtggcatttggtaacacttttttaatcagtttttttatttttaaaattgaaaaagtgaaaatatttttcaaaaacatgttctataaaactgcttttacttttcaattttataattgagaatcaaaa

SEQ ID NO: 338047 - DNA, 2025 bp, Cannabis indica
tcatctgactcagcattacaacagatctaaacaattaaaaaaattaacaaattatactttaatacatttttaagactttatacactatatataatttttacaagattataaagaaagaagaaaaagtttaaggattgttgcaacaatttcaatatatataactttttaattactatgaaagtacccatttgatgtgtgatgaataaagtatctcctacatatttttaggagtaatggatttgtcaacaaaggcaaactagtgtgtgtggtttgatttttatttaagacttttatttctataattttaatattgcagtccttagaaacatgtgaaaattcatacctaaccagaccatatttattttgagcatttttgaagctaccactaccatcgtccatcacacaaaatattttctcattttaattaaatgtgaagtttttaaaaagacatgcttaacattattaggaagtacatagactatagactaactgtaattaattatcaggcttcacatattttgttttaataattattaactataattgcaaaatactatctcatactaggtttcaacattcctagtagaaataactccaaccgtacttcataaatgcactatttttttttttcataaatgcactatttagtttgatgaaaaacggtaacaaaaatattaattttttattagaattataaaattaaagtgtaggaagttatttattttgttttgaatgaaagcaatctttataatctttattagacagaaacacccgctagtataatggactgaagagcaaggggaacatcgctctcagtaaaaagacgacctgaccaataacaaacaccacgtgccatatgaccagtcgaaacattactaaagaagataaaataaattgacaatcctaaacaaataaaccaaaaatagaaggcatagagaccgaactaagaatagcttgaacaactaaaatgcaatccgtctctaaaatgacatttgacttgttattcctctttatccaactaagtgcctccttgacgcttagaatttctgcaatttcgggtccgcaactaacagaagaaatagttgaaaacgcctcaattattcgaccatcacagccgcgtgctacaaacccaataccgatctcatttgtgtcttcaaaaaccgccccatccacattaatttttatctgttcagcagccggtttggaccagtgttctctcgtgtcagtacgattagacggcagtgaacccgagtccagccgcttagcctgagcacacaaccattgtcgaagagtggtacgagccagccaaacaacatcagcagcactacagcttttaccattccgagccttccaaattgctcaaccaactaattcaaccaaccccatatttcctactgtcaacacttctataaactagtcaaagaaattggttgctgcagagtggccaacacctaatgcagagcggagccaacaagaatgagcaaatgagcattgaaccaaaacatggaaaattgactcttccccatagctgtacaacacacaatgtaaatccacaggaacatgtttactatgaagttgagtacgtgtaggcaaacaacccgaaagagctctccaaacaaaatgtaaaaccttgggaggggctttaatcttccacaacatcttccaaacatcatcctccatggaagagttccaactaccattgaccgactgtaagtgattataggagcttttcacagtaaaaaaaccagttggatccttgttccaaaaccaactatcactcacaagattaacactcaaaggcacctgtttgatgagttcaacatcacgagaatcgaataagtcctcaataagctccaagtcccatttctactatctggcttcatgagttgagacactttgtaattggtcaaggccggatgattagataccatacaaggattagcctcagacaagagccaaggtgtattaagcacctcagtgtatgaaccagatcctattcttctacgggcaccatctctgagtagc

SEQ ID NO: 338048 - DNA, 512 bp, Cannabis indica
ctatatgttagagaaatagtttgatttcacggtgtcccaaagttcattattttttatagggatccgaagttcacatcgagattctgagatagtctacattgagctatgggtactcaattgaaatttagcatgacaatccatcttcagatggatggacaattcgaaaggaccattcaaattttagaggacatctacgggtatgtgtacttgactttgaaggatcatgtgtaaagtaccttcccctgatcgagttctcctacaacaacaactatcaggtaacaatcgggatgactccctatgaactattatatggaaggaagtgctgatcacctattcattgggatgaagtaggtgagagaaagttcttgggccccgaagctgttcagagaaaaagtgaggcagttgataaaatcagagcgcaaatgctcacagctcagagcagacaaaagagttctacagatccaaagcgtcgggatattaatttttagattggagacatggtatttcttcga

SEQ ID NO: 338049 - DNA, 681 bp, Cannabis indica
aattcctaacctaaacctagtagttgtctatcctggtcatacagttatcaacagtgatcgggaaaatgctgatcacaatctctttagtgactattttgcagagaatccttgatttctagagtcgatgtttcggcaacgatttcggatgggtcgttctttattccttcgtattttcgatgcaataacaatgcacaatgactactttgtccaatgaagggatggtattggtaaactcagattatcgggtttacaaaaactaacatctgtatttcgaatgttggcatatgatgtaccagcagatgctactgatgaatacattaaaataggcgaatctacagttttagaaagtttgaaacgattttgtcgtgctgttgtggaggtgtttggaagtcgctatcttcgatcacctgaagctgatgacgttgcaaggctactccacattggtgaacgacgaggttttccaagaatgttgggtagtttagattgtatgcactggaagtggaaaaattgcccaacaacttggggaggacaatatgcgggtcgtagtggatcaccaactattattcttgaggttgtagctgactatgatctttggatatggcatgcatattttggtctaccgggatctaattgttgggttttatgccctaaataaaactctttacaatctgattagttatc

SEQ ID NO: 338050 - DNA, 937 bp, Cannabis indica
taaaatagttatagtttaaattaatgttaaaagataaatatgaattgaataaacattaaagtattaaataatatttttcaaaaattaaaataaaaaatatatacacatatgaaaattctaaatttcagcttcaatattcaaatacaatcaaaattattaactataaattctaaatttcaaaacaaacatgttaacgcagattttcgttaactaaatttgagcctaacagtaataatttcacacagaaaaaataaaagctatagaaaaataatatatgaacacagggttttttacgtggttttgcagttaaaattctgcatagtccatgagtaaatcttattcagatttctgagtatttttcaggacctctttcatatgagtttttttatcccttttttaagcttgtttgccactatttataagtacatagtaggcagttaattacaaagttgaccagaatatgtttacagcaattatccctaaaatcgtgggatttgattacatatcacgaaatgtaaatgcggtttatgatttgaaaatcgtatagttgtgatttttccgcttttactgggtcaaaattgtcgtgtattaaacacgtctttaattgttgaatctggagatttctcgacagaaacttgattatagtgatcccaataacaagctggggccattcttccttccgcggttgatgatgtatgttatgtgtcgattgcagttatttataaagaaatcttctgcctcgccagggttgtaagcctcactcctgttagttagatgtagctataggaagtctttccatagcgagatggtcatctcgcatactagttctttgagccgatccaacttttacacttagtttgcttattgcaagctaaggacttttaaagttggtatgtatcacttctccgtgcctcgctattctacattagtcgattta

SEQ ID NO: 338051 - DNA, 573 bp, Cannabis indica
tgacgcaaatgctagtaataataccgtcactatccattatactcccattaatgtcaaaccacttacacaaaaataagagaacactccagtcttttaaataagtgaacaccataatttttttcaagcgtgtcgtaaaaattttgtccatcttcaccgggcaccataacaccgctattttgtgttttgcggttatcatccctttccttgaccaaaaatttaataccgttcattatgcaccctagataaaaataaattgctgcattcgctgggttagcaatagcatacaactcatctaacactgcaccctggttgctcaaccgtagttcattaatcgacattttagaaaaaatattaaattaagaaaagttgaacagttattgagaacaagattatgagtattgagaggcaacaataaccattcagggaactcaatctcctgcactttttcaatattgcctacaccccttgcttgaagcaactccttgtgctcactatataatataatgcacttagtaagttaagaattttttaggtgaagtcgactattgtgagtaactgtttatggaatttata

SEQ ID NO: 338052 - DNA, 538 bp, Cannabis indica
atatatacttattattgttaataacaacttataattataatagttttttaaaatatcattttttttatgtgttttcttaaggctcccatatagaaacctggctttatatgagtatgaataattaaatgaaacaaaacaattcaataaaatttatcgctatgtatatatgttaggggattaaaaagaagctcatgtttaattaaaagtaagcatatataagaatttattgggtagggtggaaaattttatcaaacacattaacacgactcaaaatccatacaaattaaacgaggtttaggtttttcttagtttaggtcatttttaggtaaacatagctaacttgtttgttgaacgagtcattttaaggttaccacgtctaactagaaatcaatgacaccatgacttgttgagaattatgagattccatatcaaaattaattggcaatgaatggagtaactcatgttcttatatatggctcaattctctaccatttattctaagtgaaacaatatccgacttattattagtatatacatt

SEQ ID NO: 338053 - DNA, 722 bp, Cannabis indica
aggaaaatacgagcaatggaaatccctagtaaactttatacatgtgattgtttaaattgtgaatgaagcgcaagcaaacatccacatattaaagtttaaacttaaaagtatgaggcattaaaaaatcaaagttggccatccaaccttgcaaatttgtctttacaaaaaaaaaaaagtgccaccaggggaaaccattgtcttggccaaggggccattttctaaaagagaaaagggagataaacaaataaccaagtctacatgctgggagactttgacagttcttcttcttcttccttgacctcgccatcttcctcctccatcctggtcttctcgcaaagggctaaagtttcctcttccttctcctccaagaagttggtgtccatattagggttcttcatccaagcccaatatattgtgcgaaaacaaacctttttgcaccgttctacggtctcgacttctttttcagcaagcttcttctcatactcatcgactttggctttgacggtcttctcagcctccttttttgccttctcagcttccttttttgccttctcggcttcatctttttccttcttggcttcctccttcgctttcttggcctcttgcttaaggcaggtattttcctgttaggcgtcgtcccgatgcttactcccaaccttgcattgggatagtaatttgtggacctcgccctctaagtattcgagccgctcaaagagtagtcg

SEQ ID NO: 338054 - DNA, 726 bp, Cannabis indica
atagtaaaagaccgaaaccctccaggttgcactgccgcgatatgtacaatcactgccgagctccatctcactattcctccagcttggctttccctttacctacacaaggtagcaaactgatgagtcaacagactcagtaagatatgcaagatatatatataaataatgcaatgccagctttatgattaagccgccctgagcttaataattaagctcaccaaatggataagaacgttcttaagggaagtacgactactgtaccaaatgcactaaagtaccaaccttgtactcatcttggtagggccataactgcactcccggaagctactaagtgttgtaccacttgcacgacgtacccctggtactcgtgttggtaacaccgtaaccacatttataaacaacactacactaacactctataaatcacattcatactagtgctagtagtgcaaatgtctagaacaagcatatattcatatatatatattcttatgctatcttacctcgtttcgtgctcaagtgtgtcggtcagcctgagtggaaacgtagctcgacgctttccaaaacatgctaaacacttttcggggatttaaaatagaaactaaacttaaccctatcgataaataggatgcctataccctaaattacgtaaaaacgggaaaaactagggctcgggaaaaagccccaaccggcagaccggttcccaaccggaaccccagttcctgg

SEQ ID NO: 338055 - DNA, 1032 bp, Cannabis indica
ttaagctccttgagttctgctggagccattttatatggagctttagaaactggttcggatccaggtgccagatcaatcacaaaatcaatttctcattgcagcggcaatcccggaaactcctcgagaaacacgtcgagaaaatctttaaccactctaactacctcaggcccaaatgttttgggtctactggagtcaatcaccactgctaaaaatcctacacatccactgtgtagtagatccctagctcttagtaccgaaataaccgggatccgagacccctgaactgatccaacatagacaaatggatcttcaccttctggctggaaagtcactattttccgcttacagtctatactggccaaatacttggacagaaaatccatcccaagtatgatgtcaaactctgttaattcaaattctataaggtcagcactcaactccctatcctcgatcctaactggcagagacctaacgcgcctattagagataactaactcccgcctaggcattagggctccaaaccctctttctagaatatcacaaggcctacccaaaagatcaattattcgtgtagccacatatgcgggtgtagctcccgaatcaaataatactgtaaacaaagagtttttgacgaaaagctgacctgtcaccacagagggagtggctgcagcatcagcttcggtaatggcaaacacccaagcaggtacagttttgcctctaacttccgctcttctttcttcacatgagggcaatccttcttgaaatgccccaccatgcagcacagaaagaatgtcttccgattgcactctccctgatggtgtttcttacaacgtgggcactcagggtaagaataaccttggcgtccacctctaccttggttccaacggaacctcttactctgccccgacccatcagatgttagggtaactttcctgttctgatttgtggtggaatcaccaccatccctaccacaggcaggagtaggaaaagtgggggttcctgttgggttttgtgccctaaataaaacccttt

SEQ ID NO: 338056 - DNA, 1137 bp, Cannabis indica
cttccattcttcagcatccacaggatgcctaagcacaccgtcttctgtcgatctctgtgagtaatgccattgcatatcctcagcggtggtcttgaccaatataatcattttagtctcggtgtgagaggaaagtaacgcataactttgtgaggaactttttttccctgacctgtttttttttcacccttcgcgattcgccaaatacagggcaaaactgtttcttctcattctccttccaaaaaatggcgcaattatacttgcacacatctattgagtcgtaacccaaacctagattgcgcaatcgcatcttcgactcatagtgcgacttcggtaattttgtcccctccgaaaatagttcaatcaagatagacaacaacatatcgaaagagtggttactccacctattcaaaaccttgcagtgcataagctttaccagggcactgagagccaattttttgcaacctggatacaacccagactccatctccttaaactagtcatcaaccttgttgttgatcattgataggggttcattcaaagaatcagtagtgctggcagattcgtcaaacccaggatcccttcttaacatgcctgtcaacacatctgccatttcctcttcgtcgttttcaggaagttcaactgggggctgagaaaaagtctcgccgtggaaataccaagggttgtacaaaggttgtatcccgctgagaaataaataaacccttgtagttgcaggtgtgtgaaaattcacattcaaacaccgcatgcacgggcatcgagctaatccgtcagaattcacgtggttcgttgcaaccgcaacaaactcgtcaatgccacttcaaaactctgttgagcgccggtgcgccttcatccaacttcggtcagtaggcaccttccaccatgaagtaattaacaaaaaaagatttaaaacaaacaagaaaatgtgcaagtgtcctaatccaccttctcactccattactaaaagggtaaagaatatcccattcaagtttataatatacatatagtacaatctacgctcttaagattattttatttttgtaaaaatttcggcagcacctccccacagttcttataagttaacaaacttatagtaattaagtttgccgacttacaagaacg

SEQ ID NO: 338057 - DNA, 1443 bp, Cannabis indica
agggcataaaacccaacaaatttgactattgccttcaacctagatgagagagttccttcaatagtgatttcagcctctttcattattcttcactattggaaaccttgagtgatagagtgtcatgcccacacatagccaaacccgaaagagagaaagagatccaggttcagatcttgataatgctctgctacagaaaagaatcaagggctagagatcttgaacggaaggagtcattatgttccgttgtaaccaatgtaagattttctaaattcttatgtgtttaattttattgttttagaaatgttcatatttaagattttaattaacatacttgttagtaaatctagatcctagtaaaatattcccaacatagcatgcatgtttaggattacctgtttgattacataggaatagtggtatccgtatacatagagttatattggatatcgatgaatgtatgtgtaacgccctaactaattaggcacgctatccaatatacatatgaaaccctaatcccttaagcgggattactaataaaattagctcgaaaattaaagtttaattacaaacgaaatgaaaataaacttataatactttttcactttacaaaataaaagatacatgtgtcgggatcccgaaagtactttacaaaatattattacaagtttgtttcctctagccgacctaagcggcaaaatagagtacaaaatacatcactggtagaccccaacccgcttggtctagtgtcgcccgaacatgtacattcgccgttcagctctcatactcatggttgatcagaaacagctttaccctttcctgaacagtagagcacccgtgaaccaagcccaacaagacagtataaaatatcaataacttgtttatcatactatataaacagtaatgccattctcatatgtctatatgacacagacctgcatgttacgctcacatgcctatttatgtctacgtggcgtagacatctgtgttgcgctcacacgtctaaatacaataaggccttagaatggttcttctcggttctggttaccgagtctaacctgtttttgccttgaatgcataacccttaaatctcaatatattcatatctacagcatggcatagcatttacacaacatatatcactagggtaaaaaccctagacaattaaaccgctcatgttagggtaataaccctaatctcggtttctaattactcacatataccatttttaatataagcgccaccgcgcataactctacgtgcttactactgtcttcctgatgtcctgcaatagaagagattccaaatccccgaatgctcctgaccaggtgccggtaattctagtcacaattctgggatttacacaaatagggttaacccctgatttcacattcataaaatattcacgaggcatttaaaattcagataatcacatagagctcgaaa

SEQ ID NO: 338058 - DNA, 979 bp, Cannabis indica
tttgagccatcttctctatgccatttgaatccttcctctgtctttctctctttaatatttcgaaccctatagtgatagagtaagtgctcacacacatcaagtggtacttaatcatagtgagtaagactgtgaagaatccaattcaagagaaggagaatcgagctcagatcttggtgatactctgctacaaaaaagatacaagggttagagatctgagcggaagaagtcatttaatttcgctgcacccaatgtacggtttctcaaactttatttgtgtttaaactacattgttttagaacgtcatatttaggatgttaaacaacatacatggtagtaaatctagatcatggtaaaacatattccaacaactggtctcagagccatggtaatgatctattttcatgaaatatggatttaaaacgatatttttgttgatttggatggtttcatgatggtttatgtgcatatttgatgattatatggaaatcgcaatttacgttgtaaaatattttttgtttcattctatactggaaagtagacaaaaaaatcaatgaatttaggctttatagaactcaatttggattttttatgaattagttatgactttttgaatttgcatgaaaatatttgataccgagcaacacgctgtgcgcgcacggatagggtctgacacggcttcagacacgcccatgtccggattcattgggacaagggctgtcctaagcccctcctgactgaggtttgcgcccccaagaggctactagcagcccttccctcgcccatttgcagcctattgtgtgcacggggagtattcaatgcatactcccctagtgcaatcttgttttgatgatatcttttgattcaaaaatcattttccattgaaaaaaaacaaaatttggtagaatttttggtagaatctaaattttcatttaaaaatctaattattagaataaattaatttttaattaattttttaatt

SEQ ID NO: 338059 - DNA, 699 bp, Cannabis indica
tgcaagacaagaatgtaagagatagcgttatcaactataaattaccatcatcatcagaatcctcaataactgccttgcccttgcctttagatgtaggcaagaggcgagcaaatccctcaaaagtctagcctccaagcttgatctagagagaagcatcaccaactgaacccctactagccaagcatcaacagagggccctctctttcctctctagattctaagctatacgagacaaaggcacgtcgtcatccaagtcaggaacttaaccatctccaggacaagctccctctgcaattggggctcgcacaactccaggagcaagagggtacaaaccatacttttggaatttggccacactggtcaacctgagtatgcttctcttatccacccaaagagacaagatgtggttcaccatatccctcatttacagtgtggggatagagcatttgaagaacagtacctgccagaactcgtagtgtccaatcctctgaaattcctaagcaataaagtacttcttggcgtacccaacaacttttgacatagttgcactattggtgtcacccaaccactggtagccaacttggctgaagttgaagtacccagtcctattctgcttcagagcagacttcagatcaaaataatatctgatctcataaggagtaggctaaggccagcttagctccctatataaaacaaaca

SEQ ID NO: 338060 - DNA, 1028 bp, Cannabis indica
ttgttcctctcgcaaaattcagtgaacaagttgccatcaaattgggttccattatcggatactatcctcatgggaattcaaaacctacagacaatgttcttaacgacaaagtcaaggactttcttgcaggttatggaaacaaggggctctgcctccgtccatttagtgaagaagtcgactgcaactaccacctacttagctcctcctcgctcagtgggtaatgccccaattaggtcaattccccatatagcaaatgggtagggcaaggtcatcattcttagttttgatggcggcacgcgaggtatctgtgaaaatctctgacacttttcacatttcttgacaaactcatgggtgtccttattgatcgttggtttgtaatatccttgtctaatgatctttttagataggctttgccaaccttcatgatccccacaaacgccttcatgaatttctttgatgatttcacttacttctgcagggagaacacacctaggggcatcgaataccctcttctatatagtttgcttttgattattgtgtagcgaggcagtgaatacaagaatttttgcgcctcgtttttgtcatttgaaagttgtccgtcgagtaagtaattgataataggagtcatctatgtaggagagttgtctaccatctcgacgtcttccgtttcacgtatgcttagctcgcttagtacctccgccagaactaagttcaattcatccaagtcgttgtgcgaggccagttttgccaaggcatcggctttagagttttgttctcttgtaattttcttgattttaaaataattgaatatttccaagctcttttgaataaatactttgcaatttttaagcctttagcctagtattccccgaggacctggttcacaatcagctatgagtcactatggcagatgaggtttgtgacttttaacacctcagctatctttaagccatcaattaaggcttcatactcagcctcgttattgatgcgtcaaattaaaatctcagagcatagtaaaacttaaagcc

SEQ ID NO: 338061 - DNA, 487 bp, Cannabis indica
cttcttggaggacttgaagattctggtgggataggggctggctagccataccctgggagagtgtatggtgaaggtcgtccagacctgtgttgaactgtagaccctgtcgaccattcttgggtacaagtgttggctttggccgactaggcctatgtgtggctactctccttggctggccaaacctacattgggtagggtctggtcgcccatagctccttcatggccagaaaaacctacaaacggcaaggtctggccacctataatgcctccatggcatgctagacctgtaaagggtagggtctggccgcctacgactcctcgattgactagcgtcagctatgtgttgatgcaagttagatcacaccagttgctagagttttggggaaccaagtgtctaaagtgattaatttcacttctcgaatcaccattttgggtgtttccacctgctcccagtccttgtcagttgaagattgtgttggaaatattt

SEQ ID NO: 338062 - DNA, 1012 bp, Cannabis indica
acctggacccaggacctagacctagattggggtcccaaactaaaaattagaacaagaatcgagacccaggactggtacagtcgacccaagccccaaccccggtctcggtcccaaaactagactcggacatggacacggatagggacccaagacatgggatccagatacttgacccacgacatggggacttggacccaacccctagtgggggtctagatatgggaatcgtaccaagacccgaacctggaaacatttctagactaggacccaaacccaaactcggatccgagacccgaaatcggaataagaactggaataatgaccgtggaacaggaattggacatgggccaaaaaccagatctaggcgcagaaccgaataatgactcgaacccaagacactcgaacccaagcccagacttgcgccaggacttgcgacccaaatcctgtaacccaggacccattacccgggacccaggtccagaacccaaacctataccagaaccggacccagacttaaacccagaccaagacccggacccagacacggactgaaacttggacccagactcagacccaaacccagactcgtactcgtactagaacacggactcgaacccgggacccggacctagaccgatatcaggtatgggacctagacccagactaggacgaagacctgaacaaggactaggactagaacctagactaggaagaggatcaagactcaagagctgggaccgagatcgagaactgggaccgggaccgagaccgggaccggcacctgggaccgtgaccgggaccggtaccgggaccgagaccgggaccgggacccgagaccagggagccgggacgcgatacttagaccttagacctgagaaccgaattgtgacccaaaccaagaccaagccaagacccaagacaaggaccagtaccgaacacggaccgggacctgcactcagactgggaccctaacccagactgggatcttggaccctgacttgaatcggggacc

SEQ ID NO: 338063 - DNA, 616 bp, Cannabis indica
agacccaaactgagactggaactcgggccccgacacggttatgtacccacaccggaactgagacgcggacctggacctaaattccggactcgatccgaaacacaaacttagacctagatagggatccggatacgaacctcgactcggaccaagacctagactgggatcgaaattctggacatagatctaggaccgagatcctgactaacacccaaacttggaaccgcactcgggacccgaacttggacctggacccgaaccaagacccagatcgggttccagacctggagacaaacccggacacagactcgaacccgaactcaagcacccacacctagaattagacacaaagctagactcagaccaggacccaaactcgaacccagaccaggattagaaccaaggacttagaccaagaactgaatccagacttagatcgggattggaacatgggacacggacccaacctagaccaagaccaaggacgcgaacccacacccggagcctgatctcgatctagactaaaatcgggaccagaacccaaactcagaccaggactcgaactctgacccgaattcaaacccaaactcgaactcagaatcgcaaatggaactag

SEQ ID NO: 338064 - DNA, 421 bp, Cannabis indica
tttactcgttgaccagaccaatcacagaaactctcaaggcacttccagcagttcctggcttcaactaggttagctctacccaccaggattaagtcatcagcaaagaaaatatgagagaggaccggccctcctctacttaacctaatacccttaatcaagttcttgttgagggcatcttggaggattctcgataaaactttagccgtccaaataaataagtaaggagacaatgggtcaccttgtcgaagcccgcaggacggtttaattgaacccactggccctccattgagacatatattaagcgttgtagtagtgatacactgggagacccacgtgcaaaacttcaaaggaataccgcaacaactcataacctggtgaatagtgtcccaactcagccgatcataggctgtcataagatcaa

SEQ ID NO: 338065 - DNA, 914 bp, Cannabis indica
tgaaatggcaccgaaggaaaatcttgctacagtggactaagcagactgtgatctgactgaaccactataattctttgtctcattgttatttccagctttctgttaatcatttctcattcccagtttgagtactcgccactctaggttgaatactcgcacttgttcttcatatagatttctttctgtcattaataatatcatataaaattggtattgcgaaattcactcgacaaaaacaggttcatgattgaagcaacaaaagttaaagggctgactaaggaagggaggttggctgcaatatttgggggcattgagcctctaggagaactatggaaggatattaagagattaattgtgggatcaatggcaaaatatctagatcaagcatatcgattcattaaactcaaagaggcagtacgatgtgtagatacagtgggacaatagaaaaatcagcaacacacgtcagccacccttgaaagagtgcgtaatagctcactgatcgagcgctcttgcgccgaagatgaacggggctaagtgatctgccgaagctgtgggatgtaaaatagcatcggtaggggagcgttccgcctagagggaagcacctgcgcgagcagtggtagacgaagcggaagcgagaatgtcggcttgagtaacgcaaacattggtgagaatccaatgccccgaaaacctaagggttcctctgcaaggttcgtccacggagggtgagtcagggcctaagatcaggccgaaaggcgtagtcgatggacaacaggtgaatattcctgtactaccccttgttggtcccgagggacggaggaggctaggttagccgaaagatggttatcggttcaaggacgcaaggtgcccctgttttttcagggtaagaaggggtagagaaaatgcctcgagccaat

SEQ ID NO: 338066 - DNA, 891 bp, Cannabis indica
tatgttatttttgtaatttttgctcggcgacaacggaaaatgcggtggatggctagtttgatcacatgggtaagtttagaactttatttcttagtgggaaatatattagagaaaatagaataccgggcttgatcgaggttatggttttgaccattttacccttaggattaagttggctttagttttaagcaagagggcattttggtcattttaaaaaagtgattaggtggcttctttttggagatggcaactgtccatttattaatattcagctgaatattacttagttgtagagaaatttaaattagaatcatttaattaaaagaaaaggaagaagaaaaacccaattatccctctctctttccatcctcttcgagcctagcaagaaccagccaagacctgggatttttctggagtattcgaggaagtgttagctgaaatcctgtggtgttaagcaaaggaaaccctagaactattaatttcttgtattttgaagctatttctttaatttgaatatgtgattttgtgaaatgggagctgttaaggttagaaatgtttagggttcgaatcctagggttcatttgagttgattttaactcctagcagctgattttagtgtgtgttgttggttttatgcaagtttaagctttgagttcaaagctttgatctttaatggcaagttgagtttcaatggtttgttctgtgattttttggctggaatatattgtgtataccctaattaggtactttggaaggtttgattgcatttagtggagaattgagcaaggaatgaaaggttttgggaaactggtgcaaactggctagttggtttgcagagcctctaaaacccgctagctggttttggcagggttccccgggcctttcattttc

SEQ ID NO: 338067 - DNA, 717 bp, Cannabis indica
ctatttcaaggcacaaaacaaaacacactagtcccctgaactcatcattatggagcaaacataagaatttcacttcgagtatccagggaagttcctaagcgaattcatcctcataaaacttgtcatataaggatcgatggacagatatatatacctcataataacaagccgacacccattgcaatactcccactgagcatgcagtaacttgacatcttttacattcaaatgtgatttcaagattaatttatcaattttgaggcctagtccaatttttcaatgagagatcaatatgacaagacatattatagtcccatttgataactatgtggtagaaattttaggattgtttaaagctaaaaagaatatcttagagcagtgccactatgtgaaaataaggattatgcaatctgctcgttttcttagctttctcaatgatctatcaacggaaacgatcatgtcatgctagagtcgtttaaacaaaatatatgactcttacgcaagtaaggacaactacttcaaatgtcataaccaaattcaagtaatccactaccgatagggtagaaaagattgtgtggttcatgacatctaatttgtttccttcaccataaaatcatcgataggatgaataaattgcatgtatggatcttaataataattgtgattgatagggagaaaagtattaacatgaaccacaattttcgataattgacatgt

SEQ ID NO: 338068 - DNA, 1372 bp, Cannabis indica
acttatacttagatatttttaaaaacaaaataaataaaaaaaaatcctaagtatagggggatatatatgccagaatgtactattgattatataaaggaaattgattcatgattgttaaattttcaaaattttatcaaacttgaaaatattttgttacaccgagctgtaattaaagtcgcagatatatatatattgaaaacgctagtacccgtgtactgcgaaaatattaaaggataattatccccgcgaggatataaatttgtccaaaataaaaagcaaatttgtctaagtacaaagcgcgagtacccctgtaccgcataaaaagtaaagttaaaaagcataacagttttaacatggaggaaaatcagacatctggaacaacaggagcagtctcatccgcgactttgctgatgacctcgttctcggcttcctcagcatccgcaccctcgacctcttcaggaaggttccctccaccaccttgggtctgagtaggcgacatagcacgaaaagcctcggccatctcagcggcttctgctccgaggatcgagaagtcgaagtctggaactttggaaagagtggtgtaaatgtaatcagacactgcctgatcatattgtttcttcccattctctttctcagcctccaaatcgcgagtcatctcctcgatcttcgcccgcgagttcctgacctcgagctccgcctgctccttagctttgcaaagttcttcaagctctttatccttcctagccgcctcttgcttcagcctcttcatgttctcctgaagctgggcattgtgcctcttcagcgagtcggcttccttcgaacctgcggcagcagcttttatgaacagggtcatcgactgcgaggccaactccacagagcgcgtaacaagctcctcagaagggatctcggccaggaacttctcctgcatggccaagaagtcgcgagctcgaacagttggatcgatcaggactttcttccccttgtcctgcgcggtcttggccagcttcttggaagagtctgtggcaagggtagccatcacatcgctcttcctcttctgggcgacaacgggcgaggtcgtcgttgctccaccctttggcttgatcttaaggacaggcgcagacttcaaaaaagtcatatctgcaaggataaatgaaagataagtataaataaaactcaagatattagtttataacaagagataaattacctgagattggtcgagaagtttgcttggagaggcgtttgtctatccgctcttgtttcctctcagatggttctttgtatactggctccctttgaagacttgcgttctcaggaatcagctggtgttctcgcagcttcccagttgtacacagtaatcgccagtcgcgat

SEQ ID NO: 338069 - DNA, 579 bp, Cannabis indica
ttttgtcatcaatattaccattgataaatgacactttaataatctatttgatataactcaagaccataatgagcaatcagtatcatgcttgtcttaaaatagtctttcaattaaactaaaagaaagtctatttaaaatgaatatatgttttatgagtaattctttacatacaagacataaatgcatctctccatgttgcaattgtcatccctcttgattataaatatttatttataaccaagtagttttacaccatatagcaataggaaaaataccaaagctttattgtctcatatcaatttgtactccttatttatgatatcaatctaattttgagagttggatccttcatggcatgataaaagttggttggatcatcgtctatcattctattaatttcttatgtcatttctctcatagatttctgtaatgacacggatctttgaggttgttaagtttgattatctaaaatatttaccatatcttgaatggatagttgcttggtattgtcttatcaaggttttggattcacttattgatcaatgaaagtcatggaaacctaaacactgtcaaaagtga

SEQ ID NO: 338070 - DNA, 782 bp, Cannabis indica
gtaatgggttttatttagggcacaaaacccaacaacctttggtaaccaattgtgctttacaacgatcaacggagccatcagcattgtatttgattatgtatacccatttgcagccaatggcatggtgaccatcaggaagagtgacaacgatccaattgtcattggcttcaagatcatcagtttcagtatccatggattttttccatatgcgatcttttgctgccattttgtagctggtaggttctacaaatgtataggcaacaagacccgctgctcgaaagtgctgtgttaacctattataagacaaatattgattattaggtgagcagtagaagaagcagcaatggtattgcaaatgtaatcagaaagacgtttaggtttagatgaaattcttcccattgttgaagtgataggagaagtagttgatatgttcctgggtgtggatggtacttcatcaggagtagtgttggtgacaggaaaactgttagaagatgaagtgtcatcaagtttgggaacaggtgagatgtcctcagagggagtatgtgactgtcctgtagaaggaagcaaagaatgtgagaataattcatttatagacgtggggatgtagtttctgaaagtagaaaaatatcttcatgaaagtaaacatctctaaattgaatgatttcttgagtttcaaaatttaaaagattataagctttcataccagggggataacctatgaagatataaggtcgagatctcgaggagaacttgtcccttttggtttctaatgtcgaagcaaa

SEQ ID NO: 338071 - DNA, 499 bp, Cannabis indica
agatcaaggttttcttgttcatctactcataagtcaatacaactaagggagagtagttaccatcatcaaggcgtcgggcctttataattctcgtattttctttactttccattattcatatttgttatttcaatcattcttaatcattttaatttaactcactatcgttggctaaaagcgatgtcagcaacataataattataggaaaagatactagtttgccttaaaagctatggggtcagtcatctttttcttggattttcaagcaatccaagaacaatcaactatttatctcaatcaagctcaatatgctaaagaaatattaaggaaaataaatgtaatacccagtaaaaatatacatatattttaaattttatttgttatacaatttgtgtgagaataaatattcatttatttttactaatagtgaatagagactattgcttagaatagtattgatagatttctaaacatagttgaaattatagtaagtgtcaag

SEQ ID NO: 338072 - DNA, 980 bp, Cannabis indica
taaactcttggctatggaggaaggaaaaaaattttagtaagatgaaggtggaggagtttatgggttctttatgtacttttgaattgaatcaacaaatcaagtagaaggacatatcgatgtccattgctaatagaggtaaaggtattgcttttaatgttgctaaaaaataaattttagatgatgaagaagatgatgagatggatgttttaactaaaaacttttagaaatacatgaaaaagataagtgacaaaaagaattttccaaaattctccaaaggtaatactttttcgaaacattcaatgactaacattcaaaagagaattcaagaatgtgaaggttttggacatattcgatctgaatgtgcaaatacactgaaaaagaatcagaaaagtttcaatgtcacttggagtgacaatgaaacttatagtgaggaagatatttctaaaaatgttgcactaacctaagttccttctaagtttgtttgtgattcaaaggtgaaagaaagattggtatgtttgaataagaccattgagaaggaaaattttgattctaattctgattctgatgaatttgacatctgtgaggagtctctggccgagtcttataaggttatgtatgaaaaagtggatacatgttacttatgaaaatagatcattgtaaaaaataaataaacaattgtctcatcaaactcaatctcttgaattgaaaattaaagaatatgagactgatttttgtttaaaagatgtggaaattattctattaaacaagaaacttcaaaatgtcaagaaaaatattcaaatgcttaaccttggatcttctatttttgaagaaaaatattcgacctaaatgtttcaccatgaaaaatttttacaaaataaattattttggtaatttgaaattttttcaaaagaaacatagtgctttgaaacaaaaatggattgaacaaaaaaaatttctagctggttttttggacaaaagtg

SEQ ID NO: 338073 - DNA, 548 bp, Cannabis indica
aaaaaattcctcatgataatgctcaaaaaatgatcaagatggtgctggtcttcgatctcaggtttgtttttcggtttctttttggtttcccccatttttgaaaatttttcgtattcgacctttgtgggttttgtttttatcgatttcattattttaggttatttattttagcatttcttttgttttgtttggctttttagggcttctattttattaatttgatttatgtgttatttttatgggtttttcatttttcgtttgtttagttttaatttctgtttcatattgttattttttttcctgtttttgtttttccaaatgtgattgtttttcattttagttagttcatttgatcatttctcattttttaattgttgtttttatagttttttaatagtttaaacgccttgctgtatgtgtttttcgagttgttttctgtctatttctatatcatcaatgggtaaaaattagatttatcatgaatgttgatgttcaatgagtttttcttatatgttagtttgtttacagttgttttgtagttttattat

SEQ ID NO: 338074 - DNA, 566 bp, Cannabis indica
tcatccaactattcacttcaaccaatttaaacctgattttcattctctgacaactagtagatgagagacaccttctgtatagtttttgaaccctccttcattgttcttcatatttagcctatagttatagaataccatgcccacacatagcaagtcaagtactcaatcataatgcgaaagacggtggtaaccaacccgaaggagagaaagagatccagactgagatcttgataatactctatgacagaaaggaacaaaggttagtgatctgagcggaaggagtcatatttttcagttccaatcaatgtatggttttctaaactcttatctgtttaatttcattgttttagagatattcatatttaggatgttaatcaacatacttgttattaaatctagatcttggtaaaatattcccaacaacaagcccatacaagagagataatcagttatagatagtcttagggagcaatgcacctctaagacctgaaaatattcacaatacatatacacacaatatatacacacatattcaataaaataaaaaaatacatatatatactata

SEQ ID NO: 338075 - DNA, 526 bp, Cannabis indica
acttctcacaaataagaaaaatataaaaaataaaaactagaagagttgatccgaatggctgctctctaggttctatttatataacatggaaatcctagagacagccacaaagtcgaatctacagctgtacaaaacttatttcctaagaaaaacttgatttgcagcatcagaaacagattctgacgcaacaaatcagaccagagaaagaaacttgcctaaaacaagtccgatcttgtattgagtcttgatacctgccataaacagtatgtatgatctgatataatcaagacacactcgaactttattaagaaaaaagataatagtcaaagtttcttttaaaaactaactttctataagagaattgcttctcttacgagaagtttccatacaagaaaaagcaagctgaaaaatcaatctttcctaagatagaaaagagcaataaaaccgaatattaaaggtgataaaatcagattgaaagcacaaataaatcttaccataaataaaaaatattttagcatctaaattg

SEQ ID NO: 338076 - DNA, 886 bp, Cannabis indica
aaaaaatcaaagaatattattttaataaaatgtagaaccaagcattaataatttctaactatcaaaaatacgtgatataaaatacgaaagaatttattttaagaagcaaaaatcataagcatatattgtactgagagttaaaataaaaataaatacttaattaaatacactaggtttcattgtccgccttaataataagggaacttagaaacccataagaaaattaactaagaaaagcaataaactaatactgagcgctttgagcttggatttttctgtctaaaactgtactgaattctaagaacctaagcttctattataagaaggtaaaaggactaatgcgcaattaaacttattacaaattgcatatgggtaaaaatgtaattaccttatagttaaactagagtgtcacgtgtcaagctcggattggtggctttggtgtgcaacttaacacgtgtaagtttgacatttgggctgctgaagggaaacggtcacggaggaccagtcgtgcctctgatgcgtgagggagacaagaggcccagaaggggtcgtgcacgtcacccgcgtgtgagggagaagggggggacaaaggcactgacgcgcctagttttgttctgctgaaagaatggctgcccgccacgtggcgaggctgtcccttagaggaagaaagtgggtcagttgggccttgtcttttgtgctctctttgggctcatttggtttaccatattgtattgtattgtaatgtattgggttgtattgtattggattgtataattttaatacaatactatgtttggcattaaattgtattagtgtattgtgttaaattatacaatgtttggctcacattgcattgtattgtattaattaaaaaaaattgcaaaaa

SEQ ID NO: 338077 - DNA, 525 bp, Cannabis indica
ttgctacaatgcataattgcaccagttctccttgtctttgtgcaatttggagggggtggctcatcagcatctcttcttcgctttttctttggtctgcctggcaaaatgtttgcacctggggggaagattggatttcgacctgttttgggccacttatcagggcttggcacagggtaaactgtgtgttcataagtcttcttgaaggcctccatcttgtaccaagggtgaatataagcatgggattgatggttgcaaaaccagattgcagctaaggcatgtccacatggaatgcctgtcaactggaatcccctacatgtgcatgttttcccctgtagatcgacagtgaaaccacctcctggattcatttgaatttggaacatagttgcatttgcccttgttacgacacatcgtttagcaacctctgttagcttagtggtgattttgacaatgttgttgtgtatagggcctttccattttgatatactctccctttttttgtaaaaacgacacataagccaatacctg

SEQ ID NO: 338078 - DNA, 1404 bp, Cannabis indica
aaaatatgataccgaggaggcaagaacaaagaaatacgttgtgagccgctacctgaagtttcaaatgactgatgataaatcaagcgaagcccagtctcacgagcttcaaaaaatagctcacgaaattctgtctgaaggtatgattattgatgaacagtttgaagttgctgttatgattgataaattacccctttcgtggaaagatttcaaaaatactctcaggcacaaaataaaagagttttcgttggaaagtctgatcactcgtattcgaattgaggaggaagctcaaaaacaagaccaaaaggaagaggtgcttgttgttggaaataacaacaatactaataaaagatccactgctgttctgaaacccaatgggaaaagctttaagaattagatacacaaatcaaatccaaaacgcaacagtcaacctcagaccaataacaacaataagaatcagaaccatcaaaggtactaaaataataggcagcaagtacccctaatagaaatgactttggtttgttcatgtgttacaactgtaacaagccaaatcatatggcacgaaagtgtaagaacaggcctagttctgctccgcaggctaacctgacagaagagctgccatttacagctatgatttcagagatcaaccttattggtggatctgaagggtggtgggtagatactggcgcttctcgccatgtctgctatgatagaaatatgtttaaaacatatgttgctgctactgaggatcagaaagtgttgttgggtgactcccacaccactatagttgctggtactggaaatgtggaattgaacttcacctctggaagaactgtgattctaaaagatgtgatgcacactccagagatgaggaagaatttggtctcgggctaccttctcaacaaggcggggttcactcagactataggagctgatttgtttactttaactaagaatgggatatttgtagggaagggtatgcaactgagggaatgtttaaattgaatgttcaagtcaataaagttaatgcttctgcttatatgttgtgttcttttaatacttggcatgctagactttgtcacgtaaataaacgcataatcaagaacatgagtagtttaggcctaattcctaaattatctttaaatgactttgaaaaatgcgaattttgtagccaagccaagattactaaaacaccacataaatctgtgttagaaaaagaaaccgagcctctagatttaatccattctgatatttgtgaacttgatggaactttgactagaaatggtaaacgctactttatcacttttattgatgattgttctgactttacctatgtgtatttaatgaaaaataaaagtgaagctcttgatatgtttaagatttttgtggctgaaattgaaaatcaac

SEQ ID NO: 338079 - DNA, 531 bp, Cannabis indica
tcaagcgtttgatgatagatggtgcctggtgagtaaattcctcacaaataggacatttgattttgatgctatgcggcatacattggcctcgctttggcagccgaggaagggagtctatgttaaggaattagatactaataggtatctttttcagttttaccatgaaattgatatacaaacggttatcgatggaagtccatggacgtttaatagaatgctgcttgtgattcatcgattgaaaagaggggaggatcctagagtggttccgttgcatgaattagatatgtgggttcagttacatgatttgaagtatggttttatgtcggaatgggttgttaaacacactggaaactacgtgggaacattcatcaagtcagacccgaagaactttattggtatatggcgtgattaccttcgagttcgggtgacagttgacattaacaagcctctgaagtgtcgtatgaagttgattaaacaagatggaacatggatttggaccacctttaagtatgaatatgttcccactttctg

SEQ ID NO: 338080 - DNA, 592 bp, Cannabis indica
tatgttcccactttctgttttatttgtgggttcattggtcatggtgatagattttgtccaaggaggtttgatcctcatttcgatccgaacattaaaccttatagagaatggatgaaagccaatacaaagaagaaaaactacctcatccgggctcaatggcttcgttccaaccgtgatgatgatgaaggagtggctaatggtggcggacggcatcggaatcaggccgaggctatggacattaattctccagtgatggtgcgatcagatggagtcaattcagggatacgtttgggagtcaatcaaggtgctatttctggagagaatcatggtgatgatatgggtgatgattatggaaagaaagctgatgataagatatacttggaaggtcaaaatgatgactcaatgttgattgtagataataaaagacgtcgtatgggaaaggaaactttgaatgagtctactgatctggatgatgataacgtgggatttggagacaagttggatgctaattcaaaaaatggattacaggtgggccttggtgttcaggcccaccagacattatgagcatattgtcttagaattgccatgggct

SEQ ID NO: 338081 - DNA, 945 bp, Cannabis indica
agcatcttactaaagtaaattgcttgcactagagtaagtaaattaccaggcataccacaagccacaggcttagataaactctgacctttgatactaggatcaggaattttgttcaatccattgaatatacttattttcaaaatttcctttcttgtccttgtaatggaaaacctttggttactcaatttgaatggttttaactatagttctcttggcttagcttcttagttccctattttgactaatcattacttgtttaaactagcaatagatttttatcaccaatgtcttccaagtcataagagggcgagatccttgaaaccctcccactacgacgaggtaccgtgactttctatctaagaaccttaatagtattatcctcattggttgtgtcaatacaccataggcagtgggaaatagctatcaaacatgtaaaccttaattaatagttttagctttttgaagttcacaatcaggacatccctaaatcaagtaatggttaagtacataaccattccatcattctgaaattttcctatcactaggatatatccttagaaagatttaggcagcaactagtaactaataatagacctttcactttcatcaatatgcatatcaaatttctagggaggtaagtttggatacaattcaaaaattcaacttaatgatctttgaactgcatatccactaaatatttttccacccctatcttttcaaaagatctttaaccatttatctcaatgctttttaacattgctagaaattcatgaagtttctcaaacatttcaaatttctttggataaggtaaatatctagagtgatcatcttaagaatataatgaaaactcatatccacccctgaatgtatatccatattcgaatataaataatcttactttcaagtgaatattgacatattgactctttgcagagaattgatctt

SEQ ID NO: 338082 - DNA, 547 bp, Cannabis indica
aatttataaatcaaataaacataaaaatgatcacatgaactaaatgacatactaaataagtaatgagaataaatctgtttctttattgataattgaatagaaaagataacattgaaatagagtttatttagggcacaaagcccaacagttggtcacatccttaattgacccaaaaaaaactaccaacgactgcttcaacacatcattgatagtcgttaagaagacctcctctgctgtaaagctgaggtgattatgaagacctccttcactgtgaagctgaggagatgacaaagacctcctttgctgtaaatctgaagagatgatgaaggcctcctccgctgtaaagccaaggggatgttgaaggcctcctctgctgcaaagctgagggaatgttgaaggcctcctatgctacaaagctaaggagttaatgaaggactcctctgttatcaaactgaggagatgaacaagactaccattgcttaaacatagctgagtgaatgttaaagaacttcaaggctacaacctaagagaagacaaagactacatc

SEQ ID NO: 338083 - DNA, 470 bp, Cannabis indica
aaataatttccaacaggtcggagaagatggaacctcgaacgatactcgtggtcggcaaagatggaacttgtattgacgctcgttgtcgattgatgggttcccgtggtcggagaagaaggttgctttactttctctctctccaactctattgcctcctgtttaagatttgggagtttattttataaataatttagttttatcttttagttttaatttatttgtaaaatcttattagaaaaaaaatatttgttaacttttttttatttattttggatttaattgacgtggcaatttaatattgatgatgtgtcattattttaaatgacgtgtcttgccatctgtcactcaacgtggcagaaaacggcaaggtacctacggaacttccaaaactgtaacacaaggtatttttaccgccaaaattttaacttaagtattaaactgcaaccattagataaacttaggtatttacg

SEQ ID NO: 338084 - DNA, 1098 bp, Cannabis indica
attaataaaagatcaaaaatcatcttgtgttgcatgattcacatgattactttcatgattatatgtttaatgtataaattctattaaatccacaacatatagttactgatgattatactgttgtttacacaatgaaaaataatcatgattatatgtttcaaagtttaagtctcatgatttgtcaatacactggatttatactgacatgataatcagcgataaagtttacttacaccttggataagtggtatgtcctttccaaggtattggtaaagtatactagtattggatgtatggagtatacatcagactagaccaatattgacattggataagatatcataaacttgctgttatatctttttaagtcagtatttcttagttgatcttaggtcaatagatcttaatcctgagatagttagtttctgacttaaatgtattattcatgttctttaacttgttcgttaaagtcgaccaagtggatcttttcaatacttacacattgggaacacagtagtaaaattaagtgggagcactaatcatagatatagaatctataccttctaaaacttttagaggtgaaacgataattttctttgagcttagcttaacgcgataaatgattgagcactcatttcagtaattatattagtatactgaaatattatttacaagtagctaaagtattttaaggataaaatacattaaaaggtagaatgataaatttgtttctactcggtgtagatcatctatggaggatctttaattatttggattgaaataatagataattcgaattacatctattttgttatattgagcgttctatgtaattaggagtataattctgaatctataatggagtttggaggaattaataagctaggaaatttacttggtaaatttcgaatctatttattagaagcttgattaatagggtcatggtcaccacactaattgggataatattattgtgtagtctcaattaattggttttaattaatcaattagaattctaaataagactgtgtcttgtttgtgaatttttcactaagcaagggcttatttgagaaaaaaaagaggatttagagtttattt

SEQ ID NO: 338085 - DNA, 499 bp, Cannabis indica
aataatataaattatatatatatgttacctcatcaagtaaccatcttcattacatcacgttgcctaatcaaacaagtcgatgctttaatatgataatcttgtattacattgcctaatcaggcaagcccgtgccatagcttagcacccatatatcacataatcgtatcatctaatcaagttagttcatgccaaaaacatgtacacatatatcacagaattgcaccacctaatcaggtgagcccgtgccacaacttggcaccaatatatcacattgcctaatcagacgagcccgtacctatgcacagttttcacatgtcactacccgtacctaataaggtacgctgccaggaagaaacccaataatagtttcaatctatgccatagcctgacattccatatcattgctgcccgtacctaataagtgttggaaattattttaccaggatcttagatctactcacaagtatgttgattaataccctaaatatgaacttctaaa

SEQ ID NO: 338086 - DNA, 674 bp, Cannabis indica
ttgatacgagtgtaatataataaagcaaataaagacacaagaattttatagaggttcagccccgagcagttcggtaatagcctaatccttgtagtttctattgacttaagaacaaggagaatggttccttttcttagagctcttacaatagtatctctaaatattaattcttagacaaatgttttgaccctttgcccagtgaatatgaatcactatttatagggatataagcttgggagggaagtatttcccttctggttacaattgatataagtggaaagattgcatagtaaatacagaatacactaatcgtgggattcagacagcttgccatatctctgtgatttgatcccaaagttatagggatttctttgatgactcacaatacgaaagttaaatttgctaagtgttggcgtgttgcgcagatttctcactgcccggctgaaagggcttcgtccgagcgaatatttaaggtgccctattcggcgtatctcttgtgagcaggtgcatagagtatattccacgtgtcaccatcgtgtgatgccacgtcagaatgcaaaattgggataagagtatgggtctgggcctgtgtccatgttagggtttagggtttagggttttggatttaatatttagggatttagggtttatggtttaaggcttagggtttaggg

SEQ ID NO: 338087 - DNA, 2073 bp, Cannabis indica
agggatttaggggtttatggtttaaggcttagggtttaggggtaagtgtaaagagtataggatttagggtttaaggtttagggtttagagtttaagggtccaattctagttcttgctccaattttcggtcatagggtacgatttatggtttgggtgtgggtctgggtcagagtcctggtctggctcttagttcatgattgggttcagaaccgagtcttggtcccaaatccaaacaccaaccacatgtcgagtctagtttgagttttggttctggttcgggttctagtctgggtctgggtccaggtcgaggtccgattcctacatttagacaccgactatgggtcgggtccaagcctcgtgtcttgggtcctaggtctcgggtccaaatctagatcctggtccaagttaaggtctaggtccttagtgtgggtcctagttcgggtctcaggttcaggtttgggtcttgggtcctgagtcataggtcaaggtccccgattaaggtcaaggtcctaggtcccagtcttggttatcatcctagtccgagtgtaggtcccagtccttgttcggtacttgtccttgtctcgggtcttggcgttgtctgggtctgggtcacaatacggttcttaggtctctggtccgagtattgggtcccgtatcccaatctcggtcttgggtcccagtcctagtcccagtcttggtcctagccccaatccatgtttaggtctcggtcgttgtcctggtctaggtccaagtcctgatctcggtcctggtccaagtctcgggatccagtccaagttcatgtacgagtccgggtttgggtctgggtcccaatttcagtccgttttagggtccgggtcttagtctggatctgggtctgagtctgggttcttgtatgggtctgggttctggttaaggtctcaggtcatgggtcctggattctgggttcttggtcgcaggtcctcacacaagtatgggtccagctatcgatcccagttggggttcgggtctgtgttcggttctgcgtctagatctgtttttgggtcaacgtccaattcctattccaaggtcttcattccggttcttgttccaatttcgggttgcgagtccgagtctaggtttgggttctagtctagaaattactccaggtttgggtcttggtacgattccaagatctagacactgactacgagtttgttccaggccccggtcgtgagtcatgatctatatcccaatcttggatcccggcctcattttgattcggatcctaggtcctggtctgtgttcgtgtccgggtctgggtctaggactaaaaccgggctcgggtcttggattccagtcccagttgggtcccgattctagttctaattttgagtttgggcccccaatctttgtcgggctcctaggtccaggtcttagtaaccaatctcactccgggtcttgggtttgggactagttccaagtccgtgtctgagttcgggtttgtgtcccgagtcgttatctaagttttgattcgggtctgcatcccgggccaaatctgggtctgggtcctagtcagattccggctccttgactgaaacctagacttggactcagacccaggtctggggtacgggtctgggtctggtttagagtcttggtccgagtccgggtttgggtttgagtttgggtatgggtcccatatccaaacactgactacaggttaggtccaagccccgggtccagatttgggtcatggtctcaggtccctatctagttccacttcaggtcccaggtctcggtccgggtcctaggtcagggtctcggtctgggtcgggtcgtgggtctcaattctagttctcatgtctatgtcccgggtccaagtcccccatccaagtccgagtcctaggtctcgatctgagtccaggacctagtcggggttcaagtcttggtccgagttcgggttcgagatccgatcttggtctgggtccaaatctgagtttgagtctaggtccagcttcgggtccgagtctcgagttttgagttacgatctgggtctgtgtaacaccctaactaacataggcgtattacgtgatt

SEQ ID NO: 338088 - DNA, 1144 bp, Cannabis indica
tttcagatagggatccaaagtttacattaaagtttgggtgagtctatagaaggctatgggtacaaatttgaagtttagcacagcttttcaccctcagacagatgggcaatcagaaagaacaattcagatactagaagatttactgcgagcctgtgtcatggactttgagggttcatggagtaagtacttgcctctaattgaactctcctacaacaatagctatcaaagtacaatagggatggctccctatgagatgttatatggtaagaaatgtcgatcccctattcatcgggccgaaattggagaaaggaagtacttaggtctggagttagttcagaggaccagtgaagctatagacaagattaaggctcggatgcttgcttcccaaagcaagcagaaaagttatgttgatccaaagtgcagagatgtcacatttcaggcataggaacatatttccttgcacgtttcacctgtgaaaggtattagacgcttcacgaagaagggtaagttgagtcctaggttcatttggctatttcagatactttagaaggtcgggtaggtagcgtatcggctagccttaccactagcactgtcggctgtccataatatattccatatttcaatgttgaggaaatatgtttgagacccctctcatgtcttgagttatgaagaacttgaactacagtcagaccaatcctacgaagagcagcctgttcagatccttaatagaaaggagaaagttcttcggaacaagacgattattttggtcaaagtgctctggaaaaacagcaaggtggaggaagccacctaggagttagagtctgacatgaggactagatatccagagctattcaggttagatttcgagcacaaaatccttataacggaaggataattgtaataaccgctttagtaattgggattagtaaaggcaattagcactaatttttgatatttttataattatttacaaatttaattaattgtgggccccattattagaaatgggcactagagttataatttctccattctgaagattttattaaactctaggagtattatttaatttataggtgaattatgcaatttttgtaatttttgctcggtgataacggaaaatgcgatggatggctagtttgat

SEQ ID NO: 338089 - DNA, 1058 bp, Cannabis indica
tcaagcattttcaaccattctaagtgtaattcaagttgttggtaaggttcttgaacttgtcttgatgttttcttgagttttaagaaaaagatgatgatttgcatgcttaattttggagtgttgttgctgctgtgtttgtgtgttaatttcagaagtttaatcatgtttatttgagtagattagagctggttatgatgcatgttacttgctttggttcaagcttgaaatttttactcaaaactatgatttttaaagtgaaatgatgaaatctgttgctgtacttgttgtagatgtttgatgttgttttcagaggttataatatgcttgattaagtagtttaaatcaggttgtgatgcatgtaggtgagctttagccaagtttgaggtttgaagtcaaagcttgtagctcacatgttgatttttcgttctgtgctttctaggttgtgttattgctttagagatgtttattggggtatttagaataggtatggaagttttggtgtgaattggagttgattggaatgagatatggaattttgattatttcctgcactgaaccagaattctggttcagtgaagcctgcagcatccggtctaccggcaggggcttccaggaattcccagaactggaattccggttgtagaaccggtttaccggtttgggaaaaattgggaaccctagttattcccatttttatgttgtttagggtattaccatgcttttcattgatagggaaacttctagtttctagtttaagtcccaaggaagtgatttagcgtatcacttatcagtgttgtgattgttatggtttaggagcctctaaaccgccgtgcagttcattccactcaggttgactggcacacctgaaatttggaattgaggtaagattagtataacagtatgcatatgtattacatgtttagcgtgcatgttaggaagcctgttagattacattagatatatatgttggcctcgtaccatccgactgtatcacatcagttaggctagagtatgactagtagctggagtatgacaagtgcaccgagtaatggctgata

SEQ ID NO: 338090 - DNA, 903 bp, Cannabis indica
ttacccatgatccttcaaagtcaagcacacatgcccgaagcatgtcttgtaagatttgaatggtcctttcggactgtccatctgtctgagggtgaaatgttgtgctaaacttcaactgagtacccatagctcgatgtaaactctcctagaatcttgatgtgaattttggatctctatccaaaacaatggactttgggacatcatgaagatgaaaaatttctctaacatataactcagcatactaatcaatggagaagtttgtccgaacaggtaaaaagtgcgttgacttagtaaacctatcaactatgacccacacagagtcgtactgtcccgtggttctaggcaatcccaccacaaagatcataacaatgtcttcccatttctaatccagaatattcagtggctgtagcaaccctacaggcctttgatgttgagccttcacttcctgacaagttaaacacttagcaacatactcagcaatatcatttttcatgcctggccaccagaacatggccttgaggtcttgatacatctttgttgacaatggatgaactgagtaaggagtcgtatgagacttattcatagtctctcttttaatatcatcatccataggcgcaccaacacgatttgtaaatcatagcattcctgtatcatccactgtaaagtcatttgttttcccagccgaaaccctatcttacgatttcactaactgtggatcttgcaattgcgcttctttgattcactccaaaagagtagattgtagggtaatattagccaattgccctacaaccaactcaattctagctcgggtcatttcatgtgctaaatgttggaaaatttgtttcactatatttatctaactctggccttttctactcagggcatcggcaacaacgttggcct

SEQ ID NO: 338091 - DNA, 1198 bp, Cannabis indica
attcgatttggagattcttcatcccttttctacacctttccaacaaatcctcaatagaattaggccactgatactctccaagccaagaagtgtttgcaaccattacctgtttagcaaatgaacaagtaaaaaatagatggtcatgagttcgaactctaccttacaaactgggcataaagtgctcgagatggtcataatctgagaaaggaaatctctagtaagaagctgggtattagctatttgccagaataggaacctgtgtttaggcacaataagcttatcctaaactgctctagcataatcaaccttgtccacctccaccaacaagtcatagtacattttagctctaagcttattccctttcaccgcaagacacattctagcttcatccattgtttcgcgaagactaagaatctatttgaagtaccagccgtcatccatcttctgtgggtaattccaaatatcatgctcattcagataaattgagttattctctcgttgctagtagttaattcctttgagaaatatatataccaaaatacttttaatgatttttgttgtaaaatattttggttgatcaattgattaataatatccaatgcacaacgtatgtgaaaacttttatgtagaaattacaggaaaattataatagtttattttttatggcataaataaataatatcatgagattatgattttttttttatttttaataaatatatgatattttttacgccacatttttgtaaaaaaaagaaagaaatcccatattttgaaaacaataataagtttcgccgaaaaattactggtgtcggaaagtcgccggaaaagttagtactgccggaaagtcaccggaaaagttaccgtcgcctaaaaaattcaccgagaaattcacgggaaaagtcaccaaaagtagatgtctcaaatataaacaaatatagaatcggttctataacataataaataaaaatacaaaatacaaaataagtcaattcggttataattgaaatataaccggttctgtaacataatgaataaaaacaaataacacaaaataactcaaactgattataactaatatagaaccggttatataacataatgaatgagtacttttagggtagatatggtatgggtgtaattatttagtgggttggagcatgttgaatggatattttgtttgagttattttatttaa

SEQ ID NO: 338092 - DNA, 1416 bp, Cannabis indica
tgtgattttataaaactagtttattacaaatatattaattaattattaaaaaactgtagaggataataaaaaacttgaactaaaataaaaaaccaaaaaaaatgaacattataacgacagttaaaaggagttccagggatccctgttataaaagatttatccaaaagacgatacacaacaacaattcaaaacacaattcaaaatacaacaaacacagccagtctaaaacaactcctgacaactcaacacgcaggctggtgaggtcaatatgtacattgctggagaagaccgtcatctcatggttgttctaaatttgccttgcccttacttacaccacagagcacccatgagtcacatagactcagcaagaaaagtaataaagaatgatacatcaaatagctaattttatatttcattatcacaaaatgattaaacaataacattcaatagtaggtaatgtaaccgatcatatgcatagaaatagatatgctcatatattttcattgcctaatcaggtaagcctgtgtcataatgtaatatcatatataatatcattgcaccacctaatcaggtgagcctgtgccacaacttggcactaatatatcgcatcgtctaatcagacgatcccgtacctaccccgtacctacgcccgatatgtcgccagaaagaaaccatcaatagttttaatctatcccataaccaggaaatttcatatcactgacacccgtacctacgcccgatacgtcgtcaggaatattgcatcacctaatcaggtgagcccatatattatgtccatagtatcattatattatcattgcgtaatcagacaatcaataatttcagaacctatcatgcgatgtggtacattatacttttcttacctcaagttttagttcaggtatgttggccgaccttctttgagaacgatcaatgatctcgggccctatgtcataacaataataaaccaataagtgtttatcccaaaacactacttaacagttgcaaaggataacctaggatttcctaccaaaaaccgtagtttaaatatactaaaattaaacatatatttttggtctaaaacatataccatacggtagagctcgtcgtaagctttgaaactgtatataaaacgtctaaaacgaacactcgagtgaaaagttatggcaaaaatacgattccggagtacccgagacaactcgaaatggtaaaccggtcggccagaaccagttggccaatttttcagaggttaaaaatgtgatttttcaagtttacgcactcaccgaaacactatcggaacctgtccaaaccaccccaaacttcataggacacatatataccgtacatactaccatacttacgtaatagaaaataaaatcgagcacttgattggcaaacgccactaatgttcggacttaa

SEQ ID NO: 338093 - DNA, 519 bp, Cannabis indica
tccgatgaaggggattaaacgtttcgagaaaaagggcaagttatgccctaggtttacagagccttttgaaatcctcgaaaagattggattagtagcttaccatctagccttgcctccaacacttttagcagttcataatgtatttcatatttcgatgttacggaaatatgttttggatcccactcatgcgctgagttatgaaaacctaaaactccagccagatttatcttatgaagagcaaccagtatagattatggacagaaaagataaagtcctttgaaacaagaccataaccttggtcaaggtactgatgcgtgtcgtaagccacaacaaatttacgatttttttattccaatacttccaattattttagtataatcgtaagtaagggtcgatcccacgaggaatatgtttattcaattattcacaaattagtaacaagaattaggaaaaggggagttttgaagattagaataaaaatttcaataataaaaattaaagaaaagaaaaaatttaaag

SEQ ID NO: 338094 - DNA, 500 bp, Cannabis indica
aactttaatttatactaaaatattatatatttaagtgtccataaaaattaatattagatatagttttacataaaaaaattaataaaacaatactatgtaaattttataaaacacaactcaatataatacattaatacaatacaatacggtgtaatacagcgtactaaattaatcctaaattaattaattaattgtgtaagacccgattctaaatctcgccaatagcaatatgacaccttaagtggatgcttatcatcattaattagtgcgttttaggaaccttagattcatcgaaacgaaaccttggctattcgcacccttcatgcatctaccctatatactagatctttaataacaattttttcttttttgtttttcatgagttgaaatacgtgtttcaatctacaagttaccacattcaattattttaatgctatttacctaacaaatttaataatatagtagaaaaatggagcaattggaagattatttgaaagaat

SEQ ID NO: 338095 - DNA, 599 bp, Cannabis indica
ctcctaggctaagtctgttgctttcagcaacacggctctgtttgactccatgagggcggaggtagacttagccaagaaggatgctgacgtcgccagggcagaattttgagttttttggatggagctgggtgaagccaacaagaagctctttaccgcccagaagaagataactgagctgactaaggatctcgtggttgctgaccgtcttgaagagaccatcgagaccttatatgttgaagtgaacagtcttcaggatgagaggacttcacttcgagcagttcttcatcgggtggaggaggagaagaagactaaggaggaggagcttttggccgaggtggcaaggttgaaagagaaggttaatgatctagagacagccggtcttgagcacttctttgatttttgtaaggctaatcctcatgcaaactttgactacttgggtgatgctaaggacatgtaccttgagttctgcgcgtcccaagtggcctatggtgaaactgaggcggctgcttcaacctccggtcagactactgatgtacctcctattcaaacaacagatcctcgagctccaattgggccagaagaaccgaaccaagagcgtg

SEQ ID NO: 338096 - DNA, 775 bp, Cannabis indica
cttcgtaagtgattgttctcttccttattatttacagcagtcttccttttttttagtacttgactaatgtgttgtttgttttgacagctcttctaacgagacctacccctacccccgagatggttagtaggcacaggcgcttgatgactctcccttacggtcttcgatcatgcaaattccttttgaacgaagtaaacttgcgatcggcgagccttctcgctgacaaagaatacacttgcgattataagattcccaagtatacttcttggcagcaaataattgttccacctgaagaccaggcctgggatcacttggcccaagcataataccttcaaagcactgcccctcaggaatccaatgaatgagcatcccgaggtaatcaatgtggctggtcacctactgtacttagggctgagcgtaatacattagttacctttaaagactcctgtcttaatttttatacttggaattccattctcgtggaccgcattgctcataagtttgacagttggtatcctagattccatgtctagataatctgtcacgagtcaattatggtatagccgagcaatatggtaccatggaagataggcaggtcacatagatgcaagctgggatttagaaccaatcgagccttgtgatatattcaaaattacatgttgtagggattttagtgaatattatggtccttctacccctcatctagtgatagctcgccttctagtgattttggtaaatcccttaggtggaaatttacactcctcccctttttaat

SEQ ID NO: 338097 - DNA, 780 bp, Cannabis indica
atagatatactaaggaaaacactcaattcgttcacttaaaaaaagggaattctgttctctcatctaaatcaaaaggtctgtctctgatactcgagagccagacagtcggatctgaacaaataccttgtgaaatgataacaacaacaacaataacaataatacaaatccgacgagcacagatgaggttgtgttatccagattggaaaagctccaaaaggcccaagatggcatgatgcagctactgagtttgcttctaccacagacacaccaagaagcatctgttgaaaggagcagcttacctgaagaacgtgcaataaatgaatctttgataaggcaagtacatactgttcaacaacaaactccggcgacacatgatagtgttcgaggaatcagaacttctgagattgttgaaaggattggtgaagaggcttggtcttcctctgagttcgtcacaaaagatgaatttattggtctccttaaaaccgaaagggataaatcatcgtcatcggtaacttccatcgactttcatccaccctaccctgtggaagttgctgtcaaaccttaccctcgcagttacatgagtccagtatttcgaaaatacaatgggaaattgggcaatgccaaagaacatatcattcaatttatagatgatttgggtatttatgtgcatgattttgaattaagaatccgagaattttcacagtctctcactgatcgagcatactcttgctacaggagtttgccatcagggagtataaggagttgggacgacatggtctc

SEQ ID NO: 338098 - DNA, 526 bp, Cannabis indica
ttttaggagtgatcttgcatctgtctaatgatggatcatggtgcattaggtagtctacttccatgtgagcccattttatccaagactcttgagaggggacatggtgattaagtcttttcttgttccttcgattccatagcagccaagacataataatgaaaaaaacaaagtcctcctttgccacctgccttttaatgtgaatgagaatgtcaataatggtgcccttactttgtttgattaccttccagaaaggataattcttccatatttgtcgtgaaaaagggcaaaaccataagcagtgttcaatggtttccttcccctgcccacacaagtagcaactggtattaattttcatgccgcgatgctgcaatatagtgttcacgggtagccaatcattacacaacctccatatgaagtttctgttggaaattattttaccaggatcttagatctactcacaagtatgtttattaacaccctaaacatgaactttctaaaacgatgaaagaaacacgtataaagttta

SEQ ID NO: 338099 - DNA, 996 bp, Cannabis indica
atctatcatagttcgggccaccaattggttggttatctggacttccacgactaatgggtcaatgtgtgggaaattaatcttaacagcatcctcatcattgaaggttatggtgggttcccctgcccgtgatatttttggcttcctttcttcgacggccagaaccacctcttcttgctcgttctgtaatgttcgggtatacctctcccgagctttgcctaaatctcatgttatgtgtggtcctctaataatgacttgcgaatgtccatctactggtggtgggagtaaatcttgattattatctgtctaggtggccttctgattttgatcggtcttaacatatatttggacgtgcaggttattctttcttatcaaaaattcaatttcgcactttagattgttgaattagttggtggcatggccataatcttcatgaaaacggcaaaacttgttcatgtgtctcttacttacgtcctttttcatgggaatgggtttcttgtacggagctaatgattgagtagccatgcagatagtctctaaatcttctgtcaggactgaaaaagcaataaacttggcaggattttccctggggtcctgttcggttttgccagcaaactttccctttttccccttgccttgtctgttgttgttgttggaccatttaccgctcgagattgaattgctcgggtactgagggagctggacagatgttccagcagagggagcttttggctggccaagtttaagctcgacttctgctcgctgaatggccacttcaagcttaatgaagccatctgcatgatcaaggaagtcactcatacaatctactggtctgtctctcttcatatccttccaaagttctctgagaacttcgatgcccccagtatcgcggtttatttcccttcttcggtcaaccatgcaaccttcgttgcctttgtcataaatctgctgatgtaagctcgaagaggttctcctgcctttgcttcacttcgaccaggt

SEQ ID NO: 338100 - DNA, 791 bp, Cannabis indica
tcaacacgtcaggtcttcacatatacatttagtatatttattaaaacatcgttttagttttgtagaataatttttgaatgctgaactgttccacctagatagatttgtctgttttttttgtttacatatgaatttgaattattcctccaaattttctataagtaaataataagtattattttgttatgactaatatatacccaattatattttactaaccaaatataatagcacaaaaattactttaataaaataaatcattcccaagatcatacttttagatacaatctaaataaaaaaaaaaaaaaaaaactttaaataaaactaatatttacgtgcctcggcacgtaacttttaactagtatatatatatatataaagtttgacacagtcaattttagaattctaatctattaaatgaatcaatcaattgagtctacaagatgatattatcccaacaaatgtgagactatgagcttatgtaactaagctccaataagtagtatatggggaaattttctttaaaataattattgatattaagagaaaataatgtgagaaagatttttttgaaatatattaaaataattttaaaaatgaatttaagtaaattatttttggggattttatttgcacccaaaaaatttataaaagaacccatttaataatttttattttatagaaagaattatatatttactttatacttggttttttttttttttgttaatttttttctatcctttctatattctttcaaaaatatacatataaatgattttttttttttt

SEQ ID NO: 338101 - DNA, 619 bp, Cannabis indica
ttttattttagtgtcgctctactaactgacaccattgaatactttttagtattgggttataactgacacttaagagatatataggctgatctttggtgtcgatttttttaattaagtgaccctcgaaccgacaccaaaaataacttttgtagcattgatgtatgcaatttcaattgatgaatatctgacgcctatttagcacttagtttccttaaaacaaattcgcatctttaattagtgctagaaaattctaacacgtctcctaggatacaacagagaaaagtaacagggtgcaccaccttttatttttcgcgaactaaataagcctgaagtctatcatactgtgataacctaattactctaaagagtactattttaggaaattttataacttttgccagcataaaatgaaaagcgttgactttttccaacgcgtaaatgcgctagtaaaagttagatttcagccactgtaaatgtgcgctggtaaaactttgaccttttcgccagcacaatttgcgaaatgcactggtaaaagttattcttaccagtgcagtagcgaacggtgctggtaaaagtgatatttcttgtagtgagtcacgtgtgtaattttaattaaaaa

SEQ ID NO: 338102 - DNA, 506 bp, Cannabis indica
actcaatatttttacatttgatcgctgtggaacaatagtgcccaatattcttcctcaagacggtgactatttttgctcaccaatcttgaatcaccttatcataattaagtagtgtcatttgctcgtttattcttgttcgcaactgggagtatcattttgcttgcttgcggctggctaactctttgataaatgtggatcgaaagcccgctatagggatatggctctgataccatgttgagaatcatagattctatttcaaaaccaattggtgatgagtggagcccatgttcttatatatagctcaatatttttatatttgattcatgcgggacaatattgcccaataatttttttatattttaagataaacgacatctcaattttaaaaatatataaaattaatgttttaactatttttatactttaagataaatatggggatacttctaatattatgtcacttcacttattgaagacatggtgaaatatttagagcatgtttggta

SEQ ID NO: 338103 - DNA, 511 bp, Cannabis indica
ttttctttgagtttttatttctcacgagatggtaattgtagaagaatactaagtatcagaagctctaatttctagagagagaagctctgactttgtaggtagtttcgttaaagtgaaaaaagagttatgggagctctccttttataggtgaaggagacccacaaaaataggaggaaaatacaaagtagatgtttttgactgttgatgatggtctaacaatgaaaattagctcttgtggtgatagctataattttgagctcgacaaaacccaattcgggtaactaagagcttatttttcctatttgatgataatagcttctgaattatgattgaagtgtgagacatgaattcatagagcatcaattagctttgaaatacaagttgaatcgtgtaaatcagagtactattgagtgagttataactgttttaatgaaggcagttcacgacctaatgcccaggtagacataaatgggcatgttgatataatgatcaggtctgtgttatacagaca

SEQ ID NO: 338104 - DNA, 674 bp, Cannabis indica
aaaagggtttcaaatgaattcatacattgtttacatataatcatgaaataaatcatgtgaaccatgcaacagtaaatgttatttctgatctatattaataagtaaatctgattatattgaaatgggttttatttagggcataaaacccaacaacaatatcaattaagattgaaatgttggtatatgttgttgtcatttaatcttaatcgaggttaacgttatgtattggttgtgactcgattatgatcgagggaaataataggaaacgattatcatcgttgagactcgattataatcgaggttagtgatatgaaccgattattatcgttgtgacttgattatgatcgagtaaaagatacggtcattaccgttatgaataattattcctgaaaccgcggataggtttcttacttatcgttttctgtatcgggcaacgatagtgaactaagtagctcgtagttaacgagtggtaagggtactttataaagtaccagtattgtgtgattacgaagttgtgaaatgacttaagcatgttattatgtgatgatttgtaactggatatatctttgttataatgtgaatgaatggattttatattgcctaaaaagattagtttctttccttgcagaatcttagtgacttagaaatgtaagaattcgtgcttatagagatgt

SEQ ID NO: 338105 - DNA, 658 bp, Cannabis indica
ctcctcttgatgcggggatgcaacatatctatgctcaactcaactatattatccagcaaaacaatcatatccagagttacatggtgcaaagaagtgaatttgatgaacatcaagtgaggcagttcaatcattcaattgattcgtggagtcttggggtcgaggaccagaattacttgtcatatcctcctcgctttcatccctatgatcagccaccaccgccaaaccccttctgatgggggttcaggtaagtccttctcaccttgagtataataacacattggggacaatgtgaatctttagtttggggggagggatttaaaaattttattttctgcatttttaatttgcatttttaattttctgctttagttttctgttttagttaggaatggcaataagataaaagataactgtgtgctgctgtttaatgtaatgtgctctaaaattgcaaaataactgtgtgcttaattctgttaactctttggattagtttggatgcttgtataacatgtgtaagaatgcaatttgatgatctgtgaaatatgttataattgttttactatggtttgtggtaagattgactggatagcttagaacttgcatgtcttattcttttgaggcgaaatccttgacaacattcaataggaatatgatttag

SEQ ID NO: 338106 - DNA, 664 bp, Cannabis indica
tcttggatcgcccgcaccttttccatctccatacggattttcccgtgttccacaacatgacccaggaacttgatacttttctgagtgaaagagcacttctcccgctttacatacagttgttcgttcctcaacttcagaaacaccgttgccatgtgttcctgatgctcttctaaattggcgctgtagaccatgatatcatccaggtacaccaccatgaacttgtctaagacatcatggaagacttcgttcatgagtgtacagaatgtggctggcgcatttgtcaacccaaaccgcatgacgcaaaactcaaacgccccataccgagtaacacaagtagtctttggttcatccccttctgcgatccgaacctgatagtaccctgatctcaagtgtaacttcgtgaagtactttgctccacttagttggtcaaacagatcagcgatcaagggaatggggtatctgctaagcacattcactttgttgagggcacggtagtctatgaacagtctcaaggtcccatccttcttcttttggaacaacacgagggcaccaaaaagggcctttgatggtttgatgaattctgcctccaacatcttcgttagctgaatcttcaactccttaagttccgggggagacattcgatatgctgctttagctggggcct

SEQ ID NO: 338107 - DNA, 662 bp, Cannabis indica
tgcatcttatcctttaagagaaaaacctgagccatctcactaaacctagccgccactctctttcctccttcttccttgattgtttcgaaacctcttagtgatagagtagtgcctacacacagcaagttgtacctcataaaataatttccaacactcatttctctctagctccgctgcctacaaccattgaggatgtccggccacctactcgaaccagcccaaccaccgtgaaggacgccgacgatccttcacgcctcattccgaccaccgcgccgcccctcctcgacctctctttcattgtggattaatgggtaagtgtttttttaaaacatttgttaaataattgtaaaagtatagcatatttcagtagatctatggtgttgttcgtaaaattttcgtcaaaattgcgagatttattttttcagagtattctgggttttgtatttttcttgactgattatcaattagttctcgaaagcttctcgaagcagatgttccaaagttagggatgacctttctcgaatgcttttcgataggttttcgataggttctcaaagccaatatttatcgatatgagtcttttgggttttgtatttttctcgactggttatcgattagttctcgaagcagatgttgcaaggtcagggatgacctttctcgaa

SEQ ID NO: 338108 - DNA, 716 bp, Cannabis indica
  modified_base (671)..(671): a, c, t, g, unknown or other
attatagaattttccaaaaatatttacaccatagactgttgctacaatgcacattcttaaaagggatgtgttgatgcactctttaactgttttggcatttaaaagaatattttagtctaattttttttatattgtgtacactataattatttaagaaattttacaaaattttgagaaattaagaataatttacaatatagaaagcagtatttaaacaatctatttcacacgcgtataaaataaaatagtcacgtgtgtaacacattgtttgaacttatttttggcgtgttaaatatttttaaatttattaaaattttacaagatatcttaaataagtataacgtacatgaccatgagaaaaaatttaactaaaaaattatttcggataccaaaacaaataaaaatacatcagtgcatcccttttaagtaagtgcattgtagtacatcatacattaaatttttactaaagtttacatttatacttagacatagaaatatttacatttacttttcctgtcctattttttttttttttttcattttttacttctatttattttttttaaagtcttattataaaattttttatttcttatatctttttattatgttctttttcaattgatttttttggtttgccttctctctgttttttctctttatctccctcnctattcatttttttgtcttcttcctctctctctctcttctctata

SEQ ID NO: 338109 - DNA, 578 bp, Cannabis indica
ccttctccgggagcatatccaaaatatctttgctttataaagacttagctatttaattcaaatgttaaaccctttccttacatgtgtcattgtacggttggtccacgtattttgggcaaaattaggggcaacaaacattgtttaggaatatattatctggttgattctgggtatacaaacatgcctggttttcgttccccatattgaggagaaagatatcatttgattcaatatgcagatcgtaatcctccaggaaaaagggagttgttcaattatcgacattcttctttgagaaatgtcattgagcggtgctttagcgtattgaaggctcactttcatattttaaagcaaatgccttcctatgatctaaaaatacagaagtacattgtgattgcctgttgtggaattcataattttataaggacaaatgcagaaaaagacatatattgatggagatgaagacattcctgaagtacaagatgctactatacaaagcacccacgaaattttgaatgatagtgttgagttcagcatttcaagagatcaaattcgtgaaatggctaatgtccgtgataaaa

SEQ ID NO: 338110 - DNA, 1213 bp, Cannabis indica
tggtgagacattatagtaggaaagccaataaaccaagttgtatgatcaagctcgaccttcaaaaggcatatgatactattgagtggggatttttggaagagatgctagaaggtttaaactttcctaaggaattcattaagttgataatgaattgtattacaactccgaggtcctctcttatgttcaatgggtccttacatgggttctttgaagctagaatgggacttaggcaaggggaccgcatgtctcctctgttatttgtcttgggaatggaatacttatctagacttatgaagaagataggggagaaaaaggacttcctatttcatgacagatgttcctcactcaaattgaatcatctggcttttgcagatgatgtgcttctcttttgtcatggagatacacagagcatcacttatatgcttcaagctctcaagcttttttctttcacttctaggcttcacccgaatgctagcaaaactgcaatattgcagtaacatgaaggaaggaagtgtgaagaaattgattaaagcattggggttctctagacaagtcttgccatttacttatctagggatacctatttgctctgggaagatttcaggtaaggaatgtgaacttttggttggaaaaatgacggctagaattaagagttggagctcaaggaatctctcctttgcaggtcggattactctaattaactcagtattaatagcaattcaggcatattggagtcagatgatggtgttgccaaaaaaagttgtaagagcaatagaaactgtgtgtagggcttttttgtggaagggccaagcaatgttcaatggtcctggggctgtagcttgggaaaacatatgtcaaccaaaaaaagcaggtggtttgggaatcataaagatagaagagtggaataaagcagctatttgtaagtacatctgggccatatctaacaagcgggacagcctatggcaaagatggatacatagtgtataccttaaggatcaagattggtggaactacacagcctctatccatgccagctggtattggaaaaagctggtagccatcaaagaacagctgaagctgaagtgtgatacagcagaattccagcagagacaatacacaattgcagcaggttatgtactcttttctcctcctggaactaaacagaaatggtgcaatgaggtatggaatagattgaatatccccaaacatagtg

SEQ ID NO: 338111 - DNA, 841 bp, Cannabis indica
tgcgacagaaaggatacaagggtcagagatctgaacggaaggagtcatattattctgttgcacccaatgtaaggtttactaaactttatatgtgtttatttcatcgttttagaaagttcatattcagggtgttaatcaacatacttgtgagtagatctaagatcctggtaaaataatttccaacaatagtagcacgaggaggagaacccttcgacgatgaagacgatgaagtgcagaatttcatgggtcgcacatatttcctagccacttgtttgggaatctatttcggcttgggcttcatagtatgagattcacgctgaggaaccgaggactctcttgggtttaatgcagttgcagcagcacgaggcaattttggagccaccggtggaatatttgagggggcaggttcggattccaccatcttgcttggatgccctaagtgcttagtcttagccattaatttctgaaagaggaagaataaggaagagtaatcgggtagaagagaagatggtgagattagatgataaacaaatcggtttaaataaatgtgtgtaagaggagcaaaaaggaaaccaacttaagaaaggaaactaccagcccgcgagcacaagaaaaaaaaaccgacccactctttttttttcaaaattcttttttaaaaaaataaaagcaaataagaatcaccaagatattttccaaaaatagtccaattaagaaaacccttcaagacaatatacaatgatatgaaatcaaaatttaaaaggtaatttatcaaaatatatcaattgagattaaatgttgatacttaccaaacaaaacaaagattttcttagcccacaagtca

SEQ ID NO: 338112 - DNA, 679 bp, Cannabis indica
tgtgtcactttagtttgggggattgaacttaaacttttattttgtttttagttttaagtttcaatttttttagtttttgttttttagtcaattttcttaatgtgagtcaatttgaaaataggtaaatagcatggtttgaaaagttcttttatttttcgaagaatctgtgtgcttggtgtgatattacattcttgactaaaagaacatggaatcatattaagtaattttctagtaattaaattggtttatgtatgctaattcggatatgtggaaagttgcttggaaaattctagaacttgcttgcttgctatttgaggcgaaataataaattatgcatgactaggaaagtgatttaggcaaatttttttgattgattgtgtctttcaagtcatccctgtaattttatcctagttaccctttttgagccttaacctattctttgttctccacattttgagcctaaaaagataaactcatgaatatccaaagatttaaccctaattataccataaatagatctttaatttgggggaattttgatgagaagttttttgtatgtgtgtggaaaaagtgtgaaaattgagagaatataaaaaatttgattggcaacaacttggaagaaaaaaaaaagaaaagaaagaaaaatctcacaatcaatgtcaaatctaggaaaaaaaaa

SEQ ID NO: 338113 - DNA, 708 bp, Cannabis indica
tggttttctcgggtttttcgaacccagtcggccgcggccagatttatggtcgccgcgaccataaaacctagcagagagccatctttttcccaattttgttttggccataacttttgactcgggactccgtttgggacgttctttatatcgttggaaagctcgttctgagatctatatgattatctgtattttgaatgccatgattatattttatgaaagtggaattagggattaaccctagttgtgaaatcccgggttgtgtgactaggattaccggcacctgatcaggagcacccaggggtttggaatctctgttattgcgggacaacaggtaagacagtagtttgcacgtagagtatgcgcggtggcgcttatgttgaatatgatatatgtgagtaattgcaaccgggattagggttattaccctaacatgagcggtttaatagcctagggttattaccctagtgatatatgttgtgtaatactatgccatgtcggatatatgtatatattgggattatgaattatgcgcttaaggcataattaaactagactcggtaagctagtaccttgagtttaattttaatgcggtctagggttattaccctagaatattgtgaatccaatgaaagcatgagttagggttaacactcttagtaaatgttatctgagtatatagcaaatgtattatatgagtgattacatagt

SEQ ID NO: 338114 - DNA, 751 bp, Cannabis indica
tgagcattggtctaaaccggttattaattaaggtcaacgtagacagctatctttgaggcagaaggttggtatgggactggtttggtggctcgcaattgtcatggccaccttcttgaagctctttcttgtagtaaatcgggctatttagaggctacagtggtggaggcgattggcatcaaggaggctcttagttggatcaaagacaagcagtggcatgatgtacagctggaaaccgattgtcttgtggctgttcaagctttacattcttcggttcttctacgttctccctttggcgtggtgattcaagagtgcaaagagttgcttgattctttaaaatctgttcatattcaatttgttaaacgttctgctaacaaggctgcccattatatggctcgcagttcttgttttcactcagttcgtatgttcaccgagagtactgctccggatgatcttttaaacattgtaatggttgatttagtttgctaataaaatgtcaccattttatctccaaaaaaaaaatcagtacagatatttatcacaagtttaagaaatatatcatttaatgttattgattaaaatttaaattagcacatataaagcaaattctttctgtaaagcccgcttagtttaatttggaaattagcagttaattatgtttaatcatgaaaattatttatagctatttaaataagttattatactgttatttatggaattcagtgatgcatttttatgtcatgtagtagtttgc

SEQ ID NO: 338115 - DNA, 738 bp, Cannabis indica
gcgtcgggcagagtggcaagccgagccacttggggatcagaagcgtcagccagacacgtagttttcttcgtacgagccatcatcctatcgctgggtacggaatcagaaagatatccttttctagaaggagattagcaagaagacgagggtggacttcgtgcagaggttgaagcagctcctggtcaatttgatgctcgggctcccaagactcacctgggttcatctacaaaagacaacacacaagatgagtgttggacggagtatcaaacgaaaaacaagcaaatatgccgaccaggagtacccaacagattaaagaacgaccatgttcaaagaaaagtctaaactcaagaagtcagaaagtttttcttgagttagggcaaaaaagttcatgaagcttggaacaagcaaaatggaaaacagacgcaatgcagttctaaaataagccttacggctgaaagctaacacaaggacatggaaaagaagagtcgcagaagtttcaaaccctagggtttcctaaagtgttctttctacaacgaagttacattcaaagcgtaagcatgcaaaggaaaagcataaagggaaccagaaacttactcaaagattcgaatgtccgggttcaagcaagccagcaatcgtctgtaggcacttcggcaactctgaagccagaaagttctctcttttcgctctgaagtttgcttaacaacgaagggtgatgaaatgaggtaatgtgccaatact

SEQ ID NO: 338116 - DNA, 794 bp, Cannabis indica
cctacaggacctgtctgctgaaaggcggacgttccaagaggaggctgcgcggcgggaggcccttgctaaggccaagttcgaggaagaggctaagcaaagggaagcccaagcggaggtgatgatccgagaggaggtccttcagagggataggctggaggccaagcaccgagaagaacaaagggcggagggtgaggctgttgccaaggccaaacgcgagctccgggaggctaggcaggccttagacgaaatggctgccaaggtgaagtccttagaggaattgcaccaggcggacttggagtccagggctaacttggccgtggagctgaaggagcttaaggactttaaggaccaagcgttgaagaaggctaagaaagatgagctcctttctcctgtctcctgtagccgttgcatcaagcggttcgacgatggcatctatatggcttggtcaacaaatggccagagtatcaagctcaacttctacccaaaacatgcggagatgattgccaaattccgggagaagaagaagaagcttgacgccatgctggaggcgcgcattggtcctcgccttcctcctcgaattgactaggccgttccgaatccaacccattacaacccagatttttcttatctttttttcatttacagctaatttgcttttatttaagacaatttgaatagctgttttattttttgaggtgaaacaatagttaaggcttgtccccgggccctttgtatatattttttgacctgtccttagggccaggatttctatatatatatgatcttctttgatg

SEQ ID NO: 338117 - DNA, 588 bp, Cannabis indica
atatctcttgtcaaaaaaagatgttaaatctcatttaattcgttggatcttgcttctacaagaatttaatttagagatatgtgataaaaaaaatcttttgaaatgttgtaactgatcatttgtgtagaattgttgttgaaacgaatcatgattcctccactattatttaaacttttcttggtaaacaactcatgcatgtatattcttttccttggtatgttgatattgtcaattatttgatcactgatgaaactccttctcattggtctaaacaaaataaatctaaattttatttggaagtaaaaaaatttatgtgggatgacccttatttgattaaatattgtcctgatcgatcaaataataaggagatacattctaaactgtgatcaatctaaaaatcatatctttttgtcatgatcatgcatgtggtggacattttagtagtagaaaactactttaaaaattttacaatgtagattttattggcctactatctttcatgacacttatatgtattgtaaatcttgtgagcgttgtcaaaaattaggaagtgtaactagaagaaacatgatgtctttaaatcctatt

SEQ ID NO: 338118 - DNA, 691 bp, Cannabis indica
ctgacttttttcctttgtgcaggccggtttgaagttggcttacacttactcccgggctaaatctgctacttctaagagtgcggctctgtccgacaccttgagggcggaggcggacttggccaagaaggaagctgaggaggccagggcagaaactggagctgttcggctggagctaggcgaagccaacaaaaagttgtttactgtcgagaagaatatttgcgtgctaacaaaggacctcgaagctgttgatcgctttgaggagaccatcgagatcttatctgctgaagttaacagtcttcaggatgagaggagttctctacggtaagttcttcttcggctgaaggaggaaagggacgccaaggtgatcgaggcagaccaattgaaggagatggtcaatgctttggaaactgccgacctcgatctcttcttcggtttctggaaggctaatccccaggccaattttgactacttggccgatgctaaagacatgtaccttgagtactgcgcggcccaagttgcttatggtgggaaagaggtggctgcttcaacttccggccaagcttctggccaggctgctgatgcttctcctgctcgaacaacagatcctcctgctccagttggctcagaagaaccgaaccaagagcctgggactccagctgtttaaacaattctctttttatctcctgtttat

SEQ ID NO: 338119 - DNA, 2664 bp, Cannabis indica
tcttgggactcagcctggagaacatagctcacctgcgagaaatcaccagtgttcttccaaaacctatagagagagggctcgtactaacccaaatgggggaaatacgacaaaccacactcagggagaaagaatagagcgtgaagaagcagtgacctcaggacggtcaaggacccacagtcgagctgggggcgagctgtgggacgacttataaggtcgtctagtaagaaacatcactgagttcaatgaaagggctcacgtactcattcgaaaagagatgaatttgttgaaaataggctcgggaggcaaacccaacaacgtttcgacaagtattgtctcaacgagaatcgataactcgggggtttctagttcgaagagaaaggatgactctaaggaaccgtcaaaggataaaaaagaaaaagaagaagcacgataagtatgtgccagtgtatactatttatatcgagcttaatgaaactcgggagaatatatacctcgcacatgagcaaaaggttgccttcggcaagcccgagcccatgaggcacgggaggaacaagcgagatcctaacaagtattgtaaattccataaggatattgggcacatgaccgacgaatgtcgccagttgagggatgagatagaaagtctcatcgctcgaggccactttaaacagtacgtgaagagacagggccatggacacaaccagcctagtctgcccaatagcctaaataaccaggggttacaacctcttggttatttcgggagggccacatatcgcaggggagaacaataacgcccaaaagagatatgtgaaagagataaagaacgagcagttaacattcgccccagaaccttccaagaaggtgaaaactgaggaacttcctatcatattcacggaggaagacgagaaaaatgtgagatatcctcacgtcgatccattggtgattaccattcaactcgccaataaaaggataaagatggtgttaatagacaacggaagctcagtaaatatcctttataaggaaacactgaggaagatggggctcgaaaaagccaaattgaggcctcgtatggtaaatctttgcggcttcactggagacaccattgctagactgggcataatcgagctcacattaaccttaggcgaggcaaccctatccgccattgttatgcaagacttcctagttgtcgacctaccatcgacttacaacatattgttgggtcgtccaacattgatcggactaggggaagttagttcaatcaagcacctatccttgaagttccaaacaccagagggtgtagtggtgcggggcaaccagatgctggctcgaaattactattgcatagagttgcagcataggaaagttgatcatcagttaatggtgatcttggcaaaagaaagtgaaaagaaggacgaggatcttgacccccaagttcaagatgaaagaaacttattaaaactgattgaagaatggaagaagttattcttgacctaggaaatcccacaaagtgtgtttacattgggaagaacctggacaagcagctaaaatagcagctaataagtttcttaaaggtgaaccaggatcaattcgcctggagccatggggatatgatagggatcgaccctaacattatctgccatcatttaaatgttgatcaaaactacccagcgaagaggtagaaaaggagacccccagattccgagagacaaggggcactaaaacaagaagtggacaagttgttagtcaatgactttatacgagaggttttttatctcttgtggatagccaaacctgttctcgtcccaaaggctaacagaacttggagaacttgtattgatttttcttatttgaataaggcgtgcccaaaagattgttttccactacccaggatcgaccaattagtggatgcaattgcagggcacgagcttatgtcatttatggatgcatattcttgatataaccagataaaaatgcatgttcaagatcaagagcatacaagcttcgtaaccaatatgggactctattgttttaaagtcatgtcgtttgggctgaagaatgctagggcaacatatcagcgactggtgaacaaaatgttcacaaaccagatagggcggaacatggaggtctatgtcgatgatatgttggtaaaataaataaaaagtggggatcataccgcagacctcgcggaatgcttcaaaatattagagaagtataacatgaagttaaacccaaaaaaaatgttcctttggagtctccttaagaaattttttgggattcatagtcaacacaaggggtatcgaagcgaatcccgagaaaatcaaggcattgatagacatgccatcaccaacaaagtctaatgaagtacaagctttgacaggaaggatagctgcacttaacagagtcattttgaagtcaactaataaatgtgtgccattcttcaacgtattgcgaggcaacaagaagttcgagtggacaaacaagtgtgaagaggccttttagaacataaaaaggcatctagcgacgcctccagttttggcaaaaccaataacagaagagacactacttctctattcggctatctcgaaagatgcaattagtgcagctatagtaagagaagagggtaagcaccaacaacctatttactacataagtaaaaggttactaggg

SEQ ID NO: 338120 - DNA, 744 bp, Cannabis indica
aacatctcatttttttctccttttaaacttaatatatacatgcattgcctagtttatcattaatggttaatctattcggtaatttagtcttatctccctagctagatgttattcttactaaatcttttacagtttgaaagatttgtcaaggtttcacttgactataatttacaaaagtttaaaatgatattactttgaatttatttatttatttaaagattattgagtatttttctttctcacatcatatgtctagacaaaatctcttctaagcacaatgtagttgaactatcactctcacattattttcttcatgatttatgccaactctaagattaactcaaatatatattaaaatacataatcttatgggaaatttttatatatatatacattatatacattaatattacagaaaaaacgttaaataaaaacaatccatgggtatgccgtgacacgtcatcaagcttaccgtgattagcttcaataattttggaaccaccggcgatgaaggagacgcgcccacaattccatatttctcggccatctctgcgcgtggttctactgtttaaaacagaaagctataaataccataggaataatacacgaaatcgaaaaacagaaaccaaaccaaccttgaacgaaaaaacaccattgacggaaaatagagacctcgacgaatctgaaaattagagaatcgatcatcatatctctcaaaactgttgctgtatacaacaagcaaat

SEQ ID NO: 338121 - DNA, 671 bp, Cannabis indica
aaatttctggaaccgtgtgctcctccaagttgagcttcgttttcttcgaagaatggggcctcccacgcttgggcagtggagcatcaaaatcagaatcatagtcttcaaggatcggtcgtttacccttggatttgttggccaaagttttcttgcccattttcaattttgttgagaactggaggaggcgatgatgatgaacaagtgattgccatcttataaataaatttgaaaaaaaaatgcaactgagagggaaaaacagttgagaaatcgtgggcttagtgggagttgaaattttatggatgaacaaaaaacgagagggaaaaaacgtgatcaataatgggtggttaatcttatgaatggaggttacttgatcttcaaataaacttagaaacagaaagcaaaaatcgaaaatgaaattgaaagaaaataaaaaaagagagggaagagagtgggatttgattgatgagtgatggggatagcacacatgtacgtgcatgaaatgatgactaagtggtatttttgtaataaaacaaacatggtaagtaaaaaagttgatataggcgtgtaggggtatttttgtaataaattgtgtaaaatgattttttcatgtaaaaatttcataataaaagagaaatttgaatttttatgattaatttaactacttaattaaa

SEQ ID NO: 338122 - DNA, 1274 bp, Cannabis indica
tgggtcccagtcctagtgcgagtctgaggttcgagtccctggtctgagtctggttcttaggtcctgggtccgaccccagtttttgggtttgggtctaggtgtaggtttgggacccggtctaggtcaaggtctcagtcttggtttacgtcctaagtcacaggtcccggtctaggtccaagtcccggtatgggttctggtctgagtttgggtcctgttactgtcccaggtctgggttctagtcccaagcttggttcgattccaatttcgggttcgggatcgggtctggatcccagtttgggtctgggtctaggtctgggtatggatccgggtatgggtcatggattcaaacactgactacgggttaggtcaaagcctcaggtttagattcggatctcagtcttggatctcagtcttgttccagttcggccctaggtctagcgtcgggtcctaagtttgggtttgggtccgggtttgggttgtgtccccgtagtcaggtcctgggttctgggtccagggtcgggtcctatgtctcgagtctaggctcgagttttgggtcttagtccttgttccaaggcccagttttgggtccaagtctcctatctaggtctgaatccttcgtccagttctgggtctaggtttgggtttggggcccaggtcccccatctaggtttggatcctaggtctcgatgtaggtccaagttcaggttcgggtttggatcccgagtttggttctgagtctaggtcccaatacgggttcaggtttgggtttgggtccgggtcgcggtctgagtccaggtccctattcgggtccgggtcggggtccttattcgggtcccagtcaaggtctaggtctcgaaccaggttctggtctgtgtttggatacgggttcaggtcatgagttttggtctaggttcgggtccatattcaggttttgggtctgggtcttgggtttcgatctcaatatgggtatgggtctaggcccatgtccaggttagggttttgggtttatggttttgggtttagtgtttagggatttaatgtttagggtttagggcttagggtttaggggtaagtgtacagagtttcagatttagggtttaaggtttagggtttagggtttaagggtctgcttctagttccagttcacattttgggtcataaggtaaaatttaaggttcaggtgtgggtataggtccgagtcctggtctgggtctaggtccgtgttttggtttaggtccgagtcttggtcccaaatccagacaccaaccacatgt

SEQ ID NO: 338123 - DNA, 567 bp, Cannabis indica
tatttatagggctatgagcttagagaggaagtatttcccttctcgttacaatagatataagcagaaagattacatagtaaatacagaatacaatgatcgtgggatttggacagcttgccatatttctgcaatctgatccccaagttatagggattctcttgatgactcacgatgcgaaagctgcattcgctaagtgtttggcgttctgtgcggatttcggattgctttgcctcgatcatgcatatgaggtatcctgttcggactatatcttgcgagcagatactcggagttgattccacgtgtcaccatcgtgtgatgccacgttagagtgcaaaaattgggataacatttgccccgcccaagtctgtagggacttccgaagttgcgtgtagacttcatctgagctgtctttgcgtttgaatgtgtgacacatgtcaggggcgcttgttcgcaactcgatgtgaggctaattgggcgtcccttcagtttttctactaataaatgctctgacaattaatatttcaaaatccgattttctctcaccacggttgatggctacacttgatt

SEQ ID NO: 338124 - DNA, 645 bp, Cannabis indica
agtcccgatgcttccccacctccagatgcttctcagttggtcactcccaggaggtcctcttccaatgccccttcgggcaccattgtgttggtggacgtggaggagggagttgagaaagttgaagaaggtgaagaagcagatctgactgccctcgagcgcaagcgcaagggcaagatggtggaggaggagccttctaagcggccccgtagggtggacactccggcccccagccatgactctgggattccttccgaggcggagaaatacactgtgcctcacggcatagtgttgactccgatcctgggtgatgaggagacgtagaatctccgggtggccaatacaattacgccctcgacaagtatagccgggggcatgctgaggtggaggcctttaagagaatcttacgggaggagcagcaaaacactctgaacgaggaggccttctggaatccctgggatctgaacatggatccgctgacggattggttcaatcgcttcctcgggcccaacttggctccctttgcctcggagatgaccagcgagtatgtctcccatctgactcagttcccgcctaagcgatatgccgcatgtgcatccttgaactccgtttaccaggttcaagcatcagcaacgccatggctgtggt

SEQ ID NO: 338125 - DNA, 696 bp, Cannabis indica
cacctactcctgatggctagttttctctaggaacctgagaatcatggagctattattgattaggatactcaagtgtgtttgatcttgaatagtttaactccagctattcgtccctttacttcaaattacgtcatgaacaagttgactttttgactttcaagagttgatcaacaacctttagacatttaaaaatttgattagaggactacataaaggaggaaataaagctccaagttctagtaattctacagttcgtacggcaaagcctgagacaaacatttcttatactttgaaacccaaaaagaagaatataatgaagaatagcaagaagcatgttaaagttgttaacatgaataataagggtaagaaggctgctaatccaacagcaaaggagaaaacatgcttctattacaacgaaaaggaataccggaaatccaatgtcctaagtttttggcaaagaaataaggtatttctaagttttttgtgaattcatgtgttttagaaaattattatcctattgggttattaattctagatctactaactatgtttattgtactattctaataagtccaatggtaagtaattacgatttataattatattatggattaataaggtaataagtagaattatgatcctactaatctaattcaacataaattttaaatttgctataagtgagtaaataaacgt

SEQ ID NO: 338126 - DNA, 1323 bp, Cannabis indica
tgaataaccgataacatctcacttgccctattaaaacaaaaaacaactaacgttgataagtttgaataaccgataacatctcacttgcccaacgctctttcacttcatcaatgtcttcttctgtatactttgcatcacttaactacaaaatttaaagataaataatatattaattaaatttatcatcatatgcattcttaataataataataataacaataataatgtatgacgtatttatatagtttgtatgttatgtaccccgacaaaaaagtgtttccgattcgaagcttgaattaaatctttcatcatcttcatgacataatatccacattcggtgtcttccggctgatgtggacactaaagatttttctttaaattaataaaaatcttaataaaatataattgaaatgtaaaataaagaatacgtagagttgggcgtcgaacttttagcttcggtggaatttctttccttatcgccctgtagtaagtttgaaatgccaatgtgaccgtttctctaatatcaggtcgattactcaagtgtgaatttttaggatccatgaaacacaaccaataagagtgggacaccaataatatcaacatccaatgctcactatgtaattcaaaaacaaaacaaaaaaaaaagttaattagattgagtattagatcacaattttatttatcatacgtaaaactaaatttaaatttacccatcaatccaaagagtgaccaattctaaaaaaaattggacagcattttccctataatattaacctaaccatctgttatagcgaacaaataattcaaacaattcaaccaacacgcaataagttttcatccttatagcaccgcaacacaatcaaattttcgcagaacctacttcactaaggcacacaagttagaaaccttctgttatcaccgcaacacacaattaatatcaaaacctacttcgctatggatgaatatgtaggatattcaaactcctctaacatttgtataatattaattaacagaaaaaaattaatatgcacacgtacctcttctaatttaaaatgaccacgttaactttgtaacgatccttgctagtaaccaaaacactaataataacattgaaaaaaattattaaaataggtagtagaaatgacaatcatcatgatcaagctaataataataataataaaaaaataataataataataataataaaattaaagtatagtttgctttgcttattatttctctttgttatgtttgagatttgaaaatgtcactataaaattattactttccaatagagtaatgatttaagagagtagacaacat

SEQ ID NO: 338127 - DNA, 1355 bp, Cannabis indica
acaattttaaatacttggaagagatttctttaaatagttgaccccttctttaaaaaataatgatccatttttctcaactcaagaacatttccaaatgattccatgattttagataattaacttatgaaaacaaacatatttatttaaaaatatgcatatatttagacaaattctacaaagtaattttttttatctttgaaattatgcttagttttataattaaattcattttggtagttagctcatgtaaccctccgattttacactagatagtctatttaaaactatttataataaaaataataaattaatttattggaaataactaaatcatgagatctcattattttaaaacaagaacacttgattcatttacaaatttttaaacattaacttttacaaaagtaatcgagtcataatctttaacgaaatatttttaaaccaaaacatcgtgacaatcccctaacatgtaatccatgcctcgagctcgccatcctcactgtttagttttgcctttacctgcacacagagtacccgtgagctaacgcccagtaagaagagctatgtaggacataaccccccaactagataacatagtcataagtataacaatatcacaacatcaaatcaattcataccatacttgcatacatataacaacatgtcatatcacatattattctcacatacaatacaacatcatatcacagtgtaatcttaatgcatgctatactcacacacataacacatagtatcttatcgcacattgtcctcacatacgataatctactcccactcatgttgatcagacatgaagtgtaacttgccctgccttgtgctgttctcacactcggcatccaatagggcaatcccttatcacaagttgtactcacccatgataggataacctgcaagtaaacccatacaagcagccaaaaatatatcctgcagtgctatgctcacaccagcagcagaaacctatcctataagtgctattctcacacaaacagtcaaaagccttatcactatcacacactaacaatactaacataataacaattcataatataaaatctcataagcacatgaacatcaaacccataataaagtcctatgtctcaacatacatcttgtgcacagatattcactcttcttacctcagttgctaagtatatcattttctctccctcgaacctctcgcggagtttctttgttgagaacaagatcttaaatccaataactaatatttgtaggatatgataacttttatgatatccttaaaataccctccatttacatcaccctcatttacacaatcggaccccctcatcggacacaatcgaacccatcggacc

SEQ ID NO: 338128 - DNA, 746 bp, Cannabis indica
tctctctctctctctctctctctctctctctctctctctctctctcatggagctttccacattagtgcaggagcaacacgactattatgttcttctccgacgacaaaggccaagtaacactaccacaaatatattttttaggagcgacaaaagatgcccctaaaacagtgataaatcgcccctaatgacttttagatgcaacaagttgcccctaaaaagttgtctttaataattcgcgcctaaaagtactattaggggcgataaaaaagtaacttgaaatcaggagcgacaatgtctccgctaaaagtaatatatgaatttttatgtttacttttaggagcgacaatatcgcccctaatatccataaagtcgcccctaaaaattcatctcagaatagttgttattgacttctagaggtgacaatgttgcccttaaagatttttaaattaaaaaataataattttttttatattatttgtgtttgaacttgttttatcaggatttagatttactaacatcttaaacgtgatttcctaaaataatgaaataaacgcatataatgttctagaaaactttacattggtggcaccaaaatattatggctccttctattcatatcaccaacccttgttcttttctattatagagtatttccaagatctaaacatggatctcctttagtgatgaaattcttcacaagcttccacacaatgattgagtattgacttgatatgagtggacatgta

SEQ ID NO: 338129 - DNA, 1534 bp, Cannabis indica
ctgggttgtttccaatcagttttccgaaaaagtgttccagacatttttccatcattataaataatgaaaatacaagtgaactaagaaaaaattaaaaattataggggcttcaaaactgagcccagcgcccaggttgacctggtgccgggcccaacgcataagttgacaatcaacctggtgcactagtttcgatcattcaaatgttaattctactcggagcgttctctctaaaatggtcaaaaacggggtaaaagaccttgtcctcaagttccataaccttggaagtatcaaaacgacatcctggaagctccaaaataagcacctaacacttaggttgacatgtggcttagtgcgttggattctgcttattcgattatgattccatctcaactgttcatctagtttttcatagtaattaagagatatgaagtcataagagtcaaattcacaactccatattttctcttttctaacaaggtgatttacttgaaaactgggtagtttcgagtctcccatttttgtagaacaagaacacctctgaaaattggtgaccaccttcgccagaacatacaaatggactaagtaatgtcaaaatatccgttaggcatcaaaaaatacatcccccgcgtgttttcccactcacccaccgtccaagttgacatcacatgtcaacctgggcgttgggcccagaataggcttcagtaaaatggacataactcactcaaaattgatatgattgacacgattcaacttgcattttgaagctatttcaatgatctatcaagtcatgtatcacacttcaatctcaattctaaagttatcaactccaaatttcaccccaagggagttacgaatttaagctacaacttacccaaagcaggtcctgcagacgcgactcaagcttcaaaaattgacgattgacctctggagttaattttatcgttagatcatcatctacgatcaaaaatatcctaaatgtatttttccatattttttgattattctattgtcatttttataggacctcttttcttataaaaggagagctccacaagctcatttttaggttcagaaaattagccataaggtcaaatcatccctctctaggaattagagtatccagacttagccacttttctgtaatccatctcatatgaaagaaaacttgaagtagatgtagctccattactttcgcaatatagggagtgaactactataaatctttgtgtctatcatatatatacttaacttataattcattctcgccaatctagcgagcgagtgtggcccagagatctgtctcctaatttctgcgttaacattttgctgctttcattgagagccacaacttaaggaatcacttacaagatggttgtaatacgctcctcaagtgttgaaagaagatccacaacaaatggctagtagactaggcgcacgccagttactgaagttggtgatgggactacacctgcatctcagatgctaggtggaggcctcgaaaccaactctatagctcatccccaaggcactaact

SEQ ID NO: 338130 - DNA, 1196 bp, Cannabis indica
ttttggtggcaatttcggttttggttgggtttttaattcttagattttgtggggatacgttgtttcctttttccatttaaggtaacctttgaccaattgtttgaaaaatctttttggtttcctttttttctctccacacgtggtgtctaaggtaaggaagttactttcctttttcatttgtttctgattattgggtaattaaaattgaaatgctatacatgttgaacttcccacttacccacgatcaccactattcattcctctctcatttttctcaaaagtctaatctttttcaagtgtgagagtgtgttagtttttctagggttcaaagtaaaatggcaaaaacaaaaaaatgctcaactgaccaagaggacctctcgtggctctgcttctgcatctccgatcaccccacctgcgccacctcctccagtgaccggagttcctggttcgtcatctactccgacgaaatctgccagaaagtcgaagacccaagctcgaaaattgacttacaaccttgcttctcctctagtcattgcttctccgatttctactccaacacctgggtttggtgatcatgaggaatctcattcatccgatcacactttatcgaagtcttcttcttcgaatggtggcccaaatgtcgagaaagctatggtgactttgcccacggtgagttctcgaacaaggtccaaggtatccactcctcaaaaacccgaagtggttctgcctctccatagggaaaaaggtggtgccttcatcttcaagggccaaaaatatcaaagagaatcccccttctgtctcatcttcggattccaaacctgaagaaggaactgaggaggatcacgaatcaaagggcttgcctgattcaagtgtagagtttgtgcccaaagatcaaccctttgctgatgattttgggtctgaaagtgaagaacctgaagctgatcctgtcagtacaaaacctattgttgtccctactgtaattccaaagaaggacaaaggaaaaagacccatggtctttccaagtcctattcttccctagaaaagaaagaggccttctggtatttctcttgaaaactttaagcctcattctcattatttttgttataatgatcatgccagagacatgaaattttatgagaataggaattttaccgttgagaaaaatttaaatgtcattgctcataagccatttgggg

SEQ ID NO: 338131 - DNA, 637 bp, Cannabis indica
tacgagagggatgtctaaggtttttggccatggtattggataccactcggcctgactctgtttggccagaagacatcaaggtggttcaggaattttgagacgtttttcccgacgaacttccaggtttatcacctcagagagagattgattttgttattgatttggcacctggagtagaaccggtttctaaagccccttacagaatggctccagcagaacttaaagaattaaaaattcaactccaggggttgcctgacatagggttttctcggcccagtgtgtcaccctggggagctccagtattgtttgtaaagaagaaggatggatctttgaggatgtgcattgactaccgggaattgaataagctaacaatcaagaataaatatcctttaccaaggatcgatgatatttttgatcaactttaagggaagactgtcttttcaaagagtgatatctaattgggctatcaccagttgagaatccgagaggaggatatcccaaaaacagcgttccgcactagttatggacattatgaatttctggttatgtcttttggactgaccaatgctcctgcagattttatggatttgatgaatagggtattcaaggatttcctcgatatttgtgttattgtatt

SEQ ID NO: 338132 - DNA, 1221 bp, Cannabis indica
agaaagatcgtgtgatcaatgctgaatgcaaagatcgtgggattgaggctaagtacactgatagtgggatcgtgtgtatgccatatccacgtaagttgatccctgagttatagggattgagctgatgactcatgatgcgaaagctgaattcgctaagtgttgatttccctacgcggatcgttgaataccttactctgggcatgccagcgaggcatcctactcggcctgtcttcccgagcaaatgttccaagtggactccacgtgtcaccattctcgtgatgccacgtcagagtgcaaaatttgggataacatttgcccccccaagtctgtacgggacctctaaggttgcgtgtagacttattccgagctggctctgcctttggatggggacacgtttcgagcatgactgtccgagactcgatgtgaagctgattgggtttcccttcggttttcagctaattaatgctctgacaattaatattttgaaatcggactttctctctacacggctgacggttgcactcgatcacttttgatttcccatattcgcttttgaggcaggaagctgaggcgtctaaggttccttttgatacagttacccctttgcctataaatacccatagtactggcacataactcattttatcacccttcgttgttaagtaaacttcagagcaaaaagagagttttctggctttaaagttgcagaagtgccttcagacgattactggttggcttgaactcagacattggaatctttgagtaagtttctaattcctttatgtttttctttgcatgtttacactttgaatgcaactatgttgtagaaagaatgcttaggaaaaccctagggttagaaacttttgcgactcttctttaccacgtcttcatgtgggctaagtaatctgttgagtacttctggtcggcatatttgcttgtttctcgcttgatactccgtccaacactcatcttgtgtgttgtcttttgtagatgaacccgagtgagtcttgggaactcgggcatcagatcgaccaagatttgcttcaacttgtgcacgaggttcatcctcgtcttcgtgctagtccttcttctagcgaaggaaactcttttgaccttgtacccagccataggatgatggctcgtgcaaagaaaaccacgcgtctggtcaacgcttctaatcctcaagtggctcggcttgccactctgcccgacgccgaacag

SEQ ID NO: 338133 - DNA, 1021 bp, Cannabis indica
gccccaaaccaaaccctaatgttaaagggaatgggggtcccctaaccgctggaaagaggcccccttcggatgcttgtcaaataaggaaaccccaaaagaattctcttaacaagcatcgggtgcaaaaagcccaaaggcagtgacagtggagaaaaagaaaaatgccaaggaaacaagaatcatcctatgccctaaaagagctatttcaacagaaaagacgtttccaaaaagaaaaggcaataaagagaaagagcaagggcacaaataagagagattccacgcattacacagcaaaatctggcaagattatttcccagaaactcaacattcaacccagatactctaaacatgcaatacgaacaaacaatagacgagtatgaagtatcctgagaacttacatgaagtttgaaggctgggggttggtgttgatcgtcgatacagtgaagactggcaacggcgaaggaaaaggagcagataatctatggtgtctggaatttttctctctgtggaagctctgagaatatttggtaaactagcaaaagtaaccaaatgaaatgagaaggttggattttataggccagaatgggtgtgaagcagctgtgatcaggcatcaccgtacggtgagaatagcaatcgatttgcattctacagatcctacggtggggataagtgttcatcaaggcggttggaaatgcttgagtattcgactgacactcattaaatgcgccagatcattaatggataggaaacgaatcattgcctgcaaaaagtaaatactgcaatgatgatggtcataaatgcaccccacgcgcccaaagcacgtgccaggaagttaataagacaacttgaggcacctaagcaagcctcgtttacttcccaccaaacaaggcttggggggtaaatgttgcccttaattttgtccaaaatacgtggaccaacgcaactgcgacacgtggatttgaggagtaaggttttgagataattcggctaagtctttttaatcaagaggatcagcaagaaa

SEQ ID NO: 338134 - DNA, 639 bp, Cannabis indica
tgaagctgaggtttctcgcactaaggatgaagcagaaaagcaacaccaagctgaccaaaaaatcaaagaactcgagaattttgttaaatttctccaagctaatctcgttaaaagacaagtcaatcatgatcaaaagctcaaagagttggaggcttgaaccaaagaaagggtcaacaacatcagtaggaggaccatctactagatttggtcagccaaccccgagttagattttagttttttgggtgataaggccaaaaccatgcttgcttactacgagaagactcagaaggaagaattttgtgaggaagaagagattgatgcagaacaagaaaatcccaccaagtcccctatgataatgtagacttggtcttgtatttatatgtgtttattttttgtttaggaaaatggcctaatggtttgccccttgtggcattttgtaaagacaagtctgcgaagttggttggccaacttagcttttatttatcttaaatgcctcatacctttacattcgaacttaatatatttatgtttgcttgtgtttttattcacaatgtaaacaattatattttgatcaaatgcagaatactcttggtctttccattgctcgtatttttcatatttaagtagttcgtaatctac

SEQ ID NO: 338135 - DNA, 539 bp, Cannabis indica
tactaaaattttatttattttttttctatttttacaattacattttttacatttacatcattacattaatttcttttaaaacacattaccaaaattttactttttaaaattttataaaatttattaatttcagatatataatattagtatatatacatatttctatataaaaaataattattaaaaactcaaaataattaataaaatatatttagagcaaacaaaattaaagatgcacaacttttatatcaaaatcactgatcaaatacgacaaattacatataaagagcaatattgtagtaagaacaacatttatctcaaaaacaaactcaaaacctcaaatgaagaatatatcaaagctagacatggagtaaggatgaacgtcttttaaagatcttaattcattatttttttttaaaaaaaaaaaatctaaataatattgtacttgaatttaggaaaaatattgaatgtgtaattactcagcccatttcttaatgagccagagcattgccttttatagatatggtaagttgttacaa

SEQ ID NO: 338136 - DNA, 615 bp, Cannabis indica
tatccctccattcacggcatcaattcttttccttgaatcccgcccacaatcccacgattctctcctacgatttctccctcaacatcctcattaatctccatgtcctctctgtcaccctgatatctcggatcggcctctctcctggaactggtagcacgccggagtaccactgctcctaggaacggcgacgtcagtttgtaatggtcttgccatattatcacgaagccaccttgcaccaatttgtttttgagaacgacgatctggggctttcatgaataagccatatggcttgacaatcttctctactggtccgtcaaaaacacgggggcaaaatctttctccatgcccgagtataccacagatgaaacagaaagtgggcaccctctcatatttgaaatttgcccagaaatagtcttccttggtgtagtaaattttcattcttctcttcagtggtttatcaatgttgatcaatacccggactctcaagtattccctccaaatgccagaataattcttaggacaagatgaaacaaattgtccaatgtaagcgccacatgccctcaacactcggtctgactggaaacccactctaagatcataaacttgtacccaaat

SEQ ID NO: 338137 - DNA, 574 bp, Cannabis indica
aaaaattaaaagtcacccataaaattctcaaaaaccaagaatttcagttatataggtatactttatatagaatagatatttagatttgtatatgagaaaaagggatccatttagaaaaggtcctaatctattacgatggatggagaagagtctggtgagaggtaatataataacaattaattatcattaatcattataataattatatcattaattttctaatttaattttgcttttcttttagttttgctagatggagaagtcgctacatttataattcttatattaatgaaaataatccttcttctcaatctcaagtaaatatactattactatttactatttactaattcataattacatatatttatcacatttatctattatttaatatgatattaattaattaaccttgaaatatttatgcagacgccaagagacagagatcttagtcctagagaaagtttcctgtaatttgtatataatttatattatgtttaattaatgagtatcatataaaaattcttaataatttatatatatactaggtgattgttacgtgccaagccacgta

SEQ ID NO: 338138 - DNA, 638 bp, Cannabis indica
tttgacctgacccgtagttagtttgagcttgaatttgttgatattttgctcaagttttgagcctatattgtatattgtttaaatctgattttgatgcatgtgagctttgattttgagctttaaatgtgtgtattagctctctgttatgttaattatattgtgtgggaaatgattttgagatatatgcatgtttggggtgagtttgggtgagttttgatgcatttttcgagctgttggaatggagtatctgagttttgaacccaggcgtcgcagcccagcttttgggtgccgcggcttgcttgcgtggacagattgcatgttgaacttattttgttcataacttttgactcgggactccgtttgggacgttcttcatatcgttcgaaagctcatttcgagcttcatatgtttatctatattttgaatgccaattttatattatgtgaaattggatttagggattaaccctttacttgtgaatcccaaaaattgtgactaagattaccgacacttggtcaggagcacccgaggatttggaatctccacgtttgcgggacattaggtaaaatagtagttagtacatagagtatgcgtggtggggcttatattgaaaatgatatatgtgagtatttgggaac

SEQ ID NO: 338139 - DNA, 622 bp, Cannabis indica
aatttaaatttatatttggatttatctaaattagtaatttttaattaaataaataaattaaaataagcatcaaaagaaaatacaactcattaaaataatgaactttagttataaggatattcgatccccattgttggttctgcacagttcttgttttagtgagtaattatccctaatggatgaacgttcattagcaatttaacgtcgtagaatttcgaaagataagtattattgtaagtgttttattcttagtaacgtccaccctaaagtggctggtagaagtaagacttgcaaagctcataagatagaatgaccttgactctcgcctaaacgggataacaccggattctagtcttgatcgaataaaaggttgctagaatggtatctattttagatgagttgactgctctattcaatgaatgatatctttgactctcgcctaaacgggacactgtatcagtttgttggaaattatttaagatgtgtttgttttgtattttcacatgtctttgttgtttgctaaatgcttaataatttatgaattgtgtatgaatttatattgaaccatgttattttctgttattaattctagtttaatttcaaatcttcattgttggtctta

SEQ ID NO: 338140 - DNA, 1014 bp, Cannabis indica
aaagtcctcagaaaatacaatatgaaactaaatccctcaaagtgttccttcggagtcagctcaggaaagtttctgggcttcatcgtccatgcccgaggaattgaagccaatctagagaagattcaagccctcctggatataaagtcgctaactaaaaccaagaaagtgcaaagtttgactggtcagatcgccgcactcagcaggtttgtttcaaaatcaatagataagtgtgtcccattcttcaatatcctgcgaggaaacaagcagttcgagtggacggaggaatgtgaaaaagctttccaagagctaaaggcacaacttgcaacacctcccatactctcaaaacctctggacggagaagaacttggaataaacttagttgtcacaaaacatgccgtaagtgccatgttaattagggaagaaaacacaactgcagatgcgttagctcgattggcaagcaacaatgtaagtgacaaggcgaacttggttcctatcgagttccttgaagagcctagcatcactggcacagaagaaatcaaaatgattgatacttccccaaacttgatgacactaatagtagcctacctcaactctgggaaactcccagataatcggaatgaagctcgaaaaatgagaaggaaagctacacggtacatcatagtagagtgaattatgcacagaagaggattctcaatgccatttcttagatgtgttactcaagaagaagctgcacgactcctatcttaagtgcacgatggattttgtggaaatcatgctacagggcaaagcttatctaagaaaattctaaggcaaggttacttcttgccaacaataattgaagattcaaaagcctatgttaagaaatgtgacaaatgccagagattttcaaatatacctggagctccacctaatgagttgactcaggtgcaaagtccatggacctttgccatttagggaattaacctgatcggacattacccaaaggcaaggaggagtgcagtatgtagtggtagc

SEQ ID NO: 338141 - DNA, 586 bp, Cannabis indica
gattatgtaataaatcaactattaatgaatatttatctaagaaataaataaataatgatagacagcgtaccgatcgggtatttctaattttacaatctttgaaaaatttaaaaataaattacaaaatcatgctccgtcttctttattcactctatgggtaatttggtacgtttttaggatcacttcaagcccataaactagttaaaacactttaattagtttcttcttaaataaaaaaatatttaagacactattcgttaagtccataaattaattaaaaattttaattaaattatccttaaataaaaaaaatttatttaagataattttcatagtattttattttaattatttttaattaaataataaaactcgttttattatttaatttagcttaacacaatttttgtcttaaataattaaaagtgtttttaaattcaaaatgtgaatatcaaatacaaaccatacataatatctcattttaattaaatataattaaaacaaatattatttaaaaagtaatctaattatttaataagataatattttgaaaatttatagtgtatatataatgtatatctattct

SEQ ID NO: 338142 - DNA, 1334 bp, Cannabis indica
tttttttctagtttttgacgatgtcgcaaaatatcgcgaaatcataaaacatgctaaatgtcttccacatcgcgaaacaaattactaatatcatcgctaaatatcgtaaattatcgctaaatatcgtaaatcatcgctaaacttcatctctaaccttgaatttgttctatcattgcaaatacatcactatatatcgcaaaatattgtaaaaaactagtaaaccagaagaaagaaacacaaaaaacgagagaggtcgtgagagaagatgacggcgaggccttgtgaccggggttctgggtctgtgtgttcgacggtaggggttctgggtcgggattaacgctagagagtgagagagagaagtttttttgaaatgtaagggtatttttgggaggaaaaaatattaaaaatgtatatactatttctaattttgtggtacatttaagcatactaagccaaataatttctaatatatatatatatatacataaacttttacattgatcacatgtttagtttagtataatattgtggattataatagaattattattaccattacattatttattttaatttttaggctgtaatgacttacattgtaatggtcattacactatgtattataattccctttacattataaaactagcataataatgattacattattaaaaaaaatatctcttttgccttttatttacttttattaaattttaaatattaaaaatatttttgtcaatatattacttactttatctaattaaaatattcattacatagttaaacccatggccggccagagggtggggcagccggggccttggccccaggccccacaatttcgaaggccccagaaaaattaaaattaatattatatatataaaaaaataaaaatataatatatgtatatatataaattttggttcaataattacataaaatggcttatagcacagttggtaatagaggggttttatgttgaggtgtgggtgccgagttcgattcctactaccctcacattttatttgttttaaaaattcaaaggtatggttaaaatttgtaagagaatatgtatgtttatttatttatttgataagaatataatattttaagatatattcaatgcattacctaaaaatatatatatataatataatgtttagaaataaatttatagtaaattgttggggttttttttcttaaaaaaaatattatttaaaaaaaaatattatgtttaaatatttttagtaaggagcaaagattatgtttagtaaacaattttttaaaaattactcttgatgcaatcaaacggataaaataatttattgtaattc

SEQ ID NO: 338143 - DNA, 582 bp, Cannabis indica
ctaaagttaatatctttgactatgatatatagagttaaagaaggttaatgagaactatagagattgaaatgaaaatagtgcaatgtttcattcttgaaggatgagcaatttgagaggattaatggaatattagaaaatatgttgcagacatatttgataaaggttagattatcttgaaataatctcttcctttgatagagtgtttgtttaaaactaataattaaatataccattgcttaggcactttaataagtgtggtacaagagaaatatgggacacctgttcactggaatgaagcaggtgagaaaagattacgatgaaccagaaagatccaaggaacttataaggatatagaatgaattcgagttgtatgcttgcctccttgagtacatagaaaagctacgctgattcaaagcgtatgaatatcaagttctaaatgggagattctatttttctccaggtatcccctatgagagagatacgtagaaagggaagttaaaccctagattccttagacctttttatactagagtaagtaggccagataacctatcaggtagctttaacaacctaaatatgaac

SEQ ID NO: 338144 - DNA, 539 bp, Cannabis indica
tattttaataccaaaataagatcattcaaatttaataaaaaaaatgaaatatctgatcttataattaaaataaataaaataatctaaaatttaaaaattaaccataaggctaaatttttgagaaatcaaattttcaaaatttaaagcctactaatatctaaaaccaattttaattaattaaaaaaattaataaaaattcattttattctgaaaattagatttttaattgaaaatttatattctacacaaaattctaccaaaaattggcatttgtttcaatgaaaatcgatttttgaatcaaaagatatgaagaaaataaaattggtgcgcaggggtatgcattagcaagggaatggccgagaaaaggggctgcgtgcagcctgtgttggctgaggtaactcggcatgaggagcccttcagatagggccatgttcgagaatcctcggtcagcccgtgtctgaaggcgcgtgctgtccgagtgtcgctcaccctgcgcacgcgcacacgtgcatccgaaacaagatattttcattcaaatt

SEQ ID NO: 338145 - DNA, 946 bp, Cannabis indica
gcaaattgtgtctcaccggtcgctgttttttccgttgtacggtatgaccatagaacttcaggaagttcttctgaccagtttcctttggaatcttccagtttcttctttagtgtatccttcaaggttttgttgactgcttcaacttgaccatttgccaaaggatgcgccactgcagagaaacttttgatgaaaccatggttcgcacagaaatcaatgaaggattgactgtcgaactgcttgccattgtctgagactattttctacgatagtccgaaccggcatatgatgttcttcacaataaagtcttgaactttctttgatgtaatggttgcgagtggtttggcttcagtccacttagtaaagtagtcaactgctatcactgcgtactgcactccgcctttacctttaggtaattgtctgatcaggtcaattccccaaatggcaaagggccacagactttgcatctgtgttagctcgttgggcggagctcttggtatctttgaaaatctccggcatttgtcgcacttcttaacataggctctcgaatcttcaatcatcgttggccagaagtcaccttccttagaattttcttggataagctctatccggttgcgtgatttccatagttaccatcgtgaacttcagataggagtcatacaacttcgtcttgagtgacacatctgagcaatggcatcgagaatcctcttctgtacatgactccctctactatgatataccgtgcgaccttccttctcattttctgagcttgattttggttatctgggagttcgtcagatttgaggtaggctgctattggcgtcatccagtttggggatgtatcaatcgtttcgatttcttccttgctagtgatgctaggctcctcgaggaactggataggaaccaagttcgccttgtcacttacgttgctgcttgccaatcgagctaa

SEQ ID NO: 338146 - DNA, 3416 bp, Cannabis indica
tcaccatgaagttccctactcccgctagagtaggatctgtgtgacgagtccaatcagactcacgagtatgttacaatgcggcattgaagctcgcagaaaagaagtcagtcaacgtcatttatctgatagaagcaccgccccctcgacaggaggtgtttagaatagaggaaatacaacacaaagacgaaccagacttggatcctagggtcctcaattacacaaccaccgcccaagccgcggtagacactattgaggtacccattgatcctttagataataacaaggttttgaaaattagttctaaactaacttttcaatagcgagaaaagcttgtcatgtttctcaaacaaaatctggatgtttttgcctggaaaaattcagatatggtcggaatatctccgcaggtcatgtgtcactgtttgaacattgaccccaaagtgcgaggtgtccgacagaagcgccgtaaaatgcaccccgcgaggtaccaagcgctgaaagaagaagtagatcgccttttggcatgcggcttcataagggagtcattctacccaaactggttagtaaatcccgtactcgtgcccaagcctaacgactcatagcgcacatgcatttcactaatttaaataaagcctacctaatggacagtttcccactacctagcattgaccaacttgtcgatgccactgcaggtcatgaacttctcagtttcatggacgcatactcgggatataaccagatcccgatgtatgaaccagatcagtaacatacctctttcattacagatcaaggtttgtactgttacaaggtaatgccttttggtttgataaatgcaggtgcgacatatcagaggctggtaaatatgatgttcgcagatctaattggtgaaaccatagaggtatatgttgacgatatgctcgtaaaatctcaacatgcaaaagaccatgttacccacttacaagcaatgttagagatactacggccatataaaatgcgactcaatcctcttaagtgtgtctttggagacaggtcgggaaaattcctcgggtttatggtaaatcaacaaggaatcgaagcaaaccctgcgaagattaaagcattagtagagtgcgatctccgactaaaccaaaagaagtccaaagccttacaggtaaggtcgctgctttaaattgttttatatcacgttcctctgataagttcaaagaattctttcaaattttaaaaggtaataacaagtttcagaggaccgataagtgcgaagaggcttttcaagcacttaagtcacatttggggcgatccccaatcctttcgaaaccaatacccggagaagttttatccatctaccttaaagtgtccgaatactcgattagttcaatactaatccgcgaagaccagggaaaacagtattcggtgtattatgttagtaagcgcctgttagacgctgagactcgctacccgcaaatggagaaactggcatttgctctggtgatagcgtcaagaaaattgcaatcttatttccaagctcatagctttgaagttttaacgaactaccctttgagtcaagttctggcgaaaccagaggcattaggaagattgttaaaatggtcggtagagctgagccagttcgacattaggtacaaacctagatctgcgactaaggggcaagcactagctgactttatacttgagttcccgagcaccgaagtggcactcatagaggaaaaaatcgaccatgatataccaaacgacaaaggatggactttatacgttgacggagcctccaacagcgaaggctccggccgtggtataatactcataagccccaacaattttaaggtacatgctccacttagatttgaattttctgcatctaacaatgaagccgagtatgaggctttgattacagaattaaaactcgctcttgagatgaagatcgagtacttacaagctttcagcgactcccaaatcgttgtatgccaagtgaacggagaatacctggccagaggtggaaatctggcaagatacctcgcactaacttgtgagttgctacagaaattcaagaaggtgattgtttctcgagtgccacgtgctcataactctcatacagacgccttggcccgtttggcctcaacaagagaagctgagttactcaatgtaattcatgtcgatgtgttaactcacccaacagtgagccgaactgaagtaatggagataaatactgccagaaaagtcacatggatgactcccatagtggattacttagggaaagaaatcctattcctacccgaagataaaatagaagctagaaaactgcggtatcgagctgctcgatatgttaatatgatggcaggctttatcgtagaagcttcagccaaccgttggtcaaatgcattgatggtgccaagtgcgattatatactccgtgaagtgcatggtggtatctgcggcaaccatgccaagggtaattcccttgctttaaaaataatgcggcaagggtattactgggcgacactgcgagcagacgcttctaacttcactaaaaatgcgacaaatgtcagcagatagccacatatgtcaaccaacctccaagcaacttacactccataacaagtccttggccctttccggtctggggcatcgacttaattggagagttacccaaagggaaggccggagtcaaatacgccgtagtcgcagtcgattatttcaccaaatgggctgaggcaaaagcccttgcgactatcacagctgtcaaattacgagagtttgtgtataattccatcatctgccggtttggcatcccttacaaacttatctcggataatggaaaacagttcgattgtaaggaaatgcgagaaatgtgcgatgagttggggattaaaaaggcgttttcatcagttgcctatccacaaagtaatgggcaaacagaagccgtgaataagatgattaagcataccattaagggaaaactcgaggagcataagggggtatggccagaagagcttctgcaagttttctggtcgtataacacaacccccgatccacgactggcaaaactcctttcttgctttcctacggatgcgaagccatggtaccagtcgaagtcggggtgggctccctacgaagagatgttttcaacatcagccaaaatgcagaaaagcaattggtccaccttgatcttttagaagaaaagggcgatcaggctcatttgaaaaatgcggccaatcaggagcatactgctcgatattttaattctaaggtcaaaaagcgaactctgcgagtaggggatttggttctgcgaaaagtcatgccaaacacgaaaaacccaacacatggggttttcagtgacaattgggaaggaccataccttatcgctgaaaaaattggccatgcaacttatcgacttgcagaactcgatgg

SEQ ID NO: 338147 - DNA, 653 bp, Cannabis indica
ttttcaaatttacggtttgagtttctaaagtggttgtagagctagttgcaatagagatttctatacgattttttgttgcaatttaggttgcagcactgattgcaataagagtttctaggtagaattccgtaaaaatgcaaaaaaaaaaactaacttgaagtgtaaaaatgaaaaaaccctttttttttaataattttaatattttagtttaaaccatatttgttaggtcctttttttttggcaatttagttgtcaattttttttttaattaatgtgtatttttattgattaatttatttttattacattgattttgtgcatttaattactcttttcttctaagaaaagattacttctcagctggtctctttttggtttagaaaacttcttgtaagagaaggaattctcttatggaaagttgtctaattttaggaaatttcctttttctaatggatgatttcagttttgcctttattagaagaaatcaaataaactttatttggcaggtatgaagtccaaattcgtgatcttggttcaatttagaaagtttcctttctgatcctgatctgctgctgtgaaacccgattctgatactacaaatcaggaatttttttaagaaagttttgtacagggaaatcatttttgtggttgtc

SEQ ID NO: 338148 - DNA, 1062 bp, Cannabis indica
ataatggaaaatggaaactttacagagtcattgataaacatgttgcaggtagccaaatgataaaaccatgttttatcctccacataatcaacacctaacctaaaacccggggaaaatttcttcgcaccatcaacataacaattgtaatgcctaaaagaacaaacaaacaacaaaaaaacaatattaaaaccagaataaaattgaaaaataaaacagaatacaaatacagaaataataaaaatagtcacctaggatgtttaagcaagccttgaccaatccacgcgtcaaactttgcctcaatctcaggagatacgggatcagcaaatgaatcattaagagcataaaggcccttcacataagtaaccattttaaaatccctatcatccccagctgattgagaacctgaggacattacctccattggagtgctccccacatcagccgacccgaaatcaacaaaaggagatttcaaggccggagcacgcttcctcttatccaacagaggtgtatcagaaacagtgtcctcagtttcttcatcagtatgaagggcagctgacttttgaccaacaacatctggattgggttgggggacctaaaaaaaacaaagactgaaattaaacagttgcaaaacaaacagaaaactattaagcaaccaaaataaaacataattttcttgcaaacaaattaagatacacttacatggattttacgaacagcctccaagccagccaacacaacttgatcatcatcaatttcaagctggcttaacccatcaaaaaaatcgtccccctttaatccagactcatgccctttggcttctcaacatccttagccctctcatcactgcctccaacagcctcagatggattcacatcagaaggaggaacatcattaacaaccttatcagcatcatcagcatcaccaccatctttaaccaactcatcaccatcatcggagtcggaatcaatatttttcaggatcaggcagttccttctcatcatcctcatcatcatcatcatcatcatcatcatcatcatcttcagaatcttgagttactaactc

SEQ ID NO: 338149 - DNA, 1155 bp, Cannabis indica
agaagaacccagcgcaccaggccatttgtcaacatgggccctgggtaccccattttcgagctcttaggttgttgttttgatacttccaaggttcttgaacttaacaataatgtctcttaccctattttttgacaatttcaaatttaatggtcgaattagatttgacatttgaatgatcgaaactagtgcactaggttgattgttaacctgggaactgggcccaacaccaggtcaacttgagcgctgggccctgtatccaggggctcgcatttgtagttttctccccgagtttgcttgaatctttattatttctgatgacgaaaaatatggctagaaaacttttttaagaacttaattagaaaaactcaagttgacaatatgttaaccatggcaccgggcctagtgccaggtgtcaacttgggctctgggttatagttatggtccttcaaaagtttcgtttggtcccaaaaaatagttgaaacttaatcttttctgaaaatggagaagatactaggaagatttctcactaaacaccatcgaaatcggtccaggttgacaaaatgtcaacttaggcgccgggccttgcttctggcaccctataaagtgttgtttcttccccaaaagtacatatttccccatttttgatgaagacgaagatgatgcaaaattcggatcgtcaatctgacacttggaaggtgcccaaattgacaaattgtgaacttgggccctgggtgcccggctagagggtgctccagttgctcaaaaatgaacttgcttcgaatatgattctgatgcctcaaatatgtctgtggtatgtctagttgatgtctcaatgcaaagtttgacccatttgtactacgacagtcccgaaaacttaaaccctagattagaatgtaaacttgggcgacgggtgaaaccctaaggtggcgtttggttgggaggaatgaaaagataggaataggaatgggaatgggaatggaaataggaataggaatggaatggaataaatttaaaatgtataaaaaaattaataattttttactcatcatgcattggaatggtctttccttccatttcaaaatggaatagtcattccaccaaatggtggaaaggccattccattggaatgacattccaatactattatatgcaacc

SEQ ID NO: 338150 - DNA, 710 bp, Cannabis indica
ggtattttaaataaagtgcacacacgtggcgtccctgttggacagggcgttacagtagaaatcttggcaaatgacctgcaacataatgtaccaacgtagttagactctaaatatagaaaaaaaagtaatatgtctcaattaaagaaacatcatacccaaaagctttaacacgacctaggtgctaaggtgtgcctaaagattccgttaagatatcattttgacccttaacttcgatttcactagtactaactttctcttttaattcattcttaccataattgacacttactattttctgctcacttaccttgtcatattctgcgatcaaagtattgttctttgtccttcctctcatctagagttgatatctctcaacattgtcaacaccgagttctttttcctgtatataagaactagattaaattttgttggtgtttttaaaacttaacattataaaagtagtgatacaaactacttacaaaatcttgttcgacattaggcatgcctctaagggatgaaggatgatggttaacgtgatttttaactaactatgcaactcgttgctaatcaacgagtttattgaaaatcgtaattaattaaaattttatttaattaattataaacactaaaataacatacttatataaaaccaggatcccgtttacaaaagtatttacaaaagtttccctgtgcatatacaaaagtttgtc

SEQ ID NO: 338151 - DNA, 655 bp, Cannabis indica
aaaataatttccaacaactaccctaaagtgagcggttatatagtctagggttattaccctagtgattaaatgattttgaatgcaatgacatgctatatatatgttgaaataaagaattgtgcggtaaggcataattaggttagactcggtaatcagaattgagataaaccaatcttaggccttattgtaaatagatatgtgagcataacacgtgggtctatgctacatagacataaataggcgtgtgaggataacaagcatgtagcgtgtgaggataacacgcatgtctatgtcaaatagacaataagtgcagtggcatcaataattatgtgacatttgattattgtgtatattgtaatttatactgtcttgttgggcttggctcacgggtgctctactgtgcaggaaatgataaatctatttgtaatcagccctgagttcgaggacttggcagtggattgtacatgttcgggccatactagaccaagcgggttcggtctactagtggatatactttgtattctcggattttaccgcttaggtcggcatgtaaaataacttgtaatattttgcgaaaagttttatgggatcccgaaacatgttgtcttttttggattatttgtaaagtttaaattattacaagttatgtttttat

SEQ ID NO: 338152 - DNA, 644 bp, Cannabis indica
aattgcaccaatagcgatattgacacgtaggaggatgctaggcaccagtggtgccctttagcatttctctaaaaagtagtatttttttttcctcacttgattttgtagtggttgttgatatttataggctataattttataaaagttaaactgatcaccaatgttttcttgaagatttctttttggttggaaaaagatgtgatgtacatacatgtatgtgtgaatgtggaaatattagggaatatgatagattttgtatttgatatgtaatttattagttgtcccaattttccaacctcgtgccattaaagttggaccaacttattttatggggatggatggagacaaatgtcttacataaataatcctaatttgttggtccacattctccattctaatctaaaattttaaaaaagtatattattggggaagcatcaatagaaagtgttatagtgctaagtgggtaggccctaatattgtttgggccctaataaaaacaataattttggacttgtaaagaaatgtgtggtaatttcaaaaagtatgtatagatttttaaaagaaaacttttgagggcttttagagaaaattacactacatatacttcttttaacttgttgtctttaaatttttacccttttttt

SEQ ID NO: 338153 - DNA, 538 bp, Cannabis indica
gcaaagcattttttatcatctgattgttaccgaaagtcgacttactccacaacttgatgatttctttaaccatcttaaatttacacatgagcttggtcctcgaccatcccaacgccactgcatttttccaccaaacctaaaaaaaattggaagagatgtgatctaaccactagttatcaaaccgaaaaggcgtggggccgcatttaggtaaattggagtccaggattattgggctgtgatcagagactaatctcaccatcatttcttgtctggcaaaaggaaacattatcttccaattattacagtataagaatcgatccaatctgctccaaatgggtaccaatctaaagttcgaccaagtaaacctttcgttgatttcttttggatccataagcctcaactatttaactaacttatcaaacattcacatacttttagtactagaggtactattcattttttcttcaactcttctgaccacattaaaatcccccccccctaaacaccctgattcgccacattaattacttgtaaaata

SEQ ID NO: 338154 - DNA, 714 bp, Cannabis indica
ttttttctttttcatggaatccatttctgaatccatgccggctgaccattgttgctttttaggaatagccattgcatgtttgtaggttaatgggtcgtcattaataccgtcaccaacgaccatattgatttcaccatgcaagccatagcgagatggtttagtagaaaccctcccactacgacgaagagcagtgaccctctgaacaggaacatgagtggtagttctctcggttgtatcaacttgtaaaggttcaaccgaggaagtgggattatcctctacttgagtagaagaggatggaacattagaaggacttatatcttaaagcatttcctccaatactactttactttgtggtttgaaattcttaatatagtcatcttcaaggaaagtggcatttgtggaaacaaacactttatcatccttgtgactttaaaatagtccacccctagtctctttagaatttccaagaaacatgcaaatctcagtttgcttttcaagtttgccatctttttttcttaagtaatgagcagggcaccccaagattctataatggcgtaaactaggtgtacgaccattgcatagttctaaaggtgtcttagggactgatttatatggaacaacatttaaattttcgatcgccatctaaattgcatatccctagaaggacgaaggtagagttgagtagttaagcatagacctaaccatttccaaaag

SEQ ID NO: 338155 - DNA, 820 bp, Cannabis indica
agtaaaaaaaaaaaaagtaacaataaaaatattgggttcaataattaagacattaaatataagtattattgatagaagttcaaaatgtaaaatgcaaatactaaagtaaaaatgattttattgaaattagaacttatgacctcttttatattcatgtaatgtcattaccattataccaaaacttatttatgttcatacatatcacttttatttataaatatatgttgtaactaaataaaatgcatatatatttttttccgaattttttttcaggggggcgactgcccacctcgcctctatgtgggtccgcccctagtctacttattattttttattaattttttataagaatattgtgagcataaaatttaaataactgcacgcgaagcgcgagctgatttctagcattataaaacaacactaccttcaatcttcctccccattcaacggcgattggagctatgcactttataaaaaataaaagagatatatgtaatgaatataaatttaaattgtaatatttttaaaatatatatttttttgttatatagtcacatctaatataacatagagatatatattattgggttttgtgccctaaataaaactcattttaatataattagatttactaattaatattagatcagaaatcgttctatgttgtatggttcacattatttatttcatgattatggcttgggcaacctgttaacgcatattttcgttaaccaaatttgagcctcgcgaatatgattcaacgtagaaataaaaaaaaaaattgtagaaaaataaaataagaacaccaggttttttacgt

SEQ ID NO: 338156 - DNA, 1456 bp, Cannabis indica
aaaaaaaaaaactaaaaagtttactcaatatctcgcatgtgaggattactggcaggtgcggttctcttttttattaattaatcttataaattgctcaagtaatagaaatgaatgcaatatattattgtgggcataaaattaagaataattaatatttttaatttttaatttttggcactatttaatttaataaacggcttattaaaaagtcttcttaaaatataatagttacataattatactctttttattaggttttattttttttatcataaaaaattagtatttttaccctccaaacattgaccaatacaaacatttccctcactttattaaaaataaattaattttaaaaattataatattttaatatttttgaaaaaaattataaatataaatttttctttaaaaaacataaattttttcttaaaaaatattttcaaattttattttcattataaatacatattttaaaaaatcaaatcaaaattattgagtatctaataaataatttaaataaattaagattttttgaaaaaaaaaatcaaagttatttatatttataaactcatatcttaataaaaatataaaattattttgaaaaaaaataaaaataaaactaaaaaatattatgtttacttaatcaaatttatattttatgagaaaaacaaaatagactcaagtttgttcccataaaattaattttttttttacaaaaattgaatttttattattttcttaatatctaaatgaatttcttaataaaaagtaaataaattttttaaaattacttatttagttctattttttttaattttcttatttattcaaaataataatttttttttaattttcttatttattaaaaataattttttcttaaaatccaaattaattttttaaaacttactaaaaaaatgttgaatctttctcattttattttaaggaggtacgatttgatagttgtcaaaatttaagggacaaaattactaatttacaaagacatgtcagtatttaaatagaataatgggacgaaatctaacaaaaaaatctaaatttctgtaaatataaaagtgcaagagattcttaacaagttgtatactttaaatcattatcgtgaaaaaagttcagagagcaaaattactaattattcacccacataaaggcgtcgcccccctaaaaaaataaatcgggaataaaaaataatgtatgcattttagttaattacaacatatatttataaataaaagttatatctatgaatataaaataagtttttgcataatggtaaagtcatttcatgcttcatgagttctaatcccaataaaaacatatttatttagtatttgtattttgttttttgaacatctaccaataatacttatatttaatgttttaattattgaacccaatatttttattgttattttttttatttaatactaaaatataaatt

SEQ ID NO: 338157 - DNA, 934 bp, Cannabis indica
acaaaaatactagattttaggtgaaagttttataattttactatcacggaaaaaatttttacaaaaatattttttttatataaaataactgtaaaacaataaaacagaataattaaaagtaatattagaacaactaaaaaataataatggaacaatgataacttagcaatatttttgataaattaatttatcccataaaaaaaaataagaaattttaatatattgtgtaaaaactctatttttatatcaccaaccttaataggaaaaaacaattagtggcttgattatatatagtgcaaaatatatatatttgagatccaaaaatatatatagcaaggtaataagatgggactacttgtggtttagtgatttaacagagaacaaatctttagggaatattaaagttcccagatcaaacatatataaactcatttaaataataactataacaaatccaaggattccgatttctggttctgaaaaaatgtcgtgaaagtcaaatctattttaaagaagggggcgtgtaaagttgtaacaaatggaagggcgactatagcatttggagggatccctaaattcctcacctgaaaggttttatcccgaaaccaaagggcggggtcttaaccaatgatctatgtgttgatgacctattgcttgaaaatggatattgggacatcccaaagctaaatggtttatttgataaagaaactgtgtccgcaatcgctaaagggggaaaaccctctggccaaggggatgatagatgggtttggacactagataaaagtgaccagtttacaagcaaatcggcttatctgtctcaagctctggatagagctcatcattgtgaggtagctctggctctttggaacaagttgtggaatagtagaatattggaaaggcataagatcctgtggtggtgcatcctatccaatgc

SEQ ID NO: 338158 - DNA, 1118 bp, Cannabis indica
acactaagtactttcatgcttgtgcgagtactaggcataaaaaaaatcagattttgtctcttaaaaataaaagtgggatttgggtggattgggaaaatggcttaccgggtgtcgttgaagattattttagagagttgtccacagcttcagagattgattggggtagggtcacggcttgtgtgcataatcgggtgtcgactgctatgaatgagtctcttactatttcagttgacgctgaggaggttcggaaatcactctttcaaatgcatcctgataaatctcctggtcctgatggctttaatcctgggttttatcagaagttttaggatatcgttagtaaggatatcattcggttagttcaacacttctttacttttggtgaatttcctaatcatttaaaagaaatgaatagtgtgcttatcccgaagaagtctaaacccaaaagcatgagtgatctaagacatgtgtaatgtggcttataagattgtttctaaggtgctagccaatcggttgaaaattgttcttcctagtgttatttctgaaactcaaagcaacttcttacctggaagactgataattgataatatcttaatctctttcgaggtgatgcattatttgaaaaagaagcaaatggggagggaggggtttatggcacttaagttggacatgagcaaggcttatgatcgggtggagtggggctttttacaggctatgttgaggagattgggatttgatgagcatgtggtgaagttgttaatgcagtgtgttagttctgtctcctaacaatcacatcgggggggtcatgaaattgggcctataattcctacaagaggtcttcgacagggtgatcccctttcaccctatcttttccttctatgtgcagaaggattctcggctttgataagagactatgaacggttggggaagattcgggggtgcaaggttgctcgaggggctcctgtgttatctcacatgttctttgttgatgactgttatgtgttctgtaaagcctctgaggatagtgctattaacatgatagaaatgttaaatatctttcaaaaggcctcaggacaacaagtcaatctacgaagtcctctatatttttcagcgctaatatt

SEQ ID NO: 338159 - DNA, 583 bp, Cannabis indica
aatcaaaaatcttgcccttcaagtctctaagagttggatttttgctcacaatggtattgctccaattcaggatccttagaatcccagatgaaactcttttacagaaagtgtttaccatggcaggacaacattcataaaaccatacagtaaacaaccacggacatcccaaagccctataccaaccatcatactggcctcccttctctgccttcctattttgcattataatcccatgctgaattctacctttgaatgaatcaatagtcaattcaaaggattccctaccccaacaatactcatcccaacgaccactatcaataacatctagattaaacctagatacttctttatcaggagtattgctaagaagaaaacattgaataaaatacaacacagccagtttcaaaccaagagactcatccaaaccccgcctactacccaaaaaagcatcatcaatagctttatcatcaatggtttttacaccacaaaaactaatctcaaccaactggtttgattcctgggaaaacaacaccctgttgcaatcacaaaaacaatcaatttcagtgatcaaataaaactcctc

SEQ ID NO: 338160 - DNA, 532 bp, Cannabis indica
cttaataattgttttagaattaacaattattcataaacatagaattgatattctaagtgtttatatggcattaactctttgcagagtttaaaataccatagaatttgtatcaataataaaacacatacacatataaacattataaacgtataaatataattggtactggcaaacacaagataaagtaaatgaagctcaatgcaattcattaaaagagaaattttattaaaataatattcccaaaaaaaaatgaattgtctgcaataatatgaaaaataaggaaatgaaaaacccaaaccaataattgaaatccaaattgttctaaaactaaaacaattaattcaaaattaaatagaagattccgagcttcatcttcaatcttggactatctccacccatctgtccaaccatccgactcaactcgctaggatagcaatccaagttcaagcagttggagctgaaataagaagaaaaacaaacatggttagtaggtccagaattaataatctaagtggataataattctctaaaa

SEQ ID NO: 338161 - DNA, 891 bp, Cannabis indica
aaatgagttctctacacaagaaccagactaggaaaactattacaagatcaccaggatagaaattaataggctacaaatggattttcatagaaaaggaaggttttccaggtgaagaagtcagggtttaaggtgtaataccctggaattaagaaatggattaggctttgctaattgtacagcctttgctcttgcatcagcagaagatattgataacacagtactaagcacatatcaagaagctgtcaactcaaggaataagaagaaatggcttgctacaattgattaagaaatgagttctctacacaagaacaagactaggaaaattgttacaagaccaccaggatagaaattaataggctgcaaatggattttcatagaaaaggaaggttttccaggtgaagaggccagggtttaaggtgtaataccctggaattaagaaatggattagcaaaaccgtgtttagataattatgaataattgaggaattatattattatatagttcaatatatgtgaattaatatgaattttaatatgttaagaccccgttggtgagctagggcattttagtaattgttacccgagaagggtaaaatgataaaattaatttaattacgtgcttaatagaactatattattatatagtatgcttgtgttgtctttttaggtgtgttctgacaggttggcacggtataatcacaaccaggaatttcgggccgaactgggttcgcgcccgaaatacaaattcgattgatttacttggcattttatttgataagtgataatcttaaattatttgtgaggtatttatgcatgaaaataaaaaaattaaccttgtgtgggtgaatatgtgtgctttggccctaagggaattttggtcttttgaccttta

SEQ ID NO: 338162 - DNA, 946 bp, Cannabis indica
taattattaaacggagtcaaaaaaatcaattaaaaaacataaaataaattagaaatttaatttttagcatgctggaaaaaagaaacgtcaaaaaaggatgaccggtgccactacacgtgcccccacgcgcctcttgcgagagtgggctttggagttggagcaagtcttcttcttccttaggtgggtctaaaacgggtcgagcacgacccgattgcaggcgatcaggtcggagagaaaaaattagcccaaaacgcgacgaaacgaacaggaaaaagagagttttgttcgtgattagatttctagtcgatctacgctactacttttgggtattaatggctaaaagagtagatctaatgtaaaaaagcaattcgaaaattgaagacataaaaaaaaattaatttttataccaatctcagtcgaaacacaaaataaatcatgtaagaacattgataaacaattgataatgagatattcataatcaattttagatcaaaaataataaaatcaataaacacgaaatataattatataaaccttaaaactttaaatttaaaattctcataatttacacaatgattttatacatataatatatcaatggaaaaaaaaaataaaacccctaaagttttaagattcaacaacgaagaatttatcatttattaattattgataattaacatatacaaattataggtcctaaattatatacaaaagataatttgataccacatgttagataaattaacaatagacctaagatctatttgtatataatatagaacacgataacaatatataataattaggtatatatatgcgtacctgattgatccatagtaattaacgttatttgatagtgcaatacaatcaactaagtcttcctccctagatctctaaattaaaagcagtttatttatttgattatcaaaaggtatacaattgtgat

SEQ ID NO: 338163 - DNA, 784 bp, Cannabis indica
tggagacatatgagtcccctcgtggtcctcatatgcccgccctactagccccactgactagtagtagctcacttagcaccaaggtgcaaggggtggtggagagctgacaccagggtacccccttaaagagcattctgagcttttagccttctaccaggaacatagatgatttttgctctgtagacatatgggaagaaccatataccaaatcacctagtttcgccaaaccgattgcaccattctatttgtagacccaaataaatggtgaataccaagtcccgtcccgttccggacaatattgaagatatttacgaaaatgccactacatacaaactaagcatcagcatgccacccgcatgcaccacaacatgcgccaccacttgaccaccacttggccaacttgtggaaatcacttagcttgtaacgtgccctcttggaccgcacgtaacattctcccccacttcaacatgtcgatgccctcatcgacggaccgcaggcaactcttcctgatctcaactcgtaagcttaccccaagcttctcccgaatcctaagtctgcacttgtccctctacctccgtagaaccaccctcttggtgacgatctcgctcgcacactcttggacttcatcaaagaccctatgccactgtcactactcagaacaacccatggagtagtgcctccgcactagaatacttctcccaacacgaactcctccgagtccatcacaacgtccctccagccaaccaagttacccttgcaacactaaccctgaagctaccacatc

SEQ ID NO: 338164 - DNA, 517 bp, Cannabis indica
ggatatatttcaggtgtgcaacaattagtcctctatttcggaaacgaggaagaaggtgagagatgaaaatcaaaatcatcttcaaccattctatgcctgacttatgaaattaaagcttcaatcgacttgattttcaatcgataacgatgagtcgacgacaagtgaacgattttagatgaacgagaccagcacattcgcccaaattaaagattcaatcgacttgattttcaatcgttaacgatgagtcgacttgattttctgctctaactgcgccaagtgttgcccaaaggtaattactttccacatattcattcgattttgattagggatgttcaaaaagcttgtgtttatgatagtaaaattttgatttataatttattttgggggtttcgcaagtatggttcttcctttctcagccactccttattctgcaatttctattttgttaattcaattttcgctatggaggtatttgttttttttttttggtacaatttcattgattagatttcaatta

SEQ ID NO: 338165 - DNA, 1266 bp, Cannabis indica
tttgctctaataccatgttagaaatgtagaagtgtatggttgaggaagtaggattaggtgagtgtatggggttccatcttaaaaccaattaaaatagaaagagtaacccattcatcttatgtatgatatttaattttcacacattgtgaatgtgggactctctaacaaggttttgaataatttagtcacagctttccaaatccaaatcttttttctataatttaatgagaaatgctaatggcacctatagtgttattctagcacccttatgagtagtaatatctctattgttaactcagatttttgttaacagtaaatgaaactttgtaataaaaaactgattgtttatatttaataaatatgtatgaaacattaagaactttacgtagttttgtagttaaaatctacatactccacgagtcactattatttcctaataatatgtttagcttacaagagaattactatgaatatttactcaatcttacagggtctttccatcccaaaataattgatcattttccccttaggttctgtccctatatatagattttttaggaagggcagttatttctcatttttaatttgaggaggtacgatttattagttgtcaaagtttaaggggtagagttgctaatttacaaagacatgtcagtatttaaatggtgttaacctagaaattgatctcggtgacatgaataacaatgtttgacacgtggcaagaaagaaaaaatcgtgaagttgagtagtcctgagtcatagcagtcaacgtgggaggggtccctagccctgcacctaggttgacttcaagaacaccggaaggggtgtttggatttcgtcaagttatttctaactcactatcttacagtattatgtaccataaagacatgaagcatccaagtccaaggcccgggagctaaaaatacacgaaacaaaaccacaaaaatcaaacccgggtgcctagggtttcacccagcacccaagttgacaacccccaagtagggtttcaattcttgggatcttcttaatgtgaatgggtcaaactttgtactgtaacgtgaagtatacatgtcacgaacatatttgagacattagaattagaattagagaactttcatttttgagcacccgaagcactaggtgccccaggtacccagcacccaggttgacatataacctggtgcactgggttctaggggtgttcaaaaattatccgatccaatccaatccgcacgatccaatccaatccaatccgcaaaatgcgga

SEQ ID NO: 338166 - DNA, 1585 bp, Cannabis indica
taagggtaagaaattgcaaactcctaatttttacaaggttcggtggagctaagccacctacatccttggtcttcaaagctatgcacctagctttgagttctaatatcgagccaagttaatgagcttgactaacccttacaatcgagaaattttcaccaaggtgtttccaaacctcttacaatagttttgcaccgccaatgactattaacttctttctcggattattgtagtgacaatctcactataattgggctgtttacaataccagtgccaacctcacctcaactactgttaacacagatttttgttaaccaaatttgagcctcacgattatgattcaacacaaaaaataaaaagctgtagaaaaatagtatatggacacagggttttttacgtggttttgtagttaaaattctgtatagtccacgagtcaatcttattcagatttctgagtattttgttttagggcctcttgcctaagagtcccttttttttctttgatcttgtctgctactatttataattgcataatggcagttaattacaaagctgaccaaaatgtaattacagttattatcccttgaatcatgggatccgattacatattacaaaatataaatgcggtgtatgaatttgaaaattatttagctgtgattttctctcttttactgggtcaagaatatcgtgtattaagcacgtctttaaatgttgaatttggagatgtctcaacagaaacttgattgtagtgatcccaatggcgagctggaaccattcttcttttcgaggtcgacaagatttgtcttacgtcaatcgcgtttatacagaaatcttccgacttgtcaaggttatgagtctcgcttctgttaattaaatgaaactataggaagttctctcatagcgagatggtcatctcgcattcttgtactctgagctggttcgacttttatacttagtttgcttatttctaagctgaggtatgtgttattcttctcaagtgcctcgctattctcttttagccacatatggtttctcatttatactctaagtaccagttcgtacatcgattactcgcctaagactttacagtctgcgggttgtagatatactctagtattgtaaagaccgcttagctttaatttggaatttagtagataattaaggcttagctatgaaaattatttattagtattgaattatttatttataatgatttatttgaattcagaatgcatttttatgtcatatatagaaattttataattttgcatgttttgtgcccgtcaacattggaatgcggtgtttggctattagaatcacatcctaaataaaaatgaattagagatatgtcttctgtttattcagatgcactttataagcagtaaagaattcagtttctctagatgagtaatgcatatagtaaaaatgatgttgcatattgttttaataacacaaaggaagtaatggtggagaaagcagttgcttgccacagacttacagttcctgtaatttgggtttagtcaaatatactgcacttgatctggatgtcaagacaattgattgattaaaatgcactacttgttttatg

SEQ ID NO: 338167 - DNA, 784 bp, Cannabis indica
cttttagttatgaattgcatttatgaattgagcttcatgtttttctgttcttgtgtatgccaaaatagcaattatatttatatgtttacaatgtttgtatgtgtttgtgtttttttaatgatacaaaatcaatggtatattcatctctgcaaagagatcataccacataaacacttagaatttaaaattcaatgtttatgaataattgttattccttaagcaattattatgatttggtttaataaaacgatctcttgatctgatacggtagaaaaagttaagaaataatatatgtagttcaacgatcttttacatctattgaactctagattatattcataactccacatgatctctataacacttaggggtggataaggctattgacatatgtagttcatttcgaactctagactatgcacaatacaccacaatatctctatgttacacatattttgattagacatggatgtaatataatgaataaactagcaaattctaagaacttattcatgatcctatattttgttccaattacagttgtaatagaaattgataccaataaatttcttggaatagtatcacagtaccttaattgagtgggagaattttaaaattctaagctcatcttgatttggatgacaacacttgtgatagattactatgttatgctcatgatatgaactttagaattcaactgagaaagtaaatctaaccgttcatatggatcgaaataacttatcagaactttgaggataagataggagaattttgcaaagtctat

SEQ ID NO: 338168 - DNA, 858 bp, Cannabis indica
aacaatttacgctgtatcttgttcccacctcgcttgtcggagcagtgagcaactggtttaacaagtttactcatcattcaataacttcttgggagcagttgtccagggatttcaagaaaaagttccaggctgctaaggatagacgacccgaagcggcctcgctaaccaatataaagcagcaacccggtgagacacttaaggcatacttaagtcattttagcatggttgtggctacggttaggaatttagatgacatcacacaactaacagcccttcaagcggggatctctactgatccataactgtagggggcgagttatgggaagacttacaaggtcgttcagtaagaagcatcactgagttcaatgaaagggctcaggtattcgttcggaaggaagaagcccgaaaggaaatgaatttgttgaaaacaagctcgggaagaaaaccaccaatgtctcaacaagtactgtttccaccagaattgatatttcaagggcttaaggttcgaagagaaaggatggtactaaggaaccgttgaaggataaaaagaaacaaaagaagcatgataagtacgtgccagtgtataccatttacactgagcttaatgaaactcgagagagtatttaccttgcacatgagcaaaaggttgccttcggcaagcctgagcccatgaggaatgcgaggagcaaaagagatcctaataggtattgtaaattccataaggatattgggcatatgaccgaagaatgtcgccaattgaaagatgagatagaaagtctcattgctagaggtcattttaaacagtacgtgaaaagacagggccatggatacaaccagcccagtctgcccaataaccca

SEQ ID NO: 338169 - DNA, 644 bp, Cannabis indica
tagtccaaccgggttggggtctaccagttatgtacttttgaaactttgattttgtcgcctaggtcggctagcacttgtaatattttgtaaaatgttttctgggatctcgaaacatgtaacttttgattgtaaagttaagtttattacaagttttattttcaatttgttttcgattaaagtttaaattacccgtgtttatctttctagtaattccgtttaggggattagggtttcttaatcaccttgggtaacgtgcctaattgttagggcttacattgaccaccaggttggccagcttgttgatgctggggctagcctaaactctagtgatcctgatcttgcgacttcaaactcgactccacctagccctaccacacatagacaatatttttcacttattagtatttaacatcatgtttgtatattatagaaaatattttcacgttctgtatggcctgtggcattttacttttagagcattacttattttcatgttctgcatggcctgtggtctttttagaacactacttattttcagcctcagggccttcatgttcgtatatttggcctatataccctctatttttgaacactaatattgtttggccctgttgcttttttatcatggattgtgtgatcgacca

SEQ ID NO: 338170 - DNA, 827 bp, Cannabis indica
tttctttttggttttcccccatttttgaaatttgttcatattcaactattgacgcggtttttcatcaacggatctaagaagatcgtaaaacaagcaagatgaacacaagcaatagtcaatcaaagtaaaccggtttgtaaaaagaaattcaccataaacaaacacaagaatattatagtggttcaccccctttcagcggtaataggctagtccacttggagtgttattgatcttaatgcttgaggtgagttctccaaagttatgttctccaagagttcactcctcaaatgagtttttagaatttgagagagggagctcaagagtatgatctcgtgagtatcaatttcagggtccctttacaagtgatttcacccccccttatatagatattcatctaggatttaaaatcccttaaacataggaatgccctcccgtaactatagttcggttaggttcaaaacaaaaaataataaaataattatttaaaaaataaatatctcttcacttatcactttttgactatattttcggagcagctctaacagcacgcgtccctcgtatttagcggacccggatggtcatgggtacctgaggggagctaattgggtcggttcgtgcccatcaggtccttgagataatttgacagctgaggagccctttacaccttagcacctgacggttgcaccttggcatctgacggattgggagcttagtgcgcccacaatgcccctctttggcctttgagctcctccttggtccatgagctcctctttggcccttgagctcctccttggtccatgagctcctccatggtccatgagctcctc

SEQ ID NO: 338171 - DNA, 1129 bp, Cannabis indica
tagttttgggggttaagtgcaagcaaagtgaaagtattaggagttatgccacaattaaccctaaagaatattaagatttgatctccaagactaatcttcaccactcttcttttctattcccatcaattgaaagaaaactcataaagagaagattagtctgtgaaagaatcaggtattgtttttattttattaattcatagagtaacattgataatttgagatccatatgtatatctaaatttaatttctaacaagatatcagagtctaacttatattgaattattagggttaatcatattagttgtaattattaaattttgtatttaaacacataattttgatttatattgtgtattttttttcattaatcttaattatataattgttgttggtagattatgggatatactcgaattatgttttgattttctcattcattttttctttcggttactaaaaggtatatttgtgcttcgtatgtatgattgaattgttctattgatatctttatagaattttatgttattaataggataaataaacatgtgttttgtaaaagttattaattagatattctgttttgttaaatgacaaaatagacactgcattttctaaaatggtacaaatagaaccctgaattgattttttataaaaataaaatttaattataagtcgatctaaaattattatgataaaactgtttatgttttctgtatctgttcatattaggaattatcttcaagttggttatattaaaaaaaaaaattgtcaaaaattaaggtctgggtcctatttttactattttaaaaaatgcaaggtctattttatcatttaacaaagcacatagtccaatcaataacttttataaaacacagggctaaaatagtatttattatttacccttattaatattgtgtttataatttcaagaccgaaggtacaaattgtttttcatattcaaagcattatatatgtggggaatatgattttgtcctgttatttacttttacggattgtaatccgtgatgtacagcagccgtcagatgagagagttatttgatttgacggctgagattgatctaggggtaattagggttaaaaagtagaaacgtaccctgacactcattt

SEQ ID NO: 338172 - DNA, 621 bp, Cannabis indica
aacttaatcacacatcctggtttgttggatttcctgccataattcctgatcaaatcttggcagatcataatgttgtgccctataaatttgcctttgatgaagcctctttatgaatgagagataatatcaggtaaaactaatttgattctagaactcaaaagcttagttgcaatcttataaatgacattgcaacaagcaataggtctaaaatctttaacagtattaggacatcttaccttggggaccagtgtaatcacagttgagttgatttccttaagaatcatgccattctcaaggaaagaagcgacagcttggaaaaatggtttcccagttatcttggagaaaataactagagtacccaacagggctaggagactttgatcaaggaatgtcaaaaaggactttcttcacttcctctattgtgattttcttcataagcaactctgagtgttcttgagataccataggactccttctcaaaatgcctttgaccattgatttcctattttccattctagttcccaatagacttttgtagtaatctagaaaagcctcctgcaccataatcgggtcattaaccctctctctattttgttgctcaatggagaagatcctattttg

SEQ ID NO: 338173 - DNA, 744 bp, Cannabis indica
tggagttccatatcagtcaaattacaattgcatagcacttcttggaaaccagtgatcaaagaagaaggataaagtctgcccccttttttctcactttggttgcctatgttgttgatatcgcctatgatgcaccatggaagttgagactcaccataaagagaggtgattagttgccaagttttgaaccgcaagctacgatttggttccccatataaaccggtcaaacgccaagtaggaaggtttggagtagagatttcgatgtcgatgtggctgtgcgaaaaacccagcaaccgcacttcatcactgtacttccataaaagtgcaatcccacccttatgaccattagcatcaacactgtaagcaccctcaaagcccaatttaattctcattctttcaatattatcacttttacacaaagtttcacataaaaagataaacttgggtttcttttgaacaacaatgttctcaaggaattgtctggcccgtgggttcccaagcccacgacaattccaactcaagatactcataacaattggtgggcctggataccagaacccaccgaattcaagttttttgaaacaatctcagcctggcccgaagcatcagtaggcccattactcttctctgcagcaaaacgtttcctttttaattctgcttgagtcaattcctcatcagcatgttgactatcataaagcataatccctttatttttggttttagattgagagatatcaggggaagata

SEQ ID NO: 338174 - DNA, 732 bp, Cannabis indica
taaataaatggtaaaattgaaacaagtgggcctaatatatggtcggccacttaagtgaatatttagctattattttatcttttttaatttcatataatttaaaccctaaccctagaaggaatcttataaatagaatatgagaggttcataacctaacaaccattcattagtctactctgtcagaaaattaaaaataaaggctcctccctatttttcaattctttctctcttctctcttcaaattttgaatgccctatagtgatagagtaccttcccactcatacaagtcaatattcaatcatagtgtgaaagattgtgacaaattctaacttttgaaggagatccaagttcagatcttattattactctacgatagaaaggaacaagggttagagatttgaacagaaggaaccataatattctgctgcgaccaatgtaaggttttctagaactttatctgtgtttaattcattgttttaagaaattcatatttatggtgttagattatagaatataatcaaacatacattgtaatatcccagtaagctaatagttaataattagggtttatatttatattatgagttaactaggtaataattgggattatgatcctactaatctaggttaacataaaatttaaatttgatataagtggatacataaatgtaatttttaaattacggagatttatatagcatgtgtgaatgtaatatgaactatatgtggaat

SEQ ID NO: 338175 - DNA, 741 bp, Cannabis indica
atcttgtcgataacctatcgagaatctatcgataaataatcgagaacatacataaccaccaccaccacactagatcggaaaataccataaccaccatataaaaccgactataaattaagaaaaattcatcaaaataaaatatatgtcaacataaataatatataatctctctaaattaaccacaccaaaaaattaaaaataaactttttaacaataccttctcgttgaggcgggatgcggctggggaggcggttgggggtttgcttctcaaacctttacgactatgctaaggacaagtctggccctttgaagccttgggttgagaccgtcaagggaactgtcaagaacggctggggtacggctggggacggctggctggacgcgaggaagaaagaggaggacggctggagagagaaagtttttgagtttatttaggttttcaaaataaataaataataagggtatttttggaaaaatgagaagttaatagattagtattgtacaaattatttaagagggtattttttgaaatagaggtttgtttaatgtacattaaatgaaatttccctttcaaaaaagtcgttagaattagcattgtcgccgaaaaaattaccaagaaactggtttcttcattaatttcttgatgaagaaactagtttcttcatgattttttcggtgattttttctaacaacgacaactactctggtgacttttccggcaccgacaacaaacttcggaaa

SEQ ID NO: 338176 - DNA, 1005 bp, Cannabis indica
gagcaccgtcgaatacactcaaagaattttgatactgctgatggaattttacttatttatgaaaactgtatttttttcgatatggaaaagatgcattcttcccatcagttcaatcacattatatagacgaatggattgaataatcataacgggaagaagaacgtttagtgaatcgtggggtgtagttagttggtttgaatgtgtctcattaactgatacgactaagtaattaaacacttttctcaattaaatgaaaataaaaaataattattttaataaatattttttctgtaaaaataatagagtgtcacaccactccacaccacaccaaccaacccaacccggtccagctcagatcaaacgaacggacggacagacggtgtgcgcgcgtgtgtggtgggtcaagtgtgtgagtcctcacccattcgcacaaaactgggtaccccttggggcccaaacccaaatgctaaagttgcactctatataaaaagggttcatatcccatgtgggactctttaatttccacttcacacacactagaacacatctatattatgttaaaagattcatcaaagttccacaatccccaacttgaattttttaaaaaatatttccatctactagtatcattcaactgtaagattgagcataaacaaaggtatctttggatttgaacgtctgcgtagtatatacaatttagattttactagagtgacccgtagtcttgaactctatctctaacattgtaccacgcaacaaccttttcgagggtgtaatccaaagcccgtgcattaatggccatgcacgtctattctagtatagtgaacgctctagaaattttgcctgaaatttcataggaagtggccccactcccacattcacacaggtgagtctatcaagagtactcccgtaactcggtactccactccacttagagtatagatctcattaagagcttctattaactcagccttaaatcgcttcaggaattcatgcatctctttt

SEQ ID NO: 338177 - DNA, 602 bp, Cannabis indica
cctgtattttctaaaatagtacaaataggaccctaaattgattttttgtcaaaataaaatttaattataatccgatctaaaagtgttatgacaaagctgtttacattttttgtatctattcgtattaagcattgtcttcaagttggttgtattaaaaaaaattgttaaaaattaagcttagggtcctgtttttacaattttagaaaatacagggtccattttatcatttaacaaaatacagggttcaatctgtaactttagcaaaacacagggtccaaaatggaatttacccaaaaaaaattggacccttatttgaaaaaaaatgtagtatgcttcaatattagtaaaaaaaattgtatttttaaaaggaaataaatatttttagttctctgagctaggtggatcttaagtataagcctactcttgatgaacgattcagctggtgaatctcaccaattatgttgttcgtttattgtttccaactagggcattacaaaaataaaattatgtgggcacgacaaatatagtggcccaaaatccattttttcggggaaatttacacccactactgatttttcccattttatttcatttatactgtg

SEQ ID NO: 338178 - DNA, 998 bp, Cannabis indica
cttcttcttcttcacattttgttgtagtgattaaaattattttaaaatttgggggaggaaactgcagtacgttcggagttactgtacttcgttttctggttctccggctccgtctccgacctcggtgtacaagtaagtttctccgaatgtaccaattttattcttcttttgcatgtttgttcgttctttagtttggggatgtgaaaaattgtctaacattgttaaagaaagatttaaacttttgtaaagagaagtgttgttcttcaaccgtgtatgtgcatttaattttgtttttgtgttccatttttggtttattgagtaattttaatcctttgtacatgctttaaatctgcttcgtgaacaaggtttgattctcagattgctgaaaatcgaaggtacatgtgtgtaccctttttgtttgttttttttattgtgaaagtgttttggattaatttataccctgtgtattaggggtctttgttcagagtctgttagagttagttcatcactgtaagtggttgttatttttcagttagtgaagattgcatttaattttttttggttatggtgtgtactcaatatataaagtactcttctattgtactctgaatatatgcaataatactcaatatattcagttattgaagattggatttcattctctgttttcaccattgtcactgccatgattcttgaatcatgaacagaaggattaacaatcctaatacagtgaaacaattttaacaaaagaatgtaatgaaagaaagaaaagcaatgtaaacattggtatgtacagtgttgctgaaaaataattgttttcgaaaatcaattttgtttggtaatttggtaattttattgtgaaagtgttttggattcacgtgtttggtcattttggtgtgtattttttttacccaaatgttttaccgtgggctgccctatattgacccaaaaaaaatttttgaaagtaaggaaaacaatggaatggtgatggctgtcat

SEQ ID NO: 338179 - DNA, 968 bp, Cannabis indica
cagacgcctccacatctgcactgtgcccccagcatctgccactgtgcccccaagctttgatccagccaatgactccgactacctcttgttcgctaagagataggagaaggtagaagcgcaacaacttgcgattctcactgcccagactgagatgaaggctgacttcaagagaagtcgaaaagagatgaaaaatcttatcatggatcaaattgcgaccgtgataagtttgttacagaaggagccttcaaagctgacacaaccatcagggccggcacatcaatcatcgccaacacatccatcagccacggcagagccattacagacggtacatcgatcaccgccgagagatgatgatgatgatgatgtctacccagaagattggcaacctgacgtatgtaaggttccttctactccttcaaacgccattgtgatttccctggatgatacagaatctcaggatgtggaagagttgcagggccaccagctggggtggacttctgcaaggttaggcgaaagcggaagccagttttcttgaacgactacacagcagggaagaagaaacaacgagttgggcccattgaagtagacacagtgaaaccggcagactcccggctgttaaaatttttccagaagtggatcacttacgctagggacaaggaccgtcctagggatgttcacactggcatagccactcgatctgggttcgtgaaattgatggtgctgggagaatggctcgacgatgctgtaagttatttcttaacagaattaatttattgtgtttttaaatgtttgtgcgacttatatgcgatttatatgcgacttttatgcgatgatggtgcgatgtttgtgcgattattcactaatttatgttttacttttgcgacttatgtgcgattaatatgcgatttctgtgcgattgatgaaacaattttggtaatttcttgtgcgatttcctgcgatatttgtgc

SEQ ID NO: 338180 - DNA, 548 bp, Cannabis indica
tggacttaacaaattttgtatatattgaaccatatgaaaaactacatgttaacataaatgatttctaatcttctattgataacaaatcagattagattgaaatgggttttatttagggcataaaatcccaacaaactcccgcttgcactaacatgaaacaagtagtgcatttcaatcaatctattgtcttgatttctagatcaagtgtagtatatttgactaaacccaaattacaggaactgtaagtttgtggtaagaaactgctttctccaccattacttcctttgtgatcataaaacattatgcaacatcatttttactatatgcattactcatctagggatactgaattccttactgcttattaagtgcatctgaataaatagaagacatatctctaattctatccaaaatggaatggagataatacagtgtagaattttcttcagttgaataagttttagtgtttttcgaaataacaaagtcatttatcttcactgatggagcttaaattagcatagatggatttttacatccttctagaataa

SEQ ID NO: 338181 - DNA, 861 bp, Cannabis indica
tattttctttaattttttttaaagaaaatggtgattaatctacttctaattcagctagtgactagctgtcactctaagggcatgccacaaatttaattaatgcaaattcccaaaaagcccttgacttcataactaagcactaataagcctaggggtaaaatggtccaaactataactccgcttaaacccgacattctaaatatttctaatatttgtcccgctaaaaaatagattctaaacttacccttgtaactctaacgaccatccatcacaaattttccgtcgtcgccgagcaaaaatcataaaaattgcataattcatatttaatataataatactcctagagtttaataaaatcttcgaaattaagaaattataactgtaatgcctatttctaaaaataggacccacaataatataaaatcatatacaattataaaatatcaataatttatgataattgcctatactaatccatattctaacatgcggtcattacaactgatgattagctttgctagaacatagaaatagactaagtgatctcaaaatattacttatgcatcttaaagtacatcccttggacgtttttttacttacccagcgtctaggttgacgtcatatgtcaacctgggcgctgggtgatgaactaccttcaataaaacaaccataactcactcaatattgatctaattgatgcgattgaacatgtgtttttaagctaatccaatgctctatcaagtcataaatttgaagcaatcgacctcaaatttcaccccaagtgagttacgaaaataagctccaggttacccacagcgagactcccaaaaaatgactatcaccatcaaaagttaattttca

SEQ ID NO: 338182 - DNA, 590 bp, Cannabis indica
cccaaggattagatccaagtattgattcacttgtgattgatccttgtaaacctttgtgtctttactgttttcttgctgctgcattgttaatagttttgttctctggttttagtttaatgttttgttcattactagcttgtttgatctgtttttggtgttcttgaatggtgattgaatcactacaaatggtatcagagcataggttgcatttaaggattcaagaactgtgaagatcaagcttgaggaataacaatcgcgactgcaagattcgaaattgacaagttcactggtgtgaatgattttggcctatggcgcatcaaaatgaaggcactacttgtgcagcagggcattgtcaatgctatccttgaaactacttccaaagaaggagaagaattaaagaaagtctcccaagaaatcgaaatgaaagcacacagtgcaatcttgctcagtttgggtgatgaagtgcttcgagaagttgcagaagaggtgtctgctcttggtttatggaataaacttgttgcaatttatatgaaaaagtctttggctaacaagctatacttaaagaaaaggctttacaccatgaagatgga

SEQ ID NO: 338183 - DNA, 977 bp, Cannabis indica
caacggaaaatgcgatagatgaccatttgagtcacttgggtaaggctagaacctttttcttagagagataaatatttgagataaatagaaaacctggtttgagcggggttatattttttgaccattttacccctaggcttaaaattcttaatttataagttttaagggtattatggtcatttatacatatgggttaggtggcattcttttgaggtggaagctggccacttagaattaagagttaacttagtttatctaaggaattaatataattatagaaaaaaaaaagaaaataggagaaaactccattgtacttgagatttcttttttctctctctctctctctcatgttgtagcatccaagaaccaagggttctttcttctttaccgtgttgattctagctaaaattcaagggcttagaagaagccttggaggagaaaagctaaggtgaatcctagaactaatcttttttctaaaatttgaaagttatgcttgagttatgatttagctattgttgtgttaggtttttgagtgaaattcgtttcttctagttaggtttgatgttctaagcttgattaaacttttgttgttggctgattgtgattttgagacagcttgagttcttggaacttgttgaacaaggttttcgttaaccaaaaaatgagatcttgatgagagctttggaataattaatgcatgtcacttttgcgtggtttgggcattaatgagtcgtagtccacgagtcttttgtattaatgagggtttttatacaaagaatattcttggtgagtttctctatctcttcttttattttttcgatcgatcccccttcccattttgtttaggggtatttatagagtttggtaaggatagctaaaaagggatcacttgtctttgagtgccagtaatgtatgtgcacaagttcccaagagatacaaaatagggcatacattacctatgccataggtatcatagg

SEQ ID NO: 338184 - DNA, 523 bp, Cannabis indica
aacttctctactccaagtaacttattcaaatttataaataacctcacttaatctactctatgtgaccatgatagtcacacagtataaatttatagttgttttgcgaccatattggtcgcacaatgtaattcattgtcatttatgcgaccatacaaagttattttaataataaattttcttatcaagttattttgctaataaaaaatttcataaaagctatttttacaaaacaatctcttcctatttagcaaggtgctacactttaaactagggattgtttcacaaatacacaaaaaaacttacaaaaatacaattgtacgaaattttaaatatttttacattttttataattttatttgcagaaaatacgattttttaacgtatctttatgttgtacacttattaatttattgttgattttttgttatttgtatgttattttttattgttgttttgatgttacttttatatagtcatcttgttgtttacatattatttttataaaaaactgtaaaaatatata

SEQ ID NO: 338185 - DNA, 760 bp, Cannabis indica
attgtcattggctaaaagcgaagtcaacaacgtacattttgagaagacgatagtacaattgagtgggagcgctaaacatagatatggaatctatagacttctataggtatttagaagtgaaacgatgatttccttcgagcttgactgaatagagataaatgattgagatatcattttagtgattatattatttcactaaaatatcatttataggtggtcaagtgttttaaggataaaatacattgaaagggtgtaacggtaattttatccctatgcaatgtagatcatctatagaggatcattgattatttggattataacaatagattaaattctctatctacttattgtaagctcggttatatagatccatgcatttataggtttgaattggaaaatatggtattattgaaaagaagaataagtggttgaaataaagtggcaaaattataactagagattggccctttgaagtgtacggccaacaagttatttttgcccaatattttattcttttttaatccatataattcaaccctaaccctattgaagatagtataaaaggaaggctatggtctcttcatcaaaactaatgcctccaaaattaaaaaccaagatgatacctcttccttcttctttcttcttcaattcgaaacctatagcctttcttcactaaataattttagccatcggtgattgagtaattgcccacacacatcaagttggtcctcagtcatagtatgtaagactgtgaagaatc

SEQ ID NO: 338186 - DNA, 509 bp, Cannabis indica
aaaaaagataaataaaataataacatgtcctgctccatgaatgaacggtgatgatttttccctgacccaagatcatcaaaagtcttgatttttcccctttggagcagcaggggatgacccaattacagtcccccggaacagaatagtagctgcgggatcatcacttgattttatatactgtttgattttatcaccattaatctgaccaaccatggtcgctggtataagatgagaatcagctatgagctcttcgccactgtcttctgtattagctaacaccaaagcaagaccacatgcgagcttaacagcactacctttttccactcttgcgttaccgccacggtcgcaaacgacaatctttccggcgactttagaggcaatgagagacccagaatagcagtacatattccctgcgtcaccggcgtagatcaacgaaagctttgcatcggcagccaaaggctctcctgcgtacagagacacgccgattaatattctaccgtcacccaaaa

SEQ ID NO: 338187 - DNA, 816 bp, Cannabis indica
aaaaaattcaagctctcctgagcaggccttccccaaagaaacacaaagaagatgctagagcctaaccgtaaaggttgctgccctgagccgttttatctcccgtccacatacaaatgcattcccttcttcaacatcctaaagaagtgtcagaaatttgaatggttcgaagagtgcgaggaggcatgcaaaaaactaaaagagaacatggccaagccaccaatcctatcgaagcccgttctcggagaagacttgttcctatacttggccgtctccgagaatgcgatcagcgcagccttagttcgggaagagaagaaaacccaccatcccgtatactatgtcagcaagcgcatgataggagcagagacgcgatacccattaattgaaaaactagttttttgcctcttgatggcctcaacaaagttgagacccttcttccaagctcacccaattaaagtactaaccaaccatccgctacgacaagtcctacaaaagccagaagcatccggaaggctactcaaatgggcaatagagttaagccagtttgacctgcactacattccacgcatttccataaaggggcaggcgctagcagacttcatcacggagtgcaatgaagctgaagctaccgcaaacgtacccacaccatcaatcccagcgtggaaagtatttgtagacggagtctccaacgacaatggatctagagcgggggtcgcaatgatatccccaaacaaactttgactccaagcagccctacggtttgactctcatctctacaatgagccgaatcgaagccctgatagcagggctgagattagc

SEQ ID NO: 338188 - DNA, 1808 bp, Cannabis indica
tactatgtgccccaaaaaagagacacgagataaccagaattcacactttttgaatttagcatacagcttgtggtcccgtaaccattataaaaccgacctaagatgcaactcatgctcttcttctgattcagaatacaccaggatatcattgataaacacgatcacacatctatctaggtaatccttgaacacccgattcataagatccatgaatgctgtcggggcattggtgagtcccaaagacatcacaaggaattcataatgtccataccgagtacggaatgcaattttcaggatatcttcctctcgaattctcagctgatgatagcctgagcgaagatcaatcttggagaagaccgtcttccccttcagttgatcaaatagaacatcaattcgaggtaaaggatacttgttcttgatggtaagcttgttcaactcccggtagtcgatacacattcgcagggatccatctttcttcacaaataatactggagccattcgatacggtgtttttgaactggatccgctcccataaccaactcaataacaaatttaatttcctgggtaggtggcaatcccagtaaatcttctggaatgacgtcaagaaactcgcacaccaatcttgtaatctcaggtccagatgtcacaggttgactggtatccactgcagtgactatgaatcccagacaacctctgcttatcaggtccttagctttcaaaagttttattcttggtatgcgtgccccctgaactttacacacgaacactaatgggttagcactatcgtgctcaaacaccaccatctttcgcttgcagtcaatcgttgccccatacttagacagaaaaatccattcccaggattatgtcaaaatcagacagttacgattctattagattggcggttaattcgcaattgtcaatctagaaggacaaagaccgaatctacctagtggatactataaggtctcttgagggtaacagggtaccaaaccctgaagcataaatatcacacggcttatggaaactttcaataactctactcgacacataagagtgagtagctccctaatcaaacaacacagtataagaacagccattaatagacaactgacttgtcaccactgacggactagcatcagcgtcagcctgagtcataataaaaagttacctcaggttttgtgtagtattcttcttaggttcctctttcttggcctgaggacaatcttcgataaagtggcccaccatgccacactggaagcatatcttggcccaacattcaccctgatggtgcttcttgcatttaggacacccgggataagacctgaatgaggacccgcagccctgacggccatctctatttccccagaactttctattaccccctgatgctccgaaagcctcaaccttccgtttgtgatcagggttgccactgtcggtcccctcatgacattaccactagtaggagggtttgattctgtgacgacatccttcgcagtctactcttttcctacatgttgctcagcctcctcagcaattaaggctagctctaccaatttcttgtacaaagtgtcatgtgaagtgataattttcaagtcccgatagattgtggcatttagtcctcgaacatatttctgtttcctggtgaaatctgtgggcaccagatcaccaacaaacttggacagccgatcaaactccagagtgtattaggccacagacatcttcccctgagtaagtttcacaaagtcttccatgtgggaagtcctcacagcgatgttataaaaattctcttcaaatagattcttaaattc

SEQ ID NO: 338189 - DNA, 762 bp, Cannabis indica
ggacattgttggaactgatgtgtgtaaggcttgcttgggtttattgatgggtcggcttctgcttcttctatcaatgaaaccattattaatttgattccaaaggttaaatcccctaccctcactggtgaatttcggccaatcagcctctgtaatgtgttgtataattgattgcgggaggttctgggggatgttatttcgaaggagaaaactgcgtttatcccggggcgcttgataactgataacgcaatgattggttttgattgtctcaacgctattaaaaggcacaagaaaggaaggaaatggtttctggcttagaaggctgatatggccaaggcttatgatagagtcgactggtcttttctgcatggtatgttgattaaactcgggtttcatcctggttgggttgggttacccatgcgctgcattacttcggtgtcttatgctattaacattaacggagaaattattggccttatctcgccatctcagggcttgcggcaaggggacccactctcccctcttttatttttggtgtgtgcagagggtttgacttcccttattaagcgtgatattggacgagggacaatctcagatcttcaatgtggcagaaggggtcctgtgatttcacatcttttctttgcggatgacagtttcttctttttggaagcatcggtggctagttgtgttcgatttagagaaactttacatcagtacgagaatgcttcgggacaacttgtgcaaatcagcggtatgcttctcttc

SEQ ID NO: 338190 - DNA, 1674 bp, Cannabis indica
gtaatatcatcgagttgacctccgaggacaactttgtgaagtacaggctttatctgaatgacagggagtagcaagggccaagcaatatgctcaggagcccttgaatcctgaagatgaggctgaggaagagcaggtgactccgcttaaaaggaggaagaaacttccggcccagcccaggcctattgaacatgcaattctcattagggagcctagttcgcctgctcgaccgccttttcccgtgcttggaaaaggggaagcttttatgtctaagataataggcttgtcaggtgatgatggactttcgagtcttgctcgggcaatcgttttgcagactactctatcttgtttttaagcttcttgactattatgctttatgcttctgatgtctgttttctctaaccatgttgtttttgttccatgcagacatgtctcagaagatgcttgatgctctaaagaaaagagttggaggaagctcaagcacatctcctccggtcaagaaatccaggggcggtgaggggaccccttccaaggaaaaggcatctaccgagaaggttatcgacctttttgtggaactaactgttgcggacctccccactccaaaagtcgctaagtccacaaattctcgaggaggaagttcgaacacgcctgagcaaccgaaaggtggatccgagctgatgcgggctcctactcctcttttgccagtgcttccagaggccaagaaaggcaaggagatgctcgcccactacatgaaccggttggttcctaaggttagtgagaaactggccgctgctgacaacgactcttctttggagctgctgatgggaggagtcttgaaggaattcacaagggtaagtctttcttgacagtttcctttaatattctttatttggttcggattctaaagttttttctctacacaggctggtctgaagttggcttacacatactcccgagctaagtctgctgcttcaaagaacgcagctctgtccaacaccatgagggcgaaggtggacttggccaggacggacgctgatgatgccagggtggaacttggacctgttcggatggagctgggtgaagtcaacaagaagctttttactgctcagaagaaaataactaagttgattaaggatctcgaggcttcagaccgacttgaagagaccatcgatttcttatctgcagaagtgaatagccttcaagatgaaaggacgtctcttcgagctgtccttcgttgggtggaagaggataagaggtctaaggaggaggagcttacagctgaggtggcgaggctgggagaaaaggtccatgctttagagacagccgacctcaagctcttttatgacttctcgaaggctaaccctcaggcaaactttgattacttgggtgaagccaaaggcatgtatcttgagttccgcacttcccaagtggcttatggtgagcccaatgcgactacttcttcctctggccaaaatgctaatgtacctcccgttccaacaatagatcgtccagctgctaccgacccagaagatccaaaccgagagcctgggactccagctatttaaataattcttcttttatccttcttttttatatatatatatcttattcggccataaggccttttttaaggcatcatgactggccaagcggtctttaaacttggaattatttttc

SEQ ID NO: 338191 - DNA, 685 bp, Cannabis indica
ttttattttattttatttcgttgaatatttgtttaactgaaaaataacaaagttaatactcattttttttaataattaatactaaatatcttattttaacgcttgaagaaaaatcatattttaactacttctgttcttatttttcttacactggttatgaaagaaaacaatattctcatacaagaaaatagttataaaaaataaaagagaagatctatttacaccctacaaaataacaagggaaaaaaacatgaaaattccgaaaagggtaaaatattacaatattactatgggccgaaccaatcaacatttatacaacccacattgaaaatattacaaaaataccacctggcttataccttcagtcccacgtcacgaacggagacgatgaagaaacctccatcgatccaatctgctacgcaaccagaatgaaaccagatcgagcgtataacaaccataaattccggcgaaatttgattggaaaagaagaattccaatgatctaaacagaaaattacaaaaaaaccagaaaaaccgtgaagaaactgaaattaaacatttgatttcggtttttatcgttcaaaatcactcaatccagcctcgaaaatccagattgaagcaatgtaaatctgtattaaacagatctggagtccccctcgaatccaaaaaaaaggtatgatatgaaa

SEQ ID NO: 338192 - DNA, 1180 bp, Cannabis indica
gggcatacgacagaagaatgttgtcaattgaaagacgagatagatatccttatctcgcgtggttactttcaacaatatgtgaagcgacaaggcaatggacaaaaccagccaaatccgcccaataacccaggaaaccatagattacaacctcctcctcttgaaagagaagacattctcgttatctcgggagggccacatctcactggagaaagtaacaatgcccaaaagagatatgtcaaggaagttaagaatgaacagtcagcctttgctccagaatcatctaagaaagctaagactgaggaacctccaattatgttctcggaggaaggcgcaaagcatgtgagatatcctcatgtcgacccactagtgattacaatccagcttcccaataaaagaataaagagggtgttggtggataacgaaagttcagtgaatatcctttataaggatacattgaagaaaatgggactggaaagagcaaagtgaaaaccttacatggtaaatctgtgtggatttataggcgatagtgttgccagtcaaggaataattgaactcccattaacagtgggcgagacgcctttatccactaccataatgcaagattttttaattgttgacctgccatcagcctacaacatactgttgggtcgaccaacgttaattggactagggacagttagttcaattaaacacctatccctgaagtttcagacatcaataggtgtaggggtggcgcgaggtgaccaacttctggctcgtgaatgctaccgcatagagctacagaatagaaaagctggtcatcaactaatggcagtcacaactgaggaatacgagaagcaggatgaggatcttcatcctcggattcaagatgaacagaaccaattgaggaattggaagaaattatttaagatccaaaaaatcccacaaattgtgtattcattgggaaaaacctggataacaaactaaaatagcaactaataagttttttaagggcaaaccaggatcagttcgcctggagccgctcagatatgatagcgattgaccctaaaattatttatcaccacttgaatatcgacccaaatttcccagccaagagacaaaagagacgacccttggattttgagagataaggggcactcaagcaggaagtggataagttgttgagtaatgactttatacg

SEQ ID NO: 338193 - DNA, 613 bp, Cannabis indica
gtaaaataattccaacacatatgtgtttacatgcttagcgtgcttatttatggagcctgttagattgtatcagtatacgtagagttatactggataccgatagatgtatgtttggctcaagtacgagatcgatgctattacatcggtacaactagagtatgactagagtaccgactataagctgatattatggtcgatagtactgtcgtatgaatgttctagactcggtaccgtgttggacacggggatagggttatggttgggtgtatggccgcctaattataatctgggttatagttatgttattaattatgcttttcttactgagtctgtcgactcattgtttgcatttgtaggtaaggccaaggcaaaggttgagcagtagtgagagcgagcggatgaagattgtacatgttggggcggttaagcctaggagcatacggtctttgggacagatggacatattttgtatagtcgctaggcgacaacttttgtattacatactttagtaacaattgtaaatactttgtacacgggatccaagttatatatatatatatatgttattttggtatttataagtatttctaacaaagtttaattaatcacgatt

SEQ ID NO: 338194 - DNA, 459 bp, Cannabis indica
aacggaaggagtcatattattcagctgcacccactgtaaggttttctaactttatatgtgtttattttcattgttttagaattcatattaggttgttaatccaacatacttgttagtaaatctagattctggtaaaataatttccaacacaaactccctactacacttgcataagggatgttcttcattgctcctctttccaagtcgttcttaggacattgctgcttagtgaacttgtcccctttcagaataggaacagaaccagctttacacaaatccatgttgaaccttttgagcacacgattaatgtaagcttcttgagataagccaagaacttttcgattcctgtcacgatggatctcaatccccaaaacataggatgcctctccaagatctttcatatcaaaattggaagacagaaaatttttggtctcatttagtagtgacaaatcactgctg

SEQ ID NO: 338195 - DNA, 501 bp, Cannabis indica
gcttctacccacgtcaacgttaatcgccttgaagataggagtgataagagttatgcggttttctagtattgtctacacgtatttaaatgggacgtgatcaaagcccacgtttcgtgaaaacagttatgtaattcaaatttaaatgtaaataactgccaacctatattcctataaataggggcagattctatggaaaaaggatggaaaatctttgagagaaagagatcaaaaactgtaactctatatcgagaaatatcttgaataagatagactcgtagactattcagatttaactacaaaaccacgtaaaatacttggtgtcattcatattattctacttttaaatttcttatatctgtgtttaaatacaaaataggctcattaatcgttaacgaaaatctacgttaatagtttggtgctttcattgaaagcctacgttatgaaaactcagaaaaatccctcctaaccaaaaagaaattttcatggctaatgataatcaaa

SEQ ID NO: 338196 - DNA, 623 bp, Cannabis indica
tcttttgatgcttttccaagtctcttttgtctattgaacaacacttgagcttgaaaactctgctctatgtctttcagttacttgtccgtcttggccataaaactcgacgtagagatggcttagggcatttgcgatagatgggagttgcaagaaagtcatctgtctttattcacctaagcttgtccactaatcttgcaaagtttcagtgactcttgaaacaaaattcaagaggattgtccctgtctgtgcctgcagttttggaatctttctcgccatttagatggggaatgtcatcaagattaaaattttgaaaattagaatatttactcttatgatgatgattggattttgataataggctcaatttgagagtatgcttcttctacatattgagccataaaatgtgggggtacgtcatcttcaatagtatctaaatcttgagactcgtcactagtatctaaatcttgagactcgttactagtatctgaatcttgggaccaagtttcagaagtctcttcttggtcagaggaagaagactgactgtcaaattcttcatctgtttgatggatcatggcagaaataggaatattcacagttggatgggccatgaattgctttggctc

SEQ ID NO: 338197 - DNA, 751 bp, Cannabis indica
tttcatggctaatgataatcaaaacgattatagtcgtcctgaagagactaatcgtcgtcttgggaaagaaccaatgggttcatagaggccacccacttaagcaacaacacgttcaacacgttcaggaagaagccaatgtggtcatgatcaagacccaaaaaccgagaatgaagaaaccaatactgatactggttatgtacgtaggagtgaggatgcctatgatcccactaggtatgtagtatgtaccgttagttgaattggaaaattgacaactctagcaacgtctggccgagtctaaccaacaaaatgctgagttggaaagagagacagctgcagccaaggcgactgaaggaaacaatgcacaaaaccaacctgatcctagagtgagaaggccacgaggtagacctcgaggttcgagtaccaggaggcaggagacaaatcaagaaaatccccagaacgcgcaggaggagcaacttggggaaactagggatgttcaagaaggaaaacaacagaataatcaagcaccttgtagggaagtacctcgaagaccctaggaatttacgaatcaggggattgaaaaacaacaacgtgccagaatcttctcgtagaaacgagaacataaggcaacccagaactagggaacagaagatccctcgtaataacgagagaaatcctgagactcaaccgaggactagtaggttaccaccgagacacccccagcgtccttctcgaactgatagggaggaggcat

SEQ ID NO: 338198 - DNA, 915 bp, Cannabis indica
aaaacttctgacctctgtagctgacttcggtactggccaatcccgaacagcttcaattttggccggatccaccatgatcccatctttatccactatgtgccccaaaaatgagacacgagataaccagaattcacactttttgaacttagcataaagcttgtgatcccgtaatctttgcaaaaccgctctgagatgcaactcatgctcttcttctgtctcagagtacaccaaaatgtcatcaataaacacaatcacgaacctatccagataatccttaaacacccgttcatcaaatccatgaatgccgccggggcattagtgagtccaaaagacatcacaagaaattcatagtgtccataccgagtacggaacgcagttttcgggatatcttcctctcgaattctcagctgatgatagcctgagcgaagatcgatcttggaaaagaccgtcttccccttcagttgatcaaacagatcatcaattcgaggtaaaggatacttgttcttaatggtaagcttgttcaactcccggtagtcaatacacattcgcagggttccgtctttcttcttcacaaacaaaaccggagcaccccaaggtgagtagctcggtctgatgaatcccagattcagtaactcttgcaattgtatcttcaattccttcaactcagctggagccattcggtacggtgccttagacactggatccactcccggagccagttcaataacaaattcaatttcccgaacaggtggcaatcccggcaaatcttctggaaagacatcaaggaactcacataccaatctcgtattctcaggccctgatgtcacaggttggctagtgtccactgtagtaactatgaaccctagacaacctctacccatcaggtctttagctttcaacagtgatattctcggt

SEQ ID NO: 338199 - DNA, 1273 bp, Cannabis indica
gtgtgaagaggcctttcaaaacataaaaaggtatctagcaacgcctctagttctggtgaaaccaataactggagagacgttttttctctatttggacatctcagaagatgcgatcagtgcatctacagtgcaagaagagggcaagcaccagcaacctctttactttgtaagtaaaaggttactaggggcagaatccaaatatccccctctagaaaaactcgcgttgtgcctagtccatgcgtttcacaagctacaaccatacttccaggtgcaccccataaaagtgttaatcaatcagcccttgagacaagttttatcgaaaccagatgcttctagaagattgataaaaatgctcaattgaactggggcagtttgacataacataccatcctcgaacttccctcaatggccaagctttggttgaattcttgatagaaggtttaactctagaggaaatttcaccagttcaccgagatgcagaaacctggatgttatacgtggatggtgcatcaaacgaaaagggttcgggtgcaggggtaatattaatatcaccagaggtttagtattaagccttaatcactggcttaaagatagcagaggcattgaaagtcaaaaatctcacttgtcatagtgattcgcaactgattgtgaactaggtcctcagggaataccaggccaaaggcttaaaaatggcaaagtatttagagaaagttcgaaagaacttgaaaagatactattactttcaaatcgaacaaattctgagagaacaaaactccaacaccgacaccttagcacaactggcctcgcaaaatgacttggatgaattgaacttagttccgctagagatgctgagcgagccaagtatatctgaaactgaagacgtcgagatgatagatagctctcctacatggatgactcctattatcaattatttactcgacggataacttccaaatgacaaaaatgaggcacgaaaactattgtatttagtgcctcgctacacaatgatcgaaggaaaactatatagaagagggtattcaatgcccctacttcggtgtgttctcccatcagaagcaaatgaaatcatcagagaaattcatgaaggcttttgtggggatcatgcaggctgccaaagtctgtctataaagatcattagacaacgatattactggccaacaatcaataaggacacaaacaagtttgtcaagaaatgtgataagtgtcagaggttttcacatatacctcgcgtaccaccaacagaacttagaatgat

SEQ ID NO: 338200 - DNA, 657 bp, Cannabis indica
attgacttattttctgaagtctaggaaataaaaaaaaaaagtaataaaaatctatgagaaatttggcagcataacaattttttttgttaagatttctaccttcctctttgattatgcactcccatattgacttattttctgaagtatagggaatcaaagagaaacataaaaatctataaaaaattaggtagcataacaacatgaagacaataaattttcttattttctctttgactatatctcacttttgaaatcttttatggcatataaagcctagatcaaagtggaccaaagaaaaaataaaaaaaaattattagagaaaaagagatgtttagattgatgaaaagaaaataaagataaccctaatacttacccgtagaaatttctctcgttgaagatgagggtacgtaatagtatttctttgtaaattttggcagagttttcttttctttcttttttcctctcctccctttgtctgttttttttttctttttctttatagactcttttgtgcgatatattgatcagagaatggataagtgagtggttggcagtcaaaagttagtggagagaaaagtggggaaattttattaattaataatttttttcctttttttatattgctgaacgagttattctctttattatcattattat

SEQ ID NO: 338201 - DNA, 774 bp, Cannabis indica
tggttgggcgtctctgcatctcgttcggccgtgatacgtcccggatgtcgagggcttaattccagccacctccacgatgttctccagctggtgagggcaagttagagtggagtgaagctcggccgcctcccatcccgtagcccgaggtttgtacccctcctgggcaacgggacccatcatgacgtcctctagggtagctagacgcttacaccccttcttggaagattttgagccagatgcagacatttttgattctgaaaaaagagttaaaattccagcaattaggcctcataccaaaccctaaatcaaaaaagggaatgggggtcccctaaccgctggaaagaggccccctccggacatctgtcaacaagaaagccttagaaggatttcctggacaaaagtcaggtgcaaagatctcacagatggtgacatcgcgcatgaaagaaaaagaaagaaggacagaaaatcgagaaaaacaaagtcttctctgtgcccttgaaggccatcacacgaagagtgtatggtcctttacaaaatgtaacaacagtgcgtgacaagagtaaccctaacccagagaaggtaaatctagacctattacgtaaaaaactcaaaagaatacattccagaaactccaaataccaaacccagaaaaacaaacagatagtaaagcatgccataaacacaaacaataaagtgagggatgcgagatacttacaatgaagtgttagaactgggggtttgatgttgatcgaacaaagaaataaaaactgacag

SEQ ID NO: 338202 - DNA, 510 bp, Cannabis indica
ttttttattacttattaatagatttagtttgaaaatatagcatgtatacttgttggaggacaagcttattgaactttaattgattttttttttttttactttttatttttattgtaaacataatttgaataattttgctccatgaccatgaatgtcatcttcttattacaataaataatatctaatttacctatccatattaacaaataaatatttttaagtccgtactgtgacctcacttacatgattagtgtcatgactcaaattaatttatgatgatgctatttgattacaccgagaaaatgatgattaattgataacacaagatataataaaagttgttcatgtctattcttattctcaacttcttcaaaaatttaacttgagtcagtcggctggcgagaattgatagagtaataactatgttctataaactcattttttttagttaaaataaggattgaattttaaaaaaaagaactctaactataaaaaataaaataaaaaaat

SEQ ID NO: 338203 - DNA, 552 bp, Cannabis indica
aaaatactaggatgtgattctaatagccaaacaccgcgtccaatgttgccgggcacaaaacatgcaaaattatgaaatttctatacatgacataaaaatgcattctaaattcaaataaaatatcataaataaataattcaatgctaataaataattttcaaaattaagccctaattatctgctaatttccaaattaaagctaagcggtcctttcatgtatatgccaccaaggctgtcaagagacctagccaaagtcaatacagggaaacaaaatggttgccctcttggagccttggccttggccggccagggttccaggccttagtggccggccagaccccatgacccagcctagtggccgaccaaaaaccctagttctaggcataggttggccagcctatggggtagaccccctttgccaaccacaccctctgatagccctccttggatggccagatcttgcccaagacctccttggctgggcaggacctacatggatctaaacttgtctttttttaagagctcaaacatgttcttcgtgttcttcatgac

SEQ ID NO: 338204 - DNA, 1209 bp, Cannabis indica
atactatgttttagtcacaagtaactttttgttttgactaaatgtcacaaaaaatttatgttgtgactaaaaagttgtcactagaagtgcagtggtttgtagtttcaatagaaacttttaatgtaaaaatatatattaaaaataaatttaataacaaattttaaagaaattaaattatccttaaaaatttcaaaaaaatagtgtaaattcgtttatcattttattaaatatatatctttctatcaactttgcaattttttttttttttattattattgtcatttttgcttagaatcatataacaagaagttggaactagtaacttcgaaaatttaaatggagttgaattaagtatattaattatagtttgattctctaagctttggctcagtcaaacacagattatacacaactgacatgtcttaaagtttaagcacgtgataaagtggacgtgaggtagcactaattaagaccatgcttcttctttatatataaaccacaacatagaaaacattaaactttacaaaagtttacccaaagtatctttattttttacccaaaaaaaaaaaaacattagtttttgtttatcatgggaggacacaaaaaatatatcttttcttcttttttttatatatcttttcttctttttttttttaattttatttttcatatattttaaattgaaaaatgttgagagataataataataaaaaaaagtatacatgttcaacaatatttggttggagttagttattcttagttatgttagagggattggagaagagtaggatggataaaaggtttaggaatgatgtgaaatatgatatgaaagtagaagtagattttatttgtaatgggagtaggaggatggagaaaatcattattttctttaatttgtattatttggtattaattattaggtttaaagttaaaagggtagaaagaaaattgtttaataaaattataatattactttttgatatgaatatttatcacttttggcggggcgtactaaattaacccactacgtaccacaccactgggtggctcacctaaatgctgggtctttctccgccgacaactcaacgtcgactcacctgcaaaataaggccaaaaattggactttactaaacaagcgagaaaagccattattcatatgtcaagggctggtaaggttttgcgcgttgtatcgaattaaaccacatgctc

SEQ ID NO: 338205 - DNA, 1164 bp, Cannabis indica
tggtggtacttaaataccttttgatgaacttattaaagggagtgatgttttcctttacgtaccacaaccactccatttatttaatcctatatcaatacatttactaagacccaatatataccaacatatggaattcgtctaatattgtttttgagtcgacctttgtttatttttcttgttttgtgttttgactatcacgtatattagtggtgtttaattttttttttacgtgtcaacattgctattgatacaattaagtatcaggtcttatatattaatataataactttcagagaatatctatctatacatttatataattctgttgttagagttagtgacacgacgctctaactttttaagaaactatcgatatatttatataattttattgttagaattggtgacatgatgtgtaacttttcaaaaaatcaattttctaatttttttattgttcaattttttatttattttttctaattgtttttctctattaattcatattcacattaactcatatatagtgccttttaattgacatatatattataaagaaaaataaatctatcacaatatataaatttttgaatcgatgtatattatggttggtatgatttgtatatgttgcatgttgtatgttgtatgctaacatctcaagtataaatgaggggccatagtgggatatgatacggggtaaggttgttgaatgtagagatactctaccttgaatttgtttgattcgtgtatgacattattatgataaagtatgatacaatgacgttgttgttgaatgtagagataccttattctataccaatggtagggctaaatgtgtccaaattattatagagccagtataggtcgggattatgtatgtaatggccatgatatgataaatagcatgatatggttgtgatatgtttatttcatagtattatggttattctatgagtatgatataaaagttatgatttctacatatgatgttatggttttggattatcatgaatgtatataatataattatttatgtatagaattatttacatattgttatcatttaaagtatgatattgaaatacttaatacattaagaatattaccgaccgccatgtcaaaaaaatcgaaaccgaaaccgaccaccaaattcggtgatgacgtgga

SEQ ID NO: 338206 - DNA, 562 bp, Cannabis indica
attttttattattttattttttaatataaccaactttaagacaattactaatacgaacagacacaaactgtaatcagttttataataaaatctctagatctgattattattattaagttttattttgacaaaaaattagctcagggtcctatttgtataattttagaaaatacaggatctattttatcatttaacaaaacagggaatctaatttataacttttgcaaaacacatggtctaaaatggtatttaccatttaaaagtgctagtaatttacaatatcaaacataaaatttacatatttggttgtacgtgacactattttttcatatacgcatagtaaataactgtttaaactttatttttaatatcgtaacaatttataattttctaaaaatttacaaagtggttttaaataattacagcgtaagcaatcataaaaaaaaattagattaatttttttttgttaaatgtggaaacagacataaaatctacccaaacaaccttttttttagccaaaaaattaaattttattaaatcaaatcagctaccaagatagctt

SEQ ID NO: 338207 - DNA, 528 bp, Cannabis indica
ttagttatttctaactaattttatctatcaacttaaatttgaatatcttttgaatttcaaaattaagtcgaggaattctaggaattggttattgaagattcttaagatattttttaagttgatatttttttttaaatcaacttaaaatggaatatttttcaaattaggtggttacaacttaattttgatatttaattaaattttatttgaaaaatatttaagttggatattctagattttttctataacaacttaaattagatattttttcaaattttagaaaaacacttacttattgaaatatattttaaatagttatttctagaactagttattttttctacaatttaattaggaaaatatttacgattgtaaaattaattgtttaataattaattttggtacaatctaagtttagaatattttcctagtattaaactagaattaataattaagtttcctctatacttaattatttatttcttgaatttaatacatttaattaaattgaaaatttcaatatctaag

SEQ ID NO: 338208 - DNA, 795 bp, Cannabis indica
ttaaattaattttatgtgtacaattaaaggcttaaaatgtacaaacttgagctttaatcagtaagctttctagtttttgctatttcacttgatttagttatttttccatgaatgcatgaacattgttcttcactttgagtgtcttttgattcccatgttagattgttgtcctttcggtatattgatccgcatgatagccttaggatacgtaatttgtgattcctagacaaaaagatctaaatctaacctttgttgtgattcttggctctttaagttacaaagaacacgaagaacgtgcttgagttcttgaaaaaaacacatattcgaatacgtacagatcctggccagccaaggagattttgtttaagacctggccagccaaggatggccaccatggggtttggccagccaagggggtataccccataggatggccaatgttgagaacttcgcgaagagattttatgcaagagtgcacttggtgctgcattgggtgcagttggcttgcgagcctcgtccaggtgggacgcaccaaattttatcctgcgatcagagtgtcttgctcaattgccatcaggaggatggtgcgccatggagttagcgtgtgaagtttccggagggacttggctttagtggaagtgtagtctattggtgccgttgggtacagttggtttgcgaatctcaccctgaggggtgcaccatacttagtccttgtcaaaaggagtatgcattggacaattggcggttgagctactatcaaaagatttgttagcttcagggtcagtgttgcaaggg

SEQ ID NO: 338209 - DNA, 508 bp, Cannabis indica
atctctggccaacaagtcaatttccagaaatcctcactgtttttctccccaaatacaagcctcacataccaaacccttatccaagactatctgcaaatccccatgacaaaccaccttgacaaataccttggattgccccagtgttttgccgatccaaaagctcttccttcaactcccttaaggatcgcatctggtcttatctgtctaaatggcatggaaaatttttatctaagggagggaaggaaattctcctaaaggcgatgattcaagctattcccagctatgctatgtctgtatttaaactgcctgattctttctgcaactttgttgagaaagaaatggcaaacttctggtggggaatagttgatggtaaacacaaacttcactggaagaattggaagttgttgtgtaactctaaaagtatagggggcttaggctttcgatctctcaagccttttaatcaagcgatgcttgccaagcatgcttggagaattcacaccaatcagtc

SEQ ID NO: 338210 - DNA, 512 bp, Cannabis indica
atactactctcccgcgcaaaacaatatgttttcttttagaaaatcattccaaatttatttatttatttttattttcaaggggaaaatagtacatatgtaaaaaaaacatatatatgtggcattttatataaattttattttatttttactcatttataagatttctcattttggaagaaagatttgataatacacttttgttttaaaaatagtctcacattgttcaagaatgtatgttacactagagagtaatttgcggcataacctgcttaagtggtcaggtgtttacgactaaccctcaattctaaagttttagtggtaaaactcctaaactcaagttctggtgacaggttggaatgtctacgtgtacacaatgtacatgtggcacagtttaattagtccacgtaataaatatttaaaattaagataaaaataaaaaatatttctttaaaattaaaaaaaaattatattttttttttcttttctttctcttttctttctcttttctttct

SEQ ID NO: 338211 - DNA, 463 bp, Cannabis indica
agagaagggaaatctagacgtattacgtaaaaactcagggtgaaacattcccagaaacttcaaacactaaacccagaaaaacaaataaacagcaaagcatgccatgaacaccaaacagtaaagtgagggatgcgagaaacttacatgaagtgttggaactgggggttgctgttgatcaacaaagaaatgtggactaacagtaataaacaaaggttaccaaagaaatatgtaaagtgtttaaaggttttctagtatgaggatttctctctctctggaaaactcgaagaaagttggcgaaagaagaaaagtaaccaaatgaaggaaaggtggtggcttttataggccaaagtgcatgtggaacagacacaatcacctaccaatcgaacggctggggaggcgcacgattcgaattcccaagaatcaacggtgagattgattcgtaattgaggcggtggaaacgttt

SEQ ID NO: 338212 - DNA, 579 bp, Cannabis indica
ttgtgagtaaatctaagatcctggtaaaataatttccaacaaccttatagtatccattaggtggattcggtccttgctttttggattgacggttgtgagttgaccgccaatctaattgagttacaattgtctaactttgatataatcctgggaatggatttcctgtctaaatatggagcgactattgactgtaagcggaagatggtggtgtttgagcccgatagtgccaacccagcggtgttcatgggtaaaattcaagggacacgcataccaagaataaggacctgatgggctgctggaaaataattgagtttgatggatttcttagctcaagttcttgagcttgagtattgctagtttgaagcatgaattatatgttttatgcaatctacaattgtgaattttatgcatgaagtatgtgttttaaactccctgtatgatgattaaaaatatattttatggtttgggggctttggttgtgaattggggtgatttgattgtgttttggaggtgaatttcgtgttcttgctactgtttttctgggttttgaacccagatgccgcggcatggtatttagca

SEQ ID NO: 338213 - DNA, 729 bp, Cannabis indica
ttagtttaatttgaaattagcagttaattatgtttaataacggaaaattatttatagctatttaaataattatttatgatgttattattaaattcttaaatgcattttatgtcatatagtgaatttcataagtttgcatttccggtgcctagtaacatggaactcggtgtttggctcagtaaaatcacaacttagtatgttagtatattgggacggtttattagacgttgggaatgtcgggattggtcgggaatttagaatttcccaaaataccccctttagtgctctttacgttattttggtgtgaaggggcaaaatggtcattttgtcccactgatattttgtcctttagtggactttatgtggtgaaattatatggttttatttgataattgctagctgaatataaggctgagtttgcatgtttcctttattttcaaaaattagaaagttaaaagaaaaaccaaaattttctcaaagctctctctttctctcttgttcgggcctccttgagcagcaaggaagtggaattttcttggtgattcaagctctttttagcaagattttgcaatctctaattgttggtaaagtttcttcatcttgctcttttagtttcttgaatatttgatgaaatagatgagtgttgcttgctagttttgagtggtttgttactgatgtgtttttatgttgtattcagaggtttaatcatgttggattgagtggattgaa

SEQ ID NO: 338214 - DNA, 809 bp, Cannabis indica
tctacatctatttttggtgactgtgatgcaaaacaacttgaagtgctgagcaagtagtgttgcaactggtttgcacttgaccatgcctaatctatttaatattttttgtaggtaggcagcttgagaaagtactatcatgccaggcttaggtctctttatgtctatcccaagaattctctttgctttgcccagatatttcatctcaaactcatcactaagtttccttttcagcttctcaatctctgattttgctttgctaaagatcaatatatcatcaacatagagtagcaaataggtttgattattaaaatacacacatgagtcatacttgcttgtagtgtatccaatattctgcatataggtgtcaaacctcaagtttcattgcctaggtgcttgcttgaggccataaagagacttcttgagtagacatacctcatctggattcccattgtcaaagccttcaagttgttgtatatagatttccttttctaattccccatgtaagaaagctatttttacatccatctgtccaatctctaggtccatgcttgttgtctttgctatcatggctctgattgaagattgcttgaccactggagaaaaaatctcatagtaatcgatgccttatttttgagtgaaccccttggcaactaaccttgccttgaatgtggtaggctcattccctaaaccttctttatgcttgaaaagccatttacatcctaccaacttgtagaactctggattcttcacaacaatccaggttctattcttcctataagagactgtatctcttcttggatggcctgcag

SEQ ID NO: 338215 - DNA, 661 bp, Cannabis indica
gatcctgttaaaatattcccaacgatcccatagttagcctccaacagtggaaagatcagtcgtgatccctgccagaagagcggtgagttgggtactattgtccaaattcctcacccttgcagaagctgtgctaaaacggcttaagtaggccttatgtgtcccgcccggctgcagctttatgttagtgagtgaggatggctcgggttgcctatcccttactgcttggaactatgttttgaagtctttagaaaactatttccaagaggtgatttaatgatgggtaaatttgttgaaccagttgctccctgatccaactagcaaagtggggaataaatacagcgtaaattattcgtaacattactagctcgcatgacagtattaaaattatttaaatgtgaggccgggtctgttgttctgcactacgatataatcgtttcagtcgcggaatcaaaggcatgtaccacatcactttttgggggataagtttcctattctccttactcttgtttactttatggcgggataaaccgcaagtcgggcaataattcatgtctgcatattccttacgatataaaatgcaatagttcggacatgcatgaattttttcatacttcaatcctatagaatttaatgtttttttcacttcataagtagattccgg

SEQ ID NO: 338216 - DNA, 522 bp, Cannabis indica
tatttatttatttccttaaatagaaaactatttccttaaatagaaaattatttccataaataaaatattctaatatggtcttaatccgtcccctatatggcattgtcacccattgtcaaggagagacagagagttgagagtagccatttttgatgtagtttggagcttggagactatcatttcaggtatgtaaaagaggaacttaaaatatgggaatccaatttctttttagatatggcatacaaaaagtacataataatgtaaacaattcaaaatatccataagcttatttaaatatgccataaaaaagtaaacacttaaaaaaatcccataatttatgtaatttctactgacaaagaaatttttacatttatacttttcttacatgttttttccttttctattgttttttacttattaaagctttaaaaagttttttttatatatatattttttggtcaattttagctttctttttttcttttcattttttaagtcagacttttttttctttctttctct

SEQ ID NO: 338217 - DNA, 806 bp, Cannabis indica
tggtatttataggattaaaattaaaaaaatatggcatttgtgaaataatagataaatggttaaaaaaatggcaaaagtataattagtggggcctactatcatggccagccacttatctcttatttttggtcaattttttatcattttgtatttcatataaatcaatcctaaccctaagtgaattagtataaaaagaaaagaatagtctcataatcaaactaatgactctaaacctagtttacaacatgtcaaacaactagagagttttgagacttcttcttctttctaatttcgaatccttgagtgttcatcacaaataatttcgagccttagtgattgagtgcatgtccacccatagcaagttagtactcaatcatagtgtgtaagactatgaagaatccaaacaactgaaggagaatcgggctcagatcttgataatactctgcgatagaaaggaataagggttagagatctaagtggaaggagatattttttatattttgctgcaaccaatgtagggtttcttatactttataagtatttaagttttattgttttagaaattcatatttaggatgttaaaaacatacttgttagtaaatctagatcctagtaaaatatatttcaacaataattagttagtggttattatattgtttattaaattaaaatgtgtaggatctaatattaaaatgcaataataataataataataataataataataataataataataataataaatacacaaaaataataaaaaaaacttataaaaataacggttgtacaaattttaatatttt

SEQ ID NO: 338218 - DNA, 1355 bp, Cannabis indica
aaaataataaaaataaaatggtaaattgcttcccaagtggccggccatggatagggggccccactttgcaattttgccatttttctaatttttcagcttattttctcaaaaatgcaaattttctaatttaaccacttaaaattaattattaaataatattgtcatttaatatattctgttaacctcacttttagccaatgatagtgagtctaattttgtaagcgacaagtagtttaatacgattgaaatatagtaaagtaaataaagacacaagaattttatagaggttcagccccgagcagttcagtaataacttaatcctcgttatttgtattgactcaagaacaaggagaaaggttccctttcttacagctcttacaacagtatctctaaatatgaattcttagccaaaatgtttcgaccctttgctcagtgaatatgcattactatttatagggctataagcttggagaggaagtatttcccttctcgttacaattgatataagaagaaagattgtatagtaaatacagaatacactgatcatgggttttggacagtttgccatatctttgtaatctaatcccaaagttatagggatttccttgatgactcacgatagaaagctaaatttgataagtgttggcgttctgtgcagattgtccactgctcggtctagagcacttcgtccgagcaaatgtacgaagtttcctgttcgagctgtgtcttgcgagcagatacctggagtcgattccacgtgtcaccattgagtgatgccacgtcagagtgtagaaattgggataacatttgccccccgagtctgtacgggacttctaatgttgcgtgtagacttcattcgagctgtctttgtgtttggatgggttacacgtgtctagcgcgtctgttcgcgactcgatgtgaggctgacttggcgtccctttgatttttggctaataaattctctaacgcaattaatgcttcgaaatccaattttctctcaccaagtctgacgattgcacttgattggttttgatttcccataatcacttttggggggaacggaggcgtctgaggttttttttgaaatgattacccctttttcgttgtttgcctataaataccattgagcatttgttcacaaactcattttcaccaaccttctttgctaagtaagttcaaagcgaaaagagaggttttgatcttcaagtttcctgaagtgttttcacaaaaaatgctcgtttagctttgtgtaacctgaatctagatgtttgatccttgagtaagttctcgatttctttgcacgtttattgtgaagcccgcttagttaatttggaaattatcagttaattgtgatt

SEQ ID NO: 338219 - DNA, 755 bp, Cannabis indica
acagactatctccctgatcactgtgtttagaccagggcatagacccccacatgtgactatgcaagcgttcacttcttctggttcaaaagatacctacggaaggaaacaagttaattacgacgtcgttttcttgttagattaaggtgacttacttttgaatgatattcaaaacacatgaagagaaaaactaagtggaaattattttggaaactttaatttatgtttttatgaagaaaaaaagaagatttacttttcaaaattaagttaagaaaaaagttgaagaatatgataaaatcatattaactattgaaaaagaaaaactataaaaaaaatagggacaaagttttatggtcctttgatatagcataatttttctttatatgaaagaatatatcatagttattttgacttttgaattttcaattcttaaatatagtttaaatattttattatatgtgtcattttgaatttttttttttacgtagtcaaataataagttgtttaaattttattttttatattataaattattgtaaattttttaaaattttataaaatattttaaataactataataatatacattattatataaaatcatataaaaaattgagattataattattttttataccgaaaatgcaaaaatttattagtgtacacaagcactccacaaaaaattataattttaaaaagttaaaaaagataaattgataaattaagctattaccgtttgacgaggtcctgctcgtcga

SEQ ID NO: 338220 - DNA, 876 bp, Cannabis indica
tagatcaaactggcttaattccacagccaaggagtctcccagatgcctccagcttctacaggacttgccggagtggatggttagtcaacaccttgattgggtgagcctgaaagtagggtcttaactttcttgaggctattaggaggcaaaaaactagtttttcgatcactggataccatgtttccgcccctatcatgcatttgctgacatagtacacggggtgctgagttttttcatcttcccggactagggctgcgctaaccgcattctcagagacggctaagtatagtaacaagtcttctccaagaacgggtttgacaggattggaggtttagccacgtgctcttttaattttttgaatgccccctcgcattcttcggttcattagaatttttggcatttcttcaggatgttgaagaagggaatacatttgtctgtggcttgggaaataaaccagctccgggcgacaacctttccgattaggctttgtacgtctttgtgctttttgggagaaggcatgttcacgagggcttgaatttttttcaggtttgcctctatccctctctggctggcaataaatcccagaaattttcctaacttaaacccgaaaagtgcacttcttcgggttaagtttcattccatatttctgaaccacttcaaagcattcctcaaggtcatctgcatggcttgcacatgccttttgttgtcgagtgaatttcgcaacaccgaattatattatttgattgatacaaaagagaattttcaaagaaacgacaagtgcgagtattgaacctaaaacggcgagtactcgaatgggaatgtgagaacaatcaaaaaaactggaaaatatcagtaagacaaagaattatagtggtt

SEQ ID NO: 338221 - DNA, 693 bp, Cannabis indica
ttatatacaaagcaggtgtccgatcagttatacaaggattgcattcattgttaatccatttttacacattgaattacaataattaaactaaacaacgttaacattaataaatgaacggcagttactaagttcatcaacgtatgcgtcttccgagtctgcgagttgactgttcatattctgatgttaaactcccaggtttatcattatgtttaggatgtctgcgtccttagatagtcgccttttgtggacatcgcatgacgagctaataggacttagtcatgcaagtctatattggttgatcaaggctgcagggttcttaggaccaactcgcatttatagaaggtcgatctcctagtttacacacggacacgagaaggacactcgcatataattcgatatatgcgagctactctcttgtctcgaatgcgatcagaatttggtcatgctcgctgtctctcgctgattttatcttaagcaaggtttaaaacttcgaggagtccctcagggacatctcagctttcttcgaaaaatctgagtatacgtgtcctctaagtaggggtctcgtctcgagtttctaggtgagagaattctcactataacacatgcccctagtttcgcgatgtgacaggtgcggtcacaagggaaactatactcgagagacaggtgaaaggttgtcacgaggaggtgaccttt

SEQ ID NO: 338222 - DNA, 677 bp, Cannabis indica
cataaaatcaacaagaaaactacataaaagtaacatgaaaataacaacaaaaaatagcatacaaataacaaaaaataaaaaattaataagattacaacataaaaagaccgtattttctgtaaataaaataaaaaaaaccgtaaaaatatttaaaattctatgaaaccgtaatttttttgttatttttgtgaaataatcccaatgagatacttacagagttttagaaatgtaataggtattattgccgccaaaaattaaattaaagtatttatttacaccaagagttaaagtatttatgctacaaattagacttatatatatatatactgaaaattcatttcttcaaacaaataaccagatattttcaaacaaataaataaatatataaccagtcaaaattattttcattttcaattataaccagtcaaaattattttcattttcaattatacccctattttcaaagtgaattacttgaatttgggccaccgcccagcccacaatgaaatctaataatgaacaaaactagtaatgggccaattataatcgacttttaggagcattttgttggttcccttttggtcttagtttttacaaaaaatactaaattttaaatgggaaacttacaaaaatactgaaattttagttaacttttacaaaaatactgttagacggaa

SEQ ID NO: 338223 - DNA, 595 bp, Cannabis indica
catttgatgctcactgaacttatgggtgcacaggttgaatggaaatctggggagagtcttcgaattccaaatctcacatatgctcatgcatcactcatgagattttctcttagcaattggcaaccgtgatgtctcaagatttggcatcctttctttttcgaatcacctcgggggcatctattgatctggtttcttcaatcttagaccagattgtttcatttcagagaggtaaaaaagcaaacttttaagcttgtgtttcctaatttaatctataaaattttgtttgctcagaaaaatgtggctcaatctcatgaaacacttgagcctccctgactggaaccattttccaaccctcggagtattttgatggagcttttccaaagcgtcctaaagctggtgctgttagtgcaagctcgagttctgcttctgcagacgtccaggaggtcaagaatgaggttcaactggtgaacaatcgacttgctgccatggaggaggtctagcaagagatgttcaagcagctgtcctcattcatcaagctttatggggttttagttttctttctttttatgattttgttggacatatttctatattt

SEQ ID NO: 338224 - DNA, 581 bp, Cannabis indica
aaaaccagctacatttttttttcaatttatttttgtttcataccactgtgtttcttttgagattttcctaaattaccaaaataatttgttttgtacatgttctgcatggtgaaacatttaggtctaatatgtctcttcctaccacagaaatgacaaataggcataaatctccttacctgagatcttactatttttgtaattcctcaagactttacttttgcagtgatagactttgaatctgttgcagcaaacttcaaatttgcagcatcaggaaagttcattggaacactagattttacaaattttatgattccagaacttccaggttcatctgatctaataccaacaaagcatctttgacctacattctgaacttcgtcaaaaatagaagatccacggttaagtatttggatatttttcttgagactttcaagttccttatttaaaagagtaattttttcatttttaatgcaaaaatcagtctcataatcttttattttaattcaaaagttttaattggatgagacaattgtgtattcattttagtcaagactctactttcagaagtaacttgtatccac

SEQ ID NO: 338225 - DNA, 573 bp, Cannabis indica
tgtgaagttctcacagcgatgttgtaaaacttttcttcaaacaaacttttaaattcttcccaggtcattacactgacatcccgggtttggcccatgatatcccaccagacgcgggcatgatcttgtaacatgaaggctgcacagttcactctttcagctcccgtcacccccatattatcgaggatacagataacagtgctcatccactggtcgacctttattataacaatacctcccgaaaaattcggaggctgcagcttcacgaaccgctcaaacacagaatctcggtgcggcataacaaacccctggttacccaccactggcaaaggtgttggtggtaacacttgatcaagagggccatccggttgccttaatcgttgcaactcttcttcttgacgaagtatgacacttagcatttcttgaaacatttggttccaatcggcaggagaatttacattaccaacccccggattctacggaggtgaaggcggtgccagtggatcggtttgggcagccccaggctctacttgctcgccatgtggtctagatgattgcggagggtccattactagt

SEQ ID NO: 338226 - DNA, 1341 bp, Cannabis indica
acacctatttacaaggcttaacagatgagtaagaacgttccatactagggtacagccactataccacatacactacgcaccacagtgtacgagtgttggtagggtttgcttcgtaccctgagtaccactgagtgatataccacacaccctcagcacttcctgtacttatgctggtatcactgtactgtactcataaacaacattcactataccgatgcactctgtaccctaactgtacaagtgttggtagtgcgattaacattttaagcatgcatatacacataacatatacatacactcagatattgatatcacacattatatatagttcttaccttctttcaagattcaagtgtgctggtcaacccaaacgaaaagtcttgcgctagatggatgccctaatcacataatgaaatcgagtacatcacacgatcgaaaacgtaatcctggaaacccgaacccataaccctaggttctattatactctctatggattattctaactcaggaagtaaggaaacacccaactatggcacagaatggacgagaattgagaaaatgagagactcgaagaaccctgccaaaccggcttgcaccagttcacccaagaaatctcatttcttgctcaaaacttcaccaaacgtagccaaaccttccagggtaactaattaaggtacacacaacatactccaaccagtaattcacagaaaaaagtcaatgaatcaaattatgccattaaagacctaaacttgagtttcaaagctcaagcatacctaattctttttccatacaccaaaactagaatccagagcttaaaaccaactcaaaatcaacctagaaatcagattacacaaactttaaaccctaacagcccctacctttcaaaattacataatcaaaccaatgaaaaagcttcaaaatacataaccataggctctagggttaccttagcttgatcctcctagaatcccttgctgaaatcaccaaagttcagcaacaaaattcccttattctaggttggttcgaagagagagagggaagggaagatagttcttgattttggtcttattttccttcaattttctttctaaaatgaaaagagattatctaattaatctcttgctgaataagatcctaggtgtcatcaatctaggcagccatcaaatcacacattggctaattactaaaatgccctttaacttaaaactagggtattttcaaaactaggggtaaaatgatcaaattctataaccccgctcaaccccgatattttatttcttctaatatatctcccactaagaaatagggttctaaacttacccatgtgatcaaactagtcat

SEQ ID NO: 338227 - DNA, 479 bp, Cannabis indica
ttcatttaaaagtagtaagtagtaccatatatcttctatatatatgagctggtttcaatttctttatcaaatgggtaattttgttgttctttacatattctcattttgcagcagatgaatttggagaatacagataagatgtttcttgaatagtaatattatttatttctgctttgttattttcagcccttgacattgtaaattaaatgttaagttacttattaaagtaataagcattcaatatgatcaaaaataatatttaatgaatgtaaattattttatgtatgagtattaccattgatgaagtattgttgttttggaattgtctggattgatttcgattgtacttgattcacgacttgacaacaacaatcctgtatgaaaatgatattttcagcatatttaagtggacgaaatttaggaattgttggaatttattttaccaggatcttagatctactcacaagtatgttgattaa

SEQ ID NO: 338228 - DNA, 508 bp, Cannabis indica
agttttttgacgaagaataacacccacatacgatctcggcgaaaatggggatgagaaattagggtttgagtttgaagagaaaagagggaaaattggggaatgagggggtattagcggcagactattagtggcggatagtccgctgttaatagtaattattttttttttaattattattagcagcggggtccgccgctaataccccaccgctaataatattcgaactgaatgggagggataaattcgtcccatttattagcggtgaggtattagcggcagaccctgtcgctaatactattagcggtggacaatagtagcagactatccgccgctaataatattttattaaaaaataaataaactgccacattagcggcggacatgccgctaataccaccattattagcggcggattttgtctgtcgctatttagcatatttgttgtagtgagaaagttaaattgagtgttaagcttaatttgaagatatcaataggaactacaatgatg

SEQ ID NO: 338229 - DNA, 1111 bp, Cannabis indica
atggtgggtctacacttggaggcgtggacttgccatttggatcaactagggtgctcgtgtcaggttggctagctgtggtggctagacctgctgtacctgctgtggtgacatgattcaccacatctacagtattcatgggaattctagttgtgacttgaacctgagtgcctggatatgcaatccgcgggtcttaagggagacccgaagatgcagagggtgcgataagaattcttcttgtgttcaccatggcatttgatcagatcatgatatcacgctctcaatgaaagcaccaaactattgacctcaaaaagtgatcaaacaacagcggggtcgtgtagatctgatgcttgccacgtgtgtgcacaaataagaaatgaaaagcaatagataatatgattttttttatagaggtttgaccaccatgtgataacgggtaatgacctactccccttttagttgtattataccgagggaattactatccagatcactataggtgggatatgctatagtacccttaagattacaatgtatgaattaatgcctgacataactcaattgttaaacagcctagggcgttggacaacctaaggtacgcgtgtgagagagaatgaagaagacagaggcaacttaggtgttatcccaatttttgcactctaacgcatcacatgatggtgacacatggaatcgactccaagtatctgctcgtaagatatagttcgaacaggatacctcatatgcatgctcgaggcaaagcaatcagcaatccgcgcagaaggaccaacacttagcgaattcagctttcgcatcatgagtcatcaaggaaatccctataacttggggatcagattgcagagatatggcaagctgtccaaatcccacaatcggtgtattctgtatttattatgcaatctttttgcttatatccattgtaacgagaagggaaatacttcctctccaagctcatagccttataaatagtgatgcatattcactgggcaaagggtcgaaggatttttacttgagagatattgtctaagaattcacattcagagataatgttgtaagagctataagaaaaggaatctttctccttgttcttgagtcaata

SEQ ID NO: 338230 - DNA, 527 bp, Cannabis indica
atgagagtgcgatttctcctttcagcaacgccattttgctcaggtgaaccaggcatagtgtattgagcaactataccattttcttgtaagtactctgcaaaaagccccatgtgttgtccagattctgtataacgaccataatattctcctccacgatcagaatgaacaactttgatgactcttcctaattgtttctcaacctcatttcgaaaaattttgagtttatcaagggcgtcagatttttctttaattaaataggtgaatccataacgagaaaaatcattgataaaagtgataaatacttgtttctgcacaacgtggtggaataaggtccactaatgtcagtgtggataatctcttataaagagtgactatagatagcagtctgctttcttattttagtcaatttttcacaagtacaatcagcacaagtattccaaccagaaacatcaacaggaggaagaattttagctagaaggaatcgatcatttttgtttagaaatatgacccgatatatcgtgccataa

SEQ ID NO: 338231 - DNA, 487 bp, Cannabis indica
cctaaaattgccccaaccggtagaccggttcccaaccagaattccagttctgcggggtttcctggggaccaaccggaattccagttcttacaggtccccctgaaccggaattctggttcaatgtaggaatccaacaaaaaattcataactcaaccaattcaaccccaaactctacaaaaccttccaagcctgctttatagactacaaagaacatatctaaagcaataaaacacttctacaggctcagaaacaaaaactaccattaaagctccaagtttgagttctaaaactcaaaacttggttaaactaactaacaatcaatcaaacatggttaaaccaacatatctggacataagtaggcttctaaaaacaaatctaaacacaaataacagctacttaacccaattccttaaaatcatgcaaaattcataacttcaaactcaagaaaaccatgaaggagttactagaagcttacctaaagcttgaa

SEQ ID NO: 338232 - DNA, 593 bp, Cannabis indica
gtgttgagtggctgtaaattaaccatcaattttttattttatatatctattcttatttttttaaaaaaaaaaactagtggcctgtcatcttatatctaaataatatgatatagatactctcaataataatattaataggatatatataagattaaactggtactttttttttataaaaacagacactaatatttctaatctctaatctctattctctattctctattcctttcttttaaattaaacactcaaagctattatggattttcctcaaatcgtaggtgattcttactttaaaatctcaccatacaatgaccatgacataataatagatgaagttattatagagaaacgacacccttgttattttacaatttttactatttcataatgttagttgggcaaattttccattttgccatcataacaaccatattatagtagcacaatatcaattagaacatcaatgttaaaaaggaattttattccaatatattgagaacagaattgggaaaagagaaagacagaaacataactgagttttttaattttttaatttgatacattcgtcttttttgaaaaacagttcccat

SEQ ID NO: 338233 - DNA, 534 bp, Cannabis indica
atagtgtatatatgtttgattaattccgcacttaatacttaaacatatacatttcagtttatatatataaatgtctaacaagatatgcatgtttactaagggtgtacgttggtcggtttggtccgtttatgcagggacggacccattaaaattgatagcccccacgaataaaaatattgccttttaaaaaattaaatgtaattttttttatttaataattataggctaaaatagtagtaaagcccccacaaaattagatacatttagtaagagtgattataatgtagctataaatatattttttatgataaataagcccccacaaagtaaaaatcatgggtccgtcactgcgtttacgttacattttatttaacccaatgtaaagatcgggttacaaaatttaaagtgcaaccacccattaaaaaaaatgtttcaaccgccaataaattggtcgatttagtcggaataactcggctaaactgagtactaatatttttttttcactattcaattgttatactttagttattgtga

SEQ ID NO: 338234 - DNA, 659 bp, Cannabis indica
actaaaaacaaagagtgaaaactaaccgaaaatatgacccgaaacttagactaattttagcctaacaaggatccacatttcatccccaccttgggatgctccctacttggtaatgtttttgccttgtctgtgcactggctggaggatacttccttcttagccttggccactgtaaggttataacattcccgtgcagtttgctggtttcctctcaaacaccctaccccattcttcgttggaaacttcaggcacaagtggaatatcgatgtgacagcctttaagtaatataaggttggacgacctaacattatgttaaaggctcaaggaacatctaatactaggaattgtgccatcatagtcatgctcgtgggagcttgtccaacactgaggggtagacgaatttgtcctagatgtgcgactccttggccggagaaaccatagacaggctggagacatcgggctagatccttgagctggagtccaatcttctcataggcagtcttgaacaagatattggaagaggctccattatcaatcatggttctggccaccatcttattagctatctggaccaccacgaccaacgggtcgttgtgtggaaaatctgattttgacagcatcttcatcattgaaaggttatggtaggccctcctgctcgt

SEQ ID NO: 338235 - DNA, 1033 bp, Cannabis indica
gggagagctcgggccatttctcaataaaaccagtttataagttcttacaattgagcaaagagttgggtgcacatgatgataattttgtcttttagaatactctttggaagctaagtgttcctccgaaagtgaaagacttgttatggcgtgctgccactaactgtctgcctacgaaatccagacttcgttctagacttcttgcttggtggattgctctttttccaaagcgtgttggcaacagttggctgctggtgttaatttgacgactgttggttcttttgccaactggttttctatggttctacagcaggcggatggggagaaaaggaggttgatcgcaatgacatgttgggcaatttgaaaacatccaaatgagctagtatggtctgataagtcccctactattgcgagtgttgctcacttagctcaagctttactcgcagattggactcgggctcatgattcaacatttaatcctacagctgaattccttactgatgtcgttggttctgagacttgggccaaaccagctgaaaacaccttgaagattaatgtagatgctaccattttttcaggaactgtaacttacagctttgcaggggtgattagggataaaactgacgcattggtggaagtttttacctgctgtcggtcaggggtgttgcaactcgaaatggtggaagctttgggtgttaagaaggtattgagttgggttaaacagaaatattggaggaaggttgtcattgaaactaatagtcttactgcggtgcaaggattacgtagctatactcctatggtttcatacttttggagtattatttctgattgtaagatgctgttaaataacttgcgagatgtttatcccaatttttttagacgttctgcaaatagtgttgctcatttcttagctcgagcatcttatttagttgttgatcgtgttatcagtagtagggatgttactccagattttaatcatgtaatcactgtggattgcaattaataaagattataaaaatttttcaaaaaaaaaaaa

SEQ ID NO: 338236 - DNA, 1228 bp, Cannabis indica
agctcgctgtcagggttattgttactatcccagcgagatgacccagcgagatacactttgcagcatatccaaattcacgtcatgctaacccagtaaaagcggataaatcacagctgtgtgattttcaaataataaccacatatattttacgtgggacgtaatcaaatcccataatttcaggaaaatattattgtgggatatgaatctgattgtaattaactgcgtccccacgtaactataaataggggcagagtgtattgaaaaataaaaaaaatccttaagagaaaagaaccctagtttgtatcagagaaatctaataacatagactcgtggactatgcagaattttaactgcaaaaccacataaaaaacttggtgtgatctttgtattattcttcttatttttattttctattatttctgtgcaaattaatcacaaaataggcttatatcgttaacgaaaatctgcgttaacaattagaaactacatcaagccaaggttcaccaacataaaaacaactcaaacaccacaagacaacaaagtataattgaatgataagtatagcataaaaaatgaactacatgaaagcatggagaagtaaagagcacgcacagtaagaattacgagaaaaagcaaaagaatcatacaacctgctgctaagttttttgcacttgctgtagaaatctaattgaggaaccatagtacacatgcaaactcaagaagataacaacttcatgtacttatttctagctctagatgcttcaataaaaatatggaacaagtgcaaacccataatcttggttgatggaactttcctaaaatcaacatatgaagggacattgctcccagcttgtacacaagatgcaaatggacacatttttcccctagcattctctattgtagattcagaaaatgacagctcatgggaatagtgttttacaaaattgagggaagcatatggggtcagagaagaacagttcttgatctcagacagacatgagagtataattaaggttattgctcatgtatttcaaaacataactcgcggctactatgtataccacctattaagcaaccttcaagaagaatatcaacaaactcgataaaccattctttgtagcagcaaaagcatacagaaatttgaataccatatgagcgagcttgacagcttggacaagcatgttagaccctatttacaacaagttggataccacaaatagtcaaggta

SEQ ID NO: 338237 - DNA, 934 bp, Cannabis indica
aacaaaatattactccccctttttgtttatctaagggccaaagataacaaacatgaaaatatagtactatgtccaacaaaagcaataaaagaaagaaaaacttattctctataaagcttgatcaaggaggacagctgctcggacatctcttgctgaacctcctccatggcaacaagacgattgttcaccagctgaacctcatttttgatttcctggacttctgcagaagcatagctcgagcttgcagcagcagcaccagctttaggcctttttggaaacactccatcaaaatactccgagggttagaatgttgtttcagtcaaggaaggctcaagagtttcatgagattgggctatatttttctgagaggacaaaaccttaaagattaaatttggaaacacaagcttaaaagttggctttttacctctccgaaatgagacaatctggttcaaaatgtgggaggccaagtcgatggaagctccagaggtgatacgatagaggaatgaggccacatcttgagacaccacagtcttatttcagtttggaacccaatttctaagagcaaatcgcatgagagatgcatgagcataggttagatgcgtaatgcgaagactcacccccgatttcagttcagcccgtgcattagtgagttcagtgagcatcaattggcgatccatagacattatggcgtttgggacattttctggccgttgcaaggcttgggaaatgtgtctttttcagagaaggaaaaccaatgtcctctaacatacactttttgaaaaaagtctagaattctcatcaagaaaatcatcagattagttagcatataaatctttgacaatgtttgcaatgtacccttcgagtgagagtgttctctcattgatggtattgaatgaacttaacaataccatacacccttgttggaaattatttt

SEQ ID NO: 338238 - DNA, 561 bp, Cannabis indica
tttttatcgatgttttttttttttcttcttatggcctcacctacctgatcagagacaatccaacgcttttgataaagtcaaaatctttcgaaatgttcttgagaaatcattgggaagagtcataaaatttgttcattttgatcgcggaggagaatattctggttgttatatagaatctaaacaacacatgaggccttttgctgaatattttccagaaaattgtgtagtttctcaatacaatatgtcaggttcactgagaaaaatggcgttgctgaaaggagaaatcgcactctcatggatatgatcagaaacatgataagtagaacaaatcttccagagtttttatggggtgaagcactcatgactgcaacttatattttaaatcgtgttcccagtaaatctgtttccaaaatccttttgagttgtggattgagagaaagcctagtctaaatcatcttcatgtatggggttgtccagctgaagtacggatttatgatcctaatttgaaaagttagattcgagaacaaatcgttgttatttcattggttatccaatgcgctc

SEQ ID NO: 338239 - DNA, 650 bp, Cannabis indica
agagagagagaaagtgagagtttctgattgttctggatttccctaattgattaattccaataattaacaaatttggctgaattaaaataaaatggctagcttccaaccaagggcaaagccacctaatctataatgcctaatatctaaaatgccctttgacttctaaattaagcaattataagcctaggggtaaatggtccaaaaccataaccctgtttaaatctagcattctaaatatctcttaagtttgttttactaagaactaggttctaaatttatcaatgtgactcaaatggccatccattgcattttccatcatcgacgagcaaaaatcgtataaattatatatttaacattttgcttaaataatactcttagagtttaataaaatctccagaaatgaaaaattgtaactctaatgcccatttataaaaatgggacccacaaaaattgtaaaatcatacataattataaaatgtcattaattaatgctagtttgctttactaatccataatttaacatgcgatcattacaacccccttgctctaggatttcatcttccatgtcgactttgtcttggtggatactcttaggtatgacttctgtaaaaaaaagaaaaaatccaagcagttagctacgcaaactacct

SEQ ID NO: 338240 - DNA, 724 bp, Cannabis indica
aggacacgtgtcactcttgtattttgtcacatcatagtgcaaaaatgggataacatttgtccccaagtctgcgcgagacctttgtggtcgcacgtggacttcactcaggttggatcactttctgaacaggtggcatgtgtttgaagtatctgttgatgatccgatgtgcctctaaccaaggtctcttcaattttcggcttattaatgctgactgacatgtacatcaaaccacgcctaaaattagcacatttcgacggttacccttcaggttattgagtgcacaacgtacactttttttgggggaaattgaggtatttaaaatttgaaatgattactttgcctcactaatatgcttataaatagggctgaaatccttaattaaccacttttagccattttcatttttgaagaatcagagcacgaaaactttttcttttaaatcctttgaagaattcctaggaaacaccaatcagcgtcatccgagcaactctaaagctacgaacagtgagtaagttcttcatctctttcctcttttatgcttgaatacttgattttgtgggtttctgctgtaaaaaactcgatagtttttgaaattgttctaggaaaaccatagaaaacttaggtttaggaatgtaacatcttgagtatgcttaacaacattgcttgattataactgtgtcttgatttcgattccatgatattcactttcacttacccattcggg

SEQ ID NO: 338241 - DNA, 1156 bp, Cannabis indica
ctttagtcggttcgctctgtacagcgtgaaggcttagtgcatgtggtattttgtaatatttgatgtgatgataatgttatcggcgaccagtatttgtatttttctttgtattttgtttttccttaattatatagttttttaaaaattggttgtaccagctttagttttagttgtagctttccgtaacttgtttaataagctgtttttaactgggtttcaaacatttttttgtcaaagttttttttgaaaaatagtttttagcttttcaaaaaattgtgccaaacaaattcttagtacaatttttaactagattttaaaagtttactctaataacaagctcaattatataaaatttaattattttacattcagtctaatttataattggatatccagttttttttttaataaattagttccatgtagttgaagtgattttgatgttgtctgcatctagatacaattataaaaagcaaacttggataataaaattcataaaaaaaaaaaaataagttcagactgctacaacatgtgatgctcaaaaagcaaacttaactacataataaacaacaatattagcatttctagcacaaaaaaaaaatgtataaaaactcattacaagatatagatatatccttaagtctaaataacacttatcaatcttccaagacagtttatataatatgttatatgatttgtttttgtgaaaaatcaaatttttacaaataccaatagttatactaaatttaagtaaaaatattgttgcaacagtctgcagcagtagaatgtaattttgtcactatagaatacaattttgcagaaacaaaccaaaaataaatagtgcagaatttaaaaacttgatacaagagaattgtacgagatatcagtgctctttcaaacactactagtctacgggaccacgccagagaatgaaatcaattagtaaagtaccaaaatttacaaaagcaattgacttagacaaatttagactccctctagtgatttgtcgcaaccctttataatccaccttgttaatctgatctctgaaacacatcaagtggtgaactctcttcagctattgatgtgtgcttacttcctcccaaagtaaggcttaaacaaatcttctcccgaagacttcctcccgaaatgagacttg

SEQ ID NO: 338242 - DNA, 753 bp, Cannabis indica
ataaaatagattacattgaaatggagttttatttagggcataaaacctaacaagttcatgttcctgccaactttgtcaagagctggccaaccttagtaggtgatgatctgccttggtgatggccaacctttgtaggtggaggccagcctttagaggtggagctattttgagaacaactacttttattcgtagtaccgtcgtagatgcaccccattctagtaccttggtactagtattggattcaatttgtagtcatagcgtgcaaacttgtatgtcccaatttctagtgcttcagtgacgacatatggtccttcctgattcggcccaagtactcctactgatgcatcttttatgcttaggaatactcgtcgtaacaccatatctccaggcttaaatttcctatctttaaccgtggagttgtattgttttgtgactgtgtgctgatacctcacctttctaagctcagacctttctctaatctattcaatcccatctaaacactcagccaacaactgatggttggtttgctggtcatatgttagtctttgatgtgatggtggtgtgatctctacaggttatcatggcttcgtacccataggttagagcgaagggaccatggccaattaatcttttttctattgtagaataagcccatagtgttcggttttgtgccctaaataaaactcatttcaatataatcagatttactaattaatataagataagaaattgcttttatgttgcatggttcac

SEQ ID NO: 338243 - DNA, 508 bp, Cannabis indica
agtaaaaatgacgagcttggttttactttggctaatttaagtaagagaggaagcaagaatgatccattcatcatggctagccaaggagtacaagttttttacatttctgacttggctattgattaatggtctgttgttttatcaacaccagagaggaggttcttagagaatgaagaggatgaggagaatgctgatttatgttatgatgatttcatagttgggcaaccaattcatgaacaagttgtgaggattgattgtaaccttgaggaagacgatactgaatacattataaatgatatcaatgacagaatatggattaattatgattcaggaaaacataaacaaaaaaagaaaagaaaacgtatctaattggttacttacttgcaatagcttacttgtgataatgcttttttatgtagttagtattgttttaatagattacttgtggcttttttttttttttttttttttttatttacgtagttactctgttatagctaactttata

SEQ ID NO: 338244 - DNA, 1039 bp, Cannabis indica
aacacatataaagtttaagtaactttacattagtggcagagaaataatatgtctcctcccactcagatctctaacctttgttcctttctgtcgtagagtattatcaagatctgagtctgattctcttttaagtattggattcttcacagtcttacacattatgattgagtacttgacttgctatgggtgggcatatactctttcactataggcttgaaaaatatgaagaaagagaaagaggatttcgaaatttagtgaaggaaaggaggctctcaaaaactctaattgtctgacagaatgataactaagttattaggttggatgagaatgagagcatcctattccttttatattattttacttagggttagaatttaaattatatggaataaaaaataataaaataataacaaaattaaggctatagtggtcgaccatatagatgggccccattagttataattttgccatttttcaaccatttatcgtttatttcactaatgccatattttctaattttactcttataaatgtcgaaactatttatttaataattataattaattatcgaataattattatttaacttatttattaagtagactttacaaagtctcttaattatcaaataaaccctaaaatctcttttctttacaattaagccattgcttagtgaaaatttataaataagacataatctaattttaaaattataattgattgattaaaactaattaattgagtcttacaagtagtattatctcaactagtgtggggaccatgggcctatataatcaagtttccaataagtagctctagaatataccaaataaaatctctaacttattaattcatccttgcgccactatagatttggaattgcactcttaattatataaaacgttctatatgttccacgatatagatacactatgaattatctattgttataatcctaataatcagtgatcctctatagatgatctacatcgagtagggacaaatttatcattacacattcaatgtattttattcttaa

SEQ ID NO: 338245 - DNA, 1120 bp, Cannabis indica
tagttactctgttatagctaactttatattttgtttgttaatggtgtagatatggctaactcagttcaggctcagattcaaacccagaagtagagtgttctagggcaatacctgcatgaggagctactcagatgaatgaagtatccaagctgatggaccaaggaaaaagaatgacactcgaagtaaatgataaaggacagtactatggcaaaaactactccaatctagtattgactttaggatttagatgcaccagacgatagggttgtcctatgaaaattggaagcaagtcaaccctacactaaaaaataaagttgtgaaagatatacaggtaagcagttatttgttagaattttgatctatttttaattaatttagatgttaaccctaatcatgtatgttttccttaaaaccagaggggtttatagtgcgagatgatttcaaacatgattttctgatccttgatgggaagttaatgaaagacttcaagaacagaatgacaaaatatattattaggcacgcattagaagaaaattatgtgcaacgaatgacacaagtccttgaaaagcatctaaaaattgaccttactgattggttaaaatttgttgaaagtctactaactcctaaatttgaggtgctaattatatttgtactaagataaacttttaaatacaagtactagtatctaatgtatttttttggcattgtaggaattgagtaaggtgcaaaggaaacgttcagcaaaaatccaatccagacattgaagtggtcggagtggaatggtgaacgtaagggaagatgtggtaagtaatcaataatttctaataatgttcttcaaaatgtaattgtactcatttaattgttataaaataatgtagaaaaaggtcctcgaggttcaagatcccccatgccaccgtgtttggatcaaatctcggactaagagaatgaaacttgtcacagattaggacaaggaaatttccaaaaaagatagtaagtatatattaatccttaattgagtactaataatgagttaattgttgggttttgtgtcctaaataaaacccatttcaatgtaattagttttacttattaataaagatcagaaataacattttatgtt

SEQ ID NO: 338246 - DNA, 1167 bp, Cannabis indica
aacaaatatatttactgaaataagagctcttccatttatctctattaagcaaagcttgaaggatattatcatttcacttttatatccagatagaagctataaaattccatatctatattagcactcccactcaatatactatcatgtccccaagatgtacgtgctacaagaaccaaatggtaggctttaactaacaactctaagaacacaaataacactcttaagatcgaaaataaccttttcaagattaagatccttggatctaagatcaaccagtgatattgatttagaaagatacagcggtaaaattataatattgttaccaagatcaatatttatcccagtccaatgtagagtctatacctccaacactagcatactttgccaatgtcctggaaagaacataacacttatccaagctgtaagtaagctttatctctgactatcacattagtgtaaatctagtgcactgatgaatcatgggaccttattttttgaagcatataatcacaattacgttctattgtgttgacatcactgtaattgtgaataactatatgttttagatttaacagaaattgtgtacattaaacgataaacattaaaactacatgtaaacataattgatttctaatcttctattggtaacaaataggatattattgaaattggttttatttagggcataaaatcccaacaaactcccacttgcactaacataaaataagaagtgcattttaatcaatctattatcttgatatctagatcaagtgtagtgtatttgactaaacccaaattacaggaattataagattgtgttaagtcactgctttcttcaccattacttcctttctactcataaaacattatgcaacatcatgtcctatatgcattactcctttagggatactgaaatctttagtattattaagtgcatttcaataaagagaagatatatctctaattctatccaaaatggaatagagataaaacaagttaagaactttcttcagtttgaataacttttctagttctttcgaaaacaactaagttatttagcttcactaatggaactaaattattatagataggtttttacatccttctagaatacttcctccaccccaagagtaaccaccatctctaatattctgagttggtgtagat

SEQ ID NO: 338247 - DNA, 590 bp, Cannabis indica
gactatgctaaagctagctgggataactcatagtgccgaaacatagattattttttggcaatatgaactcccaattgctgacccgagattacattggccgaattctttctattcaaaatgtccattgtcctgtttgtgaagcagaagttgagacgcatgaacacctttttttcaattgtatcttcactaaacaggtcataggtgctgtcatggagtgggtgggctgcttctcttggcctagaactcacggggagctgctgaactggtgcaaaaatctgaaccagcagcctcaaatgagggtgctgaatacagtcattgcagcgactttgtactcagtctggaagaataggaactgctgtgtttttgatctttgttgtgctgcccctagaagagttagtttggatgtgcgtaaaattgttcagctgagattattaggcaagggtccgtttgaggattgcaggaaaaatatgtatttcttaaatgtaattaacagttggtagttgggtggctgctgcctctttctggtttcggcagcagctggtttgttttgttggctttttgcctttgtgtgtattgtttgtctttttgaa

SEQ ID NO: 338248 - DNA, 1314 bp, Cannabis indica
atataaaatcatttactatttatgtggaagtgcatgcgactatgattactaccaatggtggcggtccccgaaatcaacggtcgcgatgattttatagataaggaacggtaacgatctttgtggtagtgggacaatggctcaatgggacagagaaaggtttatgcgcttatcgctgatcgcttcactgagaatagagttcacgcgcctcacgtgcaactgtaacacacgcttggctattctttaatgccattatactacgtggcggttttcacttgactatgtcgggtgtgggtcccactagactttgcctctctgttatacagaacacacagcgcgtggaatttggcggtgcccattgtctttattaatatcattttctttgagtaatttaatatcatattattaatgcccttattctatagtgttcttacaacaataccattttatttatttttttacatttataaaaaggagtattttgtagctaaacactcttaactattagtcagtttaattttttttttaaataaaattatataatttattaattaataaattcgttcaaaataatagaatgcactgcagaggaaactgaagtatacaacctgtaaagaaataagagtcttttgtcaagcaatgagcaaacttatttgctaaacacttttaactattagtcagtctatttgttcttaatcttttacacttaaattttaacgttaaaactctctaaacttttgaattgataataaatttaaggtatcatctattttctataattaacaattaatataaacggcttatatatacatttttatatactaggtgaatgtacgtgccgagccacgtattgctagttttatttaagattttggtctttttaagattttgaatgtattttatttttaaagattacaaattttttgtttgaaaaaattaaatatttatatttgaaatattatttaataatgtattaaaaataatattagtgtaattataaaattgtaaataaatttattattggagtagtagattattctatttagttctttttttaacatagcattgtaatgtaagtttatatctataaatattctgtaaagtgttaatattatatgaacatctccatttataaagctaaaaagtgggtcaatgacagaagtggtatatctgcaatcacacaaagatagaagtggtatttctgcttcctatgcttatccagagaaaacattagataacgtgaggttaactttaatatataaagatttttcttttttaaaaaataaataaaaaaaaatattaatattctcccaaaat

SEQ ID NO: 338249 - DNA, 769 bp, Cannabis indica
attcctagcagatacaaaataggaaatacatgacctataccgtaggtatcttaggagttaggtggatatgatcttttatcccctcttgagtgatgtgatttctcataaagtagccatcactagactcattgattatagtgtaatagccgtataaagggggttacgccatctgtcatgttgtttatggagatttcaatacgccttcccccatgcggcattaaatgcgaagtgactgttcaagggatctctatacctcccggaactgccttagcatgactctggcttcccggagagtagagatatttcttatgctctcctccgggagacaccttccctgagatattcctcatttgcctaagacttagttgattttcataagtgatggctcttacagatccacgtgtcacctttatccgcgtccacgtatttagggaaaatctagggcaacatttaccccccaagcctcatttagtgaagggtaagtgaggctttcttggtgccttccggttagcttattggtacaatggcacgtgcttcaagcgcgtgagctgcagttatgatggtcatcactaatatttatttccttttgcaggcaacgattcgcctctcgtccattgagaaacaggcgcatttaatctgggtgtcaaaaaagtactcaaacgttttcaaccgccctggcgcccatttacctcaatcgttggatttatagaatccgaatcgattacgattcccaccgtacgatggtgtctgtgttggaaatttattttac

SEQ ID NO: 338250 - DNA, 1787 bp, Cannabis indica
ttaagctcaaagcttgagctttaatggcacttttgatttaagggcatggttttgatttctgttacgttggaactgttatatggatgatatatatgtgtcatacgaagtttggaatgaattggttaggttttgagttagtttggagagtttaaagttgaagaaaatcgtgttcctggcagttcagaaccggaattctggatataccaactcgaattccgtttggttagttttcggaaaagttgaatttcgtattttggccataacttttcactcgggtgtctgttttgtacgttctgtatatcgtttcgaagcttgcaacgagctctatgatatggtgtatatttcagagccaaaatataagtttcattttagtgaatttttacctcgaggtttggtaagaaaccctaggtattcctttacagttattaggcagtgttttaggataaacacttattggtttatcatcgttatgacatagggcccgggatgatcgatcgttctccaagcaggtcggccaacatacctaaaccagaatttgaggtaagaaaagtattaaatattgtataaggttaatgttatgattgttacagttttgattaagatcgaaatctcggtatacgttattgtgacttaatcttaatcgaggttaacgatatgaattggatgtgactcaattatgatcgagggaaataataggaaacaatgatcatcgttgtgactcgattataatcgagggaaatgatatgaaacgattatcatcgtttgactcgattatgatcgagggaaatattatgaaacgattatcatcgtttgactcgattatgatcgagggaagtattatgaaacgattattatcgttgtggctcgattatgatcgagtaaaagaaacggttatcaccgttatgagtaattactcctgaaaccgcagataggtttcttacttatcgtttgctatatcgggcaacgatagtgacatatgtagctcgtgggtaacgagtggtaagggtactttatgaggtaccgggattgtgtgattacgaggtcgtgagatggattaagtgtgttgttatatgatgagttgtaattgaatatattatgttatagtgggactgaatggatgttatgttgcttgtgaagttaatcacttttcttgtaataatgcatgattagaatgctttatgaagtacagagattgagtggatatgttaatgtgtgaactggagtgctttatgaagcattgaaagtaagtgtttacaatactatatgattagggtgttttatgaaacactgaggttattgattatgtataactataaatactcttaattttgtaacaagtttgcctgtatagacgttgaattgtatatgtacgttgaaagagaatgatctcttggtatgtataatctgtggtactataatttgctattattttccatgattttctttatctagtagcttttcttgctgagtcactgtgactcacgggtacttcatggtgcaggtaagaagattagcagttctgttcggccatgggtcagaggtcttccagcagtgtacatatcaaccgtgttgtcttggctttcgtgaagcaggatcaacccttttctatgatttgatgtataacctattcttgttcaaatggatttgtaattagttgtaaaagaattttattagcaggggatccccatattacggcagtgtttaaaatggaagtctttatgttgaatttaattaaaggttttaattaaaccgcactttttctaaaaatttatagattagtaataata

SEQ ID NO: 338251 - DNA, 864 bp, Cannabis indica
cgggtgtgggttcacgtcctgggtcttcgtcgatctgggtctaggttcgggtcgatgtccaagttagggtcccgagtacgggcccaagtttgggtcctggtcagtatctcggtctagttctagttcaggtcccaggtcccatttcttagtttgggtttgggatagagactggggtgcagttctaggtcccgacccttattctgtgtcccttgtctggttccatgttggggtctgagttcaagttcgggtttaggtctctgtctgggttttgatctgggttcgagtttcagtttaggtcctagtcctggtcctagtcctatttttgttctagttccatttgcgattctaagttcgactttgggtttgagttcgggtcagagttcgagtcctggtctgaattttgggttcaggtctggatttcaatctaggtccagataaggctccaagtgtgggttctcgtctcgggtcttggtctgggttgggtccgagtcccaagttccaatcttcatctgagccaggattcagttctaggtctaagaccttggtccttatcctagtctaggttcgagtttgggtccttgtccgggtctagcttttggtttgattctaggtgtggcttggagttctagtctgagtctgtgttcgggtccgtgtccaggtttagaccccgatctaggtgtaggttcgggtccaggtcaaagttcgggtcccaagtgcgggtccaagtttgggtcttggtcaagagctcggtccacaactggtccagaattttgatcccagtctgggtcttggtcctagtcaaggttcgtattcggatccctatctaggtccaagtcggtgtttgggatcgggtcccagatttag

SEQ ID NO: 338252 - DNA, 505 bp, Cannabis indica
ggggcaaggtgggaagtttcaatccttcttgcgggcttcggcagggtgaccctctttcaccttatctgttcatctgggctgcggaagttttatcaagattatttcatgtggctcttgatcagggttccattcagggtattaaacttagtagaagtggtccgactctctctcacattttctttgcggatgacttaattctagtcggacgcgcaaatttaattgaggtgaatagctactggagatgcctagagaatttctgctcttggtcgggtcaacaggtcaacaagctcaaaacttcaatattctttagtaaaaataccccggtcagcttacgaggagaaattaagaaagctttggggattgattcccccgaaggttgtatcaaatatctgggtctgcctctgtttagatccaggcagaaggatgctgatttcaattttattctggacaatctcacgtcaaagcttcaggggtggaaagctaaaactttatccaaagctgggcg

SEQ ID NO: 338253 - DNA, 579 bp, Cannabis indica
acttcttctctgcttccaacctgtggaaaatagttcgaagaacctccctttcttcctggaggtcggtcacttctttggacaaggagatcatggcagcctaaagttggtcagaagcctctaaatccttggtcagcgcggtcactttcttctcggcagcaagaagctttttgttgacttcacccagttccattcaaacggctccgagttgaaccctagcttcatcggcgtccttcttggccaagtctacttccaccctcatggtgttggacatgacaacgttcttggaggtagctgacttagctcgggaataagtgcaagccatctttagacgagtctgcacaggaaaaaaacattagaatctaaccttttaaaattaaatataaaattgagggggagtttacaaaatcatgtaaggtaaaattaaaaggtaatatttttacccttacacacattaagggggagctaatctaatatatattgcttcaatttttcctttcctttttcaaaataaccaaatatttgatatcatctaaaagagagaaattattaactcaaatttttaggtctccttgttttgat

SEQ ID NO: 338254 - DNA, 628 bp, Cannabis indica
ggaaccaatgtatgaaaggttctgcaagcaggcacttccagtctttttgggaggtctcgatgtgatgaaagtcgaacagtgaatgacggttattacacgaattttgaactttatgggtgtcaccggtaacaataaagtggcttgtgccacattccaattcaggaagatgccctagtttggtgggatatgatggctctgacccaggatgttactaccattacctgggaggagttccaggaattgttcaatgcaaagtactataacaaggcagttcgtagcgcgaagagaaaagaaattactcagctgactcaaaaggaaaatatgtctgttgctgaatatacaacccagttcaataggctggcaggttggcttcgagaattgtgccaactgacttcagtaagaaagaaaagtacctggatggactaaaccctaaaatcaaacatgaccttatgatcaccactgatgataacaccacctatgctgatatggtgggaaagtcagtgcgagctgagggcgtagttgagtgcatccaggagtcccaagggactcaggttgttggtgaagccactactcctacctctgtctattgttaggttatatttagcctatgtttcgggtctttaaagtt

SEQ ID NO: 338255 - DNA, 626 bp, Cannabis indica
gacctcacttgcgtgagatactacttgattgcgtataattgcgtagtaaacataaaattcgtaacagctatggtaggggtagtagtgactcgaccgctgaccagaagaggaaggcaccatttgcacctagttgctcaaatcaggacaagaggttccgatggaattagggtcgagcaaaccgtaaggatggttctaaaacctgatatacttacccaaaatgtcccagttgtaagaagcatcatctgggtgagtgtaaagggcgaggatgtttccagtgtggttagcctggatactataagagagactgtttgctgcaagaaagaagaatagaaggcagcagtaaagcctgctccagtaagagtgtttgctcttactcaggcttacgcaaaagccagtccctcagttgttacaggtcagctctcggtcaacaactctttcttctctgtattgtttgactctgggggccactaattcctatgtggcagtcatgatttttgataaattgggtagagttacgataaggggtttgcaattctagtacctggtgaagaattagttatctccaaaaggagggttaggtctatgccgatcagaattgaggatagagagttgagtgctgatttagt

SEQ ID NO: 338256 - DNA, 1328 bp, Cannabis indica
aaaaagaaaccgatagaaaaatgaaccaacaaatgcacaatatacatatatataattaggaaaaaacaatttagcatgactaacctcaatcaccacatagaagctaagagagttttacagagggagggcagagatcgtagtctacagtgtgtgggtatgaccgtgagtggttttttgttcgtgcttgtgaggacttggaggttgagagaacagggatagggtaagggcactgggggattcatatggccggggagttcaaggagacagtcagagccgtgggcggagggcctaaggaagacagtcggaatcggatcttgagggagtgatcggatcggccaacctctcgaaacgaccccatctctccacgatgcctatgctcgcctggctgacgcacgtaacaaaacagtttcccatccctctatcagaggttctctctctctaaaagaagaagaagaagaatatgaagaagaaagagcaatgggtaagggtttggttttaaagaggatggaggagccgcctttgaattccccagagaaattcgaagagttgagggtgagaaaattcatgtgtgaacagtaggaacctaattaggttttaaggattttactttttgttgcgtcggttactatctctcattattgtattttgcgtcatttttaaaacctcgctaacacaatatttgagtgttaataacagacgcataatgaaaagtaatttttaaaatttttgctttattcccatcgatttatgttttagcgtcatttaataaaagacgcaaataacatactattagtaaagagtcaattatttgagtactattcacatcggtcaacgctatgaatagtagcattgaccgacgtgaatagtgtattttgtagtagtgaatttacaaaagttgacccaaatcgttacggtaatgattccctcaaccatgggatttgattacaaatcaagctaggtaaattaggcttttataattcacacagttgtgagtatcccgcttttaatgggccgagatgaacgcgtaattaaagatatacgacaaaccttatcccatagggatgtctaattgagaatggagccaagttaacttggatggcgagcagttgtttgtcatctgacttctcgagactaatattgttttaactctgataactatattttctggttttgagatgatcttccttaaatgcacgacgtcctcctgcgagataaacgcctcactatctgttatctggactcgccaaactatcgacacttagtttgtgcattgtgtaatatacgctaagcatttttaatgttatcgtttctctttcacgcagcgaggt

SEQ ID NO: 338257 - DNA, 846 bp, Cannabis indica
gttgattgagaccaccaacacatctcactcttgggtaaccaccattgcttccaattgatattggtgccacaaagtgaagaaatcaataaaattaaattctattgctcaatactagttcacaaagtataggacttttcaagaaaataaaatgaagatacgaagctactcgatctttaaccaacagtttaaacactttcacaaagttgttctacatttagctgcacacaaattgaaagaggatgaacaaaaaacatcaaactgaatttatacagatatataaaacataaatacaactattgtattgtattgttgactaaaaaggaacatgataaggtactacaatcagaaccttctttgacaatgagtcaatgactacaataatgatcacaattgttcttttattcattaaaacccaatagccatattggaatgtcaatgttccagaaccattcctatagaacacacatagattacctacataaatatttctcttaaaaaactcaaatcttgaagcattaaactgaatcatttatcataatccactaatttttagagtttctaaacaatcaaaatattaatctcaatattaggtatttagtgagattataagaaataaaagattgcaaataattgaaacacaaagaggtaagcataagaattttaaaaacattgaagaatcattattcgacttcaatgaatccttttgtttctgtaaaatgtcaattaaaactaaaacactaatgttccacgatcatacaaatgtatatgccaaaatcatcacctaaagggtcaatcatatttttttttttttgtatttaatgagatttaatttattaattttattat

SEQ ID NO: 338258 - DNA, 521 bp, Cannabis indica
aaatttttaggtctccttgttttgatgattacaaatatttgattattatttattactaatagtttttttgattttgtggcacaataaaaatgtaaaataaattttctaaggcaaaataaactccaagggaaaaataataattttatcaaaattctcaaaagtgacccgaagtggattcaacaagcatatcaactacttcatacttgataagagcaaaatatttatatagggatcaagaattcaagaccatattcaaaataggactttaaaagctcaaagtcaaatgtcaacccaaaagtaaaagtcaaagtcaaagccaactctcgagaaaaagtcaactttagatcaaaacatgcaaatcaagctagaaagctcatctacatcaagactacacacaataaaatggtataaatttactttagtcttgttaaagtgatttgcatagtacactagggtttataagtacaaattttggcccactcactaacttgtgcgacaagtttttacacctgatgtttcaa

SEQ ID NO: 338259 - DNA, 650 bp, Cannabis indica
cagacgaccccccaatcaacccagctcctccattcgaaccacacggccctgtcgacccctcgctcccacgaccctctcgaccccaacctccgacgaacgacccgagcaaacaacgagacccacgagcgaacaacgagacccactccaatcgaccccatcgacggacgccctctcgacccaatcgacctaagtgaacaacgagacccactcgaatcccaccaaccccaatcgcagcaatccaggttagttttttggaatttttctttgaatttctcctttaaaatgcatacatttgtggttgattctggtattgaattgaaagttgctattttgtatgttatttgggataaattgtgcaataaaactgtgggaagaatatgggtttcgagcaatagctgttttctgggtttttagattattgtgcgattttatgcgatttcatgtgggattttgtgcgacataatacgagtgtgcattggttctgggtttttagataattgtacgattttatgcgattttgtgcgacgtaatgcgagtctgtataaggtattgtgtgagatagttttttatgcgattttagagcgacattttgacaatttctggcgatataatgtgagttagtgaagtttttttggagttgggattttgat

SEQ ID NO: 338260 - DNA, 447 bp, Cannabis indica
aaatttagattctgcacaaaattttaccaaaatttgaattttgtttcaatgaaaaataatttttgaatcaaaaaatatgaagaaaacaattttggtgcacagaggtatgcaatgcatacccctgcgcgcgcggaatgagaggagtggccgagagaggaggctgcgtgcagactctgatgatggaggaagctcggcgtgtgcaccccttcagacagggctgtgttcgagaattctcgatcagctcatgtctgaacatgcgtgctatccgagcgtctcccttggatctgcgcgcgcacacgattaagatattttcacccaaattcaaaaaatcataactaatccataaaacatccgaattgggttttgtaaaagcctaaattcattatgtttatgtctactttccagtaaaaatattttctgaacgaaaaaaaaaatatttttacaact

SEQ ID NO: 338261 - DNA, 684 bp, Cannabis indica
ctctgaatggacaagtttctctgtatttgttgttactttcgtcttgcctaagaagaagcctaagctgatctaatccaacggctcattggtgctgatctgtctccacgtactctgcttttgacgtttatctgtttgaactacacgcgcttgagtgtgtgaaaaacagcacgtagcgtctcagctcatccaacgactagtcgtcttcttgttttgtttaaactcgtatgttgttgattgtttgttttttaattattattatattactatttcatataataaattgtttttgatagaaaacaataataagtggacattccttcctttaagcaagtaaattttatgggaagtggatgcctagaatcaatgattgatgtgccatgttattattttcgttacctcattttatataataattattacatacaaaatataaattcactttatttacaaaaataatttcaaagacaatatttatatctcttatatgattttaattatcaaaatattacagtgacacttacacaattagacgatggttgcaagatagttactacgtggttgatgcgtgattgcaccaggaccgtcttaaacattttggaggcactgttctaatttaaaatttgggcccttacaaaaaaaatataatttataaataatatttttaaatattatcattcagttata

SEQ ID NO: 338262 - DNA, 759 bp, Cannabis indica
tgaaccacttaatggttcggcccaagaatcaaaggcagccaagagaaactttctctctccaatcaacaacttatcaccctttgatgtgcaattgcttcggtcaaagcaagagtcaaacaatgactctacttttccaatcaatgaccggcccaccaagctccagcccaacaagaaatcaacccaaatgatataaccctaataatctaatataaaaggtatgttttctaaccctaaatcactcctacggcagccacaacataattcaaaaactttcaaactttttcctctcttcctcactacagcacacaaagcattctagggttctaaagttattcaagcttcttccttttatattttaatggcagctagggtttactctactcttcttcttttatttcttttcttcttttttctagccgcacctagagttagggttttctagtgttttgatttctttgttctcttctacaatggcagcaatgaaatatgattcttaaaggttttatttttcttcaagcttttctttttctcttcaaatgactgaaacgaaatggtaaggttttctatattttcttcttcttcttacagcaagcttgttctatggttttctagggttttgatttcttaaagcttcttcttttctattttaatggcagcaagagttttatgggttattctaatattttctttcctttctttgcagctacaacccgagacaaaaacaacccaaaaactcactcactcatggctttactcact

SEQ ID NO: 338263 - DNA, 566 bp, Cannabis indica
ttttttatttttttttttattaagtagttaaattaagcatagaaattcaaatttgtgatttcattattcgttattagatcaaaattcaatggtttgatatttttaaaattaatatttatagtaaattttctaattttacccattcatgggtaatacccattaagagtgcacccatatatacttagttgaaacttttgagttatagttattttaatagtcttgacaatggaatggtaattgaaatagctaggaatgtaatgtaatgtaatgagttatatagttttagttaaaaacttttaatacttagtaagaaacattcatgaactaaaattattaattaggtgtttggttaattgtaatgtaaaagaaatggtaataggaatactaatgtaatgtaataagaatatagagtaagtacaaattaattgaagtgctaaataatgtgtaattatataagtatgtagtcactagttatatatttattagtcacttgttactattctcacttaattttaatttaatttttttttaattgcatttaatattgtaggttgtggattgttatt

SEQ ID NO: 338264 - DNA, 1420 bp, Cannabis indica
agggaatatttcagagttcgggttcggattaacgtctcacttccattaaaacggagaatgaaactccgtcgacggggtaacgattcttttttctatgccaattttaaatatgagaaagtccctaccttttgcttcatctgcggagtgttaggacattccgagaaattctgcccgagactctacgacacgcctgctgatcggatagtcaagccgtacggcttattcatgaaagctgctagtaaacggcagaatttcctcactgcctcaccttggctgcgatcggggaagacgactaccacggcggcgaacgatgaacaaggagatgaagctgtcaaaattaatgtccctgctccatttgtggccgaatcagagcagtaccacaattcaagggattcgaatcccattagctccgaaaatgaaggctctgatgtgatattaatggaaagtgaattgagatatgcctctgatttagatattgttatatctgatggaaaaagaaaaaggcttgacacatcatcaattgggcttcttattcatgaaagtgggccagttggatcaagtggtctagtttctttgaaaaataccacaaatgctgaaagcatttcaaaaaacgaatcaaaggtgggtgctggtatccaggcccaccaatcattatgaataccctgagttggaattgccgtgggcttgggaacccacgggcccaacaattccttgctgacatttgtagtcaaaagaaacccaaatttttatttttgtgtgaaacactttgttctcaagaagtggtgggccgagtaaaggccaagttgggctttgattcttgttttgctgttgatccaattggaagatctggtgggcttgcttttttctggaaaataactgatgaagcacgattgattggctattctcagcaccatgtcgacttcgagatttctgttcctggtactatcgtttggcgtctcactgggttctacggtgagcctaaccgcagtcttcgagctcgaacttggactctcattcgtacacttctcaccgaatctccccttccttggtgcttaatcggtgacttcaacaacataacgaaccaagccgataaaagaggaggccgtgcatacccgactgctctcatcactggttttcagtcggttctctttgattgctccttgcacgatttagagcttcgtggttatccctatacttgggaaagaggccgtgagtctggtcatttggtggagattcgtttggacagagcattggtctcccaatcgtggcttgatgctttccatgaggtaacattgtcaaatctctctatttcctcttcagatcacactccaatttttctggaatttcatgattgttcctaccgcaacaatgtttatctctttcgttttgaaaactcttggtgccgtgaacctatgtgtgc

SEQ ID NO: 338265 - DNA, 1043 bp, Cannabis indica
catggattcaaaaatagattccataaaaaaaacaaagtctggaaatatgtagatgcacctgatgattatcatccaattgggtgtaaatgggtctacaagaagaaaagaggtgctaatgaagaagtcgaaactttttaaagctagacttgtcgcaaaaggttatacccaaagagtggactatgagaatacttttaggtcggttgccatgctcaaatccatcagatacttttctccatagttgccacttttgattacaaaatttggcaattggatgtcaagacaactttccttaacaaaattcttgaagaaaccatttatatggagcaaccagaaggttataagcttccagggcaggacgagaaagcttgtaaacttaataggtccatttatggacttaagcaagcttctcgcacttagagtaaaaggtttgaagaaataatcaaaacctaccactttcaccaaaataaagatgaaccttgtgcttaccaacacaaggataatcaagtggtagtattcctgaacctttatgttgatgacattttgattattggtaacaatatcaagaaaatgactaacattaaggaatggcttaacaatcaattcaaaatgaaagatttgggtgaagctgcttatgttcttggtattcaaatcatcagaaactggaagaacaaagaacttgctctctcacaagtagcttacattgataaggtgctagagagattctcaatgactaacactagaggggcaattagaaactggaagaacaaagcacttgctctctcacaatcagcttacattgataaggtgctagagagattctcaatgactaacactagaggggcaattaggccttctaggcttggtatccgtcaatctaaggaacagtgtcccactgatccccaaaagatagaggacgtgagaagggttccttatgcttcagcagttggaagtctaatgtatgatatgttgtgcactagaccaaaaatttgttatacagtaggaattgtgaatagctatcaaacaaactcaggagaggaacattg

SEQ ID NO: 338266 - DNA, 605 bp, Cannabis indica
atcatatgggctgagattgttccatacggtaaaaaaaaattaaaaaaaaaagttttttagcaggaaaaataagaaaagaaaaagttgagtttgagttaaatatttttgtatgaagatatttttgatatagtgtaaaaatagaaatttttttgatattttttttttaattaagtagttaaattaagcatagaaattcaaatttgtgatttcattattcgttattagatcaaaattcgatggtttgatatttttaaaattaatatttatagttaaatttatttagtaaccatccatgagtaatacccattaagaagtgttccatatatatatatatgaaagcaataattgtatattaatgtattgggtaaataacgctataagtacctaaagttttaagtttgtaagcggcatagaaccaatatttatttttagcagtatattaacacagagtttgtactaatgaaattagaaaaaaaattacaattttataaatattgggtacttatgccgcgaaaaataaacattaagtttataccccttacaaacctcaaactttaagtacttatgtcactacatttttcttaataaataaaatatagatacac

SEQ ID NO: 338267 - DNA, 824 bp, Cannabis indica
aaatgtaaatttgagtttgaataatatcttccaatctaacttctcgattttttttttgtccgcttttgaagcattattagattttaatatcctatttaaatttaaaatatgaattttttatatgtattatttgttaatttttttttttcaattaacaaatatgttgtaaaatcaaaaacgataaacaagtattaattaagacattttatttgatgaatgagttttaggaaggaagacatggatgtctttactagcgacgccgttttggaaagaagggttagcctgaacaatcaatggggtcggaattggatccggatccggatccggagccttcgagttgacggtgagggtgggcatggctggctggtttgatggaggaatgagaagaaatatgatttaagtgtataattaaattaaacacttttaattactaacctaattaagttttggaattatatatattattatttcttttcttatataataatttatgtgtgttatttgaataatttgtgatcctaacattacaatcattcaattttaggagtgttcgcggttggtgcggtttttgattatttttttcaaactaacctgcacatgcgattttttcaattttccaaactgcacccgcactgcgaaacaaaaaaaccgcaaaaattgcactgcaaaaaatggtgtggtgcggtgtatagtttttgtagtttatgcggtttaaactatcaccgaataattaaactatcacaaatacaataaagcttgaacaacacttgtcaaaaataccataaggcttgaaaataaaatatgaaagaaaaaatttaagtttc

SEQ ID NO: 338268 - DNA, 1190 bp, Cannabis indica
atcatgagcctttatatgtcactttacacgtgtgggctaggtcctacacgtgtgggtcatattataaagtctaaaattgatttcttaattttttcacaaataagatttattatttattttttcaataaataataaatgattaattttcattaatctcttattttaataggattaaaataaatattatttacactaaaataatatatttttctctttaatattatttaagaataatattatatttaagtaattaatatgattttatcaaataaaattaaatagttaaatactatttaattacacaattcatgatttttacaattattcaaaataataatttttacaaattactatttttcccttgagagttatttctcatagaaattaattctcactcaaattttctcatcaaattaaaattctcctatacagtgttgtataaaggtgacttagggaccatagacctatattttgaagctttaatacacttgactattattaatctcatctatataataatctggtttattattttcattattactccactataaatatgaaattgcactctttgacaatataaaattatatttatagaatgcttactagtagtccattgatataatcaatataagtagttcaccatctaattattagttcataattagaattgttcaaaattaccgttttacagttataattatctcttaattccttatgcaccatcaattcaacgtgaacagttaatttataatttaattatagatttggatctaagtgttagcactcccaaaattattaacactataatggaactaatattcaatcctttcggaaagcttggattctattattgtataatatgttcccgtctactcaaattattaagctcctaaaatataagttatcagaatcatcttctttgagaaactttaacaagtgaaataaagaactcaacaaatacaaatatgagttcatgtatacttaggattcagactggtctattgatgaccatcgttgtgatatgaataactctttcatgataaacgacatgttgatgaaagatattattacatcttagtccagtcatgtataatcaaattatacacaatatctttactacatgtctatccacatatgtgatccaaatcaaaatcacacacactagagtatagtgtatagcaaaccat

SEQ ID NO: 338269 - DNA, 853 bp, Cannabis indica
catccgatcgcagtacatgtattcgcagaacctacttcactatatggatgaacatttaagatattcaaactccactaagcatgtatgcattgataattaattataataacaaaaagttagtgaatgtatatacctatagcacattaaaatcccatcaataccaaaatatgtcaaacctcaaaaattagcttacaacctacaatataatgcaatatacaactaatttaaaattttaattattaaattacttactagttattaaaaaatgtaacaagttactagttactaaattctatagataatttttttaaaaaataacatatacatacataatcaattatatatcccactaacataattttaaaactttatttctaaactaattaaatccctactacctcattctcattcacaacaaatatatatacaatacaattacacaaaatacacaaatagtatgtacacaatatatatacacacaatatatgtaaacacatattcaaaaataaaacacaaaatatgtacatatatattatatatcaagttaataaatatttaccttataaatgcaatccggcgacaaattacaataaaaatccagctcctatagcacacacacaacataatattaataaaatagaaaaatccaaaaaaaaataaattacaaaaacaaaaatatagcaatgtacattaataaaatgaatagaaattatatttatactttaatagacgttgagattcaatgttttctctgctaaaatcggttatcggagttatactagtacatttttttataataggttcggttatagggatagaggggaaaaaaatcaaacttttttacagtataggt

SEQ ID NO: 338270 - DNA, 774 bp, Cannabis indica
ctcaaaataataataaacttttctcgtttcaaacttgaaccttatagtgtgggatcacaaaatttgtaactctttaattactagagtatacagtaaagtatagttccttactatttttggagtccatatttgtaacgccctaactattaggcacactacccaagatacttaagtaaccctaatctcctaaacgggattactaataaaattagcgcagaaattaaaatttaattacaaattgaagaaaagtaaacttgtaataatttagtgcatgtttggcataataactaaaaaactaatttttgttttttgaaaacaatttggcttgtttggccttgttttttgaaaacagttttcagaaaacaaaggtacaaaaaacaagaattttaaaccaattcacttttggtaaatattgtttttaaaaaatactaaccaaacgtgacttgtgttttaaaaacttcaaaaactattttttgttctcatttctaaaaacaattttttgaaaacaaaaaacagaaaacaataccaaacatgctcttaaactttataaactaaaagtttcatgtatcgggatcccaaaaatattttacaaaataatattacaagttcattttcactagccgacctaggcggcaaaacagagtcacaaaaatacatcactggcagacctcaacccgcctggtctagtgtggcccgaagatgtacatgcaccgtccagctcctacactcatggctgatcaaaaatagctttactctttcctgcacagtagagca

SEQ ID NO: 338271 - DNA, 580 bp, Cannabis indica
tttaataatgttagggttgttacgatatctttcaggttgtccttccagattggaactcaactcaaattcttccttaaacattagtgttagccactcaatctcttcctttgtacggttatatgaatcctttgattttgatgcatagaaagtcaagttataagttagtgaactgagggatccaaacctagccatctcataaatgtgttgttgttgttgttgtgctggctggttaaaatgtaggtggagatttgtttttgcaaattttctccatcacttcatgagaagagtattaggtattcttctcatgtttaatcttttcattgtagcccatacatgtctacaagggtacccttgactttcatatagcatgcagctacagtgtagtgctcgttggccttcacagtaatgaactttgtaatggacttcgggatgttgaaactttccaatggtgaatatatgccactctcattcctcctcctgacctaggacaaaataattattctctaaatcaagctactcagcaaccttatggtacatatttcttgtgtagaattcaacacattggttatagtacgtggtc

SEQ ID NO: 338272 - DNA, 652 bp, Cannabis indica
tagggcataaaacccaacagcgagtgtactagaaggtgtacttgaagcgatctagtaagaataattgcgagcctgctaagctcggggtaggtggtgtgggtatgaatcttccactaccagaagaccgagagtaaatgcatgctatgaattaagagattacttgagtaataaggtagtagaacctgtatggttaatcccgggcagcatagtgatggagaatgacactaggctgaaccgattggcaaagttttgttaaaattcagcggctactaaggccgctaggaaggctttaaggtggaacagttatattgttcagaatgtagatattacgactaaataactaggatttttctagttttatgctcaggtagttgagctaacccttaatgttgagggtacaaggattagatcacaagggaaataatgtgaagagagtgattcatgaaagtaaatgtccagtgtttgatttgctaaaggatgttaactctaatgatctggactaaaagaaaaatccattggttacgggtcttagtaagagaatggttggttgttttagttgagttaaattgaggtgatttgaggtaatgttaaggattggatcgactggtaaaatatagtacaaatgtcgattaggaaggaaagatggtaactt

SEQ ID NO: 338273 - DNA, 539 bp, Cannabis indica
tcagaactaaggtaagaaaagtggtaagcatcaaaggtggttaaatatttatggttgaatggtagtggccttgattattatcaagactttgattaaacatttgttgagcctaggttatgacctgagctaagattgagttggttgtggggtagttggctaatattaccctgcaatctactcttttacagcgaatcaaagaagcggaaatgcaagatccaaagttggtaaaaactcgagatagggttttggctgggaaagctagtgatttttcagtgttagagacgagaatgttgcgattcaggaatcgtgtttgtgtacctatggatgatggtattaaaagagagattatggatgagtctcatacgactccttactcagttcatccagtgtaaacaaagatgtatcaagacttaaaagtcatgttttggtggccaagcatgaagaatgacattgctgagtatgttgctaagtgtcttacctacaaactaataaaggctgaacatcagaggcctgcatggttattgcagccattgaacata

SEQ ID NO: 338274 - DNA, 611 bp, Cannabis indica
ggcataaaacccaacaaaaatagataccaataaagttcttgcacatagtgtcacaataccttatttgggtgggagaattttaaaattctaagcccatctttattttgatgaaacttgtgataggaactttagaattcaactgagaaagtaaatctaaccattcatatgaatataaataacttatcagaattttgaggataagatacgagaatttttgcagtgtctattcaaatgactttggcgaaattcctaatcctcgtgaaatgttttatggtatctctaatgattacttaatcttaagcaactattttacattaacattaatactagattcctgtgttgatgacttagtctagaaggaacttacagtttcagactaagatagtatgtcacaacaagatatccctaagaaacaatagtaagaggttcaatatacttctatgtacgaatttaactagactcttactgctgagtgggaaccatctaagatataatcaaacaaggaacattaggagaccatcaaggaagatctatgatagtgacctatatgttagtgttggaattattttaccaggatctagatttactaccaagtatgtttcattaacatc

SEQ ID NO: 338275 - DNA, 554 bp, Cannabis indica
caacattataaactataatatttagatacacataataataatgtcacctaataactaataatatatttttttttaatttttaattgtatcactttcaactaacataaaaaagattagcataaaatttaatatacgtgccttgcacgcaactttttgctagtatatttatatatataaatggtgtactttagtgtccctataacttattcaatcttctacaaacgtattcttgaagcaagagggtaaaatatttttatataagaagacacatttactcatttagggattcaaaagaaagcaaagaggttgagtgactttgacgtgcagtccgaaacccactataaaaataaagctaaaagtgaatccgatatgaactcatattctcttatttcaaaatatatatgtttaactttgtactagaagtatatctcaaataaataaataaataattaaaaaaaacacttcgtactaaaagttaaaatactcaagggacaaataaacttttcaaagcctatttgtaacaccctaactaccttaggcgtattacgtgattt

SEQ ID NO: 338276 - DNA, 704 bp, Cannabis indica
ctagggtgcacttctaggtctcggccccaattctgtgtcccgagtctggatccatgttttggtcaaggtttagaaccgagtctaggtcatgattaggattcaggtccgggtcccaattcagatgtaggtctgggtgggaaactgggtcctggtccggttacagtttcaggtctaggtccaggtcgaagtcctggttccggtccccttcctaggtctgagtctacttctgatttttgctccaatttcaggtcacagggtatggctttggatcaaggtttgggtttgagaatgagttcaggtccgggtctgggtttgcatcttggtctgggttagggtttggggctgggtcccagatccagacaccgactacggattcgatccacgcctcgggtcctgatccggaccccgatctcgcgtgctggtctggttccatttttggtgccgggtcacgagctgggtcctaggttcaagtccaggtcttgcgtcaagtcttgagtcccagtcctaattctactgcccaggtccctatcccgattctagttccaggtcgcgattctagtctaggtttgtgtcccggtgtaagttcggttttgggtcctaatcgcggttcgagtttggatcctagtcgcagttcgagtttggatctcagtcttgttttttatttgggtttgtgttcgagtgtgggtcttggtcctggtcctggt

SEQ ID NO: 338277 - DNA, 1759 bp, Cannabis indica
gtttttccattgctcataatcttcttctttaagtagttagtaatctgccattcttttcaattttcgagcaattatcaattctgcctcgctatagcagtacaatctgccttcagcaaacttaaaaatactttaatgatttaagcactttgtatatttttaatttgttcatatgaatagttatattatctattcattttctaggttcaagtacttttatcaaggcatcgtgatgcctcgtttagtactttcctatctcgcgagaaccgttagtattcagttttttaagcgagttataactttcaattttcctttcccgtcagataggttttaaatcaaaaattatagttgtttgatcccttctttgtaaaaaaaggtttgatcaagatgttataacaatttgatccctctttcgtcaaaaaggtgttgtcagggagttataaaagttcgactccacttttgtcaaagaggtttagtcgagaacctttgaatttcaaaaggatttttgaaatggcgggtttacattataccatgtatttctagatgaatttcgattaatcatagataaatggcctttaagtaattgttaaagaataaaactttgtaattacttaatataaacgattctctttactcataactgaagtataaagtttacatgagtaatgcgagttatatcatttatttattggtagtagggttgcaaatgttccacgttccagtaattctttattagagagccatcaaatcgagccaatttataaactccaactccaactactgcttcgatgacatatggaccctcccaatttgggttgaacactcctgtggatgcatctctcgtatttgcaatgactcgtcttagcaccaagtctccaacattgaatagtctttttttgacttttttgttgatttatcttgtaactcggtgttgatatgttgcgttggtgatttgcgactcagttcatttttccttaagtagatccaaggacaattttaaaagttcctagttttcttcttgattataaaactctcttctgtgagtcgatatgttcacttcaacaggtagcatttctttcgagccaaattctagcgagaaaggagtgtgtcccgtggctgtcttctcggtagttatgtaggcctagagtacctgaggtagctcgtcaacccatctgcctttggcagcgtctagcttcttcttgatagtatcttttaaggttttattaacggcttccacttgtctatttgcctaaggcctggatactgacaagaagcttttgataattttattcctctcgcagaatttcttctagagttatgccttttatcaagaagtcagccaaggcttggcccttgatggatgtccgaggatggtatgttatgtcgaactgccctagtttaatcgaccattttatcaatcttccaaaagcatctggtttcgataaaacttttctcaagggctaatcggttatcacttttatggggtgggcctggaagtatggccgtagctttctagacacttggaataggcacaatgcgtgtttttttagagggcgatatctggattttgcccttagtaacctttactgacatagtagataggttgctggtgcttgccctcttctcgcactatagctgcactaatcgcatcttctgtgatggacaaatagagaaacaacgtctctccagttattggtttcgctaaaattgaaggcattgctagatgcctttttatgttctaaaaggcctcttcgaactcttt

SEQ ID NO: 338278 - DNA, 813 bp, Cannabis indica
ctaaaccataatgttcaaaattcgatgagagatacgctaaaacacttatcggggatttaaaatacaaactaagcttaaccctatcgataaataggacgccaataccctaaattacgcaaaaacgggaaaaactagggctcgggaaaaagccccaaccggaaccctagatcctgggtaccaaccggtcgaccggttgctagaggcttcctagaaccggtcgaccggttcatagctggaaacctcaaaaccgatccccacatcacaattcaatcccaaactttgcaataacttccagaatacctgcatacaccacactaaaccaatcccaaccaacagaactcatcaaatcaaacaaaatctcaatccaccattagagagctaggtttgagttttcaaactcaatccttgccaaaaccttgatataatccacaaagataactcaaaacaatttaaactattaccaacaagctctagaactacagttagagtgataattatacacacagcaccaaaaatcccaaaattcaagcttaaaacctaacttatgcttactaaatcaaaataggaaagctaggaatcattaccttaagttgaatcttctttttaggttttacaacactataatttccagcagcaaaattccttcttgctggttctttggggtgcacgacaaagagagaaagagagagatgctttctcttaaggttttctaagttccttctcctttaagcaaagtgaaatgaatttcttttctctctttttttttaaaaaaaaaactataccctcataatcagctatacacaattccaaata

SEQ ID NO: 338279 - DNA, 601 bp, Cannabis indica
atgatggctcttacaaagaaaaccacgcgtctggctgacgcaactgatcctcaagtggcttagcttgccattttgcccagagccgaataggatccgaccgtccagatggaggaggatcgcgaaggggccgctgaggtctaggagatcgaggagctggatgatgtgcgtcctggcattccctccgaggcggaggaagaggaagaggtcgaactcccaaattacggggggtacaacaaggttggggagccagctgatgctgacaaagacgtcttggttgagggcgtggactacgtcagtgaggagcttgctgcagcggttcctcataaaaggtagggtgcctcgggcgccaggtgggtaagtcctctgtccaagattatagaggcgcgccttcgaactcttgaccagggcggatacctgggcgagctggactgctacattcccacccacaataatcgtgccacaaaacctgacaaggggatgtgcgcctggtcgggagcccatggtcagcaaggagcgttgatgcccttgcaaagtacttcaaggatgtggcagacttcttcggtctctgcccggcctagtttactcctaagggcattaagta

SEQ ID NO: 338280 - DNA, 564 bp, Cannabis indica
gggcacaaaacccaacagtttttcctttaccctttctagttcagccaaagagttctcaattctcttatgtggcttagccatggcaaagaattccaccagcgactccgtcttgcttgtaagtccttccaaaaatcagttcttggaaagagacctgtaattaacatacacaccaacgaagactagggggccttctccactttggttacttcagaattaaaacatttaaaataatcatgtaaggactcaccgacttcctgttttatgttagccagagttgtataaggcagtttgtacgtgatcgtggcttagaagtgtgtcaagaatagatctacaaaagtctcctaagttgatatagatgcttcaggtaattgggtgaacaaatcatgagcattatcctccaaggttgccgcaaggatgcgacacttcgctagctgaggtacctggtctgctttcgagtccaaaggaaaagatgataagggcagcgatgatgaatgcactaatagttagaagaaggtagataattagacaatgtaactaggttttagttactttgtatgttttatt

SEQ ID NO: 338281 - DNA, 513 bp, Cannabis indica
gtttctgagtctgtttaaacttatgggggttagatataacggctgtttggattggatattattagtgaagtatattgagtttaatttccatttgagagtgtaattttgagaaaatggatgaattattgtaaattagtgcttgggatacattgtatttatggtattgatctgctctgggaagtttgggcaggtttggagtagatttgtgtggtttttgggtgaaaactagtctttcacgtttctgctagcagagaaaccagttaactagttttactggtgctgtaaaacccgtaaaccggttatgtcagcagaggaaaattcaagttttagcctcgaaaccgatttttccttgggatgtctctaagaacttaagatagggtaatttggtgatgtttgagttagcttgatctaggaggggataggatttgtccgattacgagaattaaggattatccccgaaaattggattaaggtttttattgagttttggttgtcgtgaaataggaccgggat

SEQ ID NO: 338282 - DNA, 789 bp, Cannabis indica
aaataatttccaacagtttgatccgggggaaaatagggtgtgttcgattgtgagaattagagtcgattatcagaaatttgattaaggttttaattgagttttggttgttgtgacatagcaccgggatcgtctaacttgttttccactcaagtcggcccgtacacttgagttcagaactaaggtaagaaaagtggtaagcaccgtatgtggttaaatattaatggttaaatggttatggccttgattattatcaagactttgattagatatttgttgagcctaggttatgacctagggttggaaacggttaataccgttacgagtaattactcttgaaaccgcggttaggtttcttacttatcatttgcttcatcgggcaacgatagtgacatatacagctcgtggttaacgagtggtaaaggggtactttataaagtaccaagattgtgtgtttatgatattatgtaatgtgtaaacatgatgacatgagattaaattgttgatcatttttcagttattgttttgttcacttttcttgttgagtctctgtgactcacgggtgctttatggtgcaggtaaggggaaagcaaatgttaagcagccatgagttcgagttcgtagcagcaatgtacatatcagcctcagtgtatcggcccagtaatcaggatgctctattttgaaagtattttgggagtacaaagtttatattgtaaaagtactaataaactagtttgtaatattttgaaaacagggggtccccatagttctcattacttatcttctgctata

SEQ ID NO: 338283 - DNA, 1309 bp, Cannabis indica
gcatggtacctcgcctttcactacagaagtgcgacaggctcaacttccaaaagggtttcgtctatccgaatccctcaaatataaaggtacttctaacccgatagattatcttgaaaaatttaatactataatggaagtggatcaggtaccgcagctcgcaaagtgccgcattcttgcggcaacactcgaggaaaatgcccatgattggttcacccaattacccgaggcatcgatatcgacgtgggaaaccttcgtcgacttattcctcacacatttccaggccacaatgacgtataggccaccttatacgactttggccaacatcaaacaagaacctggtgagtctttacaagactattttaaacgctttaatgcagaagtaacaaaggtcgagaaggctcccgagtcttcgcttgtttgcatgctgataacaggtatcttgccgaggaccgacttttggaaggagctacaggctcgaaggcccgaatccttagttgaattcttcgccatggccgaacctcacaaaagaatcgagaattctctagcggagttagagaaggggaaggacaagcgccggtcacccataccgcggtcacgatctcgcagtccacgagggaagaactccaggggccgaagcccaagaagacgcagcccgcgaagacagcgaagtccgaagttggccaagtctcctccaaagaaggaatcctcgccgaaaaggaaaggtggacctcgcttcgtcaactatactgaactcgcagtccctcgagaccatatctacgcaatcgaggaaagaaaagtcttcaagaagccgccccccatcaggggaaatcgcgacaggaggaccctaaaaaattctgtaagtaccacaaggatattggtcacactaccttagaatgttgggtcttgcaggatgaaatcgaggagctaatccggagagggaaatttgacaagtataagaagagcgaggaaagtcgtccccaagcagatgacaaaggagaaaaccagaatgcgagtggctctagaacacctcgtaacatcctaactataattggaggacctcatatcgcaggggactctcgcaagtcacaagagcgatatgctagagaagccgcttaccaatctgaataaccttagtgagcggcccgagaagctgtttaagaaacaatgcgacgacatcacctttatggagagtgatgcgagatgggtccatcacccgcatttcgatggactagtgatagtcgccaatatcggcggggataatgtccatcgcatacttgtcgacaatgggagttcagtgaatctgctgaat

SEQ ID NO: 338284 - DNA, 528 bp, Cannabis indica
attcttacacccgacttttgcccagaaaaaccttctaaggctctcttgctgacaaacgtccggaggggccctctttccagcggttaggggaaccccaatcccttttttgacttagggtttggtatggggcctgactgctggaattttaaatctttttcagaaccaaaatgtctacatccagttccaaatcttccaagaagggaggaaagcgcctggccaccctgcaagaggtgatgagaggtctcgttgcccaggaggggtttaagcctcgtgccacggggtgggaagctgccgagcttcactctaccctaatttgccctcatcagctggagcacattgtggtggtggccggcatcaagcctgcgactttcgggacgtaccaccggccgccccgcgacgcggagacgcccaatcacaattacgggggcttcggagcttggagccaaacacatttgatgaccagggctatgcttccccttcaggattattttattaatttccttgtatttgtcggccttgcgccatacc

SEQ ID NO: 338285 - DNA, 889 bp, Cannabis indica
atacccagctaaacccagaaagcatctaacttcagtagctgattctggtgtcggccaatcccaaacagcttcaattctggccagatccaccatgatcccatctttatctacaatatgccccaagaataagacacaagataaccagaattcacactttttaaacttagcataaagcttatgatcccgcaattattgcaaaactgctctgagatgcaactcatgctcttcattatctgattcagattacaccaagatgtcatcgataaacacgatcacacatctattcaggtaatcctggaacgtccgattcatataatctatatcaaatatactacgtagccttggcccatcatttatcctgatggtgattcttgcatttcggacattcaaaatatgacttgaaagaggatccgtgaccttgacggccacctcaatttccccgatgctttctattaccccctgatactctgaaagcctcaaccttccgtttgtaatcagggctaccactgtcggttcccttactgacgttaccactagtaggcggattcgatgccgtgacggcatcctttgcggtttactcttttactacatattgctcagcctcctcagcatttaaggctagctctatcactatcttgtacaaagtgtcttgtgaagtggtaaccttcaagtcccaactaattgtggcattcaatcctctcttcatcctctgctcggcctttaatatgtcaatacctccgagaaaagtcgaaggttgcagcttcacgaaccgttcaaataccgagtcttgatgcggcataacaaacccttggttacccaccactagcacaggtgctggtggtaacacttgatcaataggaccagccagttgccttaatcgtcgcactct

SEQ ID NO: 338286 - DNA, 712 bp, Cannabis indica
tcaagctcgaagaaaccattcaatcagcagaaggttaacagaagcttggcaagtcgaaggctccttccattgggacatccgcccaacttcccaaatattccaataattcaagctcaagtggcaagcgttcaagcaacaaccacaagcaaggaaacgagaagaaaggaaagttcactgataaatccagacagactccccgagagaatcatgccaaacacactgcattcactattctgactgaagatatagaaagtgtatatatggcaactcagtcgttaatcccgtacaagaggcccgggcccatgaagaaagataccaacaaaaggggcatgatgaagttttgtcagttccacggagagtacgaccacaacactaacgaatgttacaatctgaagcggtaaattgaatttataataaagaaaaacaatccgcacttgcagaagtatgtcaagaccaaccaaggtcagaacaaccaagatttgctaccgccaccagtagatggacacttacaagtcattattggaggcccacacattgctgtagattcgggtaaagctcgggagaggtatgtccggacagcacagcacgagcaagaagaagtcatcctggtcgtggaagaaaggaaacccaaagttccacgagcagaagagccaaccataactttcaacgttgaagacgctgtcaaaattagatttccgcacaacgaaccgct

SEQ ID NO: 338287 - DNA, 1774 bp, Cannabis indica
atataatctggacttaacagattttgtacacattaaaatataaacatgaaaactacatgtaaacatatatgacttttaatcttttattgataacaaatcagattagatgtaaataggttttatttagggcataaaatcctaacaccttatcctttctatctaggatctgaagtggttgttcttcgtatgaaaagtccagttgtagctcaagattttcataacttagtacatcagcagggtctgaaatgtatttttgtagcatagaaacatggaatacgttgtgaactactgagaaagctggaggcaaagctaaacgatatgccacttgtccaaccttcttgagaatcgtaaaagggcctgtaaatctatggcatgatttacctcttttcctaaaacgtttgatccccttcattggagacatctgtaggaacacatgatcccctactcaaaactctacattcctgcgtttcagatctgcataactcttttgcctactttgagaggcaagcagtctgcctttaatcttctcgattgcttcatttgtctgttgtatagattccagacctaagtatttcttctccattgtctcatcccagtgaatgggagatctacattttctgccatataacaattcatagggagccatccctattgtactttgataactgatattatacgagaactctatcaacggtaagtacttattccaggagccctcgaaatccataacacaggctcgtaacatatttccagtatctaaattgtcctttcagattgtccatcagtctgaggatggaaacctgtactgaattttagtttggtacccatagcccgctgtaaactctgccggaatttagaagtaaactttggatctctatccaaaactatagactttgttactccatgtaatcttactatctccttgacttacaaatttgcatattgatccactgtaaaggttgtcttaaatggtagaaaatgtgcagactttgtgaatcgatctaccacaacctaaattgaatcaaataaacccctgtttctaggtaatccaaccacaaagtgcatggtgatatcttcccacttccactcaggtagtgttaaaggatgcaacaaacctaccggtctctgatttcagccttgatctgctgacaggttaggcatcgcgatacgaattctactacattcttcttcattccgctccaccagaattagggtttaagatcttgatacatcttggtggtgtcaggatctaaggagtatggagtggtatgagcctcttcaagaatttcatttctaagttccgcactatttggaacacaaaccctggtcttaaacaacaacatcccactttctcacactgtaaaatctcttgcttgaccagctgaaatctcttccctgatcttcgctaattctggataagttaactgagtagctttaatttgttctaacagatcagactgcagcgtcaagctatgaagtttacctacaacaaactcgatgcttgatctgaccatgtcctctgctaaccaaggtgaaatctaaatcatattggttacttgtctgggacctttcctgctcagggcatcgaccactacattggctttgcctggatggtataggatctcactgtgacagtcagtagtcccgtgatccgtaaggggaaataccgggtaagctgtacaatctcacactgcctggggaaggtcaagtgggatgattctaagactgtgtaggtatgggactacacagttgaatagagcttaaatggattgat

SEQ ID NO: 338288 - DNA, 1540 bp, Cannabis indica
catggtttacgattaactgtgaatcactatgatagatgacatttttgactttcaaggcctctgctatctttaagccggcaatcacggcttcacacttagactcgttattagatgtgtcaaattggaacctcagagcatagtgaaacttaaagccttctagcgatattaatatcacccctgcacccgaaccgtgctcgttggatggaccatccacatataacttcgaggttttcacatctcgcttatcagatgggatttcttcttgggttataccttctatcaataagtcagctaaatcttgacccttgatggatgtttgaggatggtatgttatgtcgaacggccccagttcaattgaccactttatcaatcttccagaagcatcttgttttgataaaacttgtctcaagggatgatcggttagcacttttatggggtgagcctgaaattatgttcgtagtttgcgagacgcgtggactaggcataacgcgagtttttctaaagggggatacctagattctgctcctagtaaccttttacttacgtagtaaataggcagctggtgcttaccctcttctcgcactatagctgcacgtagtcgcatcttccgagatatctagataaagaaataacgtctctcgtagggtttgttttcgccaaaactcggggcgtctctacagctgcactagtcgcattcttttgtccactcaaactttatgttgcctcgcagtatgttgaagaacggtacacacttatcagtttactttgaaatgaatctgttaagtgccgcaattcttcctgtcagggcctgtacttccttaggttttgtcagggatggcatatctattaatgccttgatcttcttaggatttgcctcaatgcccatcgcgttaactatgaatcccaaaaaaatttctaaggagactccaaaggaacattttctcgggtttagcttcatgttatactttttcaatattttaaagcattccgcgaggtctgaggtatgattcttactctttgttgatttaaccaacatatcgtccatgtaaactgtaacgccctaaataattaggcatgctaccaaagatacttacaaaccctaatcccctaaatgggattactaataaaattagcacgaaatttaaactttaatcataaatggaatgaaaataaaacttgtaataatttaaactctacaatctaaaagttacagaagttgggatcccaaaaaatatttacaaaatattattacaagtccttttctttcagctggcctaagcggaaaaatagagtttcaaaaatacaaaactggtagaccccaacccgcttggtctgatatggcccagacatgtacattcttcgtccagctcctgcactcatggttgatcagcaatagtcttaccctttcctacacagtataggacacgtgagccaagcccagaaagacagtataaaatatcaataacatgtttgtcatactatataaacaataaatgccaaatctcatatgcatgtatgtcacagacctgcatgttacgct

SEQ ID NO: 338289 - DNA, 1013 bp, Cannabis indica
tgaattgcaatcaactacactttgtataacacatgaagttgaagatatcctttttttttatatacattaactaaatttacttttaaataaaatttaattcaaatatacctcttttcataagtattgtatctaaattatcctcacacactcacataattatgacataatctcaaatataatagatttttgttctttgtagatggatgtgtagatttgtgggaaagttgaggtaaaattttgattagagaagaatgaaaattatcgtgaagtaataagggtaaaattagtagaataattgaaaaaagaggtaaacataatagattttaaaagagatggtaaaaattaatagcatcaaattaaaagaggcatgtaatgtaatttccttctaacatcaaatggcgccgctacaatgtcgtcacaaaccttcgaagtcacacattcatccttcttcagaaattgagcaaaatcatggactatagcatgcattttgcaatgtgttatttatttgttctctttttttttttctttaacacttaatttggtcaaggagcatttgtaactagaaacaagggataagtttttagagtactttttttttgtatccattaattaaaaatgcttttattttatattttattaaaatgtacccagttttataagtgggttacccaatatactcttactctccacttaagtctagcacataatttttattaacttatggagtataatgagaacatcatttataaaaatgggtatatcttaaaaaatataaaaataaaggtaaaaattaaaatatataaaataaaatgggtatacaattaggggtgttcataaaacagccgatccaatcaaatctccacgatccaatccaatccaatccgcaaaatgcggatatccgcacttgtgcggattggattggattggaaaattcaaaatccgtacttgtgcggattggatgttgattgacatgtaaaagcaaccgattcaatatccaatccacacatatttat

SEQ ID NO: 338290 - DNA, 790 bp, Cannabis indica
gttagcaagcgcatgataagagcggagacacggtacccagtgattgaaaaactagttttctgcctcctaatggcctcaagaaagttgagaccttacttccaagctcacccaatcaaagtattaaccaaccacccgctccggcaagtcctacaaaagccagaggcgtctggaagactcctcaaatgggcaatgaagctaagccaatttgacctacactacattccgcgcatttccataaaagggtaggtgttagcagactttatcacggagtgccatgaagctgaagctatcgcaaacatacccacaccactggtcccagcgtggaaagtattcgtggatggcacctccaacgagaacggatctggagcgggggtcgcaatgatatctctgaacggacttcgaccccaagcagccctacggtttgaattctcagcttctaacaacgaagctgaatacgaagccctaataacagggctgagattgtcaaaaactatgggggctaagagagtagaagtctacagcgattcgcaactggtagtaaaccaggtgtcgggagaataccaaacgtgcgaggaaaagatggccgcatatgtagcaatagtccgggagctactccacgagttcacggactataaagtggaaagaatccccagggagaaaagcgctcatgctgagtgcctagctaagttagcttcaaacagtgagattgaaaaactgggagtggtacctgtggaacgcctggcggagccaagcatcaaagtaaaaaaaaaccatagcaacagttgagcaa

SEQ ID NO: 338291 - DNA, 434 bp, Cannabis indica
ttgtatctatatccttcatcttcaagcgcacccaacaatatgaggttttgtctaagctccgggatctgccttacattcgtcagcaccttgattctaccatcatactgtttgatggcaaccttcccgattctaatgaccctataataatgatcatttcccattagaacattacctccatcaactgatctataatcaaaaaatgattctcaacttggacagatgtgataagtgcatctggaattgagaatacactccctattcattaaagattttgagatggagaacaattctccatttgtggagcagtcgtcactatcattcgcgattgtagtagaatccttctcatggtgatgatgttagttgtcctatctatctccattgtgagatttgttgaagcctttttgctccttgtacttcttgcaaaatctttgcaa

SEQ ID NO: 338292 - DNA, 762 bp, Cannabis indica
tatataattattggtattttaaataaagtgcacacacgtggcgtccctgttggacagggcgttacaatagtattgcctacacaatgaaaaataataatgattatatgcttcaaagtatttagtcccatgatttatcagtgcactggatttatactacgtgataatcagcaataaagtttacttacacaatgatatgtggaatgtcctttccaagacattagcaaagtatactagtattggatgtattggctatacatcggactagaccgatattgacagtggaaaagatatcataaacttaacattatgtcttttttaagttaatgtcacttagttgatcttagatcaaaagatcttaatcttgagatgattaggttctgactttaatatattatatatgttctttgacttgttcgttaaagctaaccaaatagatcgacccaatacttacatcctggaaacatagtagtgcaattgtgagggagcgataatcatagatatggaatctataacctctataactatttagaagtgaaacgatgatttctttagagcttgccttagcagacataaatggaagagctcttatttcaataattatattagtttactgaaatatcatttataagaagctaagtattttaaggataaaatacattgaagggtagaacggtaaatctgtccctactcgatgtaaattatctatagaggatctttgattatttagagtgaaataataaataatttatagtgtatctattc

SEQ ID NO: 338293 - DNA, 744 bp, Cannabis indica
gccacctgggaagcacagtactcaagctacatgtctttggtatcgctcacgtaatcaaaattcacctgagggttagccttccaaaagtcatagaaaatctcgggaccgactctctctaaggcattcacattccctttgagcctctctacttcaccgttaagctcgtcctccttggacttcttctctgcttccaacctgcagaaaacagttcaaagaacctccctttcttcttggaggtcgatcacttctttggacaaggaggtcatggcagcctcaagttggtcagaagcctctaaaaccttggttagctcggattaaagaaggattaaaggaaactgtcaagaaagactcaccctcgtaaactccttcaggactcctcccatgaacagctctagagaaggctcgttgtcagcttcggccagctactcattcacctcagggaccgatcgattcatgtagtgggtgagcatctccttgcctctcttggtctttgaatgcagtgatggaggtggggtaggagcccggatctgctcagattcgcttttggccagctcgtattcgcccttcgacaattcggacctgtttgagcttccccctcaagagactttggacttagcagctctcggggtagaagggtccacaattgttagctcctcagaaagatcgataacaacttcagctggtgccttctccctggacggtgttgtctcaccgcccctagacttcttggccggaggagatgag

SEQ ID NO: 338294 - DNA, 1125 bp, Cannabis indica
tgtggtattggtgcttaactcgctggggttgttgattacaggggtactagtaatggaccctccgcaatcatctagaccacagggcgagcaagtagagcccgaggctactcgaaccgatccactggcaccgcctccacctccgcagaatttgggggataatgcgggggctggtaatgctaatcctcctgctgactggcagcaaatgtttcaagaaatgcggagtgttatacttcgtcaagaagaagagttgcaacgtttaaggcaacatgttgccccagttgatcaagggttaccaccaaaaactgtgcttgtggtgggtaaccaagggtatgttatgccgcaccgggactctttgtttgagtgatttgtgaagctgcaacctctgaattttctgggaggtatgatattattaaggccgaccagtggatgagcactattacccgtatcctcgataatatgggggtgacgggaactgaaagggtgaattgtgcgaccttcatgtttcaagaccatgcccgcgtctggtgggacatagtgggtcagacccgagatgtcagtgtgatgacatgggaagaattcaagaaactttttgaggaaaagttttataatgttgctgtgaggacttcacatcaggaagattttgtgaagttgactcagggaaagatgtctgtggccgagtatactttggagtttgatcggttgtcaaaatttgctggtgatctggtgcctacagatttcaccagaaaatagaagtatgttcgaggactgaatgctacaatcagtcgggacttgaaaattaccacatcacatgacactctgtataagagagtggtagacttggccttaattgctgaggaggccgagcagcaagtaatgaaagagcaggctgcaaaggatgccgtcacgacatcaaatcctcctgctagtggtaatatcagtaaggggaccgacagtggcaaccctgagcacaaacggaaggctgaggcttcaggagcatcagggggaaatagaaagtttccggaaacagaggtggccgtcagggtcgcgggtcctcattccgatcacatcccgaatgtcctaaatacaagaaacacaatcttggtgagtgtcgagccaaggcatgtt

SEQ ID NO: 338295 - DNA, 467 bp, Cannabis indica
atttactgctttaggtaaaagagctaattactgagcgctttgccttgattacatacaatagggagattgggataattgactgcttcagcaggattaatagtttgattgaaaattgaacattatattctttgatagaaattaggaatgattgttgagatggagaataacttttaactagtctctcatattgtagttcactttaatttttattatcgctatttttattctaattatcaaaaaccccctctttttttctttaattcttgttactgaattgtgaataattaataatatagtctcgtgggatcgacccttacttacgattatactaaataattggaggtattggaattaaatattaataaatttgttgcggtttatgacacgcatcaatattaattcaattaaattgttattataaatttataatatataatttgaactaaaaaaattaaatattaattttt

SEQ ID NO: 338296 - DNA, 1250 bp, Cannabis indica
atataataaaaatagaaccggttctgaataaaaataaataacacaaaataacacaaaccgttataattaaaatataaccgattctgtagcataatgaataaaaacaaataacacaacataacttaaaccagttataataaaatagaaccggttctataatagtgttataatgaataaaaaccaataacataaaataactcagaaccggttataactaaaatagaaccggttatataacataatgaatacaaacaaataatacacaataattcaaaccgattacaattaaaaaataaaagagaaatcagttcctaaaacactgaaacataaattaaaaataaaactaattctacaataaaaaacctcataacacataatacctcataaaactgattataattttttcaaaaaaaatggagatcaatttcgaaagatattgaggcataaatgtaaaaagaactagttcaatgacaaaataaataaacacaaataataacacacaataactcaaatataatataaagaaactgtttctatttatcaactagttaaaaatttaagacaaaaaaactagttctatatagcaactaagataaaaactcacacacaaaaaccaattatataaaatagcttaaacaaaaacatacattcaacatgctccaacccaccaaataattacacacataccatatctacctcaaaaatactcattcattatgtctatataaccgattctattttagttataaccggtttcagttatttcgtgttatttgtttttattcattataacattgttataaaaccggttctaatttaattataattaatttgagttattttgttttatttgtttttattctttatgttacagaaccggttatatttcaattataaccggtttgagttattttgtgtaatttattttcattcattatgttatagaaccggttctaatttaattataattagtttgagttattttgttttatttatttttattctttgtgttacagaaccagttatatttcaattataactgatactattctggtgattttttcagtaatttttctagcgacggtgactttttctgacgacggtgacttttccaaggccgatgacttttttggcgccgatgatttttccagcgcctacaacttttctagtaaaacttattattgtttacaaatatgagatttctatcttttttttacaaaaatatgacataaaaaaacctatataaatgt

SEQ ID NO: 338297 - DNA, 954 bp, Cannabis indica
tcaagtgggcagtggagttgggcaatacgaaattactttccaaccccgaacagcaatcaaaggcaaagccttagcagacttgtggtagaatgcacatgcaagaaagaaagcataccgaaaagcaaccccgagccggtacaaacacctcagccaagtaacaatgaagataagccgacctagaaactacatgtagatgggtcggctacaaatatgctatctggtgcaggaatgtcccttgtcatgcatggggggcaacacctacacgctgcagtcaagtttggattcaaagcatataataacgaggctgagtataaagctctaattgttggattaaaattagcccaggatatgaaagtcgaacagattgaaatctgcagtgattcacaactggtggtaaatcacgtatccagataatacgaggcttggggagaaaagatgatagtatatctgagcaaaatacatgatctgctcacacttcaaaagctacggtctcaaacaatttcgaaggaagaaaacacaactgcagacgcgttagctcgattgacaagcagcaatgtaagtgacaaggcgaacttggttcctattcagttcctcgaagagcctagcatcactggcacggaagaaatcaaaatgattgatacttccccaaaagggatgacaccaaatagcagcctacctcgactctgggaaactcccagataatcgaaatgaagcccaaaaaatgagaaggaaagctgcatgatatattattgtagagggaattatgtacagaagaggattctcaatgccattcctcagatgtgttactcaagaagaagcttcacgactcctatctgaagtgcacgatggattttgtggaaatcatgccgccgagcaaagcttatctaagaaaattctaaggcaaggttatttctggccaacgatgattgaagattcagaagcctatgttaagaa

SEQ ID NO: 338298 - DNA, 669 bp, Cannabis indica
agagtgcaattccaagttctatgcgtggatgcaacaaggaattaataagtcagtggatttacttggtaaattcttgatctgcttattggaagctcggttatataggcccatggtccccatactagttgagaccatactgcttgtaagactcagttaattgattttaattaatcaattataattctaaaattagactatgtctagtttatgaattttcactaagcaagggcaaaattgtgaagaaaagagattctaggttttatttgttaattaagagactttatatgtctaattaataaatatattaaatgacaatattatttaataattaatttttagttattaaataattggaattggcatttaagtggttaaattggaaaattggcgtttttgagaaaatgggatggaaaaatgacaaaatggcaaaattgcaaagtggggcccattatcctatacatggccggccactatgcatttaatttaccatttatttttttattattttaatgccaaataaatctaacctaaacctaggtggttacctataaatagatagtgatggctcacattcaaacttaactctgtcagatgaaattcactttcagaaaaattgagcctctttctattgcttaggccgaaacctttgttcctcttttcttcttcaat

SEQ ID NO: 338299 - DNA, 618 bp, Cannabis indica
ttgccgcttaggtcggctagtaagaaagaacttgtaataagttgtaaatatttttgggatcccaactattttgaaaagtttaaatatattacaagttttattttcagtctgtttaatataaaagtttaaattctgcgctatttcaattagtaatcccgactaggggattagggttcataaacagttttggggtagcgtgcctaattatttagggcgtttcactaacatttttgtatgatatttcttacattttttgatatctatttgtctagagatgacttatctagagtactaaactattaattaagagaaattatagtaaatgacctcaaattataaaattatgaaaaatgacaagcttgagcccccttttatacacgaagttcagtgataagaaagccaaagattgagaaatctaacggctgggaatcgtgcagaatatgaataggcaattcataatgatcttcgaaactgtacaaccgccagaatcaagggaggcgtcctttccaagaaaggatttcggcaaaaatgcctttcgtaattattaaaaagctctttttactaaaacaaactttttaaggggcaattgttatacccaaaatttggctggaggacacg

SEQ ID NO: 338300 - DNA, 890 bp, Cannabis indica
agaggattctcaatgccattcccagattgttactcaagaagaagcttcacgactcctatctgaagtgcacgatggattttgtggaaatcatgccgccgagcaaagcttatctaagaaaattctaaggcaaggttatttctggccaacgatgattgaagattcagaagcctatgttaagaaatgtgacaaattctagagattttaaaagatacctcgagctccacctaacgagttgactcagatgcaaagtcaatgcccctttgccatttggggaattgacctgattagacaattacccaagggcaaggagtgcaatacacagtggtagcggttgattacttcactaagtggacagaagccaaaacactcgcaaccattacatcaaagaaagttcaagactttattgtgaagcacataatctgctggttcggactgccgtacaagatagtttcaaacaatggcaagcagttcgacagctaatccttcactgacttttgtgcgaaccatggtatcatcaaacgtttctcaatagtggtccatcctcaagcgaatggtcaagttgaagcaattaataagaccttgaaggatacactgaagaaaaaactcgaagatgccaaaagaaaatggcgagaagagcttcttgaagttctatggtcatatcagacaactgagaaaacgacaaccagacagacaccattcgctatggcatagggatatgaagctatgctgcctgtagaacttgagccaccatcccacagaagattgatgtacaaccaagataccaatcacctactcctagctgaatcactcgatgaaatcgaagaaagacgagccactacaaacctgaagttgatggcccatcaaaaaaaagtagctcgatatttcaataa

SEQ ID NO: 338301 - DNA, 791 bp, Cannabis indica
ttcttctacttggaatctcttgcatacccaggctgctaactctactttgccatggtatgtgatgggtgatctaaataatgttctctcacatgatgataaaaaagggggtaatagatatcctgaatttttaattcaaggttttcagcaagctttggcagatagtggtcttcaagatatggagttatgtggctatccttttacctgggagcgaggaaggggtatcaatcattggattgaagtccgattggatagggggttagttaatctagcttggttgaatatgttctcatctgctaaacttcacaatcttgaaatatctacttcggatcatgccctgattcttatggagctggttcctattgttggctaccattttgctaaacggtatcggtttgagaatgcgtggttaagggagcctctttgctttcaacttattaaggacagttgggagctttgtgggaatgatgaggttacgaataaagtgagtttttgtggacaatagttacgtgtgtggggaaaggagttcacgagcaacttcaaagatagaattaaaaagtgtcgagatgaggtgcaaagatggaagttgggtcgagatgatgtctcagttgcaaattataaacaagcgaagaagaacttatccgaagcttatattcaacgggaggtattttggcgtcgaagatcaaagcaattatggttgcaagaaggggacaataatagcaagttttttcatgcttcaactactaatagaagacgaaataattttgttacaaagcttaaggatcaatctggtg

SEQ ID NO: 338302 - DNA, 550 bp, Cannabis indica
gttaagtcagcaattgttaactgtaataaaaaagatgagaataaatgatcgaactaagttgccacctatctttactacagaaataagtatgtagttttagagagaatgagagagtgaacgataagaagtattgagataactgacattgatcatcctctctttgtgacttagagtagctcttataggcatccatagaaagacgttactcatgactgctcgcctcccttgtgaagagctccactcccacttaattaggagatcgttatttttgtggttagtttgactgatcactttagaaattgttagatgagtgataagactcagtctcgtatacgggtcagatcattgtgagcacaatgttggctaatgggtaatgccttacttgcctgtattattttgggtctattgggcttggtattgtgattgtaccgtcataactagttaaatagtccaatccaatcttgtttgagcattctttgaaaacatcgcatatgacattgagcctgagcccaattttggcctctacagtttgtccctactctttaagttg

SEQ ID NO: 338303 - DNA, 627 bp, Cannabis indica
aaataatttccaacatccccaactagaattctggttcagtggggtttcctggggaccaaccggtcgactggttcctacaggtccccctaaaccggttgaccggttaagtgcaggaaacacaaaaaaaaaccctacaacctcaaattgaccccaaaccttccggacctgcttaatgtaccataatgaacataaaccaagcaaccaaacatctcaacaaactgaaaacataaggttaccattaaagactaaagtttgtctaacaactcaaactttatctatcaagcaaatcaagccacaaacgaacgtcaattcagctcaattaacctaattttaacctcagaatatagtctcaaacaacatgaatcactacagaacctaactcgtagaaaaattataaaacacctcacttgaaacttaagaaaaataacaagagatgagctagaacattaccttaagtttgaaatcactaaaagcttgctagaaatccttgaattaagccaaaaaatcccaaccctagctgaaactagggaccacgagagaaagagaaagattttagggaccctggataaaatgaataaatcttatggttttctaatttaattaaaacaatattcagattattaaaac

SEQ ID NO: 338304 - DNA, 606 bp, Cannabis indica
agtactcagccagtattgactgtgagaggaagatggtaatcttccaaccagagggtgaagaaccgtttttctttgtcggttcggtttaggggtctcagatcccaataatttcagtgttaacaactagggaatggttacgagcggaatgtcttgggtttttttagccgtggtattggataccactcggcttgactctgttcggctagaagacatcaaggtgattcgggaatttctaaatgtttttcctgacaaacttttgggtttaccaactcagagagaaattgattttgttattggcttggcacctagagtagaacacgtttctaaggctccttacaggatggctctagcagaacttaaaaattgaaaattcaactccaggggttgcttgacatagggtttacctgacccggcgtgtcacgctggggagctccagtactgtttgttaagaagaaagatggatctttgcggatgtgcattgactactcggaattgaataagttaacaatcaagaataaatatcttgtacctaggatcgacgatctttttgatcaacttcaggggaaaactgtcttttcaaagattgatctccgatcgggctatcat

SEQ ID NO: 338305 - DNA, 640 bp, Cannabis indica
actctttttcgcaggttggaagaaaagaaaaaagccaaggaggaggagcttagagccgaggttgagaagtataaatcagaggccgagcagcagaaatcttaaatggagaggctctgagggaaagtgaattccctagagacagctggtctcgagattttttatgacttctggaaggccaatccccgggcaaacttagattacttgggcgattccaaagacatgtttctcgagtactacactgctcaggcggcctatggggaatctgaggcaaccacttccacctctccaactaaccaaagtgttaaagtgcccccgctaagacaaatgatcctccagctccagctgacccagttgacccgtacaaagagcctaggactccaactgtttgaatgctttcttattctatctctttttttatctatttagccataaggccttttttaagacaaagtgaccgaccaagtagtctttaaacttggaatttatttttcatttttcaaacaactagctgaccggacagcctttaatcctaggtttgcatgcttttgttatctttaatgaatttcattctctttttataatcatcatgcaattgtgtttgttttattttttaccaaatgctttgtacaggtataggtgc

SEQ ID NO: 338306 - DNA, 1211 bp, Cannabis indica
aaagtcagaatgcaattacagtcaagccacatggatgaatacaatcaaaatctcatattcctagacctagattttctacagttatcctatagtaagttcaagattatcaaattttctacaatggaaacccagaaaatcaaatattcaaacatcaaggagaaaatagatgaagagcttactcactgttcgaagctttagagatgttcggatgacacagatcgacactttctaaaaattctttgaaggatttaagaggaaaattgttcttgctctgaaatcgtcaagaaagaaaatgctaaaagtggtttattagaactttctgccctacttataagcaaaatagtgaggaagtgtattcattttgaaatttaaatgccttggtttccccccaaaagtaaacgttgggtaatcaagtacctgaagagcaatcgtaaaaaacgtgaaattttttggaggatttcgaggtacaaatcaatcagcattaatgagccaaattttaaagagactcttggttagaatcacattggatcaccaatacacgcatcgaacacgtgccacccattcagacacagattcaaaccgagtgaagtctacgcgcaactttggaagtcctgtgcagacttgggggaaaatgttatcccattttttgcactatgatgtggcagaatgtactagtgacacgtgtctgtcattctttacacttggctaaagaaatgttccaaacaaacttcaagcaacacatctgcacgcacaaagtttgcttgaccgaacagagtaaagggtagataattcgagcaaagagtgaagttagttctctgagtcatgtatcaagacttaactacttcagatttgatatcgtgaagcccaagcacaaaggcaatccctacaatcatgtgattgtatcaaagggatacgacaggctgttctaatcccccacttcatgtattctaaatatgtaatgtatgttcttaccaattatagagattataagcaaaagggaaacctttcctcatgcatttagccctataaatagtgatctagcttcactgaaaaggggaccaaaagaattgctttagagagagatctaagagaaaacactcaaaaatttcattttgagagctttgagagaggaaacattgtgttctttgttctcaagtcaataaaatctaaggggagtaggttattatcgaactaaaggggccgaacctctt

SEQ ID NO: 338307 - DNA, 1256 bp, Cannabis indica
caccggaggtccagaacccatccgggaccgacctaaataatctcctaagttggagaaataataatcctttgcatgatccccccaccgggtcgagggcatcctaaacctaaggagacttcatcaaaccctacaggcctaaggctagcatattcgcgaacaggagggacgtaatgtattgttaaaggggacttaccagagctggaagtgctggcgtcaggagcccccgtatttggcacctggacggtaggccttggcctgcgagccctcttctcaaccgggctcccaatgcgaaggggtctccaggcagccgtctggctcctcctctcaactgggctccaacgcgaagggctcccagcagcagcctgggccttagtgtaagccttctcatgggccttccggtagaggtactctcggtacttctcttccgcggtggcaataatcttatcccggaaggtcttctccgcgaccggaaccctcacgttcgggcagataaccttggaaaggttgggtcctccaccgactggtgccccacgatcagcttggccttccggcaattctccgtcgtgaccaacaccccaacgtcgagatcctgcctatcataagttgcgaaggtcttggccctctgaaggaagagctgagtaggcgcggtccgctcgtacgaagggatcctaacccactccgtaagaagctccgggtgctccacagctcagaacccggaggagaagaagaagcgatggcgatactccttgacgtgtttttgctggttaaaagggaccacgccctcattcaaaggatgggcccggaagccgtaaaagccgtccttaagtttgtcccccttcttggggacagaaatgagttcataaaagtacaaaatctctgccggactgggagagccccatccctgggcagagtaaaaaataaataagcctgaaagcagggggtaagcttgtggaataagttggtatggcgcaaggccgacaaatacaaggaaattaatgaaatagtcctgaaggggaagcatagccccggtcatcaaatgcgtctggctccaagctccgaagcctccgtaattgtgattgggcgtctccgcatcacggggtggccggtggtacgtcccgaaagtcgcaggtttgatgccggccaccaccactatgttctagagttggtgaggctcggctgcttcccatcccgtagcacgaggtttatacccctcctgggcaacgggacccaccataacctcttctaaggtggccaag

SEQ ID NO: 338308 - DNA, 705 bp, Cannabis indica
caaatccagcctatactcggtactctagtcgtaccgatgtggtagcagttaatccatactatctgatagcctagcatatatctggtgcagtctcggtgcaactctatgtacacctcactgttgccctgatatgctaatctgacggctatataaaatttgcctaacatatatctaatatgttaatctgatggcaactaacatgtacgctaaacatgtataagcatatgcatgacattatactaatcttacctcgattccgaattcaggtgtgccggtcaacctgagtggaacaatctgctcggcgaattacaggctcctaaatcataataatcacaacactgttaagtgacacgctaaatcacttcccggggacttaaactcgaaactagaagtttccctatcgataaacaacatggcaataccctaaataacacaaaaatgggaaaaactagggttcccaaatttgcccccaaccggtagaccggttcctcaaccgaaattccggttctgggaggaaatcctggaagccaaccggaattccagttcagtgcaggaaacactaaaaattccatatcacaaccaattcaatcccaaaccacaccaaactttccaaacctgcttattagaccccaaagatcatttccaaagcaataaaacaaagcttcatgcgcaaatacaaaaattgccattgatgagtcaagcttg

SEQ ID NO: 338309 - DNA, 683 bp, Cannabis indica
ttaaacattgtcatctattagaatattaataatttcgtattatactttttcaagctagataataatttaactaataataatttctacaaccgaaaatacacttgccaagttttcaaaaaaataatattcttactgttgctctacatcgaaaatttggaaacatcgaaatgagctagtatggtctgataagtcccctactgttgtgagtgttgctcacttagctcaagctttactcgcagattagactcggactcaagattcaacatttaattctacgactgcattccttactgatgtcgatgatgcttaaacttgggccaaaccagctgaaaacaccttaaagattaatgtagatgctgccatttttcaagaactgcattttatagctttgcagggggtgattagggatgaaactggcgcatttgtggaagcttttacctgctgtcgatcaggggtgttgcaacccgaaatggtggaagctttgggtgttaaggaggcactgagttgggttaaacggaaagattgaaggaaggttgtcattgaaactgataatcttactgtggtgtaagctttacgtagctctattcctgtggtttcatactttgggagtattatttctgattgtaagatgttgttaaatgacttgcaagatgtttatgccaattttattagacgttttgcaa

SEQ ID NO: 338310 - DNA, 930 bp, Cannabis indica
ctatatgtttaataatttctgaataattgaaccatgttattttctgttattaatgtagtttaaatttcgaatcttcattgttggtctaactaagcttgttgttttaatgggacaaatccctaatagattgtcatcaattagacaatctaatatgctccctaacatgctttaataatcatttaaaatactaaacacgtacaggcttactgacccgtgaaccgagctttctctgatgaagattgtacatgtcttggcaagcttcggtagataaacctggtggctccgataccaaaattgtaacgccctaatgctgaagcacgctacaatgctttttcaataaaagtgctatccttgctaattaaagatttttctcaaaaaaacgtgtcaaattaaaactttttataataaatactgaacttataatttacaaaactgtttacaagtaccgggatcccgtttttaaacttttatacaaagtataccaaaatacatatccggtcgcacaacgactacaaaaataaaatccctagatgtcccgagactaaacactccaggtcacgctgcgacgacatgtacaatcccatcctagccaggctcactcttgttcagctttagcctttcctttacctacacatggaagtagaactgtgagtcgacagactcagtaagaaaatcatataagatatcatataataccgacttgtatctaggcgcccatacacctatttacaaggctcaacagatgagtaagaatgttctactaaggataggaccacgtaccacgtaccacatgcactcagtataccttcgtagtagtgtaggtagggtatggaccgcaccttgagtactgttaagtgttggaccacagacaccttataccttcctgtacaagtgctagtaacaccacgatgtggttgcaaacatcataaa

SEQ ID NO: 338311 - DNA, 682 bp, Cannabis indica
tcaaacacaactgaaacctactaaattgggttgaaaaaattccagcttggtgctggttcttgccaaatcgagaggaagatggagagagaagtagctttttcttaattccatctaacctaagctaatatatgtttctttctttctttctttcttttctttttttttttaaagaaaaaaattaattcactttatattcagcattacatcacttaggtaagacaaataaaatcctaccaaaagactcatttgcccttctaactaacataggtagctacaacttcccaagggtaaaattggtcaatttccaaaccccgaaaattccaacacatccaatattcaacaatgataccccgacaataaaaatctaaaacatataaaatgcgactctctaaaggcccaatgtcgctttccacagcttccaaatacaaatacaaaaattgagaaatttacataaaatagcataataaacatatatgaacttaaatatatttctataatatacatttataaataataattaaatctcattcataaatcctaattatttaataatcaaatgtgttaatcttaagcggtctttacatggtgggcgtgtaaagctgatgatcatgaatattccaaattgtggatatttgactagtcttgagaattgtttgtttcttgtgtatttatatatatatat

SEQ ID NO: 338312 - DNA, 1232 bp, Cannabis indica
gcagtacaattacttttcttacatcaagttccagtgcaggtatgttagcgacctacttggagtacgatcgatgatcctgggccctaagtcataacaataataaactaatgagtgtttatcccaaaacactgcttaccagttgcaaaggacaacttaagatttcctaccaaaccctgtagttcaaatacactaaaataaaacttatattttggctctaaaacatacaccatatggtaaagctcgttgcaagcttcgaaaaggtatatagatcatccaaaacagacacccgagtaaaaagttatggcaaaaatacgattcttataagttcccgaggttgcccgaaacagtaaaccaattggccagaaccggttgaccagtttctaaaccggttgactgaatttttagaggtaaaaatgtgattttctaagtttacgcactcaccgaaaatctaccgaaacctgtccaaaccacctaaaattttatagggcacatatataccatacttacacaatagaaactaaaatcgagcccttgattgggaaacgccactaatgttcgggcttaagctataaaaagttccaaactcaatttctaatccaaaatcacctcaattcagaaaacatcaggactagtcccatgactacccgagaacaatcctataaagtcagaactattataactattttaatttgcaaaacccctatacgaaactaattattttaaacttaaagcagaattaaaccttaccttaagcttaccctctagtagaatttgtaatcctgctacttccggagcttagatcgctaggttttaaattaaaaatcgaagaaaatagatataagaggagagaaaattttgacagaagacgggggtttcgttttcgttcattcttctatttataaacgtataatatatatataatcaaaacttatcagttttaagttttatataaaacaataatataacaatataataataataaaaattttattatttataattatcttatcatttcttagccactaaagaaatctatatttttaagtggcgtttggttggaggtaatgaaatggaatggaaaggaaaggaaacaatctccattctatttctttatttggtggcatattaaagtgttggaatgtcattctaatggaatggctttccaccattttggtggaatgacaattttattttgaaatggaaggaaagattattccaatgcatgatgagaa

SEQ ID NO: 338313 - DNA, 718 bp, Cannabis indica
tctaacccttgtgtcctttctattgcagagtattatcaagatctgagtctgaatgtccttctcttggattttgatccttcacaatcttccaaactatgattgaggtactgtttgctgtgtgtgggcactactctttcactatggtattttgaaattgtgattctctcttgaagaagaggagggtcggctatataaagaaaagggaaggctcaattttctgaaagagatagtttcctgaattactgaataattgcttaactaccttatatggtgtgagccatcactttctatttatagacagctgttaggtttaagttagtaattaagtggcattaaaataatgaaaataataattggaaaatgcatgcacaagtggccggcctaaggtgttaatgggcctcacatggatttacagttttcacaattttatttctattttcccaaaaatgccaattttctaattctaaccatttaaatagcaaaaataattatttaataactaaaatagattattaaataatattctcatttaatataattattaattagacatatataagggctcgtttggaacgacgtattaggtcgtattgtattgtattgtattatattgaattgtattttatgcaatatttttctgtaaaactatatgtggtattaacttttatggacacctaaatatataatattttagtataaattaaagtttaacatagta

SEQ ID NO: 338314 - DNA, 569 bp, Cannabis indica
gagataatattgtttgtaagacgcatgtaattggttttgattaatcaattataattctcaaattagactatgtctatttgggaaattttcactaagtaagggtgaaattgtaaagaaagagttattaggggcatatttgttaattatgatactttgtatggttcaattattaggggcgtgtttatttcatcgttttagaaagttcatatttagggtgttaataaacatacttgtgagtagatctaagatcctggtaaaataattccaaaagtatgttgcagagtttttcctaccacactctcaaaaacttcccaacaatggtatttcaaattgacaccacgaaagttcaactcgtggaaggcgttctcctcagaattccatgcgcaattctcttcttctcgccaactcccattacatttagaggacctggtcgaagtgaagaaaaggctaggagtacctctctgagcttatatcagcagattcatgacggaggcaacgaaagtggcacggttaattgaaaaagggaaattaagcgcaatactggggggcatcgaagttctcggagagct

SEQ ID NO: 338315 - DNA, 1202 bp, Cannabis indica
ccaaagaagtgcaaagcttaactagtaggatcggcgcgctcagcagattcgtttcaaaatcaacagacaagtgtgtcccattcttcaacatcctgcgaggaaacaagtaattcgagtggacagaagagtgtgaaaaagctttccaagagctaaaggcacaacttgcaaaacctcccgtactttcaaaacctttggacggtgaggaactgtgaatgtacctagttgtcacggaacatgctgtgagtgtcgtgctgatcagagaagaggacagcgtacaacacccagtctattacatcagtaaaagactcattgaggccgagagctgatattcgttgatagaaaaacttgcctactgcctcattcaagcaacaagaaagttgaggccttgtttccaagctcatcctgttcgggtacataccgaccaaccactacgacaaatactgcaaaagccagatgcttctggatggttactcaagttggcggtagagttgggtcagtacgaaatcactttccaaccccgaatagtaattaaaggccaagctctagcagactttgtggtagaatgcataggcaaaacagaaagcatactagaaagcaaccccgagccggtaccagcacctcagccaagtaacaatgaagaaaaaccgacctagaaactacatgtggatggatcggctatggatcaactatttggtgtagggattgcccttgtcacgcctggggggcaacacctcaacgctgcagtcaagttcggattcaaggcatctaacaaagaagccgagtatgaagctctaatcgctgggctaaagctagcccgagagatgaaggctgaacacattaaaatctgcagtgattcacagctggtggtaaatcatgtatccgtagaatacgaggctcggggaggaaagatgatagcatacctgaacaaaatacacgatttgctcgcacaattcaaaagctacggtctcagacaaattccaagagaagaaaatacaactgcagatgcgttagctcgattggcaagcagcaatgtaaatgacaaggcaaacttggttcctatccagttcctcgaagagcctagcatcactgacacggaagaaatcgaaatgatttatacatccccaaacttgaggacgccaatagcagcctacctcaactctggggaactcccagataaccgaaatgaagctcggaaaatgaga

SEQ ID NO: 338316 - DNA, 516 bp, Cannabis indica
cttctcggcagttaaaggagtacgagcagaggtaccttactcacaatctagaacttgcagcattggtatttgcgctaaagatttggcggcattacctatatggcgagaagtgtgagatttacactaatcatgaaagtcttaaatacttctttacccagaggcatctgaatatgagacagagacgctggctatagttggtgaaggattatgattgtgagatcctttatcaccctggtaaagccaatgtggttgctgatgccttaagcaaaaaggggcagagtcagataaatactgcgaaacaaatcttccaacagttagcaaatgagatgacccgagctaagattgaggttgttgtagggcagttagctaatattaccctgtaatctactcttttagagcgaattaaagaagtgcaaatgtaagatccagaattggtaaaaacatgagatagggtttcggctggaaaggctagtgatttctcagtggatgaaataggaatgttacggttcggaaatc

SEQ ID NO: 338317 - DNA, 682 bp, Cannabis indica
taacgtagttaaatttgtctttatagcggagattgtggtatattcatgcttaagataatggaaatgcacattgctgataagtgcaacgagtcagctataatgttgctcaacgacaacaacataaatacattcaggaaggcatatgcagttcaattatatgtgggtagtgcagatccttaattaaccatgtccttgttcataattctgaattttgtaattttgtggataaacttgaatttactctgaacgatcgcaaacgaccttgaatttatactatgcgaccatcatggtcttttatgttcttcaacaaactttaaagaacttgaatttactttgaacgaccataaacgaccttgaatttatactatacgaccatcatagtcttttatgttcttcaacaatctttaaagaacttaaatttgcatagaacgaccataaacgactttgaatttatactatgcgaccatcatggtcttttatgttcttcaacaaactttaaagaacttaaatttgctctgaacggccataaacaaccttgagattacactatgcgatcattatggtcttttatgttcttcaacaaactttaaagaacttgaatttgcatagaacgaccataaatgtaaagaccgcttagtttaatttgcaaattagcagttaatcacgtttaattatgaaatta

SEQ ID NO: 338318 - DNA, 950 bp, Cannabis indica
cactctatcactcaaggtttcgagaattgaagacgaaaagagagagagagagaggtcggctatagaaggatagatgatggctcaaatttttctgaaggcaaaaattctgattttcaatctcttaataagtgtgagccatcactatctatttataggtaaccactacgtttaggttaggaattattgggcattaaaataatgaaaatattaattggaaaaacccaaataagtggccggccaagagttagtgggccccactttggtattttgcaattttgacaattttcatttctatttgctcaaaaatgccaattttccaattctaaccatttaaatgccaaaaacccaaaattttgtaattctaatcagtgaaggactggctgtcaaactgtttgccattgttcgaaactatttcgtacggcaatccgaaccggaaaattatgttcttcacaacgaatacttgaacttttttggatgttatggttggcagtggttcggcttccatccacttagtgaagtaatcaaccgcaaccactgcatactgtactccacctttgcctttttggtaattgtccgatcaggtcaattccccaaatggcaaaaggccacagacttcgcatctgagttaacttgttgggcggagctctaggtgtcttcaaaaatctcttgcatttgtcacattttttaacataggcctttgagtcctcgatcattgtcggccagaaataaccttgccttagaattttcttagataaaatctgtctagcggcgtgatttccacaaaatccatcgtgtacttcagatagcagtcgtgcagattcttcttgggtaacgcatctgagcaacgacatggagaacccttgtttgtacataatgttggaaattattttaccaggatcatagatctactcacaagtatgttgattaacaccctaaacatgaacttctaa

SEQ ID NO: 338319 - DNA, 975 bp, Cannabis indica
gtgtacattgaccaacctttatgccaaatattgtaaaagtcggacgcttctggacggttactcaagtgtgcagtggagctgggtcagtacgaaattacctttcaaccccgaatagcaatcaaaggtcaggccctagaaaactttatggtagaatgcacaggcaaagaagaaagcatatcagaaggcaacccgagccagtacaaacacctcagccaagtaacagtgaagacaggccgacttggaaactacatgtggacaggtcggctacagatcaactatctggtgcaggaatcgcccttgtcacacctaggggcaacacctgcacgctgcagttaagtttggattcaaggcatccaataacgaagtcgaatatgaagccttgatcgctggcctaaaactagcccgggagatggaagtcgaaccactggcaaccattgcatctacaaagtaagactttgttgtgaagaacataatctacctgttcagattgccatacaatatagtttcggacaatggcaaacagtttgacagtcagtccttcactaatttttgtgcaaaccatggtatcatcaaaagtttctccgcagtggcgcatccccaagcaaatggtcaagttgaagcagtcaaaaaaaccctgaaggatacactaaagaaaagactcgaggatgctaaaggaaactggccggaagagcttcctgaagttctatggtcataccgaacaactgagaaaatggcaaccgaacagactccatttgccatggcatatggatattaagctatgctacccatagagctcgagccaccatcccacagaagattgacgtacaaccaagaagcaaatcacctactccttgctgaatcacttgatgaaatcgaagagaagcgagcaacagcaaactaaaagttgatagcccatcaacaaaacgtagctcggtatttcaacaaacaagtaaaggcaaggaaattctttgtggg

SEQ ID NO: 338320 - DNA, 749 bp, Cannabis indica
aatgatgacctcatcgtacccatttgctatatggggaattgacttgattggggagtcacccacagggcgaggaggagcaaagtacgcaatagtgacagtcaacttcttcacaaagtggacaggccgaacctctagttttcataacttgcaagaaggttctcgattttctcgtcaagaacataatttacagatttagaatacccattaaaatagtatcaaataatggaacttagtttgatggtgaattattcactgagttcttctcgtcagtttcaagacccccaagcgaatggacaagtaaaagttgttaataaaactttaagagatactatcaagaagaagttggatgttgcaaaagagagatgggtagattaactaccacaagtactttgggttcacagaacgacaaagaaaacagcaacagggcacgctccgttctcgttatcatttggctcagaagcaatgctgccagtaaaagttactattacgacttacagacgagatttctacaatcaagaagaaaactaagaactctttaaattatccttggatctacttgaagaaaggcgtactgaatcgcaaattactaatgcagcatatcaacatcaaattacgagacacttcaacaaaagagtgaagaaaaggctctttgatgttggagatttggtgttaagacgagtatttaaaaacactagagatgcatctgctagagtgttcaacccaaactgggaaggtccttatgttatcga

SEQ ID NO: 338321 - DNA, 872 bp, Cannabis indica
gtggcgcttatattggaaatatatttgtgagtaattagaaactaggatttgggttattaccctaatatgagcagtttatttgcctagggttattaccctagtgatatatatatatatatatgagtatgttaagattcagggttatgtgttcaaggcataaccaggttggacttggtaattagaaccgggatgaacctttctaaggccttattgtatttagacgtgtgagcgtaacacgtaggtctacgtcacttagacataaataggcatgtgagcgtaacatgcaggtctgtgtcatacatgcatattagaatggcattgctgtttatatagtgagataaacatattattgatattttatactgtcttgctgggcttggctctcgggtgctctactgtgcagaaaatggtaaagctgtttctaatcagccatgagtgtagaagttggacgaagaatgtacatgtttgggcaatactagaccaagcgggttggggtctactagtgatgtattttgtgacttgtaatagtgttttgtaaatatttttgagatcccgacttttttaacttttaatttgtaaagtttaaattattacaggtttattttcatttcgtttgttattaaagtttaatttcagcgctaatgtaattagtaatcccgtttaggggattagggtttcttaagtatcttgggtcgcgtgcctaattatttagagcgttacaattttgtatcagagcgccaaggtttttaaacttcctgtagactggccgaacatgtacattcatcgtcagagacaagctcgactcatggtgcagtaagtgttgagagtaaatactttattgtcatctgtttaccgctttccattttaggcag

SEQ ID NO: 338322 - DNA, 1515 bp, Cannabis indica
atatcaccaccctcccctcactcttgctctctgagatagagctcaaaagcttgctcgaatgctgggggaagaccagaatatcatccagttaacctccgaggataactttgtgaagtacgggctctatccaaaggccttcattcctaaaccagtgaaggggaggaagaggaaatctgatgttggacgggttgaacgagctcatccggagaatgagcggattcaactgaagcgcgaggctaagttgaagggatgtgcaagggccacggaatatgctcaggagcccttgaatcttgaagatgaggctgaggaagagcaggtgactccactcaagaggaggaagaaccttccggccccgcccaggcctattgaacatgcgatttccataagggagcccaactcacctgctcggccgtcccctcccgtgtttggaaaagggaaagctgttaagtctgaaataagagcgatgtcaggtgatgataaatttttgatccttacttgggcaataactttgcatgcaactatgtcttgtttttaagcttcttgactattatgcctcatgtttctgatatttgttttctctaaccatgttgtcttttgttccgtacagacgtgtctcgacagatgcttgacgctctgaagaagagaatgagcggaagctctagtgcctctcctccagccaagaagtctaaaggcgaggaggggtcctcttctaaggaaaagatgtctgctggggaggtcattgatcttttcgaggagctaacggctgcaaacccctctaccccaaaaggtgcttagtccaagggtctcagggaggaagctcagataggtctgaactaccgaagggtgggtctgagctggtcagaagtgaacccgaaaaggtgcgggcccctactccacctttgtcggtgcttccagaggccaagaagggcaaagagatgcttgcccactatatgaaccggctggttcctgaggttagtgaccaactggctggtgctgacaatgactcttcttaggagttgctgatgggcggagtcttgaaggaattcaccagggtaagtctttcttgacacttgcctttaattttctttacatagcgcaaatgctaaagttttttctttgtgctggtcggtctgaagttggcctactcttactcttgggctaagtctgctacttccaggaacacaactctgtccaacaccattagggcggaggtggacttggccaagaaggatgctaacgatgtcaaggcagaacttggagctgttcagatggagctgggtgaagccaacaagaagctctttaccgcacagaagaagatagctgagctgactaaggatcttgaggtttcgtaccgtcttgaagagaccatcgagaccttatctgctgaagtgaacagtcttcaagatgagaacacttctcttcgagcagttcttcatcgggtggaggaggagaagaaggtctaaggaggaggaggctttttggccgaggtgacgaagctgaaagagaaggttaatg

SEQ ID NO: 338323 - DNA, 1068 bp, Cannabis indica
aagaaggctggcttttataggccgaaacaggcgtgagacagctctgatcagccaccatcgaacggttaggatggcaatcgattcaaattctacagatccaacggtttgattaaaccctcatcaaggcggtagaaaacgtttgagtacccatctgacacccatttaatgcgccgtatcaataaatggacaagaaacgaatcgacgcctgcaaaaagaaataactgcagtaatggtgatcattaatatatcaccacgcgcccaaagcacatgccaggaagctgataaggcaaccggaggcatctaagcaagccttgttcactccatcaccaaacaaggcttgggggtaaatgttgcccctgattttgcccaaaatacgtggaccaatcggatgatgacacgtagatggaaagggcttggtgtttaaataaatcagctaagtctctttaactaaagggatcagctttagacatgcctcccggagaaggcatgtcagtctcacatgcttccggagagcaaggctacaacaaagcttctccgggaggtgtcagatcctatctgaacagtcatctcacatttaatgtcgcacgggaggaggcgtattgaaactgccatatgtcttaaagtctgacggcacaactcccactctggagctactatgctatgattaatgagcctagtgacggctactttatgaggactcacatcagtcaaaaaggataaaggtctacatccataaacccctacaaaacctagggattagaccatgcatttcctatgatatattcattgggaatgtgtggctctattgatagttgtagaaagacatgtacctcaattctagcgatcaccccacaaaaaccctataaataccccccaaactcattaaggcaagggtcgagaattctgggtttcataagaactagaagaggagaaatccaccaagaacattctctgtaataaatactatcataaatacatagactcgtggactaaggctcattaatgccctaaccacgtaaaaaatctctctcttaattctttatatctctcttaattattattattata

SEQ ID NO: 338324 - DNA, 1522 bp, Cannabis indica
gcagaaaacccaacagattgtacatgttgtgacgatcttcaaaagataacgtggcaggcagctgtgataccaaattgtaataccctaactattttaggcatgttagcatgatttttaacgtactgtgcacctcgttgctaaccaacaaggttatcaaaaattgtgattaattaaaactttacttatttaactaaaaacataaagtaacatataaataaaattctgggatcccgtttacaaaaacatttataaatgtttaactatgcatatacaatagtctgtcgcctagcaactatacagcaaaagccctgatgtcccaaagattgtacgctccaggcctaaccgccccgacatgtacaatctccatctactcgctctcacagcagctcagccttagccttgcccttacctacacatggaaataacaactgtgagtcaacaaactcagtaagaaaagcataacataaacatagcaatatcccaggctataatcaagcgcccacacacccaaccataaccctatccccgtgtcccacaagatactgagtctagaacgttcatacgacaatactatcgaccataatgtcagcctatactcaacatgtcagtcatactctagccatattgatgtgacagcatcgatcagtatttcagccaacatacatttatcagtaatcagtacaactctatgtatactattactgctatcaatgtactctaacaggcataaacaacatgtatgctaaacatgtaaatacatacgcataatattacactaatcttaccttgtttccaaattcaggtgtaccggtcaacctaagtggaaaatttcccaacaaatgacaggttcctaaatcacatcgatcacaacaaggataagtgacacgctaaatcacagctagggacttaggttttaaactaaaaatatacctactgaaagtcaacatggcaataccctaaactaatagagaattaaccaaccaaagctctgaaactaacacgaatcgacaacacgaaaagtccggggaacccagcactgatccagttaatctgtttttacaaggcccggtttacaccaaaaaaccccaaaaaattcgaaaccctaaccaaatcaactccaaagcttaccaaaccttccagacctgcatattataccccaatagatattacccaagtaacagaacaacataacattcttaatataaaaaaatcaccattaaagagcaaagcttgagttttaaaactcaaagcttgctcaaactacaaaaccagcacaaatcaacatatataaccttaatttaactttaaaaaaacacaattcaaacatcaacaacaactacaacagcaaaactcacaaaacatgcataatcccttaacttaaaacccaagaaatcaaagagaaaggcattaggaacttaccttgagcttgaaaacactaagatcttgctgaattttacttgaattattgaagaacactccaaaccctagctactctagggatttcgagagagagagagagaga

SEQ ID NO: 338325 - DNA, 538 bp, Cannabis indica
agaataggtttttttcttcagcgtttttttattttattttatcattttttggctataaaagaagttaacttcaatagttttggagaagcaattttgagggaaaatgagtactaattttagagacagaagtcaatactagatgcattctacagagggtttttagatttattttattctctatctttttctctttcttaaagttaatatgtgtgattttgcttccatgaacatgtgtagctaaacaattgattagagtctagatggatgttgtttgacattattttatggttttattatgatttatttttttccctaatttctatgtattctatttcattcgtgcctaattacttttaattgtctggccatcaattaactattttataattttgatgcgagatctgagaagtgagtgtcgattatgctatagtgaaatagaactaaattttgatataagacgagagtacctgtatagtttagatagcttatagggtttttgtgtttgatgtatgttgcatgttaaatttatcacgagagt

SEQ ID NO: 338326 - DNA, 1245 bp, Cannabis indica
atacttgtgagtagatctaagttcctggtaaaataacttcaaacagctcatacctagaataacatttttaagagctaaagatctgatgtgtagaggttgtctgggattcctagtcactgtagtggataccagccaatttgtgtcatatagacctgaagatacgagattggtgtgagaattccttgatgtatttcctgaagacctaccaagattaccaccttcctaagaaattgaatttgtgatagagttagttttgagagcggaaccagtatcaaaggcaccgtaccgaatggctccaatggaattgaaagaattaaagatccaactccaggagttacttaacataagaccaagttattccccttgtggtgctccagtgttgttcgtgaagaagaaagacgggtcactacgaatgtgtatcgattatcgggaattgaacaagcttactattaagaacaagtatcctctaccccgaattgacgacctatttgatcaactgaagggtaagacagtcttttcaaagatcgacctttgctcaggttaccatcaattgagaattcgagaagaagatatcccaaagactgcgttctgtactaaatatgaacattatgagtttctggtgatgtcattcagactcaccaatgccccagcgacatttatggatcatatgaattgggtattcaaagattatctggacaaatgtgtgatagtatttattgatgatattctgatttattctgagtcaaaagaggaacatgatttacttctcagatcagtattacaacggttacgggatcacatgttgtacgctaagttcaagaagtgcgagttctggttaccacgtgtctctttcctagggcacattgtggacaaagatgggatcatggttgatccggccaaattcgaagctgttcgagattggataacaccaaaaattggctattgaagttagaagctttttgggtttagctggttattatcgttggttctttaagggtttctcgaagactacaacacccctaatagaactgacctaaaagaatttgaagtttcttaggactgatcgatgtgagaaaagttttcaggagttaaagcagcgtttgattaccactcctgtattaactcttccttcagataaggaaaaattggttgtttattgtgatgccttgagacaagggtttgggttgtgttcttatgcaaactggaaaggtaataacttatgcttctcggcagttaaaggagtac

SEQ ID NO: 338327 - DNA, 1054 bp, Cannabis indica
tcctcgtacagaagttgaagcaggtcctggtcaattcggtgttctcttccccaaaactcaccatggttcatctacaaaagacaacacacgagatgagtgtttggtagggatatcgaaccataaacaagaaaatataccgaccaagagtactcaacagattaaaagaatgaaaatattcaaaaataagtcaaaaccccgaagtttgaaatttttgggttcaaggctaaatttcatgaagctttgaataagcaaggtgaaagacagacaatgtgtgatcaaaggccgacatcatgaacggtgaagtattacaaattattacaaagaaaatcgcaaagttttaaacctatattttctacctatcttctacagcaaagtcaagaacgcatgtatgaaacccagacattaaacatgcaaagtaaaagaggaagagattgaaaaattaatcaatgttcggtgtctgagttcagtccaaacgaagctgcttggatgcttttggtagaaatctcacgacagaattgaagtgaaaaccttttttgctctgagtttgcttaatggagaaattggtaaaagtgaatttgtgaatgatgctcaaccctatttataagccgaaaaatgaaaaaagggtaatcatttcaaatgcattagacgcatcggttccccccaaaaagcaaatattgggaatcaaatataatcaggtgtaaccgtcaaatgtggagagagaaagtagggtttcgaggcattaattgagtgagaacattaattagctgaaaattgaagggacgcctggttagcctgacattgaatcatgaaaagacgcgtctatcacgtgtcacccattcaaacgcaagagcagctcagatgaagtctacacacaacttcggaagtcccgtacagacttggggggcaaatggtatcccaatttttacactctgacgtgactttacacgatggtgacacgtggaatcaactttatgaacctgctcgcaagagatatgccaaacagagcacaacatatattcgctcggacgaagccttcttaactgggtagtgagca

SEQ ID NO: 338328 - DNA, 1549 bp, Cannabis indica
aatttggaaataaatcaatccatcccaaactggcaagagctctatccaaccggacctcaataaaattatcagtatccctacccttctcccaagtgaacggatgaccaactaactccaagtccactaaatcacaatcggcaactgcttgttgaaaaccttcaagaagcgaattaggatacggattcccacctcgcttatcaacttgactcagaacgttattcagatcaccaataatacaccaagggagagtcgattctgctttcaaagttcgcataagattccaagtgttccttcgaagagcccggtttggttccccataaatacccgtaagccgccaatcaaacaactcattgtgatgaacaatcaaatcaatatggttttgagagtaaccactaacctcagcgtcagattgctctttccacatcatagctaagccaccactcctaccttgcgcatccaccgagaacattccttcatacccaagttgagaagaaagtaactccaaccgaggtttcaagcttaaagtttcacaaagaaaaataaaagtgggtttcttttgataaaccatatctttaaggaattgaaccgtccctgggttcccaagcccatggcaattccagctcaatatactcataatgattggcgaacccgatcgaacgagtccgccattaaatcgttttttgagtgagttcccttgtcttggcccaaaattacatcactattctccactagcccattcggcccactaatgatgtcttggcccaatctttttcttttagtttcaagaaaaaccataccctcctcatcaatgtccaaatcagatgccacctcattaacacttttatttcctaaaataacttctccaacaacttcattattgtgcacgacacaatttcccacaaatcttgcatggctattaatcaaatccctattcccatgcatcaatattccttgacccaccattctaggaatcccaccttgctgcctatccccaaaatcatgggcattaaaatttttttctcttctcggctggaaatcaatgcccaggtcctgcttagccgtccccatctcacctccaccaccacctggccgccccacctccgactctccagaacccccaacaccaaacgacgacgcaccagaactcccaccaacaaccgtcgcaccaaactgcctagccccacctgacgccgatcggagccacttagctcccatggcgtattgagttcttcgcgggaccgccttcatgaaggaggcatacggtttgacgatagaagcgatgggttgaataaagagcctagaacaatattgatcggtgtggcctataataccacaaatgaaacaaaaagtcggcacaaattcatagcgaaaattaatccaaaaccactcaccaccagttagttgcagcttcatccgccgttttaatggcttctcgatatcgaaacgaacctgaaccctgagatattccctccaaaccccattgaaattgttctcatcggttttaacaaagcttccgatatagttctcagcatctaaaaccacccgttct

SEQ ID NO: 338329 - DNA, 533 bp, Cannabis indica
aggagagaaatgagagcttgaatgtcttcattcttagtcagattggccaacaatttatcagtgggagcagtgacattatgagcagcaggttccttatcagattgtttcttgttgccatagccaggggaaacccaataaggaagtaacatttatcctttaaatgccatggtttatggcaatttgagcaatagggtctcattttcttattgtgtccattattattgttgttagatgttgatgccgagggagtttgggcaagagcaacagatggattaggttcttggacatatgcaataagagaaatgtgaggattttttaagctttctctgtctttcttcatgaataatcatggaaaaaactttggatagagagggaaaaggctcaattaacagaatttgagcacgaacagggaagaaagattcattcaaaccagtaaggaattgcaagacttgttcttggttaaggaatgctaaattatctgcagatgcagaacaagtacaaggaattggtggtctgagttcttgaatctcatc

SEQ ID NO: 338330 - DNA, 552 bp, Cannabis indica
ctcaaagcaaaaaatacatgagacacaatatataaataacatatatataaaagagatgtgagagcaatctcaacaccacatacaccataagtgtataataggggaatcaccaaacttgaacaaggtcttacacctttatccaaaagcgtatttccccctaccacaagcacttagggaaaagaaagaatagaaattgctttatggatttatcaagcctatagtgtttctagcaatgtgctctcttgatggaaacttcttttttttcaaggtaaacccaagacctctatttatagtattttgaggatcacatttgaaaatcaaattctttcatcacatggctgttaccaacacattaatttgtgtttaatttatatatgtttatgaacgttttcaaaaatctcgttccagatgttcgaaaacaaccataaaacaacataaaaataactattaaacaactgtttccagagaactcaaaatgtaactcatctccgagttaattcttttcccaacgtcccaatacccatttaaatgatataattgagtattgtaaca

SEQ ID NO: 338331 - DNA, 724 bp, Cannabis indica
aagcatgcccttaagataggatcttgtctcattgcactcatgttggatcgataaacaatgaaatcaccactatgggttaaaagagtcacttttttttgcgtgaaaaatccacaatagcttggtatttagacaaccaatccataccaagaattacatcgaattgccccataggcaacactagtaagcttccagacaacgtgtgtccctcaaacacaatacaaaattacctacatatggtggatacctcaccttttccccccataggtacactcaaatgtaacacaggactaaaagtttcccaactcaaacccaacatactaaaaaaacatcaaagatataaaggaatgtgatgcaccaatatcaaataacacatgagcccaagagtgtgagataagaaccataccatcaacaactccctggtcagcactgccctgtatatcatcaacccccagagagtaggcttgagtagatgacttttcttttgcctttcccttgccctgactaggatggcttgtacttgttctagaccatccaccttgattgtaccctctttgactcccactaggagcaggagtttggaaaccttgtgagtaccccatgttgaaccctgaaccttgtggcctaaactgatgttgatattgagactattggcccgattggggtgtgaaaccataggatgaagactgagactggttttgtcctgggttgtccatgaaaaggagta

SEQ ID NO: 338332 - DNA, 778 bp, Cannabis indica
aaaaatatgatgagacaacctatcctttaatggtgaacttcaaagagttatctacatgtaccagaattgaacaagcaacaacaaattttgacacatgctctaggtcttacatagacatcaactatatccatggtaattactttggatcaaatttagaactcactgaaaagaacacaagaatggctagttacatagaaggaattgcagatatgatagtggatgcaactgaacaatcagataacagagaattagcaacacaagtaattatccatccttaacaaattcaagttggaaaacttttcagaaacaaggaaattttaaagactgccatcagcctttactccatcaaaataaaaccaacctttcaaagttaaaagatcatcaccagtagattacaagctagtatgtttggatgacaattgcaaatggagtttgctagcatcaaagcatggaaaaacattgatgttcagaataagaaaaattgaatatacacacacttgctcaatagacataacctctggagaccatcctcaagcaacaagcaatctagttgggaatgttataaagagcaattacataaatccaaagcgaaattaccctccaaatgaaatagttgatgatctgactgataactatagtgtcataatttcatatcaaaagcttggagggctcgagagaaggctaaggagcatattagaggttgtccacaagagtcatatgcagatatacctgcaattttgtacatgatgcagcaaaaaaacccaggtatttcatattt

SEQ ID NO: 338333 - DNA, 776 bp, Cannabis indica
taaaataatttccaacaacctgatcttcaccaacaacttggtccaaagcaagaggatcccatccgattgtggataaatgagctggaggacaagttcaggagatatcaactgggggaattagggaggcaatctagatacgactctgacgaggagtttgagccgtatcatccagatataacgaataccccttttcctttgggattcaaaaacccgcatgtctcgtcatatgacggaaccactgatccggtctcgcatttgaataactttaacacaataataagagcgagtaatgtgactaacaatttacgctgtattttgttccccacctcgcttgttggagcagcgagcaactggtttaacaagtgtactcattattcaataacttcttggaagcagctgtccagggatttcaagaaacagttctaggctgctagggatagtcaatccaaagcggcctcgctaaccaatataaagcagcagcccggtaagacacttaaggcgtacttaagtcatttttgcacgactacaactagggttaggaatttggatgacagtacgcaacttatagccctttaggcggggatctctactgacccattaaccgtagggtgcgagttgtgggatgacttacaaggtcgtccagtaagaagcatcactgagttaaacgaaagggctcaggtattcgttcggaaggaagaatcctgaaaggaaatgaacttgttgaaaacaagctcgagaagcaaacccaacaatgtttcaacaagtgaggtttccac

SEQ ID NO: 338334 - DNA, 1389 bp, Cannabis indica
ttttaattaatcacgatttccataaacctcattgattagtaacgaggtgcacagtacgtttaaaaatcacgtaacatgcctcggctagttagtgtgttacacgtgtagacttcatctgagctgcttctgcatttggatgggtgacacatttcaagtgcgtctgttcaagactcgatgtgaggctgactgggcgtcccttcagttttcagctaataaatgctctgataattaatatttcgaaattcgattttctctcaccacggttgacggctgcactcaattatttttgatttcccatattcgattttaagtgggaaccgaggcgtctgaggttcttttgaaatgattaccccttttcgttgcttgcctataaatactagtgagcatttgtacacaaactctttttcaccatccttctttactaagtaagttcagagcgaaaagagaggtttttggcttcaagtttgctgaagtgccttcatcgaaactgctcgtttggtttgaggttacctcaatccagacatctgattcttgagtaagttctcaatttcccttatgtttactttgcatgtttacttttgaatgaaccttcgactttgttgtagaagatatgtaggaaaccctaagtttagaaactctacgattctcctttgtcatgggttcgtgcgatttcacagtccataatgtttgctttctgaactgcataatgcctttctttcatcttgcttattctaagcttcatgaaagtttttgccctaattcgggaaaatttcaaactttctgagttttgacttttcattgaacattcttattctttaatcttttgtgttgacctcgcttttagccaacgatagtgagtcttatttagtaagcgacaagtagtttataacgattgatatatagtaaaataatataaagacataggaattttatagaggttcaaccccgagcagttcggtaatagcctaatcctcgttatttgtattaattcaagaacaaggagaaagattccttttcttataactcttacaacagtatctctgaatatgaattcttagataagtaaaatctctcgaccctttgcccagtgagcatgcatcactatttatagggctatgaacttggagaggaagtatttcccctctcgtgacattggatataagtagaaagattgcatgataaatacagaatacactgatcgtgggatttggacagcttgccatatctcttcaatctgatccccaagttatagggattcctttgatgactcacgatgtgaaagctgaattcgctaagtgttggtcgctctgcgcggattgctgatcgctttgcttcaagcatgcaatgaagcctcctgtttggactgtattctccgagcagatactcgaa

SEQ ID NO: 338335 - DNA, 667 bp, Cannabis indica
cctcaggagttacctcgggtggtctccgagatcatacgcccccttctttttccaaccgtcgggggtggcttgcaatgcggaggacgtttcagcagagggagagtttctccttgtagggggtctcttctccttttttttttatttaccttgtaggcttacgtcggcacctttttatattttgggattgtatcatgtaaattttgtaagtttatgccgtcggcgttatacaacaccctatttaacatattttgcacataccactactcccccagtttttttgaaaatagagaaagtactattttttcataaaactttaatttttgtgtaaggtggggtagtgggttttctgtttcgtgttctcgttgctctttattaatgataattttactttatattctgttgtttctcgacgtgtacttgcttatccatatgttttaatttcgaacggagtttttgttgttgttgtttttttttatgttgtacttgccggttgtcctcttaagatttttgtgctttatatattatcgtatcaaatggtcttattcttgccttttgtgaaaaggtcttttatgttgcctttcgtgaaaggtctttgcattgcctttcgtaaaaggtcttttttgttgccttccgtaaaaggtcttttttgttgccttccgtaaaaggt

SEQ ID NO: 338336 - DNA, 537 bp, Cannabis indica
tttttcactttttatttttcttattcatttttatagtttatatcataacatcgaccatcaccatccacagaccgaatcaccaccaccaccaccaaccaccatcaatactggtaccgaaaccaccattattcaccaacaccatcagtgtaacttattttcaaacccaaatcacacagaaataaaatttaaacaaaatccaatctgacaaacaaacaaacacacatatatatgtatgaagctccaaacccagatctgaaaatacctaaaaaaaattaaacaaacccatatcacataaactcaaacaaacaaatacatgcatctcaaattcatggaagaaacaatgtaacaaacccagattgaaaaataaaatctcagatccaaaaacgaatcaacatctgtcaacactggagccattgattccgttcgtcggcgctacccattgtcctgtcgatgcttcccattgagaagaataggagcgagaaaagacgaagaagacgaaggagaaatccagaacgggggagagagagagagagagag

SEQ ID NO: 338337 - DNA, 1132 bp, Cannabis indica
aaatggttgagaaaaatggcaaaaatctaactagtgaaggtcccactagtggctagccacttaagggtaattttggtccatttttatcatttttttatttcaaataattcaaccctaaccctaagagaagtagtataaaaggaaaagaaagtctcattatccaactaatgcttcaaaggtaagaaaaactagctttctttctctctaggttttaagacttcttcttcttcctttcttctcttgattttcaaaatccttagcctttcttcacaaaaataaacttcagccattagtgattgagtgcatgcccacacattacaagtgagtccttaatcatagtgtgtaaggtcttagaacaagaaggagagttgggcttagatcttggtcatactctgctacaaaaaggatacaagggttagagatctgagcaggaggagtcatttaattccgctgcaaccactgtaaggtctatcataccttttatgtgtttattttcagcgtttttgaaattcatattaggatgttaaaaacatacttgttagtaaatctagatcttggttaaatatattccaataactggcctcagagccatgatagttgatttactttcaagtaatatggatttgaaacgatgtatgtgtgatttggatgtgattcatgttgatctatgtgtttattgatgattgattgatgtttgcaaaattttacgtaaattaatttgattttcgttctaaaattatttttattagatagtatggaaaaaattaagcaatatccttttcacagaactcaatttcgattctatttgaattagttatgaatttttaaaatttgaaaaaaatcttagggagtgatgatacaccctacgcgcgcggatacccctaattttaggggttcaggcgcattcggacacaaccatgtctgagtttcctcggacaaatgggctgatgctgtctgaagggcctcatacgctcgcggaaaggctgcacgcagcctccttggccgaggtttctcgactgtgcattctcctgtgcgcgcgcggatggtatgcactgcataccataccaaatgcaatttttttttccattctttttatttttcatgctttttcatggaattaattttgaatttt

SEQ ID NO: 338338 - DNA, 1198 bp, Cannabis indica
aaaggctcaaagacagttgtcaactcacgaaaatagcgcgatattatcctaaaaatcagacttcaactagctccaaaaatcaaggagatggttgagatagttctacattgatcacgtctcctgaagcgagaagcaccgacccccttccctatataaggggtcacccatgacatgggagggggatccgcaatatgaaacactttgaaaaataaacacttctcattctttgcaatcaagagcctgttcttgacttttgcaattcagattaataaaactcaaggggagtaggctattacccacattcggggccaaaccctttaaattctggtgtcttttatttacatttattacgaattctggtgttattaactacatttattattgtgattttggtttaaatctcatttattacgactctgcgttggttggctaaaaatccagtcaacattttggtgctttcattaagagcttttgccaaaatctcgaagtttttcactgaaaaagatggtgttaactagaagatctcaagagcgacctgacaaagagatggaaagtgcccaccaagttccatcaacaagcaatctcgccgtgaacaatggagaacgacccccacatctggggaacggcggcacagccaccaccgctcaaactactggccaaattgcagctactggacagacaactactggatgtaccaccaacgccactaccgcaggaggcggcgctactaatggctccactagaagaggtaatactggaaattttgtcccacctactgatggcgcggtccaagctcagactcgccgcagccctggcatctcacaccacggaatgaaccccatgtggacttaagagaattgaccccgagatggatcaactgcgagatgtgagaggccggatgcaaggccagttccaaactgtgcacaaagagcaaaatcaagctcgagcggccttgactgaaagtctcgctaaccaaaggagagaattccaatcttggctggaagatcatgctcgtgagatgaggaggccccaagacgaccaagatcatcgcaccaaagaggccgccgactaatacggagctacttcaacaaaaacactcaagggatgggtactgatacccacaatcaacagataccttaaacctatcctcaggttgtccctaccccaaggaaccagagggagagggtggtctatggac

SEQ ID NO: 338339 - DNA, 874 bp, Cannabis indica
aagacagtaattagcacgtagagtatgcgcagtggcgtttatattgagaatgatatgcatgaatgtttagtaaccggaattagggttattaccctaataggaacggtctaatgagtttttcaaagcagtagaaaaattatatgacatcgatgaaaatgttgaagctggacatcttatgtatgaaatgacaaccattaagtatgatgaatcaaaaggagtgcgagattttattctaaaaattatgaatgttcagtccaagttgaaagatcataatattcatcttcctgactcttacattattcatagtgctcttcatgcacttcctacctcttactttatcaagatgccgacaacacttgtaatgaagcatggagcatcaatgacctaatttctcagtttatagctgcaaaaatcaagctgtaaaaggagaagaatgaatattctcactatgttgctcaactcaagcccaataaaggataatgaaacttggaaaagaagcaagcttaactaaaggctaaggggtcttaggaagccaagtgagatggattcaaagcttaaagtgggcacttatgttggagttggcgttatctaagttggcacatttattcttgaattacagtttagtgttcagattattttgaacagtaatttcttgattcctacttttaaaaggaatttagtttcgcttccgcttttggttaaacaaggatattcttttcattttgcaaatgataatgttgacattatgcttgactctcgaattattggaaattgcttttattctgatggtctttacaagttgtcattggctcctttagattcctcttttaatgttgtgaatactgtgggtaaaagacctcatattaaggaaaca

SEQ ID NO: 338340 - DNA, 996 bp, Cannabis indica
agattagattgaaatagagttttatttagggcataaatcccaacattgataacttcataatttcaattaaagtgtgagacatgaattgatagagcattgaaatagctacaaaatgcaagttgaattgtgtcaagcggatcaatattgagtgagttatgatcgttttaatgaaggttgttctaggcttagcgttcaagttgacatccagtgcccaagttgacatctcatcacccaatttgacatattacgtcaacctggatgttgggtgagcaagaaacgtcttggggatgtatttttttgatgcctaagtgatattttgacatcacttacttcgtttctgtgttttggtgaaactagtcaccaattctcaaagatgctgctattttgtgaaaatgggagactcgaaacttctcatttctgagtagtttttcatgttggaaatgagaaatgcgaagttctaaatttgaattttataacttcatggatcttagttactgtgaaaaactagatggacggtcaagacagaatcaaaattagataagcagaacccagcgcaccaggccatttgtcaacttgggagtcgggtgttgaatttggagcttttgggaaatttttttgatacttccaaggttcaatagcttgatgacgaggtcttctaccccattttttgacgattctggagagaatgcttggatcaaatttggcatttcaatgatcaaaaccagtgctctaggttgattgtcaccatgtcgcttggctctgttttcaggccctcaggtttgtggttttctccctgagtttgcttgaatcttcattctttctaatgatgcaaaaaattccaagattttttttcgagaacctgattaaaaacagcccaagttgacaatatgtcaacctgggcgctgggcccagtgccaggtgttaacctggtagctggtgttgggattttatgccctaaataaaacccatttcaatttaatttgatttgttatcaat

SEQ ID NO: 338341 - DNA, 519 bp, Cannabis indica
aaaatatataataataatttgtgaagtaaaatatttaaatgtaactttcggctgcagataatttttaatagtaataatacttaaattatatttttaaaatttctataggtgcgttgaatattaaataattattcacatttttttttcttattagtatattttattaaattttaatgacataaaccaatcaatgactgcaatgtggatattgacttgacacttaatgattagatacttataaaagttttaaaaatataacttatgtattattaccgtcaaaaattaaacttaagcagttatagtgagatttctctcacctagaaactcgagaccaaacccctatttagaggacatgtatactcagatttcccaaaaaaagctgagatgtccctgagggactcctcgaagttttaaacctcgcttaagatataactagcgagaggtggcgagcatgaccgaagtctaatcgcatccgagataagagagtagatcgcatatatcgaatatatgcgatcatcc

SEQ ID NO: 338342 - DNA, 858 bp, Cannabis indica
tatacaaactcgccaagttccgtttggcttgggcaccaggaccggattggctagccattccggatagtatacgtcgcggatcatgctgttcgtcagaagcttgtccacctctttctctagggcctcggcctttaccgagtcgagggggcgtcgcttttgttggactggtggcatgtccgggttgacgttgaggacatgggtgatgacatggggacttatgccggtcatgtcctcttggcgccatgcaaaaatgtcgatggcgcccttcagtgtttttattattctttctttttcctccggatctaggctttttcccagccggagtactttggtggagtcgaggtcgcacactgatatttcctcgacatcctccatcggttccacaattttttcggaccccacccgggggtccaactcatcttcttcagccattcctggctcgatggtttcccggaccatcagtacgggcaggtgggttgcaacattgtaacattgccttgcctccccctggtttcctctcaccgtccctattccagcttcctgggtagggaactttaagcacaggtgccgaatggatgtgactgcgccaaaatctaccagggctggtcggccgaggatcgcgttataagcggtcgggcagtccaccaccacaaaagtgcagtatttgaacgtgctttggggggtgtccgggcacaaagtgacgggaagcctcacttttcccattgggataagcgttgttccgttaaaccctgtgagttgggaaccgctgggtgagaggtctcggtccgtcaggcctattgcgatgaaggcctccttaaaaagtaggttcacggaacttctgttgtcaatcaggactct

SEQ ID NO: 338343 - DNA, 1017 bp, Cannabis indica
attactaaaaactttccatattaaacatttgctattaaaaaatatttttttaccatgtaattactaactattttgccaaacaagatattaggaattcatatgtaattatcacctcatatccaaacacaccttgtattttaaaatatagtgtaattactaaactgtgtaattactaccttagtaattaccctacctagcaattacacagttacttccaaacatacctttaatattattattaatatattattataatattatttatatataagttaacgtataacgtataacgttaacttaagtttatttatatatatattaagttatcagtgaaacaaaacgaacgaacgaaactctcgttctctcctttcgacaaaaccttctcatcctatatccattttcttcgattttcaacccgaaacctagtgatctaagcttcggtagtagcaggataacaaatctttgaaaagggaaagcttaaggtatgatttaatttcgttttaagttttaaaacaattggtttcatatagggttttgtgaattagaatagttatgaaggttctgaccttataggattattctcgggtagtcatgggactagttctgatgtttacttgttgaatttgaggtaattttgagttagaaatcgagttttgaactttttaaagcttagtccgaacgttaatggcgtttttcatttaagggctcgattttaatttctgttatgtaaggatggtaatatttatggcatatatgcaccctgtgaagtttggagtgatttggtaaattttggtagtgttttggtgagtgcgaaaattgagattttcgtatttcatagtttttagaaattcctaagagattagaaatcgtatttttatcataacttttgacttgggtgttcgttcgggacattctatataccatttcgaagcttacgacgagctctacaatatggtgtataatttagagccaagatatgagttttattttaatgtatttataccgcggggtttggta

SEQ ID NO: 338344 - DNA, 1720 bp, Cannabis indica
caccaataaataaaaatgccaatcatttcagttccatttcgggcccgaacccggctcggcccgaaatacccggttgtgactataccgcgccaaactgtcagaacacacttgaaaagacaacacaagcatatttatataataatatagttctattaagcacgtaagtaaattaatttcatcattttacccttctcgggtcataattactaaaatgcccctggctcaccaacgaggtcttaccatgttataattcatattaaatcacatatattgaactatataataatataattcctcaattattcataattatctaattagggtttcgataatccacttctcaattctagggtattacagttacacttggttatgtttgatttccagtatttgcttttggggggaaccgagtcgtctaaagcttttgaaatgattaccccttttcatttttctgcctataaatacgactgagcattgttcacaacttcacttttaccaacatctctgttaagcaagttcagagcaaaaagagaaattttcgtctcaagtctgccgtgaaattttcacaagaatcatccaagcagcttctcttagactgaatccagacatcgatcagtgagtaattttccgattccttctccttttactttgcacatttagttttcagatacgttctcaaccttgctgtagaagttaggtagaaaaccctagctttagaaactttgccatttttctttacaatgatctgcgcgacttcacgattcatgatgcttgccttttgattgcacaatgactgtctttcacattgcttattcaaagcttcgtgaagtttttgccctaaatcccaaaaatttcaaacttttgggttttgacttattgtcgaatatttccattctttaatctattgagtattcttggttggcgtatttgcctatttattgtttgatatcccaaccaaacactcatctcacgtgttgtcttctgtagatgaaccctggtgagttttggggaagcgaacactgaattgaccaggatttgcttcaactgttattcgaggataaccctcgtctctgttctagtccgccctcttcaagcgacggacgtttcaactaaatcttcccctccagtcacaggatgatggctcgaacaaagcaaaaaatgcgtaaagttaacgcgtctgaccctcacgttgcccagcacactaccttacccagcaccgaacaagatccgtccttccaagaggagggggttcatgaaggggacgctgaagtccaggagatcgaggaacagggcaatgtccgtcctggcagtccttccgaggcgggggaagaggaggaggctgcacctccaaatttaggaggatacaacgaagctaaggagccagtagttgcggatggtgatatcctggtcgaaggagtggactacgtcactgaggagcttactgctgcagttcctcacaggagtcaaggtaccttgggtgagcccttcctcgaaggttactgaggcacgcctaagggatctggacaagtccagccatctgggcgagctggaatgttatgttccttcattaaacaaccgagccacaaacccaaagaaggggatgtgtgcctcatcgggtgctcattccaaacaagaggcactgctgcctttgcacccgtactttaggaaggtggcagacttcttccgtctctgtccgacccattttacccgcaagggcatc

SEQ ID NO: 338345 - DNA, 1359 bp, Cannabis indica
ggttactggagacgagtcagctgaaggatgcagatccgattgggctggactggtgacagggccaaatacagacggctcccccgtgtacatgtgcattactcccagacgcataagaggatgccaaacgaatctctatgaaactcaggcagagaaatgtcagtagatggaggtacaaaatgcccagaataatggtataagagagtagacttgatagtgcgaaccattttatacatggaggcctcaatgcaagctggcgtttttgatccttcttatattgtttgacaaaagatttaaactcagaaaacatttgtacctgccagctggaatccgataaccctttgaacataggagacttgcctttactcaccttggaagcagaagaagtggttgatgagggctgcctattaaccacagagagaaagctcttactaaggacaggactttgaacatgatagtcacgcgttgtaagagttgggtgagcagccatgagtactcgttgaaccaggcttggaaagggtagcttgttacgagtgccagttgtttctgaagcttcaagcatccattcaaatatgagagatggcagatgaatagacacatgagttcctgcagcatacagaaacttgccaatctcaagtgtaactgatgacaagtgagaattaggaaactaattgtacaaagctacgcgatgaagaaaccctatagaaaggagtcagatgagtggctaaaatttcctgtttgtccaacagatagtcatccctgccagttagcactctacccaacaaagtttgatctggattgaattgtttcccatatgttggattcctgatggactcaactttcaacatgcatgcaatagtggatggaccaaatggaacacgatgacccctaacaaatgcactcacacaccctggatgaccctcagcaataacagtcctatctagattggcataaaattctcgaactaaaatgggatgaggtgcagacaagttaatgaccgtgtttacccatttcctctttcttaaaaaatcatgcaattcaggaaaatcatctaacatgaccacttgttcgaaccaaaggtcacgactaccaaaccatcgttggtacacagaagctttggaggcatcaacaaagcattgaacagagcatgggtcaacagttgctatgggggcttttggacattttgattttgtagagcctttggacgactgtttgggagacgagtctgtagatgggactggactgggtttggtcttggatttcttttcaggtggttcatacatggtatcacgtgaagactttctttttggctgaaccctttcactagtttgagaaggaataaaaaccttagatggaggacga

SEQ ID NO: 338346 - DNA, 788 bp, Cannabis indica
gtttttgaaattttttctattttctaagctttgcatgaaaatgagataaattgaatacttaagcaaaaatctatttcagccaacacataattaaaataaacacttaattcaataaaataaagaacactagaagacaaaatactaacgaggcaaaaagacattgggcaaaaagaccattttgcccctccacactaaaaccacataattaacactaaaggggtatttttggaaaattctaaattcccggccattcccgacattcccaatgtctaataaactgtcccaaacttccaacatactaagttgtgatttctattgagccaaacaccgagttccgaaataccgggcaccggaatgcaaaattatgcaaactactacatgacataaaaatgcatctctgaattcaataaataacagtacaataaattatttaaatagctataaataatttcataattaaacgtgattaactgctaatttccaaattaaactaagcggtctttacacttaagtttattttgcccaacatttaattctttttaatccatataattaaatcttaagccctagttgaaacactaaaaaaagaacacgatactctcactcatccacttgatgccttcaacaaaatcaaacttagtttatgtgagacaactaattaatgagagagttccttccctagtattttctcacctccttcattgttcttcaccattcaaaccatagtgagtgagtaacgtggccacacatagcaagtcaagcactcaatcatagtgagtaagacggtg

SEQ ID NO: 338347 - DNA, 1031 bp, Cannabis indica
gaaatgttttttcccttgtccgtggtctggctagaggatacttgcttcttagccttggccactgcaaggtcataacattcccgagcaatctgttggtttcatctcagacacgctaccccattctttattgggaacttcagtgatgaatggaatattgacgtaacaacctttaagtcatacaaagctggtcgacctagcatgacgataaaggtgatggaacgtccaataccagaaattgtgccattatagttatgctcgtcggagcttgcccaacagtgacgggtaagcgaattttccctagaggtgcgactccttggctggagaaaccatatataggtaggagacagggggttaggtccttgagctggaaccccattttttcataggtggtcttgtataagatgttggaagaggctccattatctatcatggttctggccaccatcttgttgactatttggacctccacgaccaacggatcgttgtgcggaaacctgatcttgatagcatattcatcgttgaatgttatggtgggctctcctgcacgtgggattttaggcttcctttcttctacagccaggatcacttcttcttgctcgtgttgtgctgttcgggcatacctctcccgagatttgcccgaatttccaattatgtgcgggcctccaatgatgacttgcagatgtccatctgctggtggaagtagcaagtcttcgttattatcaccttggccttgacatacttttgtacatgcgggtttttttccttatcaggaattcaatttcccgcttcagattgttgcattcattggtgtcgtggctgtaatatccatgaaattgacaaaacttggtcatgtctctcttgctgacatcttttttcatgggtgcgggcttcttgcaaggggctagcgactgagtggccatgtaaacactttctatatcctcgatcaagatgttaagcttgattctctaggggagcttgttcggttttgccggtgaactttcccttttcccattcccttgcctattattgtt

SEQ ID NO: 338348 - DNA, 591 bp, Cannabis indica
aaataaaagtgtatttttaaccactaatcaggtctaatctcgagtttctaggtgagagaaatctcaccataacactaaaaaggatggacggaaccatcgtgccaagggcttggaacgccaatcatctccggaagtattaccaatagtccaaatatgtaaacttaggctttgtttattgaatttgtaccatcaaagtgtatgcaacctctaaattttaaataaaactgagtgccttaaaaacaaagttttcatgccactcaggggggtactaaagcataccacacggacagatgtaaaataggccaaaagttgaaacaaagtcaaacaaaatatgtaccaaagtgaatatatatatttaaaatatcctgacccaaagggcaggtccaaaaagaaatatatacaatatactgaaggcatggggacgagccgcaataaatgtctccccttagaagataatagttaaaataaaattgtctggaagggacgaaaaaagactataaataaaaagaaaaaaaaaggagatatgattgtaatgctgaaatgggctggactccgcggcctagtcgatgcgaggaggaagacgagggcccc

SEQ ID NO: 338349 - DNA, 633 bp, Cannabis indica
aagattttcttaaacccttatgtatttattttcattgttttagagaattcatatttaggatgttaatcaacatacttgtttgttaatctagatcctagtaaaatattcctaacactgtcttacctaatgtctcacaaatatggagattccaaatccatgggtgctcctcaccaagtgcgggtaatcctagtcacaatctaagaatacacaagtatagggttaatccctaaatccattttcaaaaattataaatttggcatttgaattatagatattcacacagagctcagaatgagcttttcaatgatataaagaacgtcccaaacggagtcctgagtcaaaagttatggccaaaacaaaaactcgaaaaaaatactataagctgccataaaatggccccggatactcggtttaagaacccagaaaactcagtttccagccacgaaaaaatgcatccaaatacacaaattttcatgctaaaccagcacacaatcatattgaactttcacctaacataaatcaaataattagagaaaaattacacctaattcactctcccacaacaccaaaactatgcatcaataatcatcaatttcagcaagcttaactagagcaaaaatcccaaatcaagag

SEQ ID NO: 338350 - DNA, 439 bp, Cannabis indica
atgcaacattaaatgttatgaatcactatttatagggctataagcttggacagaaagtatttcccttctagttacaattgatataagtagaaagattgcatactaaatattgaatacactaattgtgggattgtgacagcttgccatatctctgtaatctaatcccaaagttatcgcgatttctttgatgactcacgatgcggaagctgaatttgctaagtgttggcgtgctgcgcggattgctcactactcggtctagaggacctcgtctgagaaaatgcatgaggtgcccttttcggcctctgtcttccgagcaggtacctagagtcgattccacttgtcaccatcgtgtgatgccacgtcagagtgcaaaaattgggataacattcacaatcaagtcatatcttagtgaaaaattcataaactagacatattctaa

SEQ ID NO: 338351 - DNA, 617 bp, Cannabis indica
acacacacgaaagaagccacgggaaggacggggggtccgagtacacgagacccgagatgtgattactcgagcaagagatacattcaaaactaaaacccgacttccaagccaaaatgattcctcccgcattaccaatagacgggacacaaatattaaagtaaaagtgtaaagactttaagatacgtaccagaggattggcatccactttgagctcagagagaaacacaaaatccggagagcgagactggatcagggacttcagctcccgaactgtagaggtctgccctaaccctctacagttccaagcgatacctctcatgtctcctgtggaggagattcgacattctcctccacagggttgtgggagttagcagacccactcgaaacagattcatcaatgacaaaggaacccacaagcggattcttcaaaattcccgagcaactcggggagcttgagctgtcttccgaaggctcttcaatttccaactcagggtaagagccattattccttgtgtcccacggaaagtcacgaaccacgtcaggatacttgcgaggcactttatggggcctcgagcagagagaagcagacgcttcaaattttctttcttgaaaggagt

SEQ ID NO: 338352 - DNA, 1208 bp, Cannabis indica
gtcggccaaaataaccttgcctcagaattttctgcgataaactctgcccagctgcgtggttgccgcaaaatccatcatgtacctaagacaaaagtcatgcggcttcttcttgtgtaacacacctgagtaatggcatggagaatcctcttctatacatgaatccatctactatgatgtaccgtacaacctttctcctcatttttccagcttcgttcctattatttgggagttccccagtgttgaggtaggctaccattggcgtcatccaacttggagatgtgttaatcatttcaatcttttctatgccagtgaaactaggttttttaaggaattggatggggatgagattagccttatcatctatgttgctactcgtgattcgggctagtgcatcagcagttgtgttttcctctcttagaatttgcttgagggcataacttttgaattgtgcgaggagatcatgtattttgattagataggctatcatcttttctccatgagcttcgtactccccaaatacatgatttacctctaactgtgaatcactgtggatctcaatgtgttcggcatgcgattctcgagcatgttttacgccagcaataagggcttcatattcagcttcattgttggatgctctgaacccgaatttgactgccccatgcagatgttgccctcaggtgtgacaagggcaatccctgcacaggacaattgatctatggccgacccactacatgtaacttccaggttggttcgtctttgttgttgctcggttgaggttcttgtactgctccaggttattttttgaagtgctctcttctttactcgtacactcaactacaaaatctactaagacctaccccttaatcattgttcggggatgaaacatgatttcatactggcccaactccaccgcccatttgaggaaccatccagaggcattagttttttgcagtacttggcgtaatggtcagtcagtgtacacccgaacaagatgagcctgaaagtaaggccttagctttcatattgctaagattaggcaataagtcaacttttctatcaatgggtatcgcccctcagcttcaataagtgttttgctgatgtaatagaccggatgctggatattgttctcttctctgatcagtacgacacttacaacatgttccacgatagccaggtatatccctaattcttctctgtccagaggtttt

SEQ ID NO: 338353 - DNA, 566 bp, Cannabis indica
cccaattcgggtctaggtctgattgggagtctgggtcctggtccggttacggttctgaatctaggtccaatttcaggtatgattccaagtccaagtcctagttccagtcccgatagacttccggttttggttccaattttttgtcacaaggtatgggttcgggtcaacttttgcattggggactaggttaaggttcgggagtgggttcgggtcgttgtcaaggtttgggtactgggctggctcccaaatccagacaccgactccgggtttgaatctggtcacatttcaggtgcctggtcacgagcagagtgctatgttcaagttcgggtctggatcgggaactacgtcccgttcctagttctgtttcccaagtccctatcctgattctgggtccaggtctcggttattgtttgagtttggttcccggtcgaggtttgggttcgagtcttagtcaaggttcgggtttaggtctctatataggttttgatctgggttcggttttgggtttaggtctttgtcctagtcctagtccttgttcggttctagttccatttgcgattctgagt

SEQ ID NO: 338354 - DNA, 590 bp, Cannabis indica
tcatagacttattttggtgtcaaaggagctagagtgactgttcgctgacagaacatgaatgagtacttggttgtgaacccgtcatgttggactcgtcgatcaaattgcgaaggccttcctagaagaaggtgtccagcttgcattgggaccacatcgcacaatacctcatcctcatatttgccaattcgaaaagataccaaaacttgtttggtaactctcacttcaccactatcattcaaccattgcaacttgtaaggacgtggatgtttaagcgttggaagtcctagcttctcaaccatggatgaactagcaacattagtacagctacccccatcaatgatcacactacataccttgtctttcacatgacaacgagtatgaaaaatgttctcacgctatacctcttcttcctcttcttttgctttcgagtttaatgctcgtctggtgactagtgcaagcatgtcaccgtattctggcccatactcttcatcttctatagaagcatattccaatggtggcatatcagcaagctcttcttcatcttcagaatctacttcaccattttcccgaatcaccataactctcttatt

SEQ ID NO: 338355 - DNA, 1055 bp, Cannabis indica
cataaaacccaacacatccaaccctcgaatgaactttgctttcctagcagcttcagtagccacctcatctgaagcaaactttgccagtcgatcaaacttagtggcatactctgtcacagtcatactgccctgagtcaaacgtataaactcttctgcctttgctgcccgaatagactcattataatacttctcataaaacaaggcccggaaggcttcccaggtcatgttattcagatcatgaccctgagatacaatctcccaccaaatacgggcatcatctcgcagcatataagtagcacacctgacccggtcattatcttcaacccgcataaaatcaaaaatggatgttatcatactcatccattgctccgccttgagtggatcagcaccaccctcaaacactggcgggttctgcttccggaaccgctcatacaaaggttccaaacggttccctgcatccggtggcactaccagaggtgccggaggatcagggttagggtttagagcaggctgagctcgctgctctctcaattctctgatttgctcaccctgctgccgaatagtctcttgcattgcagcatataactcttcccagtttggtggtggtggagggttctcgccctcaccaggagccccgagcccagctagctcgcgggtacccctaccagtccgcctcgggtgcataatctatacacctgcggtcacattccaggtaataacaatactgataagtatttccatatattatagtccttcccacaccattccgatatcaacataattcagataatcaggtaatcagaaaattaacaaactatcttttaacttaaagcttactaaaccatgagtcgatcaggtccttgcagccaatgtacatatcaaaccagtcttcaggatctaaaaaccttggcgctctgataccatgttgtaacgccctgtccaacagggacgccacgtgtgtgcaatttaataaaatacttatatagatactatattataccaaaagtgtgggtaattaattttttttgtaattaaaatcaagcatgtaaaaactt

SEQ ID NO: 338356 - DNA, 766 bp, Cannabis indica
cggtcactacatcaagacaattaagtgatagaggcaaagaatacacttctaatgaattcaacaagttctgtgaagatgaagggatggagcaccaactcactgttggatacgcaccagaacagaatggtgtatctgaaaggaaaaacaggactgttatggaggcagcaagagccatgctgctagagaaaggtctcccaaaacgattttgggcagaggcagtaagcactgcagtctacttgctcaaccgatgtccaaccaaagccgtgcagaataagacaccgatcgaagcttggagcggacgtaagccatcagcaaagcatctcaaagtcttcggctgcatatgctatagtcacattccaaaagagaaaagaggaaagcttgatgagaagactgagaaaggaatcttcttaggctatagtactcaatcaaaaggttatcgagtctatagcttagaaacaaataagctaataatcagtcgagacgtaaaatttgacgaagatgctgcatacaactgggagacacaagaagttgaaagaaagacagtcaatattcctctaccgccaagacaagaaactaatcaaaatgaagttcttactcaaccaacaacacaagaacctgcacaagtgatagaatctccgccagactcaccagtaaggcgaacaagacaactatcagaaatctacgaaacatgcaacttcgtactacttatggagccagaaagctttaaagtagctcagaaacaagaagtatggagaaaagctatgaa

SEQ ID NO: 338357 - DNA, 485 bp, Cannabis indica
tttttttcttttatgattggttaaaacatcaaaatttaaatttgtcctattacatagatcaccttaccctatttatagaggagcattggttcattagtgcaatgtttttcagtgtccaaaataagattatgagataatattaaaggccaaattagtataactatattgtgagaaaaaataattgtatttatactgtgaacaaaagtatatacaaatgagatgtgagaaaaaaatgcgatgagtatttgataaattataaattttaaactacatgtgaaaaaaaaaatacaaaataacgatttgaaatgtgttttaggggacaatattattgtgtttatgaaataggctttaagagttaagcatatttctaattttaacaattaaccttaatcaaaatatgcttaacctacattaattagaataagagtactggagaatattatcccacatgaattaaatgtaaaagtattgagtcatatataaga

SEQ ID NO: 338358 - DNA, 741 bp, Cannabis indica
atagtctcttgcatattctccaatggtaaactattatctgaaagatgaattaatttcaaaaaatgatttattatcaaatactgaaagtgctagctctattcaactctgtttttgtacagagataattgttctattttaaggttgtactgttaagatttttgtgtgggacataaattttgtttcagattctttgttctatatgtgaatctttatttatttattttttcaaggttcagtgattgcaacaaagtaaaaagtgaagaataagttgtttcttattctccaaaggtaaactattatttatttattattaattaaaggatgaattgcttccaaaaaatttataatgaagtactgaaagtggtaactatatctatatatttaactctggttttgtgtggatttagttgcttcatttaagagagtattatgcatagcagggcatattaacataaggactagttacaacaaattctgaattttgattgtagtgaaaagggtctcttttgtatctgctttgttcaaaactatgtttgggttatggatgaccagtaaaagataagcatacatatatatatatagtgactgattgaatgaaattaatagtgactaatcgttcatattttgtgcagtgtatttttactaaagaacatgacacgagattactgacaaaaagtgtcaagtattgttgctaggagcttgggtctcttgaagattgatgatatagttttagcacaagac

SEQ ID NO: 338359 - DNA, 743 bp, Cannabis indica
atcaatggaatattaaaaacatgctttgagcatatacgataaatgttagattatcttagaataatctcttcccctgacaaagtgtttgtctaaaagtgataataaaatgtaccactggaccttaataagtgtggtacgagataaatattagatacatgtttactggattaagtaggctcgatagcctattagctagccttaactcctgcattgtctggagtataaaatgtgtttcatgtctccatgctgagaaaatatgattcaaactcgatccatattttgagctgtgacgatgttaaacttcagacatatttattatatgggaaaaatggacaagaaaaatgaagtactatgaaatgagacaatttcactagttaagaaagtgctgtagaaaaatagcaagatagaaacaacaatttgagagttagaatcataaatacgggagtaatatttcgaattgtttaaataaatttcgaggacgaaatttctgtaaggaggggatagttgtaatatcccgataagcctaatggtaaataattagggtttatatttatattatgggttaatcaggtaataagtgggattatgatcttactaatttattttagcataaaatttaaattttactataagtgagtaactaagcgtaattggtaaattacagagatttacatagcatgtgtgaatgtaatatgagctatatgtagaataaaaatatttttaggttcggcgaccctgaagac

SEQ ID NO: 338360 - DNA, 468 bp, Cannabis indica
atgtatttttcatattaagatagtgaaatcaattataaaatagagaatgctacattaaaattcgtgaatatggataaactctcagttcatttgtaaagtttctttaaaagtacgtgttcatttctcaatacatatgtctagtacacctaaattatggtgtgtgacagatttaaaaaactaagaattgttggacatgaggtggagtctgcatagcaaactctaaattttcttaaatcattgtcggttggtactcttccatgggagtgtacatatcagattgtgttctaacctaagttatttctcaaacatattttgagttgtgataaggttggaaactgactttatgacatgtacacattttagaaatacttatatacagttagagtacaattgtcaaagaaaagattttggcccaaataccataaataatcatttcatccgaaatgctataaggtctaagggtaacat

SEQ ID NO: 338361 - DNA, 702 bp, Cannabis indica
gggatatctagttggacatattgttttagtctgaaacagtaacttctttctcgactaagtcatcaacatagcaatctagtattagcattgatgcaaaatacttgcttgagattaagtaatcaacagagataccataaaaaatttatgaggattaggaatttttgcccaagtcattcaaatagactatgcaagaattctactatcttattctcataattctgataagttatttctatccatatgaatggttagatttactttctcaatatcgttctaaagttccaatcacaagtgtcagccaaatgaagatggattaagaattttaaaattctcccacttaattaaggtagtgtgataaaacgtcaaagaactttattggtatcaatttctattacaacagtaaaatataaactggaacataaatcaagatcaagaacttattctgataatttggtaattcattatattacatccatgttcaaaatatgtgtcacaaagagtactgtggtgtattgaatatagtttatagttcaaaatgaactacatatttcaatagtatagtccactgctaagtgtatagagattatgatacacccttaagggatatagagatcatggtccatccctaagtgttatagggatcatgtggagttatgaatataatccagagttcaatagatataaaagatcgttgaactgcat

SEQ ID NO: 338362 - DNA, 798 bp, Cannabis indica
taagggtgaaattctcccaagtataatctctgtattaaatacatccataaataagaaagactcgtggactaaggctcattaacgccccaaccacgtaaaaatccttctctctttttcttacagctcaataattttataatattttattagttgccgaaaatctcggtcaacaactgtcaatacattgcaaaacatcaggaggagtattactgtgtaccttttcattgcgcatcctccatatggtgtcaacaataatagaagcataaagaaagacttcctcaacccgaatccccctatatctaagatcccagatgaatttcacccagtcccagacacgaataccagcatcacaaacggggtagattccccaaggtgaagattgccacaaatgcatcgccacctcacacgagaggaataagtgttcaatagattcttcccaccgaccacacaaagggcagttagaatcctcgatctgaaaacgcttaccgatctcgtatctaacagggagtgcacttgagagaatacaccaccaaagaatcttatgtctttccagaattttgctgttccaaagcctattccaaagcgccggggcaacttcacagtgaggggctctttcaaacgcctgagttaagtaagctgacttgcacgagaattgcccgctactttccaaagtccaaatcatccaatccttaccatgaccggcaggattaccaccttttaagattgtcgaaacagtctctgttggaaatattttaccaagatctagatttactaccaagtatgttttattaacaacct

SEQ ID NO: 338363 - DNA, 549 bp, Cannabis indica
cctttggtcaaaagatcacgaccccacttaataccttgccaagttaacgaaggagaatgacccatacttgcttcaaagaacgagttatgtggaaagtatatgcttttgagtaattggctgaggagtgaatcaggattttcaactagacgccacagttatttagctattaaggcttgattaaagttgatgaaacaccgaaaccccattccaccctcaccctttcttttgcatagcaaattctacgagcgccaatggattttagatccatttgcattcattctccactaaaaattagtcatcatactctcaagttggttgcaaaagtaacccggtagtggcataagttgggatagattgaacaacagccttgagaaggacttcacgacctccaactgagaaaatcttttcactccaagagtgcatgagtttccaaattcgttccttaatgttactgaaaagctctttcttgtctctactcgaataggagggtaggccaaggtaacgttcatgacactcacggattggcatggaaaggtgttaatagcattt

SEQ ID NO: 338364 - DNA, 944 bp, Cannabis indica
gcaaaggaagagtaaataaggtcgatacattttaagacatccgggtaagtgttattgtgtacctttttcatttcgcgccctccagatggtatcaacaacaatcgaagcatagagaaagacctcctccactcagacacccctgttattaagactctaaagaaatttcacccagtcccaaacccgaatcccgttgccacaaaccggatatatgccccaagtggatgagcgccacaggtgtaacgccacatcacaagatagaaataggtgttcaacagattcctcccccttccacacagaggacagcaggtatcctctatttggaatcttctcctaataacaaatcggacggggagcgcctttgagaggatgcaccaccaaagaatcttatgccgctccagaactttactattccatagtttgttccaaagtgttggggccatctcaccatggccagctctttccagagcttgagcaagatatgcagatttactcgcgaacctcccattagactctaaggtccaaccccatctatccactccctggcccgaagggttgcctcctttcaagatagcagagaccgtgtctttatcgaataacctttttagtttacaagtgtcccaggagccagtatttgtgaggagatcaaccacacaattcaagttagccaggatttctcccattggtttcggaatgaaaccttttaaatgaggaatccaaggatccctccagatgttggtgtctctaccatgacccacaagcttacaagccccttttctcagaattgccttagccttgaccacattcttccagaaccacgagtcagaatctttataattgcagttgagataatctttcccacgaagatatttggcctctaacactctgcagcataaagattgataaccattcaaaatcttccatccccatttggccaagaaggccag

SEQ ID NO: 338365 - DNA, 597 bp, Cannabis indica
tggacctagatagggatccggatacgaacctagactcagaccaagacccagactgggatcgaaatggtggacctagatttggatcgagatcctgaccaaaatcaaaacttggacacacactcgggacccgaacttggacatggacccgaacctagattgatatcggggtcctgacctagatacaaacccgcacacagactcggacctgaactcaaacacccacacctagaatcagacccaaagctaggcccgtacccagacccaaactcgaacccagaccaggatcaaaaccaaggacttagacccaaaactgaatccagactcagatctggattggaacttgggactcggacccaacctagatcaagacataggacgcgaacccacacccggagcctgatttggacctagactgaaatctggacccaaacccaaactcagaccaggactcgaactccgacccgaactcaaacctaaactcatactcagaatcgcaaatagaactagaaccgaactaggaataggaccatgaccaggacctaaacccaaacccgaaccctgatcaaaacccagacagagacctaaacccgaaccgag

SEQ ID NO: 338366 - DNA, 1317 bp, Cannabis indica
agaaccttccaagaaggtgaaagccgagaaacctcccattacattcacggaggaagatgagaaaaacgtgagatatcctcacgtcgatccattggtgataaccattcaactcgccaataaaaggatcaagagagtgttaatagacaatgggagctcggtatatcctttataagagactctgaagaaaatggggctcgaaaaagccaaattaaggccttgtatggtgaacctttgtggattcattagagatagcatcgctagccttggcataatcgagctaacattaaccttaggcaaggcacctttatctgctaccgttatgcaagatttcttagttgtcgacctgcctttggcttacaacatactgttggtcgtccagcactgatcggactaggggcagtcagtttgatcaggcacctctcttttaaatttcaaacaccatatggcgtgggagtggtgcggggtgaccagatgctggctcgcaattgctatcacattaagctgcagcataggaaagccagtcactagttgatggtgatcttggcagaagataatgagaagaaagacgaagatcttgaccctcgagttcaagacgagaaaaacctattgaaaccaatcgagcaattggaagaggttattctcgacccaggaaatcctacaaaatgtgtatacattaggaagaacctggacgagcagcttaaatagcagctaataagctttctgaaggtgaaccaggatcagttcgcctggagccatggagatatgatagggattgaccctaatatttactgccatcatttaaatgttgatccaaactacccagcgaagagacagaaaaggaggcccttggattctgagaggcaatgggcactaaaacaggaagttgacaagttgttagtcaacgacttaatacgcgaggtgttttatccctcgtggatagccaatcctattctcgtctcgaagcccaacgaaacttgaagaacttgtattgacttctccgatctgaataaggcgtgcccaaaagactgttttccatttcccaagattgaccagttagtggatgcaactactaggcacgagcttatgtcatttatggacgcatattctggatataaccagataaaagtgtatgtcccatataaggaacatacaagcttcgtaaccaacatgatactctattgttataaagtcatgccgttcagactaaagaacgctggggcaacgtatcaacgattggtaaaggaaatgttcgcaaaccaaatagggcaaaccatggaggtttacatcgatgatatgttggtaaaatcaataaaaagt

SEQ ID NO: 338367 - DNA, 570 bp, Cannabis indica
gagaggaataaaaccaaatattggttactttaaagtgtggggtgtcttgcttattgtaagaagaccgaaccaaatagaaccaagttgggttcaagggccataaaatgtgcatttgttggttatgccaacaatagtaaggcatataggctattggatgtggaatccaatgttgtaattgaatctagagaagtagaattttttgagaataagttgtatgaggacaactctcaaaaatctacacctctaagtgagaatatgttatataaaaataattctcaagcttctacttctaaaagaggatctcaagaggagatttctgctaaaatagtagagcaacccattgaacctaggagaggtcaaagggtgagaaaaaagaaaagtctaaataaggacgaaatagattctcaattaatttctttctacgtggtagaaggaactagagaagaagtactaaggaaaattcctttaatacttcttattgaggatgatcctaagacttttctagaagccatgcaatctagagatagtgctattttggagagtaagcagttgatgatgagatggactcaa

SEQ ID NO: 338368 - DNA, 689 bp, Cannabis indica
taaatctagtgaaccgacaaatcatggaaattaaatttttaaatatatactcgaaaaatgcccccatgacctcaaaatcaacccaaactttgcaaaactctcctgtatacctaaacaatgcatatacaatataatccaactagaaattcttagaaaaagtcactaaatcaatttatgccattaaagatctaaacttgagtttcaaagctcaattccctcaccaaagctcaaaactaatatccagagcttaaaatcaattcaaaataagcttagaaatcagactacaaaatctttaaaccctaacaaccactaacttcaaaaatcccatactcaaactaaagaaaaagcttcaaaacacatactcaagagttctagggttttaccttttctttagactcacaaaaccttgattaatactcagaaaacactagcttggagatgaattttcccccttgtttttgccccaaccgaaagagagaaagagagagagaattctatattttggtttttctttaatttcctttactttgtttcaaatgaaaggggattgattaattaatcccttgcagaaaatactaattgctatgtgtcatctaattaggcagccacctaatcatcttaataataaatgacaaaaatgccccttaaacttaaaactagggtatttcttaagctaggggtaaaatggt

SEQ ID NO: 338369 - DNA, 907 bp, Cannabis indica
ttgaggctcatattgggccaaggtgatgagattgtgaggcccctgtttgggccgagatgatcccattttgattcgaggtgacggaggcataaggaccctcattttgtctgaggtgatggaggcgtgaggcccctttttgggctgagattatgatgagccgagatgacacgatggtgaggctccacttttggtctaagacgatatgttgaagcccttagggctaagatgatgcatgttgatgcttctagggccaaggtgatgtatattgaggcccccatgaccaaggtgatggatgttgagacccctagggctgaggtgattgtcatgcttcgacctctctaagtaaaacatgtacaactttctcataaaaactccaaatgagttgattcaaaatgcgatttaaacgaagagaaaaatatctaaaacttttaggtgttgatgctttccaaaatttgaacaaaacatggtcatatttaggtttgaagtttggtctgaggtgatgaggaagtgttgtgaggagatgcctcctttttggtcctaggtgaggagatgcttcttttttttggtccaagatgaggagatgcctctttttatcattgtctttgttatttttgtaaaattagggtataacattttctcctaagagtatgctaataactcaatgagtaatacttttgaatttcttctaagacttgcaaaatagattaaaataaccctccaattttgacttcatggacttggagaaaatacgatgaagttgatatagatggcgatgaacatttgaaatatagagccttgatctaaataaatttgaggtttggggtaaaaaagtattggtggggttataagcttaggaaacccccattagggccgagcttatcttctcttcctttttgttttttttttt

SEQ ID NO: 338370 - DNA, 586 bp, Cannabis indica
tcccaccttggttaaagcttcaaaaaggaagctttctcctcttttctgcatgcgccaagtgtcactcaaagactcaatttgctatttttttagccaacagaagcttgccatgtggcaccgccttgcccaagtcagccaatcaaaatgcgacacgtggctttccgaaattaactttgtttatttgcaaaattacccacacgcaatttgtaataagtttaattgcacattagtccttttacccttctataaatagaagtttaggtttttagaatttagttacagttttagagtttcagacagaaaaatccagagaaaacgctcgacttttgttagataattttcttatggatttttaagttcccttattattaaggaggacgatgaaacctagtgtatttaattaagtgtttatttttattttgattctgagtacaatatatgcctatgattttcgcttcttaaaataatttctttcatctttaatattacgtatttttgatagttagaaattatttatgcttggttccacattttattaaaaaataatattctttgattttttgtatttacattaaattgtttcaca

SEQ ID NO: 338371 - DNA, 1295 bp, Cannabis indica
agttttatatactaaatcatcgctccctagactttgaactctacccaatcatcgttcctctaactttgacatgtattaaatcatgcccccctgaactttcatcaatggtaaatatttttttactaaaattggacaaaagtccttaaattcaacaaacccaaaaagtcaggagaatttttaacgaccttaaaagttcaaggggcatgatttggtacatgtcaaagttcgagggaaaaaaatcctaattagcctttttttaatacattggatttcgaattctgtcatatatatttattgaaaattaaatttgagttaaaaattaattttaattaattttgtaccaacttaagttaagtacttttcataatatttattagaaaattaatactaaggatggaaaataaattttttctttttcagatcttcctagggtataatataaatattagattaaaatttatatttagagttatctaaactagtaattttaattaaataaatatatattaaaataaatagattaaaataagtatcaaatgaaaatacaactttttaaaataatgagctttagttataaggatatttgatctctattgttggttctacacagttctaattttagtgagtaatcatccataatggatggacgttcattagcaatttaacgccgtagaatcttgagagataagtattattgtaagtattttattcttagtaacgtccaccccatagtggctgctaagagtatgacttacaaggtatgaaataatggtggaagctcataagatagaatggccttgactctcgcataaacgggacaatgccggattgtagtcttgatcgaataaaaggttgctagaatgatatccattttagataaattgactactctattcaatgaatgatatctttgactcttgcccaaacgggacactgtattagtttgttggaaatcttggaaatattttaagatgtgcttgttttgcattttcacatttcttacttgttaattgtatgataatttttgaatgtgtatgaatttatattgaaccatgttgttgtctgttattaattgtggtagtttaattttgaatcttcattgttggtctaatttagcttgttatttttaatggggaaaattccaaaggattgtcatccattagacaaacataatagtgttagatctcgacagataagtatttgtacatgcaacatctagttgtacatccaaagatgacaacttagactagtgtttacaatatgaaacaatgaagaaataataatataagaataac

SEQ ID NO: 338372 - DNA, 549 bp, Cannabis indica
tggtgccgccatggatgaaccttcggctcttgataccaagttgaatattatggcagtagaaagagagagagagaacgatggagagtgaaaagaatcttgtattgtattgactgaattgaatgaataacagtacactatatatagtccaataacagagtatagagagtacataaccaataacagaaataactgaaattataacaacctgcaactaactctaatagacttagttaaaactaatcttgactatcctcaatactcccaataccgcataccaaacacaccctaaggattttaagcccatacaacctaaggagtttataatgtgatattagttgaattaattcttggtttctcagttcatagcaaccctaatctccaagtacgtacaaaacatgtacattacgttttttttcctcatcatattacttttttttttttttgtcttaatacgaaacacattattacatgataaataatttcttgaataaatcaaaacaaagactagtgatagtttaatttcaggttataatattttttaaaaaaaaa

SEQ ID NO: 338373 - DNA, 523 bp, Cannabis indica
caagatctgaacctggatctctatctctccttcttttgatgctgattctccttcttgattggattctacacaatcttccatactatgattgagataccacttgatgtgtgtgggcactactctatcactagggtatttcgaaattgaagagaagaaaagagaagaagaggttggcggcttggacgctcaggtttttctctgagtgaaataagattcaagttcatagtttcctgaagccatcactttctatttatagaatagccatttaggtttaggttagaattatatggcattaaaataatgaaaatataaatggtaaaataacttgcatagtggccggccatgatgtggataatgggcctcactttgcaattttgccattttgtcattttcaatcccattttctcaaaagaaaaatgccaattttccaatttaaccatttaaatgtcaattccaattattaataactaaaattaatattaaataatattgtcatttaatatatttattaattagatatata

SEQ ID NO: 338374 - DNA, 653 bp, Cannabis indica
gcacaaaacccaacacttaaatccatggaagttgaagctcaaagttaggaatggagaattagcatcgatccaagctaggagaaaagttcccctcaagaaatagattagtgtttcatgttgacaaacacaattttatcaattgcattttttgggttctatttccactatttcttgtaatgacgttcaattatatgtcgctcacatgaaacaagagctttacgttttaagaccggatataccaattgcactaaataacaaactttttaatattgctaaacctagaaaccataaaaggaaggagattgataatattgatgaaacatatctatggtatttaccacttgatcatataggctatgatagacttcataggttaaccaaaggtgatccattaaaaaatgtcaccttgggtgaattacgagtttatgaatcttgcctagagggtaaaatgagtaagcattatttctctgcaaagggagagcatgctaaagagcctttagggtattgtggtaatttttaacttgcaagtatagatttcattttaacaagtaataatcacaaagagtgaggtcgatcccacgaggattgtagttaagtacgttgaaattaaattcttacttctatttggctaataaaattttaagagaaaattt

SEQ ID NO: 338375 - DNA, 718 bp, Cannabis indica
aactaggctccaaacattgagcaaaattcaccaaatcccatcttcaagagcttaaacacaagaaaaaaactcaactataaattcagagctgcacaaattaaaaagagaaccaatctaaactcaaaattcctctcaaaacacagcataaagcatcttacataaatctttaacgcaatcaagcattaagtattacaaattacactaatatcaacatacatgcatctgaagaacattcaaagctcaaagacctatttatccacttccattttagcaacaatttcaaattaaaacagtaagaaaactacctccaaatcttcaactattcaagctccaaagaattcacaaaatcaagttgcacacaagctatttctccacaaattcacaagttgataaagatggataaagagagagacgggaattggtttgggggctgagaaacaaactgaaaaaaaatgcatttactttatttaaaatttcttttttgttgtagacaaaataaagggtcaaaaagacaataatgcctatggggccataataaagcataggcagcaagcaagggtaaaaatatcattctgacataacacccaattcaattaatttttagatttatcacacattaatcaaatgccaataaataatctcgaaaattaattttggccccgaacccggttcggcgcaaaattcctaattgtgactataccgcgccgacttgtcaaaa

SEQ ID NO: 338376 - DNA, 1015 bp, Cannabis indica
acttaatgaaattattaattttaataatactttatattatatacaataataaataattaattgtaacataaatatgttaatttcaggcaagaatgaccaaaaatagagaaagtcagggtaagatgaaacttcaaggagaatggggatcaaatcctattgtagcacatgttgtcgatggggtaactttatatatttatttgtgattgataaatcttattttattcttttaaataaacaataatcacacttgttttttcttaaatataggctaatcccgagacaggagaactttcaactgctgtggatatttttcagaagttccaccatagagacaatactcagcgcaatgaatacgcgcaacaatcttttacattgctatgtattaattttgatatttctttcaatttttttgtattcaaactgactatttattttattttatttttttaggagcaaatggttgaattgattgcaaatcaactagcgcctactgaggatcagcctgctgaggatgctatagatcccatctagtacccacgatacttgcctgttatgacacaagtactgggtgagcgatattgacattttatttataaaaatacttctataaggtaaagtcaacatttatactttttctgtaattttaattaccaaaatactacttaaactatcatcacttacacaatcagacgatggttgcagagtggttactgcgtggttgcacggtggttgcatcagacgaaagttttaattagacgatggttgcgtggtggttgctatgtggttggccgaaggttgcatcagacgaaggtttcaatcagacgaaagtttctgggtggttggccgaaggtttcaatcagacgaaataacttttagcaaaatatttatgcaactgttgtgaaacattaaaaatcagaacagtgttttcacgtacataacgctatctgcatgtctttttataatttaatatgaacaaattcaccattagaaatttggaaaacaacaaaatacacca

SEQ ID NO: 338377 - DNA, 762 bp, Cannabis indica
tagatacataataaaaagcgggaaaggaaagtgaaccagatccaaacgaagaaagaacggagattggttaccttctgggactttcggcgatccaaaagctctagaaaaccctagacagaaatttgagatagctaaagacgcaagcaggagcaaaggttgcgaatagaaaagaaatccaaagccaagcaggtttgtttcggcgcgacaactaacaaggttattacagtcttttcattttcctttttaccaggttattacggttattttcatattcgtgttatcaccaaaattttgtttacactccacaaatttttaaaacaccttattttaataatttttattttatatttttcaaaataaataatattaatttttattttatataaaatttagagtgattctacaaaaaaaatttgattttatatacttaaaaaactaaaagaatttattcttaataatacccctctcataagggaaatttgattttttatccttacattaagggaaatttttttccttaaacctaaaataccttataggaaaattttatttacacccccaaaaagttctaaaggcaccccattttgataatttttattttatataaaatttatatttttaattgtactaatttttttaaacttttttctttcaattcatattcttaaaaaatatacctatcaaacaaaaataaagtatattttaaatattatgataaaaaaattaaaataaaaaattaatgtgaaattttttaagaaaaaa

SEQ ID NO: 338378 - DNA, 795 bp, Cannabis indica
acatattggacctaaataataaaatagtatttttataatgtgtgatgcggtttgaaccgcatattaataatttaaaaccgtgaaccgcaccgcaccgcgcggtttaggaaaaattcaaacggcgatctcaccgcaaagaattccaaacagaatttttattttgcagtgcgagcgatttaagcgatttgagcggtttgatgaacactcctacataaaatacactaacttagggcccacagactgaggcccagcccgtggggttgttatgcttcatatggctagggaaccacttgaggttgacaagtgtcgtgcgtgcgcttcctttacgtattgtagtgtctgaataatggtcgtaggacaaaagggatgttcccttaggtggtacacacactcccagggtgacacaggggacaacctcctaatatagcgggattcggtgtcagatgatcaccatgtaaacctttagcttggattccgaaacgtcacttggaaagcccttccagatatatcctaatcatccttccaaagggtcttgactactttttaaatgggacgatgcactcttctggatccaaaaacatccaattccaagcataaatatcttatatctcgaatggtttagaagctcatccctctgtgtagtctgagcccattatcttgtagggtttttgagcagaccttaatcaattaagttttaattggaaatgtcacgtgcctttttttaaaaaacacgaaaaaataattttttgagacttttttatttttacacttgaaaacttagtttttttttttttt

SEQ ID NO: 338379 - DNA, 568 bp, Cannabis indica
aaatttcttaagaaaaatatcaaatatttaagtgtcttgaataaaatcaacttaaatattagttttcttatttaattaaatatatctagaaaaataccaaaaagtctacctagaaaaaatctatctacataattcataaactaattactaattttctaattaaaatatattttactatatctattttaataaatcattaataaaaattacttgatttaagttgatctaaaattaattgataaattaattttcaactttaatctaattttcaaaattaaaaacttttgaaatatctgcatttaaaataaataaatgcaattcgaaattatgtggaaaataattattaaaataaaatataatatactttgaaaattattctaatttaagtttttctaatcgtattgagactagaactcatagggaataaaatttaaggatggaaaagtcaatatacttctaatgttgaattaggatcaactaggtcagaaataaagctttagaaaatataatttagttactaaaaatttcaatctagaatatttcattaaactaagtgtatttatctaaa

SEQ ID NO: 338380 - DNA, 1025 bp, Cannabis indica
ccaagattaaactgtgagatttcttgtcttttaattttggaatcagaagataaggatgtgatgtgacaacacactgcaacggttgagatcctggtcaaataatttcagcggccaagattaaattgcaagatttcttatcttttaattttgaattcagaatataaggatgtgatgtgacaacacactgcaacggttgagatcatggtgaaataatttcagcggccaagattaaactacaagatttcttatcttttaattttgaattcaaaatataaggatgtgatgtgacaacacactgcaatcgttgagatcctgatcaaataatttcaacggccaagattcaaccgtgagatttcttatcttctaatttttaattcaaaagataaggatgtaatgtgacaacacactgcaacaattgagatcgtggtcaaataatatccgcggccaagattaaaccacgagatttcttatcttctaattttagattcagaagataaggatgtgatgtgacaacacactgcaacagttgagattgtggtaaaataatttcagcgaccaagattaaactgcgagattttttatcttctaattttggattcaaaagataaggatgtgatgtgacaacacatcatggtcaaattatttcagcagacaagattaaactacgagatttcttatcttctaattttggattcaaaagataagaatgtttacactataaaacatgaatatgatacatgatatgaggtacaccaaagaaatatatacagtttaactttgaaaaaatatgaattcttatcttggtagttcatcttatttatcatcgtctttttccgatgatgaatagtatcatgatataaaaatgcaagtggtaggtcaaatcattgctaacaataatttttgtatcgctcaacaccaaaaatatcaaggctcacgtcgaggctcgactcctagtcatataattattaacagtgaccgggaaaatgctgatcataattgtaacaccctaactaacttaggcgtat

SEQ ID NO: 338381 - DNA, 883 bp, Cannabis indica
tcatctgttggcggattcgatcctgcatctccgcaaacctctactcccaatatggaggagcttgtggtggatttacaagacgaccaccctgagctctgccatagccacgaccgcgaccatgagattctggggaattttgtttccctgaccgcctccagtctcaaccatattaccctgacttcttgtatttcgctgggcatccattttaaaggacttagcctgcgaacccataagccaggcaagttagatagcgatcagaaagctcaataccgctcttatggacttaaaggcaacacacttaaaataaataattataatctattatgcttcctaacacactttaataaccacataaaattctaaataattatgggcttactgaaccgtgagccgagctttctctgatgaagattgtacatgtcttggcaagattcggtagacaaacctggcggctctgataccgaaattgtaaagccctaatgctaaggcatgctacagtgctttttcaattacagtgctatccttgctaatcatagattttttatccaaaaatatgtcaaattaaaactttttataataaatattaaactttataatttacataattatttacaaacaccgggatctcgtttctaaactttaatacaaaatgtaccaaaatacaattttcaggacgcacagaaacttcaaaatataaccccagatgtctcgagatcgaacactccaagtcacgctgccacgacatgtacaaccccatcccagctcaagctcactcctgttcagctttagcctttcctttacctacacatggaagcagaattgtgagtcaatagactcagtagaaaagcatataacatatcacataatactgacttatatctag

SEQ ID NO: 338382 - DNA, 576 bp, Cannabis indica
aaaaaaaaaaaaattgttataagatgtaaaaataaaaacaatctctttaaaaaattaccttttaaaagttaaaactcttaaaaatatagtattgctatccaatactattttaaataagagagcgtggtggactaataaaagttaaaactccagaacctttatacgtacaatatcttttttagattttgtagaggttttttgttttggagaatatggtaatcttgaaaggggtactcctgtcattttccacctacggaatggtatagacgtgtacataattttattacatggatggaggaaaaggtgtaataatatgcagccgttcttagcagacaaaaattaaaccacggtataaagttttccactaataattaagagagtgatgaaatcagatatgggtggaaagagaaaagaaataaatatgtaaattagaagctacttatacgagtatagggatacaattagaatcataccattttttatttttatttttggaggtgcaaaattattatatctatctttctttactaatagatcgaaaattaatattaaacaaaaatatatatcattttggat

SEQ ID NO: 338383 - DNA, 620 bp, Cannabis indica
atcagaaccaaggacttagacccagagctaattatagattcaaatcgggattggaacttgggactcgtacccaacatagaccaagaccaaggtcgcgaacccacacccggagcctgatccggacctgaacccaaactcacaccaggtctcgaactccgacccgaactcaaacccaaactcgaactcagaatcacaaatggaactagaaccgaacttggactagggccaggacaacgacctaaacccaaaccggaacacacatcaaaacccagactgagacctaaacccaaaccgaggagaggactcgaactcgaacctacaccgagaccaaaactcacacaataaccgggacttggacccaaaatcaggatagggacctgggaaagagaaataggacagggacctagaacctgacctagacccgaacttgaacctaggacccagactaggacccgagattgggaaacagatctggaccaagatcttggaccaaacccggagtcggtgtctggatttgggacccagccctggacccgaaccctgacaaggaccaatacccacacccaaacctgaacccagtcccaaactcaaaagtggacccgaacccgtaccctgtgacc

SEQ ID NO: 338384 - DNA, 599 bp, Cannabis indica
tggaccgtaatcaccacttctcaaatcccgaagtcggtggttcggaatgagtccaacacaccactttcggaaagtatctaacaattgctgatccggtggcgccaggggatcaaacgtcgaagaaggcctctgtctcttcttcgtctccgtgtagtcacggaaccatacaggaggatttctcttcctcttccgactcttaaccactgcaggttgtgcctctatcgacagaatgtcaccctgggactcgctgtcatgtacatggataacacctgtatcgatgggagtcgctggagctccctcataaggatcgtacccgtcagggaagacctcctcctcttctagtgggggtgatgcagctggtagtggggtagatggatctgctggggcctccggtgctgaagctgtcgttggcggacgattcaacatggccaatatgtttctgagctgctccataattacgttctgaccacccttcagctctacatggctggtctcgtatgccttcttcagctcggcatgagcagcgtacataccctgagtgtcagcctcgatcctatccaacctcgccactaaatcagtgtactcggcaccacgaacgc

SEQ ID NO: 338385 - DNA, 579 bp, Cannabis indica
aacatgatttgaaaagttcatttgtttttcaaaaatccgtgtgctttgtgatattacattcttgactaatttcaattttgtgctttaaaagaacataggatcatattaggtaattttctagtaattaaattggtttatgtatgttaattgggacatgtggaaagacgtttgaaaaattctagaacttgcttgcttgctatttgaggcaaaataataaattatgcatcactaggaaagtgatataggtattttttttggattgattgtgcctttcaagccatccctataattttatcctagttacccccttttttttagccttaatctattttttgtttctacacatattgagcctagaaatgataaacccatgaatatccaaaaatttaaccctacttatacataagtgaatctttagtttgggggaatttggatgggaagtttgttgtatgtgtgtgagaaaacgtgtggaaattgagagaatataaaaaaatttagattgacagcaacttgaaaaaaaatctgacaaccagtgtcaaattcagaaaaaaaaaataataatataaagttgttgcaatc

SEQ ID NO: 338386 - DNA, 560 bp, Cannabis indica
gagcagactttctgcgaatcctgcacctttttctttctctcggggattaaagtgggattattcccatggttttcctcagaagggtaccgtatagggcttggttccgtggtctttggtttctaagtgctcggtgaggactcttctgatgtttcttcgagtcctgctaggatggccttagggtgtatgtgaattcctgccgtctccatggctttttgcatggtgacgatcacctcttgcatttttctattctgctctttttgggatgcgatctcggcttcatgattagtagccttttgcctcaaatttagtaactctgtatagctaccttcatcgtaagagtcatactcgtcaaagttctcttcgtactcttcatctttggcctcatctcgctcctcagagcccacgttcactgttgaggctactttttcgtcctctgggttttgaccatcctgagggggacggggttgatgtgtattgttgcgagtttccaccattgttgacctaacttttctgatattgtctgtttaaagacgctttcttcaactctcaatgaaaacacc

SEQ ID NO: 338387 - DNA, 581 bp, Cannabis indica
aaataaagaggattaaaggaaaaagtcaagaaagacttacccttgtgaattccttgaagactcctcccatcagcaactccaaagaagagtcgttgtcagcaccggccagttgctcactcacctcaggaaccaaccggttcatgtagtgggcgagcatctccttgcctttcttggcctctataagcactgacaaaggtggagtaggagcccacatctactcgaaaccacttttggccagctcggatccacctttttgattgctcaggcctctccgagcttcctcctcgagaatccttggacttagatacttttggagttgatgggttcgcaacagttatctcctcgaaaaggtcaatgacctccccgacaggcgccttttccttggaaggggtcccctcgccactcctagatttcttggccggaggaggtgcgcttgagcttcctccaactctcttcttcaaagcatcaagcaccttctgattcatttttgcacggaacaaaaaaaacatggttagagaaaacagacatcagaagcataaagcataatggtcaagatgttggaagttattttaccaggaact

SEQ ID NO: 338388 - DNA, 617 bp, Cannabis indica
atagagaaaatataataattttttttaatttaattagtaaacatattctcaaaaatgtatttaaattacctcaattttgtctaaggtacaattttattgtctatgatatcccagtcgaatgttctgacctggctttcggaggctgtcatttgagggaccatcgccatgtaatgggtgtcacatacaccaccactggtccaccaatttggataataaaatgcaccaagcatccatcagcgtcttcaattcgtctttcattagagttcctatactcgaatcgaagacgaatagcttccacaactcaagattcgccttcatagcgatctaatgtttctgtcggtccaagaatatggccatgtatatgcactccatatccttccaagacgacatgaattggtttggatctccacgaacgagttccaagatggactcatcccagacaaagccagcatggtcagtattggtcttccaagcgtcccaccgacccttcaacgatgaagcaaaccaagatggcatgacagtacacttacgtgggtacaactctgggaagaagtgttgccgcctcctcatcatatggaaagccgcatccaaatactgcacaacacatacaaataagt

SEQ ID NO: 338389 - DNA, 762 bp, Cannabis indica
aaagcaaaatttttaattaatcatgtttttccataaacctcgttgattagcaacgagctgcacaatatgtttaaaatcacgtaatatgcctaagctagttagggtgttacacggttggttacttttcatatcatggtgacataattacaaatgattatgcacgggttcaaatcacacaagttattcaaggggaagctaaaatcccatatccaagaggtgcaatacgctatgtttatgatgcatgtaacaaattggttccttggcctagggaattgattttgactgaagaggtatggaataatttacttgtatttacattaatgttaaattatatatgaattgtattacaattttacttgtaattatgtagggttctctaattaagaagcttcatagttcaaacaactcgaaggggaaagagaaatgtaaaggaaaagagaagatagtggaacatcttgattccactaaatcttatgagaaattcattgcagaggtacttgacaagactcatatttctcttcaggccatgttcttggaatatatgagagtaaaaggtaaaaatgagtttgtgagggttcctgtcaacccatccttattctaccgagttcacatctacataacttccgaagatgtcatacaagtggccacccaagatgaacttacgggttcagctatgttatttggactaaggtatctcattaactttgattaatatatcatatatattatgttagtggagtttgaatatcttagatattcatc

SEQ ID NO: 338390 - DNA, 670 bp, Cannabis indica
acatacaaataagtcagcacaaccacattagaacattattaaaaaaaataaaacaaataacaacagtaaataacagtaaataacaaatcataatacttagttaataaacttacatcattagaaagccattctttgttcgtaagtagcttcttgaaccaagccacaccatgtacaccagtgaagacgtccatcggatacttgtttccgatggttcccactaaccaatttcgaaaactatgtaatagcttctcatcaacgggtcgaagtgggtcaacattcacattggctatcgatggcttcatcttcttcttcatttcggtgtactcgtcaaaccaccttagccttttcttcggtctcttctccatcggtgttggaacgatctctaaaacatgtacctctgaatcttgcgtatctccaatggacgtgatcgacatgttctgaggtgtatggagtacatcttccacattatcaggtctgtaatcattaagaagaatgaactcatctcctagagagacgaggtctggctgtggctctacctctgcactgggccttttcggatctcccatgagtgccaatagggtcttcaaataacccattatctatgtctgtcctctcagaatatccgtctggccttgcttcaaagcaacttgttccctctcaacacgctcca

SEQ ID NO: 338391 - DNA, 729 bp, Cannabis indica
attttttttcttttttttttcctattttttttttctttttcttcttcttttgaattgaacaaagaacccaaatatctccactctctctcccaatttctatttctcttgtgtgcagcatcagctaaccaccccaagtgttctccgactaccccaggtcacatgtgaagactcggtttgaccgagtcaaacctattatatatataataaaataaatgaataaaataatatatatattaaaaaaaatcaatattagatttttttaaaaaaaaccccacccctatcgtgtctctctctccttttctctttctctttctctctcttcaagcttcaaagcaaacccacaaaccaccatcaccaccactctccggcgacccacctccggccagcgactaaccccacacgtcggacaaaatgaatctcctagtgccggcgacctcaccccccccaagcggcgccgctcctttcgccaccgttagcttggggatcgcaagtcaatgtttggtgattcaaactttgaacaaattgttcggtcacctccggtgtccgtttgacgagtcgtcttcaccactagactcaactcgtcaaggagaacaacctacactaaaccattttgcccagctcgctactttttccagtgacatttttatagctccgcccctttccgtcgacttttcagcgacatcgtgtattgttttgacaaacggtcggcatgggtgtgatctactcgtc

SEQ ID NO: 338392 - DNA, 999 bp, Cannabis indica
ggaagtggaccaggtaccccttgcaaagtgttgcattcttgcggcaaccctagaggataatgctcaggattggtttagccaatttcctgaagcatctatttcaacataggagactttagtcgacctctttctcatgcactttcaggccaccatcacctataggccaccctataccactctggctaacattaaacaagaggtcggtgaatctctacaggattattttaaacgctttaatgttgaagtaacaaaagtagagaaggccccgagtctttgttagtttgtatgttgataacagatgtcctatcgagaactgatttttggaaggagctgcaggcctcaagacttatatcgttggtcgagtttttcgctatggcaaaaccacataagaggattgagaattctctagctgaactagagaaggggaaggataagcgtgagtcgccagtaccgcgatcacgattgcgcagtgctagaggaaaaagttctagggggaggagccctagaagacccagttcgcaaagacagcgaagtccgaagttggccaaatcctctccaaagaaggagtcatctcccaagaggaaaggacatccacgctttgtgaactacacagaatttgcggttcatcggtaccatatctatgcaattgaagaaaagaacggagtcttcaaaaaacctcccctaatcaagggaaactgcgacaagagagacccgaaaaaattctgtaagtaccataaggatattggtcacactactctggaatgttggtttttgtaggatgaaatagaggaattaattagacgagggaaattcagcaagtataagaagagcgaggaaggtcatccccaagcgcaagccaaagaagaaaatcacaatgcgagtggttttagaactccttgcaatatattgaccatcatcagtggacctcacatcgcaggacattccagaaaatcgaaggaacgatatgttaggttttgtgccctaaataaaacccattac

SEQ ID NO: 338393 - DNA, 956 bp, Cannabis indica
gagcatttctaaactcttgtttaccattgaatgccttagtccaagttcgaagtttatgagtatccttcaagaatctcctatgtcccatataacaaactttccgagaatgtttcaagaattcggaacatgtttgttcttcacaaataggacaagctttataacccttcacactatagccagataaattcccataagcaggaaagtcattaattgtccataacaatatagctctaagattaaattcttctttcctgtaagcatcataaaccttaacaccttcatcccacaaaatttttagatcatctatcaagggggctagatagacatctatgttattaccaggttgtttaggtcctgatatcaacaatgtcaacaatgtgaattttctcttcatacacaaccatggtggtagattgtagataacaagcataactggccaagaactatgcttactgtaagagatgagtaaggattaaacccatcagtagcaagacctagacgaatattacgaggttcatttccaaaagaaggccacttcatattaactctcttccattgcaaagtgtcagctggatgtcttaatttatcatcatctattctctcatttgcatgccacgacaaacttttggcatgtttggcatttttaaataaccgaataaaacgaggaataggcggaaggtaccacaataccttcgcaggtactccttccttaacatccacaccatttcttttctttttccatcgtgactccccacaagtaggacacgattttaaatttgaaaattctttatgatacaacatgcaatcattaggacatgcatggattttcttatattccatgcctaatgtacatattgtctttttgacctcgtaaaatgaaagcggcatctcatttttctccggcaataagtcattcaaaaaaataagtaattctgaacaactagtatcactccaac

SEQ ID NO: 338394 - DNA, 962 bp, Cannabis indica
ctctctctctctctctctctctctctctctctctctcccatacgcctaccttaggctctccatcatcaaacgatgtccaacaccataagctatccaacatcctaggctaaccaacgcttgagttttgccaggcattaattgtaatcctaagggtacgtactatagcagatcccacctatagcgatcttgatagtaattccctcgatttaatacaactaaaagaggagtagatcattacccgctatcacaagggggtcgaacctctataacaaatcacattgtctattgctttttattcttatttgtgcacacacttggcaagcatcagatctgcacgaccccactgtcagttgatcacttttcaaggtcaacagtttggtgctttcattgagagcgtggatatcgtgatctgatcaaattccatggtgaacacaagaagaactcctatcataccatctgcatctttgggtctccctcaagatccacagattgcagatctaaacactcgggttctagtcacaactccctatgaatactgcaaatgtggtgaatcccgtcaccacaacaggcacaacaagtttggctaccacagctgcccaacctgacgtgagcatcccaatggatccaagtggcaggcccacgcctccaggagcagattcaccattggtgcctcccactaaaggaaggacccaagggcgacagcctccaggatcaacaactggacctcaactccggttctacgcaagagagacaggtccaggagtgggtgagtcagaaattggcgagcctcacctggacctaggagaagactttgagttggccagactcagggaagctgtaggtcgtacaggcctaactaaagaaccacgcgctgctaattgcgatgtattcgctcagcagagacgcgaattcctaagatggatggatatgactaggagtacatcctttgatctcaccaagaa

SEQ ID NO: 338395 - DNA, 451 bp, Cannabis indica
atcataaattaattaaaaaaattaattaatttaattctgataattagaattgaagtaggaatagtaaatatctaactacaaaactacacaaaaaatcggaagttaattccatgaaatagcatgaaaaatcgaagaaaacgaaaaaaatttgcaagcggtacggacagtatgcattgcatactgtccgcgcgcgctcacgagggtgtctggacgaggtctctcggtgctggaggctgcaagcagccattccgggcgtgcaccatgacgatttcagacaaggcacccatgtctgaccgagaaaactcggacacaagcctgtccgaagcccaagcgtccgaggaatgaggctcatccgcgcgcgtgtgtggggtgatgacaccctgatattttctggttttcaaaaagtaaattggttaatttttccgaaatatccaataaaataattccaaaa

SEQ ID NO: 338396 - DNA, 673 bp, Cannabis indica
tacaacgaagtcacattcaaagcataagcatgcaaaggaaaagcataaagggaactagaaacttactcaaagattcgaatgtccgggttcgagcaagcccaaaatcgtctgtatgcacctcggcaactttgatgccagaaagttctctcttttcgctctgaagtttgcttagcaacgaagggtgatgaaatgaggtaatgtgccagtactccaagtatttataggtagaagggtaactgtacgtaaaggaaccttagacgcctcgacttcccgccttgaaagcgaatatgggaaatcaaaataatcgagtgcaaccgtcaacagtggagagagaaactcgaattttcaaaatattaattgtcagagcattaattagccaaaaaccgaagggacgcctagttagcttcacattgagtctcgaacggtcatgctcaacacggtcagctcggaataagtctacacgcaacctcagaggtcccgtacagacttggggggcaaatgttatcccaagtttggcactctgacgtgacatcacaagagtggtgaaacgtggactatacttagagcatttgttctgatcaatatgtcgagcaggatgcctcgctcgcatattcgaaatggaatactcaacgagccgtgcaaaatgaaccatacttagcgaattcaactaaac

SEQ ID NO: 338397 - DNA, 1111 bp, Cannabis indica
agcaacctatttactatgtaagtaaaaggttactaggggcagagtctagatatccgctctcaaaaaactcgctttgtgcctagtccacgcgtctcgcaagctacaaccctacttccaggcacaccccataaaagtgttaaccgatcagcccttgagacaagttttatcaaaactagatgcttttggaagattgatagaatggtcaatcgaactggggcagttcgacataacataccacccgcaaacatccatcaagggccaaaccttagcagacttcttaatagaaggaataaatcaagaagaaattttgcctgttcaccgagacgcggacacttggaagttatacgtggatggtgcatccaacgagcagggctcaggtgcagggtaatactgatttcaccagaaggctttgagtttcattatgctttgagatttcaatttgacgcatcaaacaacgaggctgaatatgaagccttaattgttggcttaaagatagccgaggcattgaaagtcaagaatctcatctgccatagtgactcacagctcatgtaaaccaggttctcggggaataccaggccaagggcttgaaaatgggtaaatatttagagaaggttcgaaagaacttggaaagattcaattactttaaaatcgagcaaatttcaagagaacaaaactctaacgttgatgccttggcaaaaatggcctcgcagaacgatttggatgaattaaacttggttccagtagagatgctaagtgagccaagtatatgtgaaaaggaagatgtagagacgatagacaactctccaacatggatgactcctataatcaactatctacttgacgggcaacttccaactgacaaaaacgaggcgtgaaaactcttgtactcagtgcctcgatacacaataattgaaggcatactatacagaataggttatttgatgcctctacttcggtgtgttctccctacagaagcaaacaaaatcatcagagaaattcatgaaggtttttgtggggttcatgcaggttggcagagcctatctaagaagatcattaggcaaggatattactggccaacgatcaataaagacacccatgagtttgtcaaaaa

SEQ ID NO: 338398 - DNA, 823 bp, Cannabis indica
tcatactttttattttatagctttaattttttctgtatgaaattgtcactgttaggttaaaatttggttaacgaaaatctgcgttaacagtttggtgctttcattgagagcctctgtgaaaaagctcaaacaaaaccctcctttcttttgaagaaaaaccctctcattcatggctgaaaatccaaaaaatgttaatacaccacatgaggaaactcaccatcattctgggaaagaacccatgggctccagaaggtctaccaacccacaatctcgacagaccacccgctctaggaggactcaacctgagaatagccccagcacacggaccacatgttcacggaggactcaacctaatgttggtcctagtacgcgaacaacacgctcgaggagaactcaccgtgggagtggccagaaccctaggacaagggatgaagtgcccgatcgtggaggtgccctgtttatgggagaaggtacttatgaaatagaaaactgccgctgaagacgacgtctggaaaaggtgcggcggcggaacgctgaattagaatgtgatgcagtcacggccagggtggcacaggggaaagaacagagcatgaagaagcaagcgtaacctcgaggtggtcaaggacccacagttgatcaactcgaagaggagaaggtactcagcaagataatgatcgagaaagcatgggaaccagtaaatctgtgagtcactcaaagacgaagtccatgagtaggacaaattctttgagtaggacgcgatctatgagtaagacgaggtctgtcagcaattactcccaacagaatctgcgagagcacttgaatc

SEQ ID NO: 338399 - DNA, 519 bp, Cannabis indica
ctacaagaaaacaaacatctcttttaatttttattactattggttattatccgtgatcgattgaaaagaattgaacgaagcttctttaaatttgtgcctctcttgttttgcagtacataaaatgtgtttatttccataacacaatttctctgatttaaaggagtggagaaatgttgaaatatagtgctatgtatattaaattctgctttgcttgctcagctaactagtcacttggctgactccacaaggagatttgcagtagtaatcaattgaagctttggaatgcacaaattatacttggcttttataatttatattgctcattggtttgggaaaatacctttttaatcacacacatgtatgtatgaattaactttttcatgtattatagctttgaaattaaaattttacttgtagtattttcataggttgtaacctcttagcactttcattattccatttggtaagaacggaatttgtgaattacttgaagagttgtctctgtaaataggctttcta

SEQ ID NO: 338400 - DNA, 596 bp, Cannabis indica
tttcccgctgctaagggagagcacgaactttttttcaattagagaacattgctggaaaatcaaactggcaagaaattgaaggtgttaggaacagataatggcttggaatattgctaaaatctattcaaagatttctgtgccaaagagggaatagagagacataaaataattatcaaaactccacaaaaaatggcttggttgaaagaatgaataggacactacttgaaagagtgagatatctattacttgaagctggtttagaaaggaagttatggggtgaggcactcaaaactgtttgctacctcattaacagtgtccatctgttgcaaacaagtttagaacaccacaagaaatgtggacagggcatatccctaagatagatcaccttagagtttttggttgcactgcctatgctcacataaaacatgataagttgcaaccaaaagattcgaagtgcatgtttctaagctatctaaatggtgttaaaggctataaactatggtgcttagaacctgatttcaagaaatgtattataaccaaagatgttgtcttcaaagaggatgaaatggcaatgaaaaccaaagctcttaatgaca

SEQ ID NO: 338401 - DNA, 513 bp, Cannabis indica
aatcttccaatcaaagcttctagccaaagagactgaaaatcatattatcctgaaacaaaacaatacataacacagcattagtgaaaattcaaaagatcactaaacaatcaaaaccaaacaacttaataaagaaaaaaaacttacctcgtctgattcttctatctcttcaaccttctcttccttctttgactctgcggcagcagctggggcagcgtcggctccacctgcgggtacacagaaagcaacagcaccaccacaaatgggactaatgctagcttctcccttcttgatgcaattagtgccgtcagatctttgcccttgacctcagacaaaaagaaggttaatcttctcatcctctgcctcaattagatctgggaatttttagtggaattttgtttgttgggtagatctaaatatacctcaaaatctaaatgcatcaacccattttcttctcttcaataccatgaaatttttctcagccaaagatctcaaaaaaaaaactctcagactgaa

SEQ ID NO: 338402 - DNA, 445 bp, Cannabis indica
aacatacttgtgagtagatctaagatcctggtaaaataaattccaacagaggttggtcagcagaggtcagtcgtagtcggagaggaaatcggcagaggtgaagatgagaatcgtgaagaaattagggttaaattgaaaaatctaatagaaagttatttatggaaaatatgatttgtaaaattgaaaatgtgaaaactaaaacgtataattgcaaatcatgctccctagactttgatatctaatttcattcaattttactgtttcaggtactaaatcatgctccccagactttgatatctactaaattatgtccctcaaacttttatatgtattaaatcatgccccctgaactttcatccacgttacaattttttaactaaaagtagacaaaagtccttaaatttaacaatcttaatagtcaggggaatttttaatggctaaaaaa

SEQ ID NO: 338403 - DNA, 928 bp, Cannabis indica
aagaaaaaaaataattaattaattaattatttattttttaaaattaaaataataacacccaccaataatatttcgacatgtggcatttgaattgggtttaacgaatctgtcaacttggagaccaacggacaaataaaaaaacatgaccttgaggactattgccgctatttttggaggttggtgacttatctgtatcaaactgaactttttggggacttttgccgcaaatttccctaatattgattgattctcacattaggcttgttggtagaagtagtaaggtaactataaactacatgttagtaatgggtttggttaattcactttctaaggttatcacaatataatttatttatgtatgaaaacgtaaaatatatatttgtatatattttgtgaatgtagaatatattttatgtatgaaagttatctcaaatctggaacatctcacaagaaatgggttggtttgggttatatagaactataatgtgtccaacccataaccaacccttaattatatggcttatcacttttcagcccaatgaaccatgacttactcttaacattaccctttactataaaaaatgggttgggttgaccgggttgaatggtttggcccatattttgtgcacccctaagagctgggattgagaaattttattaagcaacattatcaataatgttggctcaggttagtgagttaatgagtgttaagggattatactatggatgacttactatgattatttccttgtagctcttgagattgatatctctaattctaattatcaataaagattggcgacaatgctttcaaactggagtatgaccaagttcacattgaacttaggatcagaaccaatataattttcgtgtattgttgtgtctgaaagctatctagatttatttgtgttatttttctagtttaatg

SEQ ID NO: 338404 - DNA, 462 bp, Cannabis indica
accagggcattcataacacagccattctgcccgctaccaatgttcaaacaaccattgaagatgacactaaaatccagaacctccgtgctgctcttggagtcatgcagggtcatactaacaccctgcatcatgatcaggaggaactctgtgctgcggtgaatcttgcgtttgaagagcagaggtgcatgttcactgaatggagataaggagatagaaacattaagggctcagcaagcagtcattgacgaccgtagtcggtatgccactgtgttgatacgaaaagcttatcagactaccagagaacagcctgtaatcgtcatccccatggaggaaatagacgaagatccaacgatgaatacctcccagactataaatggtcagccgccaaaatccccggtcacaggttccacatgtgggccaagttgaacgggggcagactttatctagtaattcatcaagaga

SEQ ID NO: 338405 - DNA, 679 bp, Cannabis indica
taagtttttaaggaaaagaacttacgtatgatgcggaaggcagttgtatttattagagagaggcccatcatccagaagaagtcttctttaaactctgacttgtttggcaacctaactatgatcttacaatcaccaatataagtcctaagatcataaaagcctcctgtagcattcttcctcgtagggaatactttgagtgtgtaaaagcaagctatctccaaaggagtagggcactcccatcctaagatatggtatagggccttcaagctcgcaaggatcctatatgggatggagtttagctggaatggggcaaccctgaggtagttacagtactccttaaaataatccctaaggggaaggaccgcccagccttgatgtgctcgaggctcaaggctccaatgcccgaggaattactcgtgctaggcccactgcactcctcgtgtattaccttttatggaggaaaccagctaaattccccaagtgccacggaccttatgacacaacctttcctctacttgatgtcgcaggactttaaatgctgccaacataggcctcaatcgacctaaccttggattcgataagttcgacctcaaaagtaacactgggatcctgtggggtctttgtgtgacagtcaataatcgtgtgatccgtaaggggaaataccgggtaagctgtgcaa

SEQ ID NO: 338406 - DNA, 518 bp, Cannabis indica
gattctgcatcttttcaatcgttcatgctattgcatatatatttatcgcagtcgcatatgtatatttaaatatactgcttttgttttcaatcgtttaagtatatttaatggcatgtcggtaaatgtggaagcaatagggcattttaggttgttattaagtactggttactatttggatttgatagatacttttgttgtaccgtcatttagacgaaatttggtttctgtttcttgtttggacaaattaggttattgttgttcatttggaaacaattgtttcagtttatctattaattcaaatactgttggaactggttctcttatggtttatgacaacttatatttgcttgacaccgttgcttcttataatgaaaccttgaatgtggaatcacgtggtactaagcgtaaaatggataatgaaaaatcaagttccttatggcacaaacggttaggtcacatctctagaaatagagttgagcgacttgtgtctgatggaattttagattcaattgattttt

SEQ ID NO: 338407 - DNA, 726 bp, Cannabis indica
aaagatttgggtgaagctgcttatgttcttggcattcggattatcagaaactggaagaacagataccttgctctctctcaaacagcttacattgataaggtgttaaagagattttcaatgacaaataccaaatggacacagatgccttctagatttggtatccatctatccaaggaacagtgtcccactgatcctcaagagatagaggacatagaagggttcgttatgcttcagcagttgggagtctaatgtatgcaatgttttgcactagacctaacatatgctatgcaatagaaattgtgagcgggtatcagacaaacccaagagaggaacattagactatagttaagcatattctgaaatatttgaaaagtattaggcattatgtgttagtctacaaggatggtgctttaaatcccataggctataccgactaagatttccaggcttgtcttgatgactaaaagtcgacatctgggatggtttttactcttggaggtggagcagttgtttggagaagcgctaagcaaaccgcaatatcagactctaccatggaggccgagtacataactgccgctgaggctactaaggaacttgtttggctaagaaagttcttctcaggactaggggttatttctagaatggaaaaatcgctggttttactttgtgacaacactggtgctatagccaacagtaaagatcctcgaagccacaagagaagcaaac

SEQ ID NO: 338408 - DNA, 716 bp, Cannabis indica
taaagcaatatcaaacaatatctatctaaccctaataaagtgtttagctacacatgttcatggaagcaaaatcaaaccaccaaaacccacgtgagacaaaatcaatcctcgtgggattagcctcactcttggtgagtctactacttgttacgatacgtacacttgcgtatgcaaatcaccacaacattagcaattataattaattatcaaataaaatttttatttaatttatttatttattagacccatcaaagtctcttaattaataaacaaatcctaaaatctcttttctcctcaattaagcccttgcttagtgaacattattaaataagacatagtctaatttagaattctaattgattaattaaaaccaattaactgagtctacaagccaatattatctcaactagtgtggggactatgggcctatataatcaacagcccaataaatagttctagaatttaccaagtaaattctctatcttattaatttctccaaactccactatagatttggaattgcactcctaattatatagcacactctatatgttccaaatatagatatactattaattatctattgtttcaatccaaataatcaatgatcctctataaatgatctacattgagtagggagaattttactgttccaccagcttcaatgtattttatccttaaaaaacttagctccttgtaaatgatatttcagtaaa

SEQ ID NO: 338409 - DNA, 1351 bp, Cannabis indica
aaaaggttccagggtagtcaggatagcagtgaaggtgagaataagaaatggtgaccttatcctgagtgttcaagatgcaaaatggagtcatttgggctaatgtagagccaaatcttgttattttggggtagtgggtcatttgaaaagaacatgcccacaattaagaaagactgatgttaaagaataaaagggtacgggtcctgcccaagtgctggctaggactcaaggggactcagttatcggtctttcgaccgactcaagttagaatttataggcaattttataattactattttgatttatattggtattaaacattgtactctcaattgggggacatcaaaagatctaaatggactgtgtatgtatgttatttagtggtagttcatctaacaaggtagacagattagaaaaaatgacaatatgagttaaattaatggtattcctaagtggaatataggacatgagtagttaatggaggcatcgatctaattgattcaaataataaaatattttgtttaggtgtgatctagccttagcaaaggtaagacaatttacgaatattatctggaattctaggtgaattgaaggcgacaattgtgtagtaattttgagattaggtaggcgtgagactaccaatgttagcaagaagtatcttgttttggtacctcaccatgtgagaactccatggttgagtgtccttgactttgggtgattttatttagcaaatttccccatgaagcgtgcaagttagaacaaaatacgttggaaacacttagattggtccgtggagccagtcgtcagttcgggaagtagctagagtgatgcactcgtgtataagagtcatcattctgtgggagtaaggacccaatggaggcttgaagcggggacgttaccgggggtaacgtataaaagaacgtcaggaagagtagtggtatcactaaggtaaagaagattacttgaattacttaaggtgatacggtaatgatggagagacttcataatttactagatagtcaatatggtatataaggagaccattgaaattttaggaaaagattactttattaagcaattatagaaagtcatactcacctagaatggagaaaagcttatgaattgagatgcaatttaatggacatgtatttgagagattggtgaatgttagatcacaaagtaagttgtttactaaacaacgaattatataattgagtgtaaaataaattttagagtggttaaccaagtatgaagatagtgatgattgcaagaaagcaatggtagcgtatgaaccacggagtgaaacattagtggtaatgatggaaaaagaacacgagagtcttagatgttgatg

SEQ ID NO: 338410 - DNA, 792 bp, Cannabis indica
accctgccaaagaagctcatttcgggctttccaaataccccatgccaccatcaatagctcatccaccaaggccactctacccctaccaaaaatgccttaaaccaatcagcaaaggtagcttctgcagaaaactgcaaccccacaccagacctattccaacaagattgtgcaaaatgacatccaaccaaaacatggacaatggtttcttcatcagagttgcagaacacacaacgggggtcaacaggaacatgtttagtacgtaactgggaacgagttggtaaacaccccgagatggctttccacgctaagtgaagaaccttgggaggaactttgactttccatagagccctccataattcagactccaactgaaggccccgttcacctttcaactcttggagatagtgatataagaactcttgaccaactaaaaacctatcggctccttactccaaaaccaagaatcaacattaacatgatcacttagtggaacctgcattatcaagccaatatcccttgcctcaaacaaatcatgtaaaacctcaagatcccattgcttacgatcaatatgcattttatgttttaattaaatatttatacatctgaagatctattgagactatggtacaataataatcaaatatacgattattctgctgcgtacttaatttagtaccataaaaccaacatttatttggatggatttattctattttttgtacactattatttattttaatgatatgatcattatcaaaaaaaataatttatttatataaattaatatttttt

SEQ ID NO: 338411 - DNA, 714 bp, Cannabis indica
ctcgaagccacaagagaagcaaacacatagagaggaaataccacatcatcagagaatatgtggcaagaagggacgtactagtggagaaagtggacactgaatacaactttgttcatccattcactaaagttttcactgcaactacatttgaaaagcacagacttaatttaggattaattgaaatgtactgattgttttatgttagtgcaagtgggagtttgttgcgctttgtaccctaaataaaactctatttcaatgtaattttttgtattcaattatcaataaagaaacaaatttaatttcattacttgtttaatgtgttatttggttcatgtgatcatttatttatttgatttataaattcatccaaattcttatcacattgatattcttatttattgtgttgtcaacacagtggaatgtaatcaagattgtgtgacgaaatgtattcctatgatttatccactactagaaaattgcgttttagtgaaacacattgagtaactctaaaagtgtatagtgacacttcaacgcgcgtcactaataagggtgactggaaagatagtttttagtgacacttcacacgtgtcactgaaaccttttacattcattttctgcgcgtcactataggcatctacagccacacacatgaagtgtcacgatatcttttttacttttttttgttttattttttattaatatttttggagatat

SEQ ID NO: 338412 - DNA, 681 bp, Cannabis indica
ttagtttcttgagttgtaagaaaatggattttgcatggagttgtgattttagctactgtttttactgttagtgtttgatagtgtgttgtcgagtgaatttcgcaacaccaaattatattgtattattaataatcagtaagcaatttatgtggaaaggcaagtgcgagtattcaacctagaatagcgagtactcgactggaaatgagagacaggtgaagggttgtcacgaagaggtgaccttttagttgtcccatcgagggtttcgaaaaatgacgggtgtaattattactttttataacatttatggtgccacgtcacaaaaactcctcggtttccgtgtaagcgtggccatcattggtcgttggattgggcgaccttaggcattccggttgccacgtgtcgtgatcccaattaataagggatatgggtatttaaaccctttgatacaaatcaaaacctccattttttccctcttgttcttaacttcctctttccctctcttacagagaagagacttcgaaaccgttatcattttttgcccagatttctaccattcttttccaaagtatcctcaatttcataagtgatcgaaagcaatcgcagggacaacttgctaaaactaaaggttagtttcgattctcgctgtattttttgttttctgtgtttgagaaagaacgtttt

SEQ ID NO: 338413 - DNA, 1015 bp, Cannabis indica
ccacttgtgcaagcacaaatagaccaacttaagagcctagtaaaaggtctaactggcccaaaactcacagatctcaaactagacccggcaagaagatcacctctctcacctgaagtcaatgctctttacctaccctcaatgttcaaaatgcctatatggaagatgtacactggaaaagaagatcctatatctcacttgaaatacttttagatgcaaatggatctacaaggagttagaggcaatgtacggtgtagaatttatccgaccacactagcataggcttcccagtaatggtatttcaaattatctataggaaagttaattcatggattttcttttcatctgaattccatgcatagttttcctcctctcgttagcctccttcgcacctggaagacctggtagaagtgaaacaaatctcaggagaacctctaagggcctacattataacgccctgactcttagggacgccacgtgtgtgcttttacaaacttattaataactaatctattagtttagagaaagtgtggtttaattgaaacgtttgattaaaatttaacatagaactttcatacaaaatactgtcataatacggggatcccttgtttataaaattcttttacaactagttataaaactgctattacattattacaaatgtaggttacattttcaatcataaaaaaaaagatttatcctgcttctcagaagccaagacaccacgactgatatgtacactgctgcagagacctcaaactcatggctgcccagttttgcctttccctttacctgcactatttagcacccgtgaatcacagagactcaacaagaaaaatgattaaatccataaacattattaaatacaattaatcttactataagagaaaaacgtagatataacacatcacacactaacatacttatacaatttcattaaccacgagctgcgtatgtcactatcgttgctagataaagcaaacgataagtaagaaacctatctgttgggttttatgcc

SEQ ID NO: 338414 - DNA, 590 bp, Cannabis indica
ttttgtgaccataataattatttatggcgggacaatataatttatggttgtttctgaaactatagaaaattattttgttgataaaactttttgtaaaattattttattaataaatttttaagtaaattgcagtataaatatttaatgtttcagattttatacacttaaatattttatttttatttttagagacaaatatatatatatttttataagtggagacaaatatacttaatattacaattttcctacatccgttactacaacttttgttaactcataaatattatttttttttttaaatttaatattcttaatattattaactaaatgctgcttgttcaaaaaaaaaaaaaaacaaaagttactcataacaatttttactatgataattacgataattatgttcctatatactgtactggttctactcaactatggtaatttaggtattgtcatctctcttattttgttttaaacctaagtagccattttttttctttttcctttctttactaatccttgtaacctttggtcctcgaggcaacgtagtcaagactctaccgtcaacggatatgtaagatattgaa

SEQ ID NO: 338415 - DNA, 967 bp, Cannabis indica
ccatctttcttcttaataaacaatactggagctccccacggtgacacaatgggtcgagaaaacccaatgtcaagcaacccctggagttgaattttcaattatttaagttctgctagagccatcctgtaaggagccttggaaatcgattttgctccaggtgccaagtcaataacaaaatcaatttctctctgaggtggtaaacccggaagttcgtcgggaaaaacatctagaaatttccgaaccacctagatgtcatctagccgaactgagtcagctctagtggtatccaataccacggccaaaaacctttgacatccctcttgtaacaattctctagctgttagcaccaaaattactgggatctgagatccctgaaccgaatcgagaaagacaaacggttcttcaccttcaggttggaagattacaatcttcctcttacagtcaatactggctcagtacttggataagacatccattcctagaataatatcaaaatcaactaaattcttctctatcaaatcagcactcaactctctatcttctattctgattggcatagacctaatcaaccttttggagatgactaactctctgccaggcagtagggttccaaaccttgattcataactatcatgcgatctatccattttactgaattcttgttgccacatacgaatgagaggcccaagagtcaaataacacagagaaataagagttgttcaccaagagctcacctgttaccactgaagggctggcttctgcatcagcctgagttatcgcgaacacccttgctggagtgggtatcgctgcagtctttggtgtctcagttctaagcttggggaaatcccttttgtaatggcctggcatgcttaactgaaaagcatccttcccctttacactcccccagatggtgctttttacaactggggcactctgggtaagtgtatcgggtttcggtgccactctg

SEQ ID NO: 338416 - DNA, 651 bp, Cannabis indica
aagactgtgaagaatccaaacaactgaaggagaatcgggctcaaatccttattatactctgcgacagaaagtatacaagggttagagatctgagtggaatgagtcattatattccgctggaactgatttaaagtttctcatactttagatgtgtttaagtttcattgttttagagattcatatttaggatgttaaaaacatacgtgttagtaaatctaggtattggtaaaatataatctaacaaagtaatcaaatatgacatgggtatttatctaaatcaaagaaaatatattaaagagcttctgaggaagcatgacatggtcaatctaaaactgtgtctgtaaagaccgcttagcttaaatttggaaattaacagataattagggtttaattatgaaaattagttattaattctaaattattaatttatgatgattcacttgaattcataatgcattttatatgtcatctataaaaattcatatttttgcatgttcagtgttcgacaacattggaacgtggtgtatggcttagttgaatcacatcttagtattttagtatagcggtgcgatataattagacattggaaatgtcgagattagtcgggaatttagaattttccaaaatacccttagtacctttttatgttgt

SEQ ID NO: 338417 - DNA, 987 bp, Cannabis indica
tttacagtttgggtttctaaggtgattgcagtgcttgctgcaatatggttttctatacgattttttgttgcaatttaggttgcagcgctagttgcaataggcgattctatgtacaattccgaaaaaaatacaagaaaaaaaaattgtttttaggtgtaaaaatgaaaaagccccttatattttttactatataaatatattttttttttgaatgaaagtaatctttattagacagaaacatccgctaatacaattggctgaagagcaatgggaacattgctctcagtaaaaacacgacctgaccaataacaagcatcacgtgtcatacagtgcgcgactttgttagcagaccgtttaacatgatcaatagaaacattacttaaagaagataaaataattgacaatcttgaacaaataaacaaaaaacagaaggcatagagaccgaactaagaatagcttgaacaactaaaatgcaatccgtctctaaaatgacatttgacttgttattcctttttatcaaactaaatgccactttgacactttgaatttctgcaattttgggtcggcaactgacagaagaaatagttgaaaatgcctcaattattcgaccatcacagccgcgtgctacaaaaccaataacgatctcatttgtggcttcaaaaaccgccccatccacattaatttttaactatcgagcagccggtttggaccagtgttctcttgtgtcagtgtgattgaaagccagggaaaccgagtccagccgcttagactgagcacatgtccattttcgaagagtcgtacgagccagcaggacaacatcagcaacactacagcttttaccattccaaggcatatcattccgagccttccaaattgcccaaccaaccatgacaacttcttcaaccaaccccatattgcctaatgccaacacttccataaacaagtcaaaaaaattggttgcagtagaatcaccaacacctaacgccg

SEQ ID NO: 338418 - DNA, 816 bp, Cannabis indica
agaggtatgtttcaaataaatataaaattagatgtaaatttgattaatttattaataaaagtggtatttttcaacttacccctatatattgaggaacgattaatggagttttaaggttttctaactgtgtattaaaaaaaaaaatccaacttgagaattgtaatacctttaagattattattaatacaattaaatattaaatgttatgtaatttaatatattaatttttatgaaatattattatttaatcgcaaagtatcatcgctagacactattaatactttatagcaatgtaatttcaactttgacaattattttagggtttgtttggaaacaactgtataattactatgcagtgtaattactaccttagtaattacactatatagtaattacattgtattttaaaatacaatgtgtgtttggatgtcaagtgataattacatgtgaattcctaatatcatgtttggcatgatagttagtaattacacagtaaattgatattataatatttaaaaattaatttcatcaattaataatttataaataaataataatctcttcataaaataaagtcaaaactataacaattcagtaacaaatatttaaaataattttttaagactatctaattgctcttgcgttccatatattttgagctattatatctctaaaattaaacatatattgcttgtcatcatctgttggcctgtcaccaagttcttcatctgaatcaaaatcaatattgttcaaactttcacaatttcctattttattttccatgtcctcttcaaaaaaattcatcatcccaattcc

SEQ ID NO: 338419 - DNA, 568 bp, Cannabis indica
taagagccattcattccgtgggagtaagggcccaatggaggcttgaagcggggacgttacagtagctctccaggaaaagtaggaggtctttgatgggaaacacacgattagggatgagtatttagacttgtccatggaggtcaatttgaagtacatggaatttccccttcgtgaaagttggcttgctcaaggtaggaagctgtatgagagtagtccacagacaaacagggctggccagagtgatgaggaggtactggctgaccatactcttaagctacctatcgaccagcctgctggagcactggccagccaacctattggaacattggccagccaacctatagatgaggttccatctgaccaaccttccatggactaaactacaaagcctgccccagaagctccatctgtccagggcttagtttacttgaacccacatattcatgtgattattccggcggatgtttagagacttatattgttttttttttttgtatttaatgctttaatttgttatattttatttttgttcttgtatggcctatatgccctttactttaaacatgtt

SEQ ID NO: 338420 - DNA, 519 bp, Cannabis indica
gatgccacgtcagagtgcaaaaattgggataacatttgccccaagtctgtacgcgacttccaaagttgcgtgtagacttcatccgagctgcttctgcctttggatggggacacgtgtcgggcgcgactgtccgagactggatgtgaggctgaatgggcctcccttcagtttttggctaacaaatgctttgacaattaatatttcgaaattcaattatctctcaccacggttgatggctgcacttgattatttttcatttcccatattttcttttaagggtgaaccaaggcgtctgaggtttctttggaatgattacctcttttcgtgacttgcctataaatatcaaccagcattgacatataaactcattttcactatccttctttgctaagtgagttcagagcgaaaagagaggtttttggcttcaagtttgttgaagtgccttcattgaaactgctcgttggattgacgttgcttgaaccctgacatctgactcttgagtaagttcttgatttcctt

SEQ ID NO: 338421 - DNA, 528 bp, Cannabis indica
ggtccgatgggcccgatgggaccttaaaaaatggttttttgtttaatttttgggatcgggcccaattttgtccgatggtcgtgtctgattttgtccgattattttcatattaattgcaatgaaagatttttggtaacttttcggtgagatttttgttctaaattgtaattgtattttgttttaaatgtatgtgataggttcaactgttaatgcatgtgttatgtataatagcgtttgggagcttgatggtacagattgggtttataaacggggcgaaaatttgacatttgacattgatccgaacctaagctactcaggtttggttgatgttttgtacgaagaactggatgttgacaaagtggagtatgacttgaaattggaagtaaattacaagtacaggaaaggctatgagtatcgccctgaagttattggaaatgataagcgtgcaaggtactttttatctacacttccgaagaagccagatgaatttactcctttgtttgtgactttgttaaagaagaatatttg

SEQ ID NO: 338422 - DNA, 837 bp, Cannabis indica
caactttgccttccacctttggcatcttccctggggggttatgcctgttctggattcaggagcccgaatgtgggactgggttacttttctatggaatcttaaatccaaaagagttgatactgatgagttgttcctctatgccttgattgtggtagatacgatttgaagggcccgcaacgacaaggtacataataaatcaatgggtaacattaaacactatattgactctatttcttcttgttacacagattatggctcctgccttcttccccctccacgatctattaggactcaggcttggtctccgtcgccagaagattgggttaaaatcaactgcgatgtcaaagtcggaggtgaaactatgtgtgctgtggcgattgcgagagaccataacgaatcagttttgtgggtgctggctaaaaggctacacttctctgacccactcactggagaagttgcggcctgtcttttagccttggagacggcagtttctttgcatcatccttttgttctggtggagagtgattcagagattgttatgaagaacttaaaaggggaagactctattggggggattgagaactatgtacgtcattgctcctctctacttttatgactaattgtaattttttgtgtatagctagaaactgtaactacgcggccaataatgtggccaaatgggcatttgccaacaatgttacgggcatggtagagatatctactatacctgttaatatcttttgtaatgaccatgaggtctaacttcattttatttataaacgtattttcaaaaaaaaaaaatacctattttttaaaatatttatgaaaatgcactct

SEQ ID NO: 338423 - DNA, 701 bp, Cannabis indica
tcaggaactttcaaaatctatcacacatgcttatcacagacttcctcaggatttagatgtaaactttaaatctcaatatgaaatatttaccattgaagcaacacaaggttagcctatttcctcaacaaataatttatcacactaatcattttaatcatatcccgctcaaacaaaggaaaccgtactgactttgtacatttgttctacgtacctaaatagaatcaaagaaacttactgttcctacttacccaaataaattcatagagccctaccattacttgattttctaacaagttgggcatctaattcatatttcacattatatcttcataactagcaaaggattttaatatcgtgacataacttagttgttcccgtgtataaaaatttatagagtaatgtgaaatccatttagaaccttctgttcgttaaccttattgactggtacacataccttgtctttgtatcataaaattccttcaaacaaaatcaaaaagtcctttactgagcctgctccaaatctttctttgtacccctataatttggagtcaccaaactgaaccatttttaattcttttcaataaatcaaactactacgtaatgccaacaaattctcctatcacgaactcaatccgtgctctgtttatatttcccagcaaactttggtgaaatctctttctggttatatctaaacctcttcg

SEQ ID NO: 338424 - DNA, 688 bp, Cannabis indica
ttctctgtacaactataagtcaccacatcatatatgaataagaaattttccaattaataatttaacacttatgtatatatcaaaatgatcaattctttattaaaaatctgaattatctttatatgttttttggagtataaaccttaacaatctcccacttgccctaaaaggaaattgtgcatctcccttagtcccatattagttatatgatccattaaagattttactaggagtgtctttgtgaatggatctgccaagttatgttccgacacaatcttcaaggctttcacatcacctctctctactatatccctagtagatggtacttcttctcaatgttcttgcctttcttgtggctctttggttccttggagttggccaccgatccactattgttacagtagagcattagtggtttttatacttctggaactacttctagagcagtgtaaaatttcttcaaccataccactaccttagttgctacatattacccttccatggttgaatctgcaatactggtttgcttaatgcttctttagactacaacttctccaccaagagtaaatactaacctagatgtcgacttttgactatctttgtctgattgaaaatcacaatcagtatatcctgtatgatttaactctccaccagaatatacaagcatgagatctctcgttctctgaag

SEQ ID NO: 338425 - DNA, 1055 bp, Cannabis indica
catatgcaatgaattcatcataaaaaaaacaagtagggcctttgtctgtcttctctctctattactagctaactaatagctgctaagttcctgttgatctacattttcttctccttctgttatctcagttccatttggaacaacattagttggtgttgtaggagcaacttactcacattcttatctgaaacagatatactatgtttagaagtggtcttggttttcatggccattttatcttcctgaaaaataacatctctactaattaagcacttcttgaatccagattctaagcaccacactctatatcccttagccccttcagggtagccaagaaacatgcttctcaaagctttaggctataacttatcttgtttaacatgcataaatggagtacatccaaacactttcaagtgatctaagtttaggggtttacatgtccatatctcttgtggggtcttgaagttatttgacacagatggtgatttgttgattaggtagtaggttgttttaagagcttctcctcaaaaggttttgtctaaaccagctcctgataacatgcacttaaccatttcaattagtgttctattcatcctctcaggaacaccattttattgagggattttgatcacgatgctatgtctttggattctcactttggcacacaatcgcttgaactcatttaagcagtactcaaagcaattgtcaatttttaagaccttgagtttgtttcgagcatggttttcaagcaacctcttccatgtatcaaaggttcctagagtctcatatttgcttttcaacaataaacccaaactttcttattgtaatcatcaattatactcgtaaaataatgtgctccacctttggttggaatcctagatggcccccaaagatcagaatggacaaaagctaacctctttgtgggtggtgtgttctgccttgttgaactcaatatgcaagccttccccaaaacacattcatcacagaattcaagtctttctattagcttctctttgaatagtccttgcattttcatttcctcaagtcatctctgt

SEQ ID NO: 338426 - DNA, 614 bp, Cannabis indica
atgttattcatcgatagggaaacatttagtgtcaagtttaagtccttggaaagtgatgtaccgtatcactcacctatgttatgactgatgtgatttaggagactgtaattcgcctagcagctgttccactcaggttgaccaggacacctaaattcggaatcgaggtaagattagtataatatcatgcatatgcttatacaggtttagcatacatgttagatgccgtcagaatagcatattagatttatcttaggcaaattttatatatccataagattatcatatcagggcaacagtgaggtatacatagagttgcaccgagattccatcagatataagctagcttatcagatagtatggattaactgctaccacatcagtgcgattagagtactgagtataggctagattcgcgattaatcatactttgtcaagaacgttcctgattaagttagggctatggttaggtgtatgggcgcctgattataacctaggatttagtatgtttattatgttatgcttttcttactgagtctgtcaactcacagtgctattgctatgtgtaggtaagggaaaggctaaagctaaggagccgtgagagcgagcacgtgaag

SEQ ID NO: 338427 - DNA, 849 bp, Cannabis indica
tttttgataacaaagtctaaggctttcttggcggttatggtcttcataggctcggcatctgtccactttatgaagtaatccacggccactatggcatactttgccccaccctttcccgttagtacattcctgatctgcaacatgcattctaatctggttgtacctagagtaggcatccctgaaagatagcaacttaaatcctgaggtggcatccaccatttaatcaattcggggcaaggggaagcaatccttcgggcaggccttgttaaggttagtaaagtctatgtagactcaccatgttccattcagtgtgggcaccaatatcggattggctagccattccaggtaatacacgtcccagatggggccattggtcagtaacttgtccacctcttgctccaaggcgtcggcctttagcgggtcaagcggacgtctttttttctgtaccggaggcatgtctgggttgacattcaggacatgggtgatcacgtgggggcttatttcagtcatatccccttggcaccacgcaaagacatctgtggctacccttaacgtatctatgatcttgcttctttccttcggttctaggttttttcctaggcagataactttagtggagtcaaggtcgcacacacttacttcctcgatgttctccataggttctatggttgttttggatcatcttcttctgtcaccaagggctcttcgtccctttgtaccattaaaactgaaagatgtactacaacactgtaacattgactcgcctctccttggttccccctcaccgttcccactccagcctctcgagtagggaacttaaggcgcaagtgtcgaatggaggtgattgct

SEQ ID NO: 338428 - DNA, 707 bp, Cannabis indica
attcatagccaacacatcttgccatactcgaatcaatagctcggttgcacagaaaaaaaaaattttgccagagaatcaaaactagcaaattgcagccagcccgagctaagttctggtttggtgaggtaaattgaaaattattttggttgaattgcatacttggtgggtgtagttggactgctagtatatgctatattaaaatggtgttaaacattatcattatgattcacgggtggtaaccgagtgtgataatgttggtttggaagatttgaattggaatttggtggcatttttgaatattgggctgagaaagattggaaaatttgagaaaagtagtgattgtgaaattggggttgtaatttggaattttttttagtgtggttttgaatgcttcactgttctctgccgtgtttgtatgatggtgattcttagtgaaatggtgttgaattggcagtggtagtgttagacatagtgcaagtgtgaactgagttgtggtgttggataaattagacattggaagagttacacaggggaagtatcatggccaagtactacatggattgtgtgtaaggtgtcaaaattttacttggtgtggtgtgggttggcaaaagtagtagtttttgaacaagagtgggttggagacagtgaagtacattgtaagagatcttattgtgttgaggggcagcagtgagtaaggaagcaaagaa

SEQ ID NO: 338429 - DNA, 1198 bp, Cannabis indica
ctgaaggaagagttagtgcaggagcggtaatcaagcgttgctttaactccaggaaacttttctcacaccgatcagtccaaacaaacttctggttctttcaagtcagctccattaagggtataactatctttgaaaaccctcaacgaaccgacggtaataaccaactaaacccagaaaacttctaacctctgtagctgatttcggtgctcgccaatcccgaacagcttcaattttggctggatccaccatgatcccatctttatccactttgtgccccaaaatgagacacgagataaccagaattcacactttttgaatttagcataaagcttgtgatcccgtaacctttgcaaaactgctctgagatgcaattcatacttttcttctaattcaaaatacaccaagatgtcattgataaacatgattactcatctgttcaagtaatcctggaacatctgattcatatagtccatatcaaatatagtatacagccttagcccgtcattcaccctgatggtattcttgcattttgaatactctagatatgatcggaatgaggacctgcgaccttgacggccacctcggtttccccaaaactttctatttccccctgatgctccggaagcctcagccttccgtttgtgctcagggttgctactgtcggtccccttactgacattaccactagcaggagggttcgatgccatgacgacatcctttgcagcctgctctttcattacttgctgctcggcctcctcagcaattaaggccaagtctaccactctcttatacagagtgtcatgtgatgtggtaatcttcaagtcccgactaattgtagcattttgtcctcgaacatacttctatttcctggtgaaatctataggcaccagatcaccagcaaatttagataaccgatcaaattccagagtatactcggccacagacatctttccctgagtcaacttcacaaaatcttcctgatgtgaagttctcacagcaacattataaaacttttcttcaaaaagtttcttgaatttttcccatgtcataacactgacatctcgggtctgacccactatgtcccaccagacgcgggcatagtcttgaaacatgaaggccgcacaattcaccctctcagctcccgtcacccccatattatcgaggatacgggtcacaatgctcatccactggtcagcct

SEQ ID NO: 338430 - DNA, 609 bp, Cannabis indica
gcctgcatcgccccgccgcactcactcgcccagccctgcgtgccccgcactctcacgcgccccgcacgcccgcgaccccacacacccgcacgctgcgccctgcacgccccacacgttgtgcccgcgtgccccacatgcccgcacgctgcaccccgcgccccgcgtgccccgcacgactgctcttatttgcacgcgccccgcgtcgatcgcccgcttcgcctattcccctttacttcctaacattagcaagattaataagaagatgtcaggagggataatgacggcataatgagtatgaataatggagacaaaacttcagttcatctaaggtacaaaatgaaaggagtatttttagtagggctgtacatcggtcggtttgggcggtttatcctatatattttctaaacccaatctaaagtttgggttgctaaaatttaagtgcaacccgcccaatttaaaacaaaaattgtaaaccgactaacagtttgggcagtttggtcgggttaactgcccaaaccggccaaccttttttttcggtttcaaagtcaataaaaattaaaaaaaataaattaaaaatatcaaattttaccaaagcacaacacaatatat

SEQ ID NO: 338431 - DNA, 1222 bp, Cannabis indica
catggtgtgccaaagtctatagttttggatagagatccaaagtttacttctaaattctggcagagtttacagcgggctatgggtaccaaactgaaagtcagtacaactttccatgctcagattgatggacagtctgaaagaacaattcagatactggaagatatgttatgagcctatgttatggattttgggggctcctggagtaagtacttacggttgatagaattctcgtataataaaaattatcaaagtacaatagggattgctccctatgaattgttatagggaagaaaatgtagatctcccactaggatgaaacaggggacaaaaaatacttaggtctggaatcagtacagtagagtaatgaagcaatcaagaagattaaagctagaatgcttgcctctcagagtaggcaaaagagttatgcagatccaaaacacaaaaatgtagagtttcaagtaggggatcatgtgttcctacgggtgtctccaatgaagggggtgaaacgtttcgagaaaggaggcaaattatgccctagatttacaagacctttcaagattcttgagagggttggacaagtggcgtatcgtttagctttacctcgagctctttcagcagttaacaacgtattccatatttccatgctacaaaaatatgtttcaaaccctgcccatgtactaagttatgaaaatcatgagctgcaaccggacttgtcctatgaagaacagcagttcagatcttagacaaaaaggataaggtatttcagaataagaccatagcttttgtcaaagtactctgaaaaaacagcaaggtggaggaagccaccttggagttagaatccgacatgagagctcaatatccagagttgttcaggttagatttcgaggatgaaatacttttaaggggggataattgtaaagaccacttagctttaatttggaaattagcagataattagggtttaattatgaaacttgcatattagtttggaattattaatttatggagatttatttgtattcaaaatgcattttatctgtcttatatggaatttcattattttgcatgttttgtgtccggcaacattggagcgcgatgcttggttattagaatcacatcttagaatttctagtttagcaggccttatagttagacattgagaatgttgggaatagttgagatttttgagttgactaaaatacccctaagtggccttttatga

SEQ ID NO: 338432 - DNA, 1412 bp, Cannabis indica
tctcttctatcattgcagcaagccaactaggatgagatattgcttcacgaatagttttaaaaatagtgacagaatcaagagaagcaataaaagaacaagaagaagaagagagatgattataagaaacaaaagaagaaataggaaaagcacattggcgtttacctttacgtagttcaatgggaagatcatctttgatttcgggatctaatgacaaagatgcaaatgcaagacatgagacaggaagtggaggaggggacgcctggtgtacactataggaggccgagggagtggtggaggtgaggcattgtgggagttatgaccgagagaggtgaaggaacaagagacttgtcagaacatgtatcacgcgtataggatgtgaccaaatataccaacaaatcatcatcatccccctgacaagtaggagtagttgaagatgaaaaataaggtgtattttccacaaaggtaacatcaaaagaaacaagatatttattgagatcgggacaataacacctataccctttttgaagatgagaataaccaagaaagacacattttaatgccttagggtctaatttggtgacatgtggacggacattgcgaacaaaacaaatactgccaaatacctgaggagcaactagaaacaatgacttactgggaaaaagaattttaaatgggatctcaccattaagtacagaggatggcatgcgattaataagaaagtatgttgtggaaactgcatcagcccaaaaaggtttaggaactttcatttgaaacaagagggcacgtgcagtttgaagaagatgtatatttttacgttctacgactccattttgaggtgcagtatcaacacaagaagtttcatgaagcatgcccttagaggtcatgtaagattgaaattgagtagatgtctactctttggcattatcacttctcaaagtacgaacaaatacattaaattgattttgaatctcagcacaaaaagctcagaatatagaaaacaactcataacgatttttcattaaatataaccaagttacacgagaataatcatccacaaaagtaacaaaatacctgaatccaagttaagacaaaataggaggaccccaaacatcagaatgaactaactcaaaatgaacactagcacgcttattgactcaaggactcaaactgacatgatgatgtttggctaaccgacatgactcacagtctaataaagacagcttactatatcggggacaaagtttcttaagcaaaggaagggatggatgacccaaatggtaatgagcctcaatagcggaagcaacactcgaacaagcaatagaggttagtggaagtgggtcaagacatacaagccaccagattcatgttctttaccaataatcttcatcgtcataagatcctgaaacaaacaa

SEQ ID NO: 338433 - DNA, 1340 bp, Cannabis indica
ggtcagccgtccaatccccagtcacaggtcacaggttccacctgtgggccaagtggtaggcaggcagatcttgtctagcaattcatcaggagaggttttacctaaaaattcaacccaagttaatggtgccgaccagctgattggccaaaccagccagtcacagagacagccgtgtgtttctatattcaatcgattgggaacggtttatgatctcagagatgatctgaatagaaggaaagggttagatgagaagcatgatgcgccagttgttcagcccgggcccgggactcgtgctcaaaatcccgctcaaagagatgctaacgtgactctggtcgaccaagaggctgaataagttaatccagccttgtaggcacagctggatgagctgaaaaatatgttccaaggcctggccggtcaaaagaacaatgatctcgagttggacgagcgtggatcccctttctccctagaaactaatgtcttagaattgcctcacaagtttaagatgtcaacctggaagatgtatactaggaaggaagatcccttatcccatctcaaatattttgaaatgcaaatggacctgcaaggagcacaaggagatgtatgttgcagagtttttcctgccatcctctcagaggccgcccaacaatggtatttcaagttgacacctagaatgttcaattcatggaaggctttctcctcgatattccatgcacaattctcctcttctcgccaacttccattgcacttagaagacatggtcaaagtgaagcaaagaccaggagaacctctcggagcatacattagcagattcatgacagaggcaactaaggttgcacgggtgaccgaagatggaaaattgttcgcgatactggggggcattgaagttcttggagaactttggaaggacatcaggaagaatggaccaatagattctatgagtgacttacttgatcacgcaaatggttttattaagcttgaagaagccattcagtgagtagaggttgagcaaaaacctagccagccaaaagttccttctgttggaacattcgtccagctcccccaataccctagcagttcaaacttgagtggtaaacggtccaacaacaacaataggcaaggaaatgggaaaaagggaaagttcgctggcaaaatcgaacaggctcccaaggagaatcctaccaagtttactactttctttgtcctgacaaaagatatagaaactgtttacatggctactcagtcattagccccgtacaagaagcccgcaccaatgaaaaaaggcgtgagtaagagagacatgaccaagttttgtcattttcatggagattatagccatgaca

SEQ ID NO: 338434 - DNA, 638 bp, Cannabis indica
tccttcgtcttctacctccagcagtccacccccaccaccccacatcattttcttcctccacccacaccaccccaactttgtcttcttcctccaatcacaccccgaccccgattcacctccatctcaagccacactccggtcctcgagctaaccggagttccaccgcgcacggtggttgcctaccgtcgacggcgaagcttgtagaacctatcaacaagatctaaaagatctttacaaatagaatacatttttaaaagtcgttttactcaatggatctcaaatacgactagaccagacccaaaactttttactgtaggagctttttaacggggactgagcagtgaagggagctacgggaacctcagagcttgtggtttgaaactcgacaaaagccatggtggccttgagtctagagaacgacgtcaaggcccatggtggcctccattttcgatgacgagacttcatcggtggtgaaaaaacattgagtcccgagatagagggagatttggggccttgcaattggggccgggacttaaaggtttgtcttttcacacttcttccataggtatgggaggattgagtttgagaaaaaaaaaagtgaagaagaggggtcaagtgtggctggaggtagaagagga

SEQ ID NO: 338435 - DNA, 654 bp, Cannabis indica
ttttatttaagtcatggataggtggcttcttggttagttgacacctagccaagttaatttcagcaagggaaaatggattttccttaagctttttccatttagagaaaataggaaaaagtagaaaatcaacataaaccttcctctcttttcctctttcggctgaagcaagcaagggagatttgctgctgaatttctgtgtttcagcaaggaattcaactagaaattaaacccaaggtaagctctagcaactcctagcctagttcttgaatttaaagtttaggttgaatatgtgaaattgggttttaggggctgttaggtttagaaatggttagggttcagtttttatgctcaatattgattgattaaaggttctggttattgattttgatgcttggtgttagttttaagcaagcttgagttttgaaactcaagctttgagctttaatggcaacttgaattataatggtttgttctgtgaaatactggctggattttattgtttatgcattgaataggagctctggaaggtttcatggcaattggtggaggattgagcaacaaatgaaaagttttgggaaaactggtgcaaaccggctagccggtttgcagtgccacaaaaaccggctagccggttttggcagggttccccgggcc

SEQ ID NO: 338436 - DNA, 604 bp, Cannabis indica
aatctaacttttttttcctcatccgatccaatccaattagtaattgaatttgaaaaatcatcatccgatctaatttaattagacctcaaaatcctatccaattcgatccaaagtaattggattggatcagttttttaattggatatccaactacacatttaatttttaacattaacttaaaaatatgaaaaataaatacgtaaaaataaaatatttccatttatatttaagtttaatattctataaaaatatcattgttacaagcgtaataaaactaaacgtttgaaataactaaaataataatatgtccaagtaataaaatataacaaaatattatgaaaataaatatataaaacaactaagtgttacaaatttcacaaaaaaaattactaaaaatataattaatatatatttttttattttattagtttttattatataaattaatataaataattttttaatgtatatatataaatataattggattggatcgatttttaattgaattttaagattgacatccaataactgatccgatctaattagaatctaacttttagcatccaatccaatccaattataattgaatatctattttttt

SEQ ID NO: 338437 - DNA, 1182 bp, Cannabis indica
cccaaaatcaggatagggacttcggcaacgaaactaggaccgggacccaagacccgatacaagactcagacatgaacctaggtaccagtttgtgactcggcacccaaaatggaaccagatcgggaccggagattaggatccgaatttgaacccgaggcttggactgaacccgcagtcggtgtctgaatttgagacccttccccagacctgaacctagaccaggaccctgtcccgaacccagaccaggaccgaacctagtccctgacccaaacttggaaccgaactcgtaccctatgacccgaaattggaaccgaaaccggacgtagatcgggagtaggaacaggaccgaactaggacttggacctggacccagcagcataaccagacctcgacctagacctagaaccataacctgactaggactcgtactcaaaccctgacctagactcgagacccaaacctagacccgaactcagacccaaaaatggaaccagactcgagacacagaaccggggccgcgactcaaaaccgcaccctagtctcggtgtcgaacccaactcggacctcggacacgagacgttaacactagactgagacacgtgaaagggatccaaatatgggactcaaacaatgatctgaacccagaccaggacccaaaccgagaccttgacccaaattcgggacccaaaactggaaattgaacaagaactgccagacccaaacctagaaccaaactcggacctagccccagacccaaaccgaaaccaaaactctggcccaaacacgttcgtatacccagactgtcactgagacctggacccgaacccggagaaggacctagatctgggacccgattacagacccagactcagacctagatagggattcggatacgaacttggagtcaaacccaaactagacctagaccgagattgaaacttgagaactagattcagaccgagaccctaaccctgaccgagacctagacccgcacccaggacctgaactcggaccgaacccgaacccaaacccatacaaggatctggaactggaccaaaacccagacctagactcggaccaggattcagaccccgacccagatccagacccaaacccgaacccaaaaactgaatcaaaatttaaactgggacaaggacccaaacctgaattgacccagatcgg

SEQ ID NO: 338438 - DNA, 769 bp, Cannabis indica
gattgtaaacggaagatggtaatcttccaaccagagggtgaggaaccgtttgtttttgtgggattagttcacggatcccggatcccagtgttttcagtattaacagcttgagaattgttacaagacggatgtttagggtttttggtcatggtattagataccacacggtctgagacagtttggccagcagatctcagggtggtttgggaattttttaaatgtttttcctgatgaatttctaagttttccaccgcagagggaaatcaatttcatcatcgatgtagcacttggagtataacttgtttctaaggcaccttagagaatggcttcaaccagaacttaaggaaataaaaattcagcttcaggggttgcttgacttagggttttcacggcctagggtatcaccctgtggagctccttttattatttgttaagaaaaaagatggatctttgcgtatgtatattgactatcgggaattagataaactgacagtcaagaacaagtatcctttaactaagattgatgatcttttcgatcaacttcaggggaagatggtcttctcaaagattgatctctggttgggctatcattagttgagaattcgagaggacattccaaagacatctttctgcactaggtatgggcactatgaatatttgattatgtcttttggactaaccaatgctcgtgaaccttttatggatatgatgaatagggtattcaaggatttccttgatatttgtgcaattgtttttatcgacgacatcc

SEQ ID NO: 338439 - DNA, 575 bp, Cannabis indica
tgtttaaacaacatacttgtgagtagatctaagatcctagtaaaataaactccaacagaaactaaccatcattctggaaaagagcccatgggctccagaagatctaccaatctgtagtccaaaaggaccacccgttccaagagggttcaacctgagggtggccccgatgctcggaccacaagtccccggagaatcaggatgaacagccagaaaagagacaaccatgaactgatgaacgagaaatccctcatgaaaatgagagggatcttggaagtcaaccaggagaacagagatcacccgctagaaatcaccaacgttcttcccaaacccatagagcgaggactcgtacgtaccctgataggggaaatacgaaaaaactgctctcgggaggaaagaacagagcgtgaagaagcatgtgtgacttcgaggtgatccagaacccatagtccatcaactcgaagaggagaaagtactcaacgagctaatgatcgagaaagtatggtgttgcgataatttgcacacgcaagtgtacgtaccgtttcaagtagtagactcaccaggagtgaggtcaatcc

SEQ ID NO: 338440 - DNA, 815 bp, Cannabis indica
tctacatagttcttgttttaatgagattcatcactaatagatgcttattcattagcaatttaacactgtagaatctcgaaagataagtattattgtaagtcttttattcttagtaatgatcaccccaatagtgactgctaagagtagggttacaaagtattaaacaatggtagaagctcataagatataatggccttgactcttgtctaaacgggacaacactggattcttgtcttgatcgaataaaaggttgctagaatagtgtccattttagatgagctgactactctattcaatgaatgatatctttgactctcgcctaaacgggacactgatttagtttgttggaaaccttggaaataatttaagatctgattattttgtattttcacctgtctttcttacttgctaaatgcttaataatttttggattttgtatgaatttatattgaaccttcatgttattctctgttataaattgttgtagtttcaatttcgagtcttcattattggtctaacttaatttgttgttttaatgggataaattccaaaggattgtcatccgttagataaatataatagtgttagatctctacagataaatatttgtaaatttgacatctagttgtacaatcaaagatgacaacttagactagtgtttaaaatatgaaacaatgaagaaatttataaaataagaataactttgactctcgcctaaacgggacatcgttggattcttattttaatcgaaattatcctttattttttctcttagctttttcatttagaaattgcttagatagtatatcattgga

SEQ ID NO: 338441 - DNA, 754 bp, Cannabis indica
tattcaatgaagggggagatatttgtaattcgttttgttttgtagttgctttgtgtatattcctaaagacatttatatctagattattaactcttttttctgtggtctttagttttgtttgttagtcattgaacataacctgtcaagggggagaatgttagtgtcattattttgtgacagtttttgttctgttcaatgtctagtcgtatctgggtttttagtctgttatatctgcactagcgttctgttacgtgagtttcagttaagtattagttagtgccaggtggacttattttgtggatatataaatagtcggtttctgttagtaattgatttatccattaaatcgttcagacagttatttcggttgtgtgtggagatagagtcgtatcttgtttcttgttgttgtgattacaggtcagatcttggagcttgaggatgttcatcaatggcggaatgatctgaatctggaattgctgagttcaaactgaagggagttcagtgtcatcttcatcatcagatctgaagggatttcaggttgaagacatgttgaagaagagctcagttgctgcacaagggattgtgcattaacaatcagtgttcttgattgttgttggtaattcattactaattgctgttaaggttgtatttgattcctttaaagaattggaaattgtaatatgaacctttgagaattagtggatgaatttaccctggttcggggaacccaagcactagtcggctgagatgtgtt

SEQ ID NO: 338442 - DNA, 775 bp, Cannabis indica
ctaattaattctaataaatggataacaatgatagcacaaccacaaaacgtaaatattaaacaattaatgaataagacatataaataaattttttttttaaaaaaaaaaaaacgcgattctaatattttaaatattcttaccgttttgttttgaaccaacttaattatttggaggaagaagtacaagttgcatgctcttcattagttgcccgttctgaaacaacaatcaatcaatgaatttatagaccaaaaaataatgtctagagagaggaataattcataattaatacacataatagagttatagtagaaacaagaataattatggctgattgaattatatatatacatacccaattgtttgtttttctcccaaatcattcttacgcttgttttgagatcacccatccgaacgcctattatgccatgatcactggtaattattttacgcaagttaaaagcgattgcatttccagaagagaaattctccatgtgagggcattcaaacacatatactctttccaaattaggaaactgtatcccactatttgcgcagttgaagcttttcagattgggtaaacgatgaagctctaaagtatttaatttggggaagaccatcacattctcaccagcttcctcctcatccacaattacttgtctcatttctttacacttgctaatagttatatgctgaagttgtactagacttctggcggtggaggaattcattaaatttatcattccatcatggtttgatatacaaatctctctcaaat

SEQ ID NO: 338443 - DNA, 2160 bp, Cannabis indica
tttatttagggcacaaaaccgaaaaatgggttcatgcgtttttacagtccgtaatgtttgctttctaaactgtataatgcctgtctttcatcttccttattctaagcttcatgaaattttttgccctaactcgtggaaaatttcaaacttcctaagttttgacttttcgttgttcattcttatcctttaatctgttgagtactcctggtcggcatatttgcttgttttaacgttcgatattccaaccaaacactcatcttgtgtgttgtcttttgtagatgaggccaggtgagttttgggagagcgaacatcgaatcgatcaagaattgcttcaattctaggacgaggatcaccctcgcctctgttttagccaaccttcttctagggaaagacattctcccttgaatctttcgcccagccatagaatgatggctcgcaccaaaaagacaacgcgctcggcacgccactttgcccagcgccgaacaagatccaaccgtcaaggggaaggggatcatgaaggggacactgaggtctaagaaattgaggagctggacgatgtccgtcctagtggtccctctgaggcggaggaagaggttgtacccctaaactgtgtgggatacaatgaggctagggagccagtcgatgctgatggagacgtcctggttgagggcgtggactacgtcagtgaggaacttaccccttcggttcctcatagaagactcggctccagcagattcctacacatcactgccctcccctcactcttactcttagggatagagctcaaaagcttgctcagctgccgggggatgaccggaatatcatccagttgacctccgaggacaactttctaaagtacgggctctatccaaaggatttcattcccaggccagtgaaggggaggaagaggaaatctggtgcttgacgggccgagcgagctcatcaggaggatgagttgattcaactgaagcgcgaagtaagttaagaagctaagtttaagggaggtgcaagggccaagcaatatgctcaagagcccttgaatcttgaagatgaagttgaggaagagcaggtgactccgcttaaaaggaggaagaaacttttggccccacccaggcttattgaacatgcaattcgcattagggagcctagttcgccttctcggccgccttctcccgtgctcgaaaaagggaaagctattatgtctgagataaggggcttgtcaggtgatgatggactttcgagtcttgttctggcaatcattttgcagactactatgtcttgtttttaagcttcttgactattatgctttatgcttctggtgtcagttttctctaatcatgttctttttgtttcatgcacacatgtctcaaaagatgcttgatgctatgaagaagacagttggaggagctcagcatctcctccgaccaagaaatctaagggcggtgaagggaccccttccaaggaaaaagggtctgctggggaggttatcgaccttttcgaggaactaactgttgcaaacccctctactacaaaagttgctaattccaaggatcctcaaggaggaagttgggacaggcctgagcaatcaaaaggtggatctgaggtgatgcgagctcctactcgtcctttgccagtgcttccagaggctaagaaaggtaaggagatgctcgcccactacatgaaccgattggttctagatgttagtgagcaactggccaatgttgacaacaacttttctttcgagctgcttatgggaggagtcttgaaggaattcacaagggtaagtctttcttgaaagtttcctttaatcctctttatttggttcggattttaaagttttttctctgcacaggctggtctgaagttggcttacacatactcccgaactaagtctgctgcttccaagaatgcggctctgtcaaacaccatgagggcggaggtggacttggccaggaaggacgccgatgacgccagggtggaacttggagctattcggattgagctgggtgaagtcaataagaagctttttactgctcagaagaaaataactgagttgactaaggatcttgaggcttctgaccagctcgaggagaccatcgaaaccttatttgcagaagtgaatagccttcaagatgaaaggacgtctcttcgagctgtcct

SEQ ID NO: 338444 - DNA, 1283 bp, Cannabis indica
agatctcaataatctccttgtcccaagcacagtcgtccgtcttaaaaaagctgctaacatactagttttgcagagcaggatgagttaaagagacaaaactattggtgcggtgaggaagccaaggatcccttaatattgagatttgatcacctgtacaaatggtttgagtgacacctgcttgtaacagccccttagcttcaaaaatactcctccatatgaagcttgggttatctcccaactcagctggaaagaaagaaccatgagcataatatcttgctttaaaaactttactcaccaaggagtgatcattgactagcaaacaccaacattgctttccaagaagagccaagttaaaatcccacaagcttcggaagccaaggcctgcaacatgtttatgatggctcaaccggtcccaactcatccaactaacacctattttccgaatagaatcagtttgccaccaaaatcttgccataaagcgctccaattctttgcaagtatccaaaggtaacaaaaaaacactcatagcatagctgggaattgattgcacaaccaatttcagcaatacttcctttcctgctcgagacaaaattcgtccttcccagtcctgaattctctttcttattttgtcttttagaaaaccaagaatagcgtttttgttcctaccaactgaataagggagccccaaataagtgtgattctcattcgcctcatatatatcaagcatttggcagaatatatcttggtgataagtgttggtgttgttgctgtagaaaacagatgacttgttgaaattaatcttttaccccgaagccatctcataagtgtacaataattctttcacattatgtgcttcttcctttgtagctttacagtagatgtaactatcatctacaaaaagcatgtgtgaaataactggaactcctctagcaattttgcagcccgttattaaaccactttgttcatagctacgcaacagacttgagaacccctcagcacagaggataaatagatacggtgaaagaggatcaccctgacaaaggcctctttatgcagtaataggacctaactccttacccctatgggaaatcatgtaagaaacagtaccaacacaagacataactaaattgatccatcttccatcaaagcccatcctctcgagcatggcccgaagatatccccattcaagacggtcgtaagccttacttatgtctagcttaagcgccataataccatcacagcccattcttttccttttcaaatgatgcattatctcataggaa

SEQ ID NO: 338445 - DNA, 740 bp, Cannabis indica
agttgtgttaggctaggtttttgaatatgttaagaatggttttgagaggtttctttggctgcttggattgaaatgtgttggatgaagctaaaagttgaatttcttcacttgaacatgtgattttgagttagagattgaattgttgtgtttttaagcttgagatatgttgtattatgattgttatactgttctggaaggtttgagcaggtttggagaagatttggtttggttttggagccaaaaactcgagtttccattttctgcagcagggttaaccggtttcacaggcatagtgaaaccggtcgaccggttttggcagcagtgggggaaaaccctagttatggcttcgaaaccggttttgctcggggtgtttttcaaaacttagaataggttgttttagtgatgtttaagctattttaaactagtggagagttagaaatttgtctgagtatggagctagggtttgtttggaatatggataagttgtttatcgaatttccttgtcgtgacataggagccgggattgcttagcttgttttctactcaggtcggctcgcacgcttgagttttgaactaaggtaagaaaagtggtaagcaccatatgtggttaatttttgacggttgaatgattatatcttgattattatcaagattctgattaaaagtatgttgagcctaggttatatcatagggattgggaacggttactaccgttactagtaattactcttgaaaccgcg

SEQ ID NO: 338446 - DNA, 684 bp, Cannabis indica
tgacagtttccttaatgttgtcaatccacaaaacacgaaatatttgtgtgacggtcaaaatctcgtgatctgtaaggggaaagagcgagtaagttgtataatctcacattgtttgggactatacagtagaaggtcaagtgtgataattttaagactgtgtaggtatagaattacaaagttgtagaaggcttaaatggattgatgagtactaactatatcaacaatattgcatcttcttttcagtagcctatcatttaagagattaaaaattaagcgtgcttgatttgcagctgtgtaggtatacattttcgaattagaaagctctagtaaatgaataagagcattaaatgaaatgttgaaacttgacaaagcaatgtaattaatgttcaaagcaaaatgatgaaacttttatacaaaatttttgtatgagtttaaggataacaacgcccaacatgattctctaaatctaaaagcaaatcgattttcaaatgtaaaacacttgtttcataatacaggtacctgccaatctagtaaatcaacaacaacattctttcccaacccattttctggttgaagtagttccaactctccaggattagaaatcttaaatagagatccaactcttctcttctccttatcaaaaacccctccctcttcaatatatagaggagatataactgcaat

SEQ ID NO: 338447 - DNA, 867 bp, Cannabis indica
aaggtcctaaagactggtcgaaaatatacatttggtgggaagataggtcgactcatggtataataagtgtttatgttatttgttgttgccttacttgtttagacaattatagtgtatgattggaagaagtggtgtgtgttgatattgtttgaattctaaatggttgaaggttttgggttacaggatattggatcatgcaacggtgatctggccatttaaactgcgagctggaactcagggtaggtcgtgtgaaagagcatcctccaccccccaaaactgggaacaactatttgctgccatgcaggagacgattgggcagcaacgggagcagattggagacttgggagagcaacaggctcgtcctgcacctatactggctcctcaggtagtgccattgaatatgggggatcatatggaaccaatttatgagcggtacaggaaacaaaacccacttgtgtttgagggtggcccagacccattgaaagcagaacgacggatgagtatgattacttctatctttgatttcatgcgggtagaagataatgaccgggtacgatgtgctatttatataatacgggatgatgcccggatatggtgggagattgtttcccaaggtcataatctgaataccatgacttgggatgcatttagggcattattttatgagaaatattataatgaatctattcgtgctgctcaagctaaagagttcgcacgattagtttagggtagcatgactgtgattgaatatgctaccaagtttgataggtcggccaagtttgcttctgatgaagtggctagtgatgctacaagaaaggctaagtttatcagaggccttgaagaatatattgctagagatgtggttat

SEQ ID NO: 338448 - DNA, 834 bp, Cannabis indica
gaaaacactaaaacaacactactagaattaatagtaagagaaaccaaaacaaaaaataagaaagtcacaatgaaagaaaaaaaaacaaaaaataagaaagtcacaatgaagaaaaaaaaaacaaaaaataagaaagtcacaatgaagcaaaaaaaatgacttttagttgggtggaatgaaaatatagaaacagtaatgagaataagaataatgaaataaaatttaaaatgcattaaaaaattaataaaaaaaattattaaatattttctcatgttatcttggaatgatctttcattccattttaaaatggaatagtcattctactaaaatggtaaaaaagacattccattggatagtattcaggtattcagccatatggtatgagctacttgtctttatttgcatacggaccgtaccataaattccgggtctaatcttaaaattaagtaacataaattttgggtctaaccttgaaattatattgtattatctagcaaatttttatcagaccaacatcataatctctatatgcaaaagtaaataagatttttgtattatttttatgatgtggtatttttttaaatagctttatgatcaaatatatgatattgttgaaataattaggccaatatcataatctatttgtagtgattacgactacaattacaaaagtaaatgattgtgatctttatgattgcctttgaaaataatagagctagaaaacatttttattatcaagtcttcattgtggaggagattcacatttgtttaagatctaatccttttttatttagtaaaagtttattatataaattagaaacaatacaatacatt

SEQ ID NO: 338449 - DNA, 654 bp, Cannabis indica
taaaataaggtacttttaccgctacttttttttattaaggtcatatgtaataattgtaaatgttaagaaggttttgccacaaatatttttttatggttaatttgaatttttgtctcctaaacttcaatatgtaacaaattattccctctgaactttttaagatattaaaaattctccttgaactattgagattgttatatttaaagacttttgtcgaatttcattcaattttattaattcggtgattgtttatgcactaaatcatgctccttagactttgataactaccaaatcatgctctccaaactttgaaatctaccaaatcgtgccccttgagctttgatatgtatcgaatcatgccccctgaactttcatccatgttagattttccttactaaaattggacaaaagtccttaaatctaattatcttaatagttcaaggaacatgatttggtacatgtcaaagtttgggatgcaaaatcctaattagccttttttattagtcttcttttttgagaatgctctattttttttaataaatcatgcaattttattcatagcaatcaattaaaataatagcttgtaatccaatcgaaaattctcttccattagagacacgactagaattagaattaaaaaaacatgccaaaaaa

SEQ ID NO: 338450 - DNA, 952 bp, Cannabis indica
ttgggtcttgattctgttctaatttagagtttgggcccacaatttttgtcgggctcctgggtccaggtcttagttagcaatctcggtccgagtcttcggtttgggactaggcccaagtccgtgtctgagttcaggtttgtgtccagagtcgagatctgagtttttattcgggtccgcgtcttggtccaggtctgggtctgggtcctagtctgattccggttccttgactcaaacctagactaggactcggacccaggtctgcggtacgatttaggtctgggtcagggtcttggttcgagtccgggtttgggtttgagttttggtaggggtcccaaatccaaacactgactacgggttaggtccaagccccgagtccaaatttgggtcacagtctcgggtccctatctagttcaacttcaggtcccaagtctcagtctgggtcctaggtcagggtccgggtctggggtcaagtcgtgggtctcaatcttagttctcatccccattcccgggtccaagttccccatccaagtacgagtcctaggtctcgatctgagtccaggacctagttggggttcaagtcttggtccgagtttgggttcgggatccaatcttggtttgggtccagatctggctttgagtctaggtccaggttcgggtccgagtctctagttttgagttccgatctgggtttgggttctgaggcccatgtctaagtccccaatccaggtccgggtcctaggtcccgatttgggtccatgttcgggtttgggtcctagtcccgatttcgatttcgattcagtgtctcggttcgggttatggtccgggtctgggttttggtcgaagtcctagttcgagtctgggtccgggtttacgtcgaggttcagatcctagtctgggtctacgttcgggcccaggtttgagttcggatcccgagtgtgggtccaagtctggg

SEQ ID NO: 338451 - DNA, 633 bp, Cannabis indica
ttctttctttctttatttgtttcatgtttgacatttgagagtatgtggtgtactaaaaaaaaagtagtgcattgttatattttaggactatttacaatagtatgaaaaaaaaaagtttatatatttattgatatgaaatttaatggacaaaatatggtaattttagagaaagaaaaatatgaaacctcaacaaaataccataaaaaatttaataatatgtttaaagaacaatggtcattggaaaaattgtcgaagtttgctagagttagtattggtgctggaaaagttgtcggaattggcactggcgctgaaaaatctctggagtttggcaccggcactcacagctgttgtaaaatttgctgaaattggaataactcgaaaagtcgctagaaagtggtcggagttatcgccgtaatcagagttagatgtcggagtcgtcactggagttgaatgttggaatctgacacacagaaactaatttcatttatcaactagttaaaattttaacatataggaaaccatttagtaaagtacaaaccagtttcgtgaaataatcaaatgaaaaaactgaaacttaaaactcaattatgaaaaataataaaaaaaaaaacaagttatgaaactagttactta

SEQ ID NO: 338452 - DNA, 1098 bp, Cannabis indica
ttctgaaatgaagattttttttttgaaatgttttcaggtttgtttaattaatttgttatattaatttgttttatttatttttttaggttttattaattttttttacttaatacttttatattttaggggaaaattaaaaataaaaaggggattaaatctagtgcgtccacgtgtcccgttagtctcactaacggactgagtatgaatggacaaacaactttgtccaccttgggtatttttaccgccaatttttgaggttgaggactaatcggcggactaatcggcatcaactttaaatttttggggacttttgccgcaattatccctaaagatattaaaccttttcttttttggggaggagaatttaaattttgagcattttgtttgtgttgagataatcttaatgtacttattactggttgagttctatattcattatttataaatttatttgtacagcatgtttttaaattatatatgtattagtaagttaggtggtgtttgtttggttgggaggaatgcaaatattagaataagaaagagaatagaaatagaaatagagacggaatggaataaaatttaaaatacataaaaaaattgataaaaaaatcattaaattttttttcttattacattggaatgatctttctttcttttttaaaatagaatagtcatttcaccaaaatagtggaaagattattccattagaatgtcattccaatactttaaaatgtaaccaaacaaatgaatgaaatgaaaattgttttctttctattccattctattttattacctccaaccaaacgcttgaaatttactttttgataatttggttcttaaattatataaaatttagcaagttagtccttaaattttatgtttttagtttattagtccccaaatttttattttcttgaatacataaagtgctcacttttaaataataatattttatttatttattattaattttaaatagctttatgttaacatattatcaaattaaataaatatatattttttagaaatttttacatgaaaaatcctttttacacactttattacataattaccatcacacgcctattactacatttc

SEQ ID NO: 338453 - DNA, 686 bp, Cannabis indica
atttctttttgtattttttttatacaaccgaacattaaaattttgatatagttttatgattgaatgatcattaaataatatgtaactgcacgcaaagcgcggtttgtttcctatttgtatatataattctataaaaaaataataatttaagattttaatacatatgatataaatatatttcaaaacttattaaattaaatttatattctattattatatatagaaaaaaaaaatataacttaaacaaaattaatcatttctttctacatataatttttttctttctttgaatttattattttaatttattgttagagataaaaagaacaataatttgttttgtttttgttgttagttatatgaaaaatatttttaataaatattaaaaataatcaatctaaaatagaagagtgttaatgtcaatctcctgttacaacctcttagtcaatctttggtcctctatactcgaaaacatatatcgaaatatttttttcaattttctttcacattgtttgttatgcttacaacatcattcctgtaaatttttaaaaatttcgaattgtttagtgctaaaaatacgtgaaattttttgaacacacgtggtaagctagaatatcaagaactctatttttcaatactgtaaactattcaaaatttttcaaaaatttacaagaataatactgtaa

SEQ ID NO: 338454 - DNA, 526 bp, Cannabis indica
atatacgactatataaaaaaatagactaaaaaagtctgtcgagtgccgaaacaaataaaattgcattcataaatcacttttaaaaaagtgcattgtagaatttctcaaaaataaattcttaatttcataaatacaataatataaatatatatagatattaattaaatatatataaatatcgcgactacactgcacgtagagaaaacctcaaaactttgcctttaatattgtctccttggagcattaatttacaatatatataaatatatatatattctatataaaatgtggctatacaacagaattcttggtttatgagaaattattgggtgactttttttaaaaataaaaaaaataacaaattattagatgtttccacgtaaagagtcagcatccatgtagttagttaaatctaaatatacttaatccacgtaaagtgttgcaattaataataaatttgttcatattgtttatttttttattaaaaattatttttcaaatttttgatatttagaattagttaaat

SEQ ID NO: 338455 - DNA, 957 bp, Cannabis indica
cccacggcagagacaattagacattcaaaatcacaccgaaaagttccaaattaccaacccactgtcaactatcaatggaaccgattaacctcttgtgcactcaatgaactctcttccctacgacaatctgtccacatcagtttttttttttgtttttttttttttttttaggtctactgctgataactctgttcacattcaagactgttctcaaattcactaatacttctcagcccaatagtcgaaaatcctaccaaatttcaattcaaatcgtccaaaccaacatcatcacaccactgctaatacatttaaatcatactgacaatctcaagcaccattgaatatacactagcagttcaaccacagccactaattaagcactgtaatccaaaataaattgcaaatgaaatcaccaaatcagaacttagcttagattgactgagaaactcggcttgacagaggattctcgattgctgtgttttgaatgaaggtcgaatgagacaactcgggcgtatgggtgcaagctgaagggaacggagatggagctgtgattcgagtctgctgggttgtggaacttggtggttctgattagagggtgctgcgcctggttgtgagtgatgtagttcgaaggagattgctcgggtggctatgggttctggcgggtgcgagctgggtgggtgaatggtgagcttgctggtgcggtttcagtggcgacgggctcaggcgaaatggtggttcgaaggtgggttgggttcacgggagtggatgggttggtgtcgactggagcttgggtgcgatttggtggtgaatggtgagtgaggttcgagttgctaggggttcaggtgaaatcgaatggtgggcacgctggtttgttgaaaatgatgcagagagggattcgactacctggatggtgaaggggacggctgaaggtgggagatgatgaggaatgtgaatggg

SEQ ID NO: 338456 - DNA, 558 bp, Cannabis indica
gttacctagcgtaaaccagttaaccggatcaggggtaggattcccaaaaaatccatttttttattcatgttaatttcagagccttagttcattttttccttgataattaggatattgtcatgctagttatcgatagaaaaacttatagttctgagtttaggtccccagtttgggttttagcgtgttatttacctatttgcgtaaatgtgacatagggcatacattcagaggctgattttttgtttaggtcggccagcacacttgaatttgaaaatgaggtaagactagcataaaacgtattttatatgaatgtgtgtatgtgtgatatatgcatgctatttgtgattcgtgtactaccaacactagtacggtagcagtaatgagtgtgttagtacagtgtacgatgtttaaagagtacagtatggtattaccaacactagtacagataagtacggagtgtatgtggtataacacttagggccggggtactcgatggaggaaaccctacccacactcgtacagtagcggtacatagtgcaagtggtacagtggtcgtac

SEQ ID NO: 338457 - DNA, 852 bp, Cannabis indica
ccacttggcgtggcaatagttagccacgactagtactagaggccacgtacgttaactggatcgaaacaataccatcatcattgttaatatatatgtatatagtagtacggttctgaaattataaagcaatataattggatcaaattaataaataaagatgtcaggggcacaaggagctcagccaaagaattcgaaaacggcaacgacttacgaatcgacacagggaggagagaacagaacgaagatcgagttgaaatcgcgggaggacgaaggaggcattcagatcgataaaatccaggacaaggttcctgatgccgccggtaaaggcggtcccgtttcggtgctgccaacgacgacaaaaccaagatctcggcgttacgggcactggctctgagtgactatagctacttataatcaaactatatatatttaaatatgtacgaatatatatttatgtaactcagtttcgaataggatatatgcaagtttatagtgtagagtttttttttttttgagaataattatcttattataagtttagaaataaaaataagggatttcacctcaccaataagcttgtttagccaagtcatgaaaagtttggtttgcatctcgacgaacatgagaaacaaaaagaaaatagaataattaaattttaacatcaacaataagatcttaaaataaagatgttataccgaaattaaatacaataaaattaaaacgaattactgatagaataatctggctgagttacggacaatgtcactctctttaagacgtttcacggctctgctcgaagtgtgtacggcagtctagcaaccacggcgtcctcaggataaaacaacttctgta

SEQ ID NO: 338458 - DNA, 501 bp, Cannabis indica
ataagaagcttcaagatgacctgcattggcagctttttccaacaattctacaccagacttctttttcttgtgaaaattcaagtattcagtctgtataaatattatatataaaaaaaaattagaaatataattaaaaataaaataaataattatgcgtgatataaaaaaaagttatgtaattattaccaccctaatcgatacatggctactgaattttgactgttgaggcatttcatgaagagggtagttgcttccttgcacatgttcacgttgaatggtctggtctgtagggactctacaagaatatatagtaatgatgttaacaataaattaaagtgtgtataacagaggtgaaagagaaactgcaggaaggttccacaacccaaaaaaaaagcttcgccagtttgggcgggttaacccgaccaaacagcccaaaccgttagtcggtttcatatattatttttttaaaatggggccggttgcacgtaaattttagcaacc

SEQ ID NO: 338459 - DNA, 851 bp, Cannabis indica
acccatctcgaaatatttttccccactagtcacaatgaattcgtactactaacacgtgaatatgaagattggtttaaagttaaattttgttaaaatgactcctatttcaaaaattgaaatattcttttgtttaggataaatttcaacaagttttttccttcctcttacagtcgttagtgttctttcaaaatctcaccctagacatcttaaaaaattgtgaaatttcctagggacgaagccaagaccgttgtcaataaattttctattgggggtctgggtttggggtttggggtttgaggttttggattcaaggtttgagggatttgggtttaggatttggggtttgtggtttggggttttttgggtttaggggtttggggttaagttgttttacattaggtgtttggggtttgggtttgggtttggggttttgagtttggggttttgggtttttatgtttgggatttagggttctggggtttggtgtttagtgtctttggcttttgggttttttgggcttgaggtttagggtttggggttttatgactagggtctagagtttaggatcttggacctagtatttggggtatgaggttttaagaatggggtttggtgtttgggttttagggtatggggttttagggtttgggtttggggtttgggatttggggtatggtgtttttgtgtttggggtcttaaggtttgctattttttggattacggtttaggtttcgggtttgatgtttgggatttttaggttttacagtttaggggttttggggtttggggtttggggtttgggatttgggttttagggtttagggtttcaggttctgcaatattggcgtttg

SEQ ID NO: 338460 - DNA, 719 bp, Cannabis indica
tcagttataattctaaatttagactatgtctagtttatgaattttcactaagaaatggcttgattatgataaataggattttgagatttatttgctaattgagagactttgtagagtctaattaataaatattataaatgactatttgataattaattttaaatattaaataaatagttttggtatttatgggattagaattacaaaaagtggcatttataaaagttagataaatggttgagaaaaattacaaaaatctaactagtgttgggctcacataggggccggccactaagtcctatttttgctattattttatcattttttattccaaataattcaatcctaaccctaagtgaattagtataaaaagaaaagaatggtctcattatccaactaatgactctagacctagctttcatcttgtcagacaactagtgttttgagacttcttcttctttgtaaagtcattttttagatgccaaaatattttttatttatggtgagatttgtttgtgtttccaattcaattttatcacctttaatatttggttttattgctcttttctatcttaggaaatattatttttatagctgaaccttttcttgtatgaaaacttcttgtaagagaagcaattctcttatggaaagttagtttttaaaggaaactttgactattatctttttccttaatagagttcgattgtgtcttgattata

SEQ ID NO: 338461 - DNA, 875 bp, Cannabis indica
acaccggaagagcctcaccaagcactcagaagcataagtccagggagcttagtcccatacgatatccctctgaaggaaaccaatggaaaagtcctacttccatcccaaggaaaaagaaaaaggtgcaggatccgtgaaaggtccgctcagatttcccaaaagggaaaggtccgcagaggggcaaactccaaaaagggagtcttggccctcaggatcgagaggaccgaaagagggtttttgtgcaccaagaactcggagagaaaggagggaggggacggagataccccccattgatttgagacaacagatcaacgggaagcatggtgatttgcgggatcacttggacaaaaagaaacacgcaccggcggtctccgcaggaacgatgaacgagggatttatggcagagctagccatactgcacaaagatattgctctagtctcccagagacaaaaaggggatgactcagattctgactgtgaggaccgggagccgtgcgacagacacattttggaggcggaacttaccaaaaattttaagatgcccgaaatggcagcttacaccggggacacggaccacaccgatcatttgtctcggttcaacctagtaatgacggtcatgagagtcaacaatgacgccaagtgcttatgctttccactaacgttaagcgggtccgcgaaggaattgttcaaaaagttggaaccaggatctggggactgctggaacaagtttcaagttagcttcctaagacagttcgtcgccgcaaggaagattaatctcgaagtcaatgccctgactaacatcaagcaactacctgttgggttttatgccctaaattaaactccatttccatgtaatctattttattcaacatcaa

SEQ ID NO: 338462 - DNA, 595 bp, Cannabis indica
ataaaatagattacattgaaatggagttttatttagggcataaaacccaacatctgaatcatagagctacgacaccatcaaacccgaacgaacaaaacgttaaatttaatcgtaccaatctctactaagggttattactcatttttctgctagctatttaatttttcaattatttattcaattaaaagaagaagaagaagaataggaaataatagtagaaattctcttatcccattcagaaggatatcatctcataattctcaatggatgtttatgtctgtagcacgaccacttaacaaaatatagagaaaagtaggacaaatggttgatactactagaaggattcctttttggataataggtattgtagttgatattcttgtgattggtttactctgtattttcttttatagtttatattctggattaggttcatcccttttgtaattggataaattgaattgtagacatgacatgaaagcgtaagaactcaacgaaatccccctcaaaaaagacaaagaaagagggggcatgtctcgttgagatcttaataatcataatattttattcatctaaatctaaatgataacaaaaa

SEQ ID NO: 338463 - DNA, 874 bp, Cannabis indica
accctaaaccttaaactctaaatgctaaactctgtacacttacccctaaaccctaagccctaaaccatgaaccctaaatccctaaacatattacccaatactgtaaaccgtaaaccttaacctggacacgggcccaggcccataccaatactgagatcggaacccaagaccaagacccagacccggatctagatgcgaacctagacccaaacttaactgaacccgcacccaaacccagaccaaaaccttgtccgggacctagacgttgtctcggacccagattgggtcccgccccggacccaaatagggacctggactcagaccgggacccaaaccctgactcaaacctaaaaccgtactgggacctagactcagacctaaactcaggatcccaacccgaaattgaacttggacctagactatgacctaggatctggacatagatgggggacctaggccctaaacctaaacttggacctatacctggaccaaggatccttacccagatgcgggacttggacacaaaattgagccccagatccgggaccgaactcaaaactcgaccccaaactcgagacacgggacccgaccctggacccaaaacccaggacctgacttccgagacacaaccctaaaccgagacacaaaccaaaacttaggacgcggcccaagacccaggacccaaactagaataagaccgagatccaagactgagatccgaatctggacctaaggcttcgacctaacctgtagtcagtgtttgaatccaggacgcggacccagatctttacccagactcatacctggacacaaacctaaacccaaactcaaaccataacccataccgggacttggacccagaccgagacctgtg

SEQ ID NO: 338464 - DNA, 1852 bp, Cannabis indica
gtcattgttcttctgaccggccaagccttggaacatgttttttagttcatccaactgtgcctgcacggttggattaacttgttcagcctcttggctaaccagagtcacatcagcatctctttgagcaagattttgagcacgggctccgggctgagcgactagcgtgacatgttgctcgtctagccctctccttctgttcacatcatttctgagatcatgagccgttcccaatctatcaaatatagatacaccgggctgtctcaatgactggttggtttggccgatcagctggtcggaaccattaacttgggcggagttgttgggtatgacttctcttgacgaattactagaaaaggtctgtccgcctaccgcttggcccacaagcggaacctgtgatcggggattggacggctgaccattcagggtttgagaagtgttcacggctggatcttcgtctgtcttgcccaggggaatgacagttgcaggttgctgattggtagactgataggattttcgtatcagcacagtggcctaccttgttcggtcgtcaatggctgcctgctgagccctcaacgtttccatttctttatccatccattcagcgaacatatgcctttgctcttcgaacgcgagattcaccacggcacggagttcctcctgatcatgatgcagggtgttggtatgaccttgcatgattccaagagcagcacagagattttggatctcggtgtcatctccaatggttgttggagaatttgttgggggcggaacttcaatgttgggaatgccctgattgactgccgaattggtatttccagtctcttgcacaccaggcgcaattccactcaaaggagttgtcacaccttgacctacagttgatggttattcgggattcgtggcttgtggaacccttgcattccctggattctgcagtgcaggatccactgcctgtggattcgctggatcaaccacgcctctacgagtttgtaccaccatcatgcttatgattggatttgaaataaagagcgatattgtgattgtgctctcaatgaaagcagcaaaatgttgacctcgcttttagccaacgacagtgagtctaaattgtaagcgacaagtagtatactatagatacgatataatgaaataaatagagacacaagagtttttacagaggttcggccctgaccagttcggtaatagcctactccctttagtttgtattaacttaagaacaaagaatacaatgattcctcttcttagagatcttacaataatatctctgaatatgaattcttagataaatctttcgaccccctgcccagtgagaatgggtaactatttatagagctataaactgtggagaagaagtttcccttctgattacaatagatataattggcaagattacacattaaatacagaatacattgatcaagggatttggacaacttgccatatctcggtgatatgatcccaaagttatagggatttctttagtgattcatgatgcgagttttgaaactgctaagtgttggcgtgttgttcagactgctcactgcccgattaagaaggcttcgtccgtgcgaatatacatggtgctctgttcggcatatctcttgcgagcatgtatataaagttgattccatgtgtcaccatcgtgtgatgccatgtcagggtgcaaaaattaggataacacctcccataaacagtgtgtttgatctgatcttatcaagacacaatcaaactcattaaggaaaataataatagtcaaagtttcctttaaaaacaaactttccataagagaagtttccatacaagaaaaagtccaactgaaaaatgattctttcctaag

SEQ ID NO: 338465 - DNA, 1043 bp, Cannabis indica
aatagaaaaaataggaccctggccggccacatgtgggcccaccactagttaaattttggccatttttctcaatcatttatctatttttcacaaatactactttttacaatttcaatcctataaataccaaaactatttatttaataattaaaattaattatcaaataaaattatcatttatattatttattaattagactccataaagtctcttaattaacaaataaaccctaaaattttatttcttcacaatcaagccataacttagtgaaaatttataaactaggcataatctaattttttaaaattataattgattaattaaaatcaattaactgagtcatacaagtaatttatctcaactagtatggtaaattctccaacttattaatttctccttgcaccactataaatttggaattgcactctcaattatatagaatgctcaatatgttccgcgatatagatacgctatgagattatttgttattatcctaataatcaatgatcctctatagatgatctacattgagtaaggactaatttacctttacaccctttaatgtattttatctttaaaacacttagctacctataaatgatattccagtgaactaatataatccctaaaatgagtactcaaccatttatctatgttaagccaagctcgaaggaaatcatcgtttgacttctatatccggataaaagctatagattttgtatctaataattagcgctcccactcaattgaactaccatgtccttaacctatatgtcatgagaagttttatttggtcgactttaatgaacagatttaagaacacaaataatgcaactcaactagaacctaaccatctcaggattgagattatttgatctaagatcaactaggtgatattgaattgaataaatattacggtaagtttatcatatctgattcaagtttaatatcagtcccttctgatgcatactccatacatccaacccaagcttactttaatcaatactctggaaaggacgtagcacttatgcaaggtgcaagt

SEQ ID NO: 338466 - DNA, 631 bp, Cannabis indica
ttggttagataatgccatatttagtggtatttactttttatgccatatttatcataaccttaataatttttcccatatttttgaaaatagccctaataatagtgtatttttcaaaaaaaaaaaaataatagtgtatttaatttatagggcccacaaaaatcattatttgttacactcttcaatatatcgctataagaatatcaaaccatgtcaccatattcacgtgctttattcctaaaaaacgtgatcgtttttctatataactagctacgaattaagatcatggtgtgacataatttattacgccaatttaattgtgacacattaattaattttagtattttaagaaaaaaaaatgattaatggagtctaaaaaaataattaagtgaattgtcacacttaaattgatttaatacatatgtgataccaatttttaacaaataatcttaatttaagtagctacatatatatatatactagtaaaaagttacgtgcgaaacacgtatactaaattttatgttagtttttttctatattatttgaaagtgatacaattaaaaattaaagaaaaatattattagttattaggtgagattcttattatgtgtatctaaatattatagtttataat

SEQ ID NO: 338467 - DNA, 699 bp, Cannabis indica
ttttctttctttttctatctgttcatctcagctctctctctctctatcagtctaccacctgcatccaaagtcactgtaaacaccactcccaacataaccgaaaccaccatcattcgtagccaccataaacaccaccacccacactactgaaaccaccaccatccataatcatcgtaaacaccaccacccaccactaccgaaactaccatcacaacctatatttcaaattcatatcacagaaaaaaaattaaatactaaaaccaaatttaaaaaaattcaaatccaacaaacaaataaatacacacaaatatatacacaaaatttcagtcccaaaactcaaatttgaaaaccttaaatttattttccccacaacaattatcttttctcatatctgaaaataatgaatacaataatacccaaatagggatatctatacacagatcttgatgatgcaaaaaaaaattaaaggtttaatgcattaccgttacaatttattcccgactatttgggggctcctaatattttgtactagtgtgtgatctgagaagtttacaatccatgcattacaatatatatgcattattaactgtgacaattgggtatatgtaattagatatatatgtttaataacaactctatttagcaggtttacaatttgtgctgcattttttcttagatctaaagagagagagagagaga

SEQ ID NO: 338468 - DNA, 804 bp, Cannabis indica
tgaacaagtttgagtttgaaaactcaagcttggttcatccaaggcatatatttgtttggtatgtttttctgaattctattgggtggaatatattgtgtaagctcattataggtgttctgaaaagtttggtggcatttggacaagttttgagcaagtttggaattatttggagaaacctggtgcaaaccggttaaccagtttgccaagacctataaaaccggttaaccgattttgacaaattccccaaacaattcattttcctcaatttatgtccatttcagtgcctcgtttgggtgattccttgtttcctaggatattgtagttccaattagtaataatagaaccttaagttgtaggttcgggtttcccggattagggttttgacgtgtgatttaccggattatgttatgtgattaaggcatccatctaacatgagactttctgctcaagttggccaactcacttgaatttggaaactaagaacagcgcgtaatatgtgatatatacgcgaatgtatgtatgtgtgatatgtatatgcatgcttgttgtgatttgtacactaccaacacttgtacggaaatggtacaaagtgtattggtatagtgtatattgtttaaagagtacattacgatgctaccagcacatgtacagagaaatacagggtgtgtgtggtatatcacttagtggtactcatggtacgaaacaaacctaaccaaaactcgtacaatgtttgtacaaagtgtatgtggtacagtggctgtaccctagtatggaatgttcgtactcatctgttaagccttgtaa

SEQ ID NO: 338469 - DNA, 583 bp, Cannabis indica
aaattttaaagtgatattttaagaatattttcaagtgaaataaggtttaaagatgattaagtttaaacgataatagcttttagctatggttggttcatatttttaggaattattagcaaaaagggaaagtagtggaatttagtattcagattctaatattattttaaaattaatcaagttatttgaagaaaataaatacgaagatattgtaataaaaggaggtgggaacattaattgtcaaatgctaatttattttgttcagatatatttgggaagtcaaactttatgcaatttagtttgtaatctataaggatacaatttttgaaagttttacaacctgtcttttggaaattaaaataggaataattatatcataataactgaattggattattttaagtaatttcaattcaatatagattgattataatcaagttttaccataaataaatatgtataaaaattgcttttttgggataagtacaataaagtaatttgtaatattttagaaatggggacattaataatgaatcaaaataattgattttgtctattttgggaaggattatggaataaatgggtc

SEQ ID NO: 338470 - DNA, 595 bp, Cannabis indica
atttggactaaaaatttggcggcattacttatatggcaagaaatgtgaggtatacactgatcataaaagtctgaagtacttcttcaccaaaaagacccaaaaatgagacaaaggcgttggctataattggtaaagaattacgattgtgagattctttatcatcctggaaaggccaacattgtagttgatgccttgagtaggaaaggacagagtcagatgaatattgtgaagcaaatctccaagcagttagcagatgagatgacccgagctaagattgagttcattgtggggcagttggctaatattaccatgtaatctactcttctagagaaaattaaagtagcacacttgcaaaatccagagttagtgaaatcctgagatagggtttcgattggaaggattagtgattttacaatggatgacacgtgaatgctacggtttatgaatcgtgtttgtgtgcctatggatgatgacattaaaagagaaatcttgaatgagtctcatacgactccttactcagttcatccgggaacaacaaagacgtaccaagatcttaaggccatgttttggtggcctggaatgaaaaatgatatag

SEQ ID NO: 338471 - DNA, 505 bp, Cannabis indica
aaaaaataaataaattatatatgcatgaatgatgacagtttaaatgtggataaaaactaagtagatgtaaataatgatgaggtacatgaacacaaatgtggtttattgtttctatttattaactgtgttacatattgctgcaaaatgaaaaataaaaactatgtttacaaatatatatatatatataatatagggtacaactttgaaatatatggatgcattttttatttatttggatattttttaaaaaatagtctacgtttttttttttaattatgcatgttataattatttcggatattacaaattttgagaaatttgaaataacttataatatagaaaataatgttcaaacagtctattttagatgcgtataaaataaaagagtcacgctacaatttgtttaaattctattttcagcgttaaatttttataaatttttcaaaattttacagaatattttcaataactataatgtacacgaatatttaaaaaaaaaaaaaaa

SEQ ID NO: 338472 - DNA, 486 bp, Cannabis indica
gaatgctacggtttatgaatcgtgtttgtgtgcctatggatgatgacattaaaagagaaatcttgaatgagtctcatacgactccttactcagttcatccgggaacaacaaagacgtaccaagatcttaaggccatgttttggtggcctggaatgaaaaatgatatagctgaatatgttgcaaagtgtttaacttgtcagcaagtgaaggctgaacaccaaaggcactgcagccactgaatcttccagaatggaaatgggaagacattgccatggacctcgtggttggattgcccaagactgcgagacaatacgactatgtgtgggtcataattgataggtttacaaagtcaacgtactttttacctattcagacaaacttatccattgatcagtatgcaaaattgtatgttagagaaattgttcattttcatggtgtcccaaagtccattgtttctaatagggatctgaagttcacatcaagatt

SEQ ID NO: 338473 - DNA, 1017 bp, Cannabis indica
ccatgcaacattaaatattatttctgatctatattaataagtaaatcttattatactgaaatgagttttatttagggcataaaacccaacaaccccctcctcaagatggagagtgtatgtcgtatactgacatcttggagacatgagaagtgagaattggtgaagatagtggcttggtgaaggcatcagcaagttgcagtgtagtggaaattgggattagtctgatggaccaattcgttatattatctcggatgaaatggcaatccagctctatgtgcttcgttctttcgtggaatgttggattgtttgctatatgtatggcagaatttttgtcgcaataatgaatgcagggtgtggttgaggggatgtggaagtcatctaggagatattacagccaagtgacttcacttgtggtagcagccaacgctcggtattcaatttcagctgaactttttgagatagtttgttatttcttcgtgcgccaagaaatgaggcaatctcgtaggaagatgcaaaaaccggttgtagatcgtcttgtgatggggcaagatgcccaatctgagtcggagaagccacagagatgcagcgaagagtttctggaatagagcagcccccgtccaggatttcctttgatgtatcttaggaggtgatgaactgcttgaagatggtacgacggttcgccatgaattggctgagagtgtttactgcataagtaatatcagctttggacaaggtgaggtggagaagcttcccaacaagttgtcgatagtgagatggattgttcaaagtctctccttcttcgttgttaagttgttttttaggatctatgggcgttttgctgggtttgctgcctatgaaacctgaatcctcaagtaattggagagtgtattttctttggcaaagaaacagtccttccttagcacgggcaatttcaaaaccgaggaaatacttgagttctccaagagctttgagtttgaatttttgatgtagagatgtctgcagctggtgtagattgga

SEQ ID NO: 338474 - DNA, 1326 bp, Cannabis indica
  modified_base (803)..(803): a, c, t, g, unknown or other
gtcttaagaagagtcttcccagccacccaagaacccggagtgggggtacttgggccaaactgggaagggccatatgaaatcgaggacgaaatcggttcaggaacttataagctaaaaaggatggatggaaccattgtgccaagggcctggaacgccgatcacctccgaaaatattaccaatagtccaaatgtataacttaggctttgtttaaagggtttgtaccgtctaagtgtatgcaacctctgtatattaaataaaaatgagtgccttaaaagctaagttttcatgccactcaagggggggactaaggcataccacacggacagatgaaaaataggccaaaagtaaaacatcctcacccaaagggtaggtccgaaagaaaaaatatacgtgcgtcaaaaaagatcatatatatataaaaatcctggccctaagggcaggtcaaaaaaatatatacaaagggcccggggacaggccttaatcattgtttccccttacaaaaaaacagctattaaataaagattgtcttaaataaaagcaaaatagctgtaaataataaaaaaaaagagataagaaaaatcttggttgaaatgggttggattcagaacagcctaatcaatgcgaggaggaaggcgaggaccaatgtgcgcctcaagcatggcgtcaagcttcttcttcttctccctgaatttggcaatcatctccgcaggttttagtagaagtcaagcttgatattctggccattggtcgaccagtccatgtagacgccataatcgaagcgtttgatgcaacggctgcaggngatggggagaggagctcatctctcttagccttcctgggcttcccttttcttagcctcttcttcgaacttggccttagcaagagcctcctgccgcgcagcctcctcttggaatgcccgcctttcagcagacatgtcctgtaagatcttcacaacctcgtctatgcacccaaatttggacaagacgaagccatgattaataatggtcctggaaaggcgaccggtctctgtagtaatctggaaaaaggaagcaaaagtgagtgaaggccttaagtaaaataatgagaaaagaaataaatcacaaggtacttaccgcggccaaggcatggctgagatccctgaacttggaagatggagttcaaggatgcacaagcagacgtaccgcttaggcgcgcaccgagtgagcttgggagacatactcgctggtcatctcagcagcaaaaaggagccaaggtaggcccgaggaaacggttgaaccagtccgtcagcgggtccaggtttagatcccacagattctgatagttct

SEQ ID NO: 338475 - DNA, 623 bp, Cannabis indica
cggtttttttaaaataaaaataaaataaaaaaaaggagggaggcgtggtgatatgattcatgggctaaggaaattttgtgtttaattggtaagtatcaatatttattcttccttgatttattttgatatgtttccatttaaagattgatcttttatatggtaatgtgttttaatcttgaaagattgtcttatttttggaaattttgttggttattctagtttccttttattttgttaaaaaaaaaaagggagggaaaggagttgcaagagagtgggcggtttccttttgtgttcttgggctggtagtttctctttttaagttggtttcctcttttgatcctctctcacatgattatataaaccaacttcctttgtcttttattttcataacctagctacccgattcctatttctttgtgttcttgttctttgtttctcattcttactttcagaaattcatggctaaaactaagaacctagggcatccaaggaaaatggtggaatccgatcaagccccctcaaatgctcctcttgttgctccaatcgtcttgctgccatggaggaggttcagcaaaagatgtccaagcagctgtcctcattgatcaagctttatggggcataag

SEQ ID NO: 338476 - DNA, 693 bp, Cannabis indica
atgctgatgggtgttgggatagagaaattggcaatgttttttgatgaggaagttctccagggtattttgactattcctcttgctgatatttctttagacgatactcttgtttgggagcatcattcttcgggtctgttcactgtgaattcagcctatcatttagccaaatcaattacttctttaccgtcctcttctagcagtaattctctagtcaagtggtggaagaccctttggaatttaaaaatacctcccaaaatgaagcaccttttctggagggcctttcaccatagtcttcctactgctctcaatctttcccataagaaaatcttgtcgtcccctctttgttctctttgctctaagggtcctgaatctgttactcatgcacttagtagagtgtttcagagcttcaagagagtggaaagattcaaggtttaaagatttctaacgagttgctaggaattgtgatattagagagtttctgttaagaggtttccatgatttgtctaaagctgatttgagagttttcattggaattatttgggaaatttggaatcgtcgaaatattactttgtttaacaaaagaaggatttgttagaaatattttaccaggatctagatttactaccatgtatgtttcattaacatcctaatatgaattctaaaataatgaaataaacacatatgaagttttag

SEQ ID NO: 338477 - DNA, 1009 bp, Cannabis indica
gcaaaaatatgattcccaagttctcgaggcagcccggcgttaaacggttaaccggtttgccaaaacctgttaatcagttcccaaccggttgacctgttggtcagggatgagaaatgtaattttccaagtttacgcactcactaaaatgctatcggaacctgtccaaaccaccccaaacttcatagggcacatctataccatacatactaatatacttttataatagaatctaaaatcgagcccttatttggaaaacgccactagtgttcggacttaagatataaaaagttccaaactcaatttctaacttaaaatcaccacaattttagcaagaaagcatctaaactagtcccacgagtactcgagaacaatcctataaggttagaaatttcatgactattctaattcgtaaaacccgtatacaaaaccaattgttttaaagttaaaaaggaattaaatcttaccttaagctttcctgctatgagaatttgccatccttctactatcgaagcttagatcgctaggttttgggctaaaaatcaaagaaaattaacatagggggagagggtttcgtcgaaaggaaaggatgaaggtacgttctatttcgttgacctattatacacttataaaatattatatgtataatatactagtgcgttattaatattaatattaataatataaaaatattaatattaatgttgttctcccaatttttgtactctgacgtggcatcacacgatggtgacacgtagagtcgactctgggtacctgctcgcaagacacaagccgaacagagcacctcatacattcactcagacgatgtcctctagaccgagcagtgagcaatccgcacagcaggacaacacttagcaaattcagctttcgcatcgtgagtcatcaaggaaatccctataactttgtgatcagattacagagatatggcaagctgtccaaatcccgcgattagtgtattctgtatttactatgcaatctttcagcttatatc

SEQ ID NO: 338478 - DNA, 607 bp, Cannabis indica
aaaaaatacgacataaactaaaataacaaactgtaacaaaaacaaacataaaaataactataaaacaactatagaacacctaaaaaataaaatattaacaactataaaattactataaaataacaaaaagataactataaatcaatagaaaaataacatgacatcaatcttgttaaaatatgcaaatcattcataaattaactctgaataaactaaaaaatataatacttttattaatcatgtaaaaaataaaaaaaatataggaatagtgctcttaatttttttgtaagagagagaaagagttttaaaaagtaagatataaaaatgtacacttattatatatttatatataaatacaatgataaaaaaaattaaaatagagagagtgagagaggggtcagcaactaacttataaaaaaagtgagtcagaccaaaaaaaaaaatataaagaagggtaattttttttttgaagctttaaaaagtgaaaaatagtaaaaaaagaaaaaaattaagtagagaaagcataaatgttaaatttttttggtcaaagtataaatgtaaagtttgaaaaaaagtttttttagaagaaaagcgtacttgtattaga

SEQ ID NO: 338479 - DNA, 769 bp, Cannabis indica
gagagagagaggttgaatagttttaggtagggtttttaattttgtttttatctcattaaggtagggtttggtaatgggctttttcttttaatttaaggaaatttaacatagggcgaagatgcaaaatggccataaatctaacaattaagttaataaatgtccctttttataaacaattttttatagacaattaacaaaatgtccattcacttaaaaatttgatgatgaaattacaattataaccttgaataattaagtgtttggtatcgttgttttgcacaatagtatatcgtttttatgtgcaatagtatactaaaaaacactgagaggtagtatattagtttaagattgtgattattttaatgtgctatgatatataatgaacgaaagatagaaattaaaaaaatgtggaatattaatttaagtttgaggtatagttatatttcactaggaaatattgtctatgttcattagtatatcatgaaggaaagaaaaaaaaatgtggaatattaaattaagttcttagtatatatatatatataaattgtttccacaatacgggtggtatattaatttttcactatagtatatatgcttatgattgcagaatatagtttttatatgatattgtatatcgtggaaaaaatcatttaatagtatatttgtaatgccctaaataattaggcacgcttcccaataaacttatgaaaccctaatcccctaacttgggattactagaaaaataggcgcgaaaattaaactttattaa

SEQ ID NO: 338480 - DNA, 641 bp, Cannabis indica
gaacatctgcttcgagaacctttcgagagcttatcgatagctagtcgagaaaaataatgacatgacattgaggtagttgagacactcaataaaactgtcgacatatcatcgatatcatatcgataaagattggcttcgagaacctatcgaaaacctatcaaataacattcgagaaaggtcatccctgaccttagaacatctgcttcgagaaccttttgagaacttatcgataaacagtcgagaaaaatacaaaacccagaataatcttaaaaaagagatctcgtgattttgacaaaattctacgaacaaccccatagatctgccgaaatatgctatacttttacaatcatttaacaaatgttttaaaaaaatacttacacattaatctacaatgaaagggaggcagaggaggggcggcgcggtggttggaatgagacgtgaaggatggatggtgtccttcacggtggttgggctggtgcgagttggctcgtcggacgtcctcaaggggtgtaggcggctgagctagagagaagggaagaaggatttatttatttttatttttgaaaaaaatggagaggagccattatggagatgagaaagggggaggagttggttgatggggtgactgatggggatgtggt

SEQ ID NO: 338481 - DNA, 895 bp, Cannabis indica
aatcaacatacttgtgagtcgatctaagatcctggtaaaataatttccaacaccttccacaattcagactccaattgaataccccattctcctttcagttcttggagatagcggtaggaactcttaaccgagtaaaacccattcgactctttaccccaaaatcaagaatcaacattaacattatcactcagaggaacttgcattatcaaatcgatatgccttgcctaaaacaaatcatgcgagacctcaagatcccattgcttacgatcaatgtgcatcaactgtgagaccgtgctatgagccaatgtctagaaatgacacaagagtttacatcagaaatcagccaagggacattaagcacaggggtagacacaccagacctgattctccttctagcaccatcacgaaccagttgttgtgattcaaacacactctgccaaaaaaaaaccttgggttaggacctatctcagccgtaaggaaaacacatttggaaagtagcgggccttgtaaatacgtcccacaagagaatcttcatacagaagaagacgccatccctgctttcctaacaaggaaagattgtaatcccacaaattacgaaagctaatcccacctgaattcttgcttctacaaagccgtcgccaactaaaccaactgagaccttttgttctattattagaggacccccaccaatactttgacattaagctctcaaggtgtgaaatagtcttaaccgaaagaagaaacacaaacatcgcataggttggcaaagcttgagcaaccgttttgagcaaaaccacacgaccagcctttgataacagacgaccttaccaactctgtattcgcttgagcatcttatctttgagaaaacccaatattgcatctttattcctcccca

SEQ ID NO: 338482 - DNA, 1063 bp, Cannabis indica
gtgttcttgtttatgcatgtttatagttttgatgtttgatcatggtaaatagagtatgtaaagcataatttagttgtgatatatgcttattgagcagggaatgtgagtttaggtcagaatttatgagttattgattgagtttgcagctctgattttagtggttatcttgagtttgtgtttttggatttgatgattcaatgtgtgaggttgaattttcttgattttgctcaagctttggagcttttgttggatgttgttgattaatgttggaattgatgttgttagctctctgttgtgatgatttttatctgtcagaagttaattttgggtgtggcttgattaagattcaaatatatggaaaagtgagcatttttagaccttaaaatctggttgtttaggtttttcgaacccagtggcggcggccagatttatggtcgccgcggccgaaaacccagcagagagctatctcttttctcaactttgttttggccataacttttcactcgagactccattttagatgttctttatatcgttggaaagcgcgttccaagctctatatgattatctgtattttgaatgccaaatttatactatgtgaaagtggaatcagggattaaccctatttgtgaaatcccaaattgtgtgactacgattatcggcacctgatcaggagcaccaagggggttggaatctctgttattgtggcacaacaggtaagacattagtttgcacgtattgtatgcactgtggcgcttatgttaaatatgatatttgtgagtaattgtaacagggattagggttattaccctaatatgagcggttaatagcctagggttattaccctagtgatataagttgagtaaatgctatgccatgctaagtatatgattatattgagatttaagggttatgtgttcaacacataatcgggttggactcggtaaccataaccgagatgaaccattctaaggccttattgtatttagacgtgtgagagcaacacgtaggtctacgccatgtaaacacaattagatgtgtgagagtaacacgtaggtttacg

SEQ ID NO: 338483 - DNA, 822 bp, Cannabis indica
caaagcattttttatcatctgattgttacagaaagtcgacttactccacgacttgatgttttcttgcctttctcgaattcaacatgttatgaaaaaatctcgagttagcatcaccctctttggcccacttgcatttagctttcaaccatgcacttctttcttcagcaaaagctaaattttgccattcctatttttgtctttcttctttcctccatagaagcttgattcccgccaacactaccaatttgtccaattcgaccagccttctctccaaagcattttttatcatctaattgttactgaaagtcgacttactccacaacttgatgttttctttaaccatcttcaatttacacatgagcttggtccccgaccatcccaacgccactgcatttttccaccaaacctcaaaaaaattggaggagttgtgatccaaccactagttatcaaaccgaaaaggcgcggggccccatttaggtaaattggagtccaggattattgggctgtgatcagagactaatctcaccatcatttctgtttgacaaaaggaaacatgatcttctatttattactgaataagaatcgatccaatctgctccaaatgggtaccgatctgaagttcgtttaagtgaacctttagttgtttactttggatccataagactaaactcttgaactaactcatcaaacattctcatactttaagaacaagaggtactattcattttttcttcaactcttctgactacattaaaagccccccctaaacaccataattcgccacatattgaactcaatccccgcaaattcatcccaaaaatc

SEQ ID NO: 338484 - DNA, 533 bp, Cannabis indica
attctttgtaaataagaaccgcattgttcgcaagacatgattcgtcgatcttggaaggaaaaatggccccagctcgctattgagatcactggaacaaggcttctgtcaagacatctccagatatgacaattaaagacgtgtttaaaacaagataactttaacccagtaaaagcgggaaaatcacagctatatgattttcaaattataactgcatttacactacgtgacatgtaatcaaactccgtgattttaggtgatgattgttgtaaacatattacagtcaactttgtaattaactgcccactatgtaattataaatagtggcaaataagatcaaaaaggggaaagaaactcatacaggatcggccttcaaaaataattagaaatctaaataagatttactcgtggactatgcagaattttaactgcaaaaccacgtaaaaaaaaccatgtgttcatactttcttttatagcttttatttttatagtgtgaaatcactactgtgaggttcgaatttggttaacgaaaattt

SEQ ID NO: 338485 - DNA, 754 bp, Cannabis indica
ataaactaaaattaagaagccaaaagtgattaaagttgtgataatttcagatttagaaaatagacttgggtggttaaattccccctggtatgttccagttgatacagcaatgacttaggaatcctgtcagagttaacaaatttcaagaaaaaccagcaagctttttccaaaacctgcagtataccatccataacctcaacaatgtattcctacgctaaatcaggtcacaaacagtctaatatagcatcaaatctttagttaagcaaggtagcaaaatatgcctatttcactactaattaatacctaaacgagtagtaaaaatcatacatcaattaaatgggttcatctatgtcttacttttccaagtaagatctagcttactaaatgttaaatctggccaaaaattaacattcaatcaacatttcatcacatctaattgaacaaagataggattacttcaaccattgcaaatcaaagcactagttcatacaagggttcataaccacccaaatctcaaagatctcagttcatgtttgaaattaaaagcctaaaaccagaaattaacatattcatggagctaaagagaatatcaaagactagaaaatgatacaaaatggaagaggagagcaaaagaaatgagttggtgagctcaaatcttctctattgaggttgccttcttctccttcttcttagtcttcttcttctcttctttgtactctctttcttttttttttctgtacttcctttctgaaaa

SEQ ID NO: 338486 - DNA, 535 bp, Cannabis indica
gttctgtgttcggttctaggtctaggtccgggtcctggtctcggtcctagtctttttctagggtccgagtttggcgattcttgttcaggttctaattttgggtcccaggtctaggtctaggttctgtgttagtctggttccatgtttttgtctcagttcaagttccggttcgggtcccgagtctaggattgggttgggatccgggtccgaacctagaaaggactcgaacccgaacctagacagggacccaaacccacacaataaccgggaactggacccagaataaggatagggacctggggaaaagaactaggaccgggacctagtacccgatccagacccgaacttgaacctaggaccccggtcgtgacccggcaccagaaatggaactagactgggacccgagattcaaatccggatctggacccagggcttggacaaaacccgttgttggtgtttggatttgggacccagacctggacctgaaccatgacaaggaccctaacgcacacgcggacttgaacctagtcccaaa

SEQ ID NO: 338487 - DNA, 859 bp, Cannabis indica
ccaaccgttagatttcccaatctttagctctcttgtcactagactttatgtataaaagggcggctcaagcttgtcatttttcacaaacctttgtctttttagtgagatccattttcaggatggatcatctttttcctgctagaatgtcccttctgagttcagaagttcatcctttcaaacttataatacccaaatgcaccaaccattttccatttgttcccaaagacttcaagcctcaactggagccggaaacgatggattccaaggctgaggagcttccgaccaatctaaaccaggggaacctcgtagcctgccatgggcgatcctcataagtgatcatagatcttgtgggcgatttaaaaggtcctcctcaggctgataaagaattctagaggaaagttggcatggtttcagataaatctaggaaggaggttggcgtggtttctatcaaagaacccaaccaacctaagacccaaacctgtgccaacagatctttgtgccaacctctttctggtatcgaggaatttcttgaggctgggaaagagatctcggcttcaggaaatgggatctgatgataaggagaatgaggtctgtgcagagatcaaggttcggttctctacgtgcagacggtctttctcgagctacgtgtagccggtctttctcctagatatgtgtagacggtctttcttgagtttatcggcttctcctctcattcgttatttaggaagatgacttaatggtttgcccctagtggtatttttgtcaagacaagtttgtaaccagttttagattttttcttatcttaaatgccttgtactgtttgcattcgaacttaatacaattgtgtttgcttgcgttt

SEQ ID NO: 338488 - DNA, 521 bp, Cannabis indica
ttaaccatagtaatggttgggggatggggatattggaaaggctgtgttttgtctgtgatcttctctttgcccctaagaaggatgttatataggcacaaaggttcagttagaagctcatcacatctctgtaaaaaagccacacaaaatttttttgtgtgatccaactttccacagaaaaaacagaaaccaggcaggcgctcatacttaaaatcaatccacttaacaaactcacgccccatcctaataaacttaatattcatacccctcctaataggcaagttaacatccataagaactctcagacgcaaataaggaccagtaccctctttaataatgtccttatcgacctcaacaaggtcttcaatctccatagctataaacctagcaaggtcataagacttacacataaatggaatgccataaacttgaatccaaaagggtacataatggagattgtcaggggtaagagggaaggaactatctggggcagcaaagatagtaagacactgggcaaaatgcca

SEQ ID NO: 338489 - DNA, 632 bp, Cannabis indica
atattttgaattctaaattcccgcaaggattcaaaaatcaacacattttgtagtatggtaggactgcgaatccagtcgctcacttgaataaatttactaccataatgcgagccagcagtgtctcgactaatttgcattgcatcttattccggacttctttaactaggtcagcgagtagctggttcgacaagtttactcattattcaataatatcttgggaacagctgtccaaagactttaagaaatagtttcaagctgctagatacaagaaacatgaagcatcatccctaactaacataaaacagcaaccaggcgagtcacttaaggcttacctaagacgctgcaaaggttagaaacttgaatgacagtattcagcttactactcttcaagcagatatcacaacttatctttcaacgactgggggcgagttgtgcgatgacctacagggtcaccaagtaagaaacattaatgaattaaaagaaagagcgcaagtgtttgagcgcaaagaggaagcaaggaacgagatgaagttgcttaagagtagctcgggaaataaacccagcacgagtactgcaacatcaagtactgtctcgaccaaagaagaaaatccaagtggttcaaacaccaaaag

SEQ ID NO: 338490 - DNA, 686 bp, Cannabis indica
cccttcacagccaaaggagaccagaaacatgtcatctgcatgctcagacacagtaacagggaaacgacactgcgatgaccagatacccgagagagttttcatcaaagaaggcctattataagggcgaatagtatgcaatttaagaagaagactaatgggggctggatcagaactggaagaaccagtatcatagataaagacagtggattccttaggaggaagaacaagggcattggaaacattatttaaaaactcatccataaacacagaaagaaaacacaagtgcaaaagcaagaataaaccagatgaaaggagagtgatgaagaaaagggtacctgagtttggaaatatatataaagaaccaaaggccacgaagaatacacctgagaaccgccctagtcacgtttgaagtcgcatccatagaagtcgtaataatgagaggaacctgaaggactttgggaaaccagttgtccgcctccaatttgcgataatcaagggggtttttctgggtgtagatatgggagatcaagagtaaatggcgagaagacaaaatggaatgattggaaaaattaattagagaggacagagggaagggttttgagcaattaatgctctgatcagagttaatgagatgggaaataaaaccataataacccctagagcatttattacataggggagatgag

SEQ ID NO: 338491 - DNA, 601 bp, Cannabis indica
gggcagagccctagtgatatttgtaactgtttttataactgcttcagttgtaactgtctttgtaactgtctttatgttctttagtcttgatatttgttgtatctgatgtaagggtatatttgtcaaaccctatgagtggtgttattcaacttaagggtaaataagtgaatctgtaacaacaaattccacccagattctcttatttacccaaggatagttgatgatgctatgagggcttgaatgaccccaagggtcagtaccatttgtttatccctagcaagttcagtttgaacttagctaggataaacaccttggtcttcatgtttgtgacacctccttgtgtcaccttattcttctctcttgcatagatcaagtcataaaatccttccatttggttttgtgactttctaaacgcaagtataacacatgtggtcttctttaagtaacttaaaatccatatgataatcaaccaatgtatcttcccagtcaataccatatacttgctaacagcaactatagtatatgttgtatctggtatggtactcaacatgaaatacatctttgaatcaatcccattagagttgaggatcttactcatatc

SEQ ID NO: 338492 - DNA, 448 bp, Cannabis indica
cacaccaaattccaaatggtggaccaatttgagaagccttcccccgacccttgccatgtacgagagggctcttgcattagcccaactgcctgactataagaaggatctaaacattctaacatccccctgggcattagatgatttttaggttcaactttgttgttaccccttctagcggagttacgggaaatcccgcgacccttaggatactctgatggtaggcactagacagcaatagcgaaaagcactatgcccgggtcttctaagaacaggtccaattaggtaagtgtgactctcttggtgatgatcgctatttttctttcttattacatttcttcattaattttcatgttattatatgttactaatcatttttgtgtgttttgtagatatggccagtcctgttgcgtacaaacgaccttaccaggagccaaggaggggttccccc

SEQ ID NO: 338493 - DNA, 922 bp, Cannabis indica
ttgggcccctgggctgggtgggccctaggcacaggcctagcccgcctatgcccagggccgggcctgcttctcatactaatggagtaggtagaacacttatattgaaagtaattcttgcctaatcttggacgtgagacttagggttgatacctcaacaatcttcccctcaaattaccaagacccacgtaccagtggtggggcctcccctccaatgaaatcatattatgcctgctgctatcaccaatagaactcgttggcagacatttaacatcgttatcgttggaaagacttttgacacaaggcatactaaacaaaaatttccatcttgtacaactgtaatcaccaacgggacacgtcacctgaccaccgcaatattaaattgactttcgacacatgacagttggcaccgtacaaatcttcaattgtgaggtcatcacgttcagagcttctcccacataacacaaatgcagtccactctcccaactcttgaacctttggctcacattaggggtgagcaaaaaatccaagaaactgagtacaccgaccgtccgaacaccgaaaaaaccaacatcgaaaaaactgcctttgcacggtcagttttagtgtcaatggcaaactgaccgattaaaccgagaaccgaccgaacatatatattgtacactatacatatataatataattatttttgtacatatttaatatacaattttattaaaccagttttacttcttatattttttatttaaagtctcaattatccattgctttattttattataatttaatatatttacgtattacatacacacattcataaaaataatatgagttttttaatataactcattactatgctagtagcacaaataattagaacaaatttaaaaaaaaaactattttacattatttatttaactaagaa

SEQ ID NO: 338494 - DNA, 622 bp, Cannabis indica
actttctttgatttctgtttcttgcagacagaaaacctgagctctgatgccaatttttgtgaaacaacaccttagcaagaacacaaaataatgcaataaagatcaataaaaccaaatagcaacaatcacaattatgcagtaaggttttaaaccagaaaacaactagcattaaaagaataaagagcacagaattttacgaggttcgaacaagataacttgcctacatcctcggccagaaacaaccacaattatggctttgagattttattgattgagcttgaatgattagagattacacaggtacaattacataaaactcagaagcatagcttcagtaatctgtttctcgaatggcagtgaacacagacacagtgttactccaattacaaacactcaagacagctctctctctctctctcaatcttcttaaaactctctctttctttctgttcaattcttctacaaggttaatctctgcagtgtgaaagaatggccccttaaatactgatgttgaagcagaagcataatacccgaacgccaactgtcataactaactgttggttaagttggttaagttcggtaagggtaatgatgtcatttgatatttggacaattacttcaa

SEQ ID NO: 338495 - DNA, 821 bp, Cannabis indica
caagaggaagctgaggaggctagggcggagactgcagctgttcgccatgagttgggtgaggccaacaagaagctgtttgccgatgagaagaagatcaccgtgctgaccaaggatctcgaggctgctgatctccttgaggaaaccatcgagaccttatctgctgaggttgatcgtcttcagcatgagaggacttatctgcggcaggtccttcttcggctgaaggaagataaggacgctcaagcggccgaggcggtccacttgaaggagaaagtcgatgcttaggagactgccggcctcgagctcttctttgatttttggaaggctaatccccaggccaacttcaactacttgggcgacgccaaggacatgtacctcgagtactgcgcgacccaagttgcctatggtgggaaagaggtggctgcttcaacttccgaccaagcttctgaccaggctgctgatgcgtctcctgctcgaacaacagatcctcctgctttagtcggctcagaagaaccaaatccagaacctgggactccagctgtttgaacgttgatattttttatctctcctgtttatatatatatatattatatgtggccttaaggcccttaagatatcacgatcggccaagcggtctttaaactttgaattatttttcatttttcagacaacgggcttaccgggtagcttttaatcccggtactttatgctcttgttatccttaatgaatttcattctctatttataattgcagcgcaattgtgtttgttttatgtttaccaaatgctttgtacaggtataggtgccccccaagtgaccgagca

SEQ ID NO: 338496 - DNA, 789 bp, Cannabis indica
tcaggggcaacatttaccccccaagccttgtttatttgaaaaagaaaacaaggcttgttcaagtgcctccggttgactcctcggtttcctggcacgagctttgagcgcgtgaaggtgcatttaatgatcgccattaatgcagcgattcactttttgcagacgtcgattcatttcatgcccattgattgatacgacgcattaatggtgtcagacggatactcaaacgtttctaccgccttaattacgaatcaatccaaccgttgattcttgagaaatcaaatcgggcgcctccccagccgttcgattggtaggtgatagcgcctgttcctcatgcattttggcctataaaagccaccacctttccttcgtttggttactttccatttcttgccaactttgttcgagtttttcagagagaaaaatccccagaccaagaaaaaaccttcgaacaatctacaaatttccatgctaacattcattcaccgctgtcaatctatatttccttgtttgatcgacaacagaacccccagttctaacacttcatcgtaagtttctcacatccctcactttactgtttgtgtttatggcatgctttacttatctgtttgtttttctgggttcggtatttgaagtttttgggaatgtattcttttgagtttttcatgtaataggtctagattcaccttctctggtgttagggttactcttgtcacgcacttgttgtaatattttgtaaaggacaatacactcttcgtgtaatggccttcaagggcatagagaagacttcgt

SEQ ID NO: 338497 - DNA, 665 bp, Cannabis indica
gaaaaaaaaaataattgattatattgatgcccatttcatattttttttgagaatatacaaaatttattattttttattcttttattatttaaataatggtaatatatatagtaaataaagtaaataaaatttagtaaaagccaatgaatcacaataattagtcacattatagtaaataaaaaagtaacatttattataagctaaatttagcacaatactatattttgtgccaaatttaacaaaactcttttagcatgtgtcaaatttaacacactttgttttttaacacctataaatttttttaggtgtgctaaaatacagtaatataccatttttttgtgagactttattagaagtgttcttatataactacttagactactttaaatggttataggagtgcataaacgcgtaaataaataataaaaaaaaaattaccgtgacttcgatggggacacgtgtatcaatccgatgctggtaatagagatcaatataatccacttgaagtctcttcaggctggcctcgcaagcagctcttacatacgttgggtcactttcacctcaaaattctccccaccctcatcgtatttgatcccaaatttagtagccacttgaacctttttctctcattcctcccttaagcgcctgttttccattttattttt

SEQ ID NO: 338498 - DNA, 566 bp, Cannabis indica
acttttctttccagcctcctgagaatgcttctaagagaaagtttttctcggagtaacccaatctttattctgagcccttgcaccattttccttctgcgaatttatctccctggtagcagtagcctcagcctgcttattcctttccttgttttcctgcacttgcacattaggttgagccgagtctctgcccttcaattcttgctgcttttgcttcatctctccctttcggcaatccgccataatgtgtccataccccatacagcttttacacttaaccggaagccactcgtaatcgatattttgatcaacaatctgcccatattcattgacatattgtatggttctcggaggcgtatcagttatgtccatttcaactaggaccctggcgaattgaacccttgtacgatctttagtatgctggtccaccattattggtttcccaacagtactaactaacgcactaagacaattggttccccaatattggaggccaagatcatggagtctaatccaaagaggcaccgaacgaacaagtttaactgaattgagatcagaagtccagggtc

SEQ ID NO: 338499 - DNA, 567 bp, Cannabis indica
ttttaataattaattattctattagtattaactagtttataaaatcatacacgtggcgtccctatagactagcgcgttacaaccagtatcagagcggccatggttttaaaggtcctgaagactggtcgaatatgtacatttgttgtgaggacaggtcgactcatggtatagtatttatattatttgttattggattacctgcctaggctattataaagtatgttaaaaaagtagtatagtgatattttttataagaatatgtgtatggtatactcatattgatattgatatccgtcttagttttaaatggttagaaaatgtggactaaatgtctgataagttatacagtaagagcaatcaaatagtctgattagcgagctatctgggctcgggacaaacggtaagaaagagaattatttatttccataaaaatatggtaacatgtaaattctactgtgcaagatatgattagacagtatgagaaaacagatctgagatctgagagaactatgggctcatcttgtgtctgttgttgtactaccgacacttcctgttgtaccactagat

SEQ ID NO: 338500 - DNA, 702 bp, Cannabis indica
ttcgaattggatttgattggatgatcgcccacccctagattaagcaactaaatcattgtaataataggtaaatacaatcaagaattagctaagatatttgacttggtgatttggacatccaaatatagtattttattaacacttttctttggatatccataataattgccttattagaaaccttttcgaaaaatctagtgggacaaaaatatcaatcaaggaaaaagagtgcaatctgtatttactacccctcattttggcattcttaaagatattttaatcgatgcattctgatctggttaccatgtttttgaatattaatgctggtaattattttgtgaataagtctgcaagattgacacttgattgaatgtgttggacactaatatagtcattctcttgaaaatcatgtgttaagaaaaaatttatgacaaagatatttggttctatttccttcattacagctttaaatgagcaatgcatagaagttgctgcgtttttagcctttgaagtgtctactcttgactgtctgatctcatttgttgtaataaactaactgcttttacatgtctctttgttgaatatgtgtggcaagtgaagaaatggtcccacagaaactatttaagtcttttaagggaaactcttcttcacttttcgtgtaaagaccgcttagtttaatttagaaattagcagttaatcatg

SEQ ID NO: 338501 - DNA, 1035 bp, Cannabis indica
ttcaacactataatgcgagctagaaatgttacaatcaatttacgttgtattttgtttcctacctaactagttggagcagcgagcagctggttcaataaattcactcatcattccatcacttcttgggaatagctgtctaaggactttaaaaagaagttctaggctgcaagggataaatgactcgaagtgtcctcactcaccaatataatgcaacaacctggcgagacggttaaggcgtacttaagttgttttagcacgactgctacaagagtaagaaatttggatgatagtacccaacttactgcccttcaggctgggatcactattgatctctccactgccggaggcaaactatgggatgacctacagggtcgtccagtgaaaaacatcaccgagttcaacgagatggctcaggtgttttttcgaaaggaagaagctcaaaaagagatgaacttgttgaaaacaagctcggaaggcaaacccagcactatataaacaagtactgtctcgactaaagctaataactcaggggccctacatggtaaatctatgcggatttactggcgacagtatcgccagtcaaggtataatcgagctcgcattgaccttgggtgaggcacctctatccgccataattatgcaggactttttggttgtcgacctgccattggcttacaatatattaccgaatcatctagaattgatcgaactaggggcagttagttcgatcaagcacttatcgctgaagtgtcaaacaccagagggtgtgggtgtagtgcgaggcgatcagatgctggctcgtgattgttatcgtatagagctacaacacagaaaagccagtaacacgttaatggcagtcttgacaaaagaaagtgaaaaaagggatgaagatcttgatcctcggattcaagatgaaagaaacttattgaaaccaattgaagaattgtaagaagtttttctggacccaggaaatcccacaaagtgtgtttacattgggaaaaacctggatgaacagttgaaataacaactaataag

SEQ ID NO: 338502 - DNA, 1120 bp, Cannabis indica
gggtagtgggtcatttgaaaaaaacctatctacagttaaggaagactaatgttaaagaagaaaagtgtacgggacctgcccaagtgctagatataattcaaggggacccgaatatcggtcctccggccggctcaaattagaatttaatgggaaatattacaattgttgtttcaattgatattaaacattgtacattcagttagagacatcaagaaatctgaatggactgtgcatgtatgttatttagtggtaacccatttgacggggtagacaaattagataaatgacaatatgagttaaattgctgatattcctaagtggaatataggacgtgagtaattaatggaggtatcaatttaattgattcaaataacaaaatcttttgtttaagagtgatctagcattagcaaaggtgggacaatttatgagtattgtctggaatcctaggtgaattgaaggtagcgattgtgtagtaattttgagattatgtaggagtgggactacctatgttagcaagaagcatcttgttttggtagcccaccatgaaggaactccatggttgagtgtccttgacttggggtgatttcatttaagaaaatttcccatgaagcgtgcgagtaagagcaaagcacgttagaaacacttggattggtccgtgggaccagccgtcagtccaggaaacagctagagtgatgcagtcatgtataaaagcctttaattcgtgggaatgagggcccaatggaggcttgaagcaatgacgttactgaggtaacgtataaaagaacatcaggaagagtagtggtatcactaaggtaaagaagattacctaaattacttaaggtgatacggtaatgatggagagtactttataattgactagatagtcaatatggtatataaggagaccattgacattcttggaaaagattactttattgtgcaattatggaaaggcatactcacctagaatggagaaaagcttatgaattgagatgcaatttaatagacatgtaattgagtgattggtggatgttggatcacaaagtaggttgtttattaaacaacgagttatataattgagtgtagaataagttttaaagtggttaacgaagtatgaaga

SEQ ID NO: 338503 - DNA, 938 bp, Cannabis indica
cgttgattcttcttggtcatctttcggtcatttcctcttcctctgcttgtgttcttcttctcattcccttctacatgagcctcagttcgcaaggctgctgtcacacactcagtcaagttgttaaaggtcaaaggggctattggaccacgtatcgcaggcctcaaacgacgcatgaactgttcaatcaccaagggttggtcaacaacaccaggatatgcataagaggatagctctacaaacttcatgtaaaattcattcacagtcatatccccttgtcttagaccatcaaatactccaatcagagccctcctgtgagatggactaaaatattgttccctgaaaacttcctcaaaatctcgccaagtcatcccatcagtttccattgtcctggacaaggtctcccaccaatctgctgcaccaccctctaacttggacacagcaaaataacttgatattcctcaggtgttcctattgtgttgaaattttttttatctgcctcaaccacctttcagctaccatgggatcttgtccaccctcaaactcaggcacttggatccgatgaaagacttgaaaatgatgactctgtcgagcggcaggatccatctgttgagcgggaactgctcttaaggcttcgagaagggcgttcatagggaattcagcttgtggaggttggacattagcttgaggggcgtcttctccaactgttctccttgtcttccttccttttggaggcattttcttaggtctgagaaccaaaagctaatcagttagcgaggattggatgctaataatataaatatgtcttatacatataaataacaagattattattatttaaaataaatctaaattatttggtgatacactctgaggtaatgccatttttctgtcacaacccgagccctaggccgtggcagatatgtaatatctataacttg

SEQ ID NO: 338504 - DNA, 547 bp, Cannabis indica
taaaaatatgtagcatgctaataaaattatatgtcatgtcaacaaaagtacaatagaaaatagaacttaaatattattttttaaaaaataatatactgtataacaaaaaaatacatatatcattcactaaaaaatatatattaataataataaaaaatatatattactaatatatatgtatactatactaacaaaattatataccacaattaaaatatatatataccataataaaattatataccatcattatacataataaattagacactaattaaatattatttaaaataaattatatatcatacaattaaactatataaaaataattattaaatatatgtagcatgctactaaaattatatacatacattaaaatgtttgtattgtgctaataaaattatataccactattatacatagcaaaataaaaaaacaaatattatctaagaataataatataccataacaaaataaaaatacactgtgcaataaaatttataaactgaaaacccacaacaacccatacaaaattaaaaaaaatcga

SEQ ID NO: 338505 - DNA, 502 bp, Cannabis indica
aacagagccaaaaacgatgaacactcacctgttcacttcaatcatactctatcaatcagattgaacgatcacaattttttattgtggaagcagcaagtgttggctgccattcaaggaaacagactcttgaaattcatacaagattcagctccaccgcctcagttcctgaatgatggtgatcgagccgctcatgtccagaatcctgagtttgtggaatgggaagttcaagatcaattacttgtttcttggcttctctcctccatgactgagagtttattgactcgaatggttggatgcaacagtacaagacaaatatggagttctctggagaaacacttcaccttgcaggtttcatcgaaaatcctagagttcagaactaagcttcagaacttaaagaaaggctctcaatctctcaatgattatctcctcaaagttaaacagcatgttgaccttcttgcttcagttgggaggttctttcagctcgagatcacatagctgcaat

SEQ ID NO: 338506 - DNA, 474 bp, Cannabis indica
tacgtggttgggcattaatgagccttagtccacgagtcttttttattaatgagagtatttattacagagaatgttcttggtggatttctctcctattttctctctttgattctcttaaacccagaatgttcgaccgaccctttttcagtatgtttgtggggtatttatagtgtttagctggggtgatccctaggaatggatcacttgtctttctgtgttaacttcataagggcacatattcccagcagatacaaaataggaagtacatgacctataccgtaggtatcttaggagttaggtggatataatcttttatcccctcttgattgatgtatgattcctcataaagtattcgtcactagccttattgattacagtgcaatagccgaaaaagggggattacgccatctgtcatgtcgtttatggagatttcaatacatcttcccccatgcggcattaaatgcgaagtgattg

SEQ ID NO: 338507 - DNA, 413 bp, Cannabis indica
actaactatcatgccaaacataatattaggaattcacatgtaattaccacttgacatccaaacacactttgtattttaaaatacaatgtaattactatgcagtgtaattactaccctagtaattacattgcatagtaattacacagttgtttccaaatacacccttaaagtaaagtgaatatataatgtaatttcctcatttttatggggtatgagaattggagagagtatttgaggcttcccaattacctccaatgacacaattattgtgtaagtacgtaacaaaacaaacacatcaaacaaacaagtgtgtttggaaagccacaatgtaattagatttgtgtgtaattggaggtaattacacaatttggcatgtttgtctgactatgtaattacattgtaactgtgtaatt

SEQ ID NO: 338508 - DNA, 423 bp, Cannabis indica
atcaagatctgaatctggatcatcttctctccttcttgttggtgctgattttccatagtctgacatactatgattgaggtaccacttgatgtgtgtgggcactactcatcactcaaaggaatttcaaaaaaaaaaagacagagaagaaagagaggggaagtggcggcttcacagtgtttgagtgaaagaaaataatacagtaatgtgtgtgtaaaacctgaagcctttaccttctatttatagaataccacatagggttaaggttgaattacttggcatttaaaactgaaaaataaaatgaaaaataggaagcatagtggtcggccatggaataaggaaacaagcctcccacttttgaaactttcctattttatcattcctagtttcccattctctaaaattgccaattttctcattcaacca

SEQ ID NO: 338509 - DNA, 619 bp, Cannabis indica
aaataaattaaattaattttaattaatttattcttaataaatcctctatttaagacaactttattatcatattagtattgtcttaaaataatgacatttattattttatttggaactaagacaacttttgtcttaatatggttatagattttaaatttgaatttcaaatctataactgacttaaatttatttaattcaaaattaaatttgaaaacataaatatcccacaaaattatattattttgccttaattacaataaaatacttttattaaataattaagatagttaccaatttaaatttaaatttcaaattagtaaccataatatttattttgaattaaaaaaattgaaaaataaatatccaaaataatatttaattattttcatcaaaataataatatgataatttatttttacctcaattttggccaaccaacaacgatgtcgtatttatgaatgatatcgccacatgtacacaatttttgaaagcttaattaatttttaaaacctacttctaattattattttgcaacaatcgcttgacccatcttcctcctttataaagaaaaaataaaatagggtttcagtttgttataacctaacattatgtgaatttt

SEQ ID NO: 338510 - DNA, 528 bp, Cannabis indica
aaattaattttaaaaaatccaattaatttaattatgataattagaattgaaataggaatagtgaatatctaaatacaaaactacacaaaaaatcggaagttaattccatgaaatagcatgaaaaatcgaagaaaacgaaacaatttgcaagtggtacggacagtatgcaatgcatactgtccgcgcacggaatggtgagctttggtcgaggtccctcggcgcaggaggctgcatgcagcctctccgcgcacgcatgggatgaatttcagacaagcccccttgtcctgaccgagaaagctcactcaacaccctgtatgagcgcgtgcatccgagggaatcaccctcgtccgcgcgcgtagggtgggtgataccatattttttgattttcaaaaattcataactaattcaaataaaatcaaaattgagttctataaaaaagtaaattgcttaattttttcgaaactatccaataaaaataattccagaaacgaaaaatataattatttttcataaaatttcacaagcatc

SEQ ID NO: 338511 - DNA, 2216 bp, Cannabis indica
aaaacaatatccaacacccggtcaactacatcaggaaaaggctcattgaagctgcaggccagtacccattgatagaaaagtgcatttattgcctaatcctagcaatgagaaagctaaggccctactttcaagcccatcctgttcgggtatacactgaccaaccattacgccaagtattgcaaaaactgaaaacctctggatggttgctcaaatgggcagtggagttgggccagtatgaaattatttttcagcctcgaacagcgataaaaggtcaggccttagcagattttgtggttgaatgtatgggtaaagaagaaagcacttcagaaagtaaccaagagccagtacatgtacctcagtcgagcaatagggaagacaagatgacttggaaactacatgtggacgggtgagctacgaatcagttgttcaccacaggaattttccttgtcacacctgcggggaaacacttgcacgctgcggtcaaattcagttttaaggcatccaataatgaagctaaatatgaagctcttatcgccggcctaagactcgctcgggagatgaaagccgaacatatcgagatctgcagtgacttatagttggtggtaaatcatgtatccaaagagtacgaggctcagggagaaaagataatagcatatctaagcaaaatacacgacctactcgcacaattcaaaagttatgctctcaagcaaattccaagggaagaaaacacaactgctgatgcattagctcgacttgcgagtagcaatataaatgataaagcaaatataatccccatccgatttcttgaaaaacctagtatcatcggcacggaagaggttgaaatgattgatacatccctaaactggatgacgccaataacagcctacctcaacactggggaactcccagataacagaaacgaagctcggaaaatgaggagaaaggttgcacggtacatcattgtagagggagttatgaatagaagaggattatccatgccactactcaggtgtgtcacacaagaagaagctacattacttttgtcagaagtacatgacggatttcatggcaaccacgcaaccgggcagagtttatctaagaaaattctaagacaatgttatttttggccaaccatgattgaagattccaaggcctacgttaagaaatgtggtaaatgccagagatttttgaagatacctcaggcaccagccaatgaattaactcagatacaaagtccttggcctttcgccattaggggaattgacctgatcggacagttacccaaaggcaaaggcggtgtgcagtacgtagtggttgcagttgattattttaccaagtggacggaagccgagccattggcaaccatcacgtccaaaaaagtgcaagacttcgttataaagaacataatttgtcggtttggattaccatacatgatagtctcgaacaatggcaaacaatttgacaatcaatccttcactgatttctgtgcaaaccatggcatcataagaagtttctccgcagtggcacatccctaagcaaacggtcaagttgaagcagtcaacaagacactcaaggacaccctaaagaagaaacatgaagatgctaaatgaaacgcgccggaggaacttcctgaagttctatggtcatatcgcacaactgagaaaacaacaaccggacaaactccatttgccatgacatatggatatgaagctatgctacccatagaactcgaaatgccatcccacaaaagattaatatatagcctagaggccaatcatgtactccttgcagagtcacttgatgaagttgaagagaaacgaaccgcaacaaacttaaaactgataccccatcagcaaaaagtagctcggtatttcaacaaaaaagtgaggtcctaagaagagtattttttaacaccaaagatagtacggtagttgtgctcagaccgaattgggaaggaccatatcaagtggtcgaagttctcgaattaggggcatacaaattgggcaagtatgacgaaaagatgcaactcgttttagtaccaaggtattgaaatggggaacacttaagaaaataataccagtaaaagtaccaggttggatgtattggaaagggtgcagcggaataatacgactccttccattcagatatctagcccttgattcctttctctagcagagcattatcattatctgaacctggatctctttctctgattc

SEQ ID NO: 338512 - DNA, 790 bp, Cannabis indica
cctccaatgatgatttgcagatgcccatctaccggtggaggtagtaactcttggttattgtcattcctctgaccctgatcggtcttgacagacttctacaagtgtgggttgttttgccttatcaggaattcaatttccctcttcaggttgttgcattcattagtgtcatggccatagtctccgcggaatcgacaaaactttggcatctcccttttgctgacatctttcttcatgggcccgggcttcttatatggagtcagggactgagtttccatgtaaatactttctccgtcttcagtctagatagttaacatagtgtactttgcttgattctcccggggatcttgttcagatttaccggcaaattttcctttcttcccgttcccttgcctatggttgttgttggaatgtttaccacttcaacttgaattattttgataatggggaagttgggcagatgttccacgagaaggagcctttgacttcccaggcttttactcaccttccgctcgttgaatggcttcttcgagcttgatgaagccttcgacacggtcaagaaaatcactaattgagtttaccggtccgttcttccttatatccttccaaagttcgctgaggacttcaatgccccctagtatcgcggataactttccatcttcagttacacgagaaaccttggtcgccttcgtcatgaatctgcttatgtatgcccggagaggctcacctagtctttagttaatttcgaccaagtctcctagatgcaatggatgttggcgagaggaggagaact

SEQ ID NO: 338513 - DNA, 764 bp, Cannabis indica
gtataaatatatagcattgttattaggtatttattatttttataagaggccctctatacaatagttagagtttttaaaaggtatttttttaagttataagaaatttaatatttaattgcaccaattatgaggaattacattgttattttgacgccatattatattgtgtctcttaattagtgatttatcttaattttttaaattaaaataataaacaaaattcaatatagtagtacatcaataaattaataaataaatagggcatagcacacttttgaccactacaaaaaatttacttttagtgacaacaaaatttatgactaaaagttaaaaagttgtgattaattataaaatataatttttatgttgtaactaaaaagttcgtgactaaatgtattagtgacaaaaattacattttgttgtgacttaaaactaaattaaggataacttatatctaaatactatgctttagtcacaagaaattttttgttgcgactaaaagttacatttaatttagtcacaaaaaatttatattgtgactaaaaggttgtcactaaagattattttttttttggtagtggaccaaagagtccatttatgctgagaatcatggagttccatctcaaaaaatcaattggtgatgtgtggagtatcacatgttcttttatatgactcaatacttttacattcaatccatgtggaataatattcttcaatatctctcctcaagatggtggctatttttgctcaccaatcttgaatca

SEQ ID NO: 338514 - DNA, 566 bp, Cannabis indica
ataccatgttgtaacgccctgtccaacaaggacgccatgtgtgtgtttttataaaattctcttttaatgatttaaataattataccaaaagtgtggttaattaaaattttgcaattaaaataaacacataattttttttgtaaaggataagtactaatctttacgaggaccccttaatacaaaatatttacatttggtttcaaaagtgctttacaaagtaggattatacttcaaaatacagtcaaaacgggttatcctgtccaccgggccctggcactgcgactgatatgtacattgctgcgacgacctcaaactcatggctgctcaactttggccttccctttacctgcaccatttagcacccttgactcacaaagactcagcaagaaaagtgaataaattaataatcaatataactgtcatttatttaatttcatatcaacatgcttaaacattcacacaatatcgtaaacacaagcttggtactttataaagtacccttaccactcgttaaccccgatttgtatatgtcactatcattgcccgataaagcaaacgataagtaa

SEQ ID NO: 338515 - DNA, 957 bp, Cannabis indica
aatcatgaaaatgagataaagttagtgaaggacacttgagtgagtttgccaagattaaggagtttcaatgaaatcaaaggctatgctatattgatgcgcccacttaagactagaaaataaggctttagcttatatctcttgaggctgaatcttccccataaagggcatggaaagagcaacaatcacttggccattagaatttcgaacaataacaccaacaccaattttatgtttcgattcatcatatgctgcatcaatattcatcttattttgctgcagaggagggggctgccagcaggatgagatagcagcactagtagcagacattgtagcaggggattgagctgccaagtgctgctgaaaattacagcagtaagctgcagcttttgcccatatttcagtcggtttctgagcagccttgtcatggagaatattgttgcgatcattccaaataaaccacatagtacagatcatttgttcaaactcaaacttagaagtattagaagataaatgggtaagataatctcctttatataaccagttagcagaatgaaattgatacgaaactcggttgccttccatacagatttaacatatttacaactaaagagtgcatgccccacagactcccacgcattcgaacatctactacaggcagccgaatcaatgatctttctatgaaacaatgcagaagcaacaggaagagcattttgactcagcctccaagcaaagattttcactttggagggtagttttaaattccataaaaacttccaccatgtttcttgattggaaaaactagagggctagtgttgatcctccaaagaactagccaaatggtacccagattgcactaaatactccccagtgctagtgtagtgccaaacccacctgtcattgttgggttttatgccctaaataaagctcatttcaatataatcagatttacttattgat

SEQ ID NO: 338516 - DNA, 560 bp, Cannabis indica
gaccttcctgaataagggactataaagttcattaaaacaaaagagcataaaccatagagtgtttagaagacaaaaaacttttaagaccaaataacaagatatgcaaatagttgaaaaaacaagtcaatgtattaaaattgatcaattggcccaagaaacacacaatacaaaagaaaaatgttggaaaaattattctttattattataattttcacttagttattgttttcctaaaaaaaattgtatgtgtacttataatgcatgataattagatgcaattaaattgttataatctaattaatttttatgggtttcttttgtttttccaccaacaagaaacatagacctacaatccctcaatagttgagcaaagaattaatcaatatattcacatttacataggctatttccaatgagcaacaactatgcttagtcctcactctaataaaataccagtttaaactctcaattaggatttagaaatattatattttttttctttttcttagggaaaacaaattaccacatttacattttacattaaagttcatctagatgtt

SEQ ID NO: 338517 - DNA, 938 bp, Cannabis indica
gagtagatgcatggagtgtgagaacatttgggaataatagcagtcactatggaagacctggaagaactagaaggtgtaggcttagtgagactgtcatatgggaaggaaaattcttcaaatatgacatctctagagatgtaaagtctcccattagaatcaaggcacttgtaccctttgtgattgagactatatcccaagaaaatacaaggagtggacctatactcaagcttatgcttattataaggtcttatattaggatagcacctacaaccaaaggttttaagcattgtataatcgggttgaatgttaaacaagacctcaataggagatttgttgtcaagtatgggagtagggagtctattgtgaagatagacagcagtcctaaaggcttcatcccaaaatttgaggggtaatgaggcttgagctaacaatgcaagaccattctcaacaatatgcctatgttttctttcagctaaaccattttgttggtgagtggtaggacaagggtgtctatgttgtatcccatggtctgtaaggtacttagagaaggacctaaactcacccccccaatctgtttgcaagcattttaacttcttgcctaactgcaattcagcctcggctttgaagtttaagaacactttgaatgcatcagatttgttcttcaagagatataaccaggtaaatctagagaagacatctacaaaatggatataatatttgtaattgttgagagaagtagtatgagaaggaccccataaatctgacacaacaagctgcaatggttctgaaataacagtattggatgccttaggaaagggaaatttgtgtattttgccaagacaacaagcagaacatatggaaaaattggaaattttattgctgatatgaatgttacaagcttgcaaaacattgtttacaattttctcagagggatgccc

SEQ ID NO: 338518 - DNA, 701 bp, Cannabis indica
aatatataataaataagtaaatttatgtttagtacaaaataatttattatatagtctattaatcaaaacagtttttttttaaaagttaggttgtaccagttttagcttttagttataattttttgaaaaaataacttttagctttttcaaaagttatgtcaaacgggccctcaatagaatcgagaggaagtccaattctaagcgaccaatctaacgccaccatgaaaactactacttcagcctgaataactatgaagttccctacaataccaacatagaatataataaggctcatcctgaagtataaccatactaatagtaattaaaataataataaaaagaataaaattaataaaagaaaattgtaaaggctatcttagactaaaggaaaatctcccttgggcctttattaaagtcaaaacaaaggaaaaggtatatttttatttttatttatttaaatatatacttattattatttatttttgaaagcaaacaatgagaaaagtaggactgttcatataaactggaaaatcgtggtttaaatctggaccactacaatccgaaccattgtaaaccataaccgaggaaactatttttggtggtttggtcaatccagaccgtttatgtcgtaatggttcggttgcggttcgtaatatataattaatggttaaaccgaaccggaccgtttataataaataatt

SEQ ID NO: 338519 - DNA, 562 bp, Cannabis indica
aaaaattctaggttgatgttattggttaatattaaaataaaatataaattattttttaaaaataatagatttaataattatttattttattataattagtttattttaaatatttttattttttttaatatataataaataagtaaatatagttttagtaaaaaaatgtattatagtctttaaatcataacagcttttcataaaagttgggttggagcagctttagcttttagctgtagctttttcaaaaattcttcaaaaagttattttttaactgcttaccaaacatatttttatcacagttttttcagaaaataacttttagcttttttaaaagttgtgcaaaatggacccttaattgtatataaaagtgaaaattgttatattttttataataattttttaattttaaattaaagttgtaataacatgcatgagatttcattgtatttatcaaggactcagggttaagcttggactaataagacgagctagatttgtgcttaaagtccactcagtctagttgttcttaattttttttttaaatatatacatattattt

SEQ ID NO: 338520 - DNA, 1198 bp, Cannabis indica
tcagtaaaattacggtctgcttatacgttttgaattacgttatgataatctataatattattttttaatttagaattagatgatatgacatgtaggataaaattaagatatgtgaaataattttagacatgtcatcagacacatggatattttttttttaaagaagtttgatatataaaataaaattggagaaaaatatgagcactaaatgatcaaaacatttccttcatatatatctgtaggtaaaatttatacctacccatattaaattatgcccaatgataactttgacatattatatgattattaatatttagataccaataaatcttaccattatttttgggtaagtaaaactaatacctacaaataaatattagtaggtaaagattagatttcttgtagtgttagtccactattacaaaagatttttgtccaatttattcatgttggattactcctttatataaaaagcaattgtccttttagttacacataactaattggttataaaactgttttacaattaaaattaacatttaattagaataaaagtaaaagaataaatgaagaataatttaaatccgttttaataagtatagcaatgtatgcgacctatagggtgcgagttgcatattcatattctcgcacaagctcacagactttgggagcattctatctttcggagggctaatgagcctcgtgctaaggtgtctacgttctgtttgagtcacatatatggactcctcatacgcgtcaacaacatgagacacacgagtccttatggagttatcaaatacgctttgtcatttagactagttcattatgtaaagaagcgatctttacttagtcgtaggagaaggctacgtagttatcacatatgtccttgtatatgcgcgacttgtataaacccctcttagtcctccttattttatactatgctagacacagtatgtgactagactctgtcaaaggtcgcatcatcttgtgagtttgagtcaagcaaggtaaactctcagggagttattaattagcagctcatccatcccttgaggattggatccatgggtcaattttaatggagactgatctcaaatttctaggaaaaaaatttgcactataactgttaggttatttttagtattaattttagattaagtttaatatatttttaattgagttttaatcgtgtttggag

SEQ ID NO: 338521 - DNA, 864 bp, Cannabis indica
aatctattgatacttccgaagaaatagatgaaatcaaaacatatttagaatgtaggtatatatcagcaactgaagcttgctggagaatctttcaatttgacatacattatagacaaccatcagttgaaagattgccattccatttgcctagagagcatacagtaatattcggagaaaaagattatgttgacgatgttctttccaagcctggaataagacaaacaaagttcactgaatggttggagacaaataagaaaaatgatgatgcacgagaactaacttattctgattttccttcatactggatttggaattcaaaagaaaaaaaatggactaggagaaaaaatggtgtggctattggaagaatttacttcgcacatccttcaactggtgaacacttctatatgagaatgtttcttaattttgtcaaaggatgcacttcgtacgaaaatattagaacagtaaatgagatcaaatatcctacttttaaagccgcgtgatatgctttaggattattagatgataataaggaatggattgactgcttgactgaagctgcactatgggcaacaggaaaggaattaagacacctttttgccacaatactcattcattgtcaagtttcagatgcattacaagtttggaaatctaactatactacactatcagaagatataatttcattacaaaggaaaagatttagaaacaaagatcttcaattaactgaacaacaagttgaatcatacactctatacgaaattgaaatgataatgttgaagatgggaaaaatattgaaagacatagatggaatgccccttcctaattcttcaattaataagagatttagtgttggaaatattttac

SEQ ID NO: 338522 - DNA, 692 bp, Cannabis indica
gattaatttctggtgttatccctttctcttacccgaccctctctccctctcttgctctcttgattttcaattttaagaattgaagaaaattgcttggtgttacttgattttggagcttgatttggaaggattttaagcttgggattgaggtagtttcttgctgaaattatttgaaattgattgttgaattcttgctgaaattcttggggtaaaagcatgttttaagttttgaatgttctttgttgcatgttaagtggattagtgttaatcttgttaaaattgagcttgttgttgttgtatgcttctttgatgaatttgggcagagattttatggtattttctagcttggaatcatgtgtttctaagatgtgttattgctggaaaattatttgagttgttgaggatgaagctcttgttcaagagcttgaagttccttagttaaacatgattttgtgatatatatgcaatctggttttgggggttttatgttggaattgatgcatgaaatatgttattttgaccccttaataattgctagcaaccctatttgttgatttgagagtttggttgtgaattggggtgatttggatgagttttgggcatgaaaatcgttgctggtttttgagttttctgggttttgaacccaggtgccgcggcatggtatttagcatgccgcggcgcgcccatttctt

SEQ ID NO: 338523 - DNA, 1019 bp, Cannabis indica
tgtcattttagataatcgatatgtcgtcccttataatagaaatttgattgtcaagtttgatgcacatattaatatcgagatttgtaattactctagatcagtcaaatatctattcaaatatgttcataaaggttctgatagagcaactgcaagaatagaatctattgatacttccgaaaaaatagatgaaatcaaaacatatttagaatgtaggtatatatcagcagctgaagcttgttggaaaatctttcaatttgacatacattatagacaaccataagttgaaagactaccattccatttgcttgaagagcatacaataatattcggagaaaaagattatgttaacgatgttctttccaagcctggaataagacaaacaaagttcactgaatggttggaaaaaaataagaaaaatgatgatgcacgagaactaacttatttggattttctttcatactgggtttggaattcaaaagaaaaaatatggactaggagaaaaaatggtgtggctattggaagaatttacttcgcacatccttcaactggcgaacgcttctatgtgagaatgttgcttaattttgtcaaatgatgcacttcgtataaaaatattagaacagtaaatgggatcaaatatcctacttttaaagccgcgtgctatgctttaggattattagatgatgataaggaatggattgactgcttgactgaagctgcactatgggcaacaggaaaggaattaagacacctttttgtcacaatactcattcattgtcaagtttcagatgcgttacaagtttgaaaatctaactatactacattgtcagaagatataacttcattgcaaaggaaaagatttagaaacaaagatcttcaattaactgaacaacaagttgaatcatacactctatacaaaattgaaatgattatgttgaagatgggaaaaagtttgaaagacatagatggaatgtcccttcctaattcttcattaataagagatttaggtaatagactaatca

SEQ ID NO: 338524 - DNA, 725 bp, Cannabis indica
ttatacaccttataaatgaataaatcaagtctccaacaactatatttttaatagctatcattcattcacattcataaataattagtaacatcttttactaatttaagagtgaaaaagagatgagagttacatattcaagtgatcatcaatttaaaggatttgcaactcctattttgtgatcatttcacacattttgtaactccataatgtatgttacaatttgacaaaattaatactttgtcacacttaattatttacaacttaattatttaatctaaatattatattatataaaataatataacattcccccactagattaaataatatctcatttgtagcaaataattttgtaacacaacattttatttaatcaatcaaacattatattatggagtaatataatattcccccacttgattaaataacttcactctaatagaaaccattgcatttgtgcatagtgtaaaatgtctttcgacttgaattttaccttagtgtaattaccacaaggtttatcgaaattttggttgccgtagcatttaaccactatgtcctgataacacacacatttgctatgttcactcaagaaccttatggattgcttttgcaccgttaatggccatgtgcacaaatccaattcatggactttttagagaataactcccaattctcataagaggcggcaccacccctagtccatataggtggagttttagtgtctc

SEQ ID NO: 338525 - DNA, 606 bp, Cannabis indica
aattacgcttgttttctatgttttcaagtttcctatagatgtggatgttcggggtttcaaaagtataataaaagacaagttgagccaagaaaaattgaaaaatcaggatttggttcacttctggccgcgaaggatttatttacggccacgaccaagatttggcagagaggtgcttccaagatgggctcagtagccgcggcgagctacttcaccgctgcggccaaatcagcactcgccacggcgagggaatccatggtcgcggcgaggttccgtacggattgaggccaatttcgtcttttgaaagctgggatgaaaaatagaaagaaaactacgagaaagagaagggagaagcaaattttagacctgaaagcagtcaagaacggcaggaggagcagagtggcagctcggattcattccaccaacagtttctttcttccttcctttttaattcttttatgttaaattctgttttaggaatagttatggatttgaacatgcactaaattcccaattgggaaagatgatgaatgttggttaaagttttctctagttaatgtcaattgccattccttttatctttgatttgtgaaattatctctatttgtg

SEQ ID NO: 338526 - DNA, 933 bp, Cannabis indica
ttctctctattttttctctcttttgatactataaaaactctcttttcttttacatgaacatctctaggaggagctcacatggagatgacaactctcgaccaaaaggctctctttttctctgttgttatttctgttgttgttctctctggctgtgactttttattctgcttgtatctcttatattttgtcttgttctgagaaaaatatctccttttatactgatctgtgaatctgatctagggcagagccctagtgatatttgtaactgtttttgtaactgcttcagttgtaactgtctttatgttctttagtcttgatctttgttgtatttgatgtaagggtatatttgtcaaaccctgtgagtggtgttatacaacttaagggtaaataagtgaatctgtaacaacaaattccacccagattctcttatttacccaaggatagttgatgatgctatgagggcttgaatgaccccaagggtcagtaccatttgtttatccctagcaagttcagtttgaacttagctaggataaacaccttggtcttcatgtttgtgacacctccttgtgtcaccttgttcttctctcttgcatagatcaagtcacaaaacccttccatttggttttgtgactttctaaacgcaagtataatgcatgttgtcttctttaagtaccttaaaatccattttataatcaaccaatgtatcttcccagtcaataccatatacttgctaacagcaactatagtatatgttgtatctggtatggtactcaacatgaaatacatctttgaaccaatcccattagagttgaggatcttactcatatcctccaactctttatttgtcttactgcatttttctttatgtctaaagggccacatatgtttcacaacactctttcccttgggttttggaacacaaacccaagtctt

SEQ ID NO: 338527 - DNA, 882 bp, Cannabis indica
tctcaaaaatttcaaacttctgagtttcgacttatcgtggaatatttctattcttttatctgttgagtactcctggtcaacatatttgcttgtttattgttcaatatcccgaccaaacactcagctcgcgtgttgtcttttgtagatgaaccctgtagagttttgggggagcgaacaccgaattgaccaggatttgcttcaactgtttttcgagcacaaccctcgtctctgttctagtccgcccttttcaagcgacaaacattccaactcaatcttccagtccaaccacaggatgatggctcgaacaaaacagacaatgcgtagggtcaatgcatccgacccttacgtggcccagcacgccactttacccagtgtcaaacaggatccacccgtccaggaggagggggatcatgaaggggacaccaaagtccaggagatagaacaacagggcgatatacgttctggcagtccttcagaggcggaggaagaggaggaggttgcacctccaaattttggaggatacaacaaagttgttgggcaagtagatgcgtacgtcgatgtcctggttgaaagagtggattatgttagtaaggagcaaactactgcagttcctcacaggaggcaaggtactttgggtgccaggtgggtgagcacttcgtccaaggtcactaaggcacgtctaagggatctggaccagtccggccacttgggcgagctggaatgttatgttcctacctcaaacaattgagccacaaaccaaaagaaggggatgtgtgcctggtcgggtgcttattccaaacaaggggcattactgcctttgcacccgtactttaggaaggtggcagacttcttccgtctatgtctgacccaatttactcccaa

SEQ ID NO: 338528 - DNA, 497 bp, Cannabis indica
tagttatgttagttatgttggtttgtctataaatagactcaactaactcctagctagccgtggttcacacttgttgtacagaaaataatagagagagagtgacagagagagagaggaatatactggtgtcaagaaaccagttttctctggtgtgctcagttcgagttcaattccttccactcattctctagtttgaatcaccaattgatgtacattttattcattgcatacttgattaatggaaagttcctaaatggctgaatattgatttcactttgtcttgttaaattcagtttgttttactgttggtatttgacaatctttgtattgagtttttgttaaatctgtcatagactttgatcaatgaattgttcttgatatttggacattgtgatcggtttgatcacatcattcaagatatactaatgaacataaagacaatatttcctagtgaaatataactataccttaaacttaaactaatattccatagtttt

SEQ ID NO: 338529 - DNA, 534 bp, Cannabis indica
ttttttttacaaaaaatacggtcatttgatgttgtacacttattaatttgttgttgattttttattgttattttgatgttacttttacatagttttcttattgttttcgtgttatttttatagaaaaccgtaaaaatataaaaaaaatactttaaacataaaaatataatttttttacaaaaaatagtgtcttatgtaattattagggatgcacacgggacgggaaattagcagggagtactttccccgtccccatccccattaagaattttaaccatccctgccccatccccgcttattccccatcggggacggggcgagaaatcccctaatggggcggggacgggacaagaattcccctattgtaaaaataaaatttattttaaaaatttaaatgtataaaatgattaaattaataaaatattacatattatttattattcaatatattaattattatacgaaacacaacttcaaaaattataaaaataatattaatatattaaaaaaaaatacaaatgcatatataaaata

SEQ ID NO: 338530 - DNA, 593 bp, Cannabis indica
ttattgatagatagaaatatgattgagtgcttttttaattcatgattttgggaatcagaggatatctgattttggtttgtttggcacgaataatcataaaatctcattcaatggttagctgctaagaagtaatcatataaaatctcattcctatatctttcttagtggcccattatgtgtaattatatgtaattataatagtcgagaatttgaaatatactggagaatttgatggtttttctcaacccatttttggctgtcaatcaatgtagtagaatgtagaacttgatgaacataggaaatacattagaatggtatgtgcattatctttctcttttttttttgttttgtttgttgagttttatttagttataaatagaaatgagaaatttagagctatacagaataaaaaatttaacatattacaattaatattatttaatttaatttaatttaaaaaaaactaattatacatgtcttgcaattaatatttatatttaaaaaaaacaaccttattttaaataaataacaaactacaccaaaagttacaatgtaaacaaatgttataattgaacaaaaaatacaatagtaaa

SEQ ID NO: 338531 - DNA, 577 bp, Cannabis indica
ggattggagccaagtgtagccgaaagaaagaacccgaagggaagtatcgggctttaaagattcttcccatcaaactctcgccacaagtgagaagcctccacccttgcttagccaacaaagcaagattgaaatctctgaaatcccgaaatcccatgccaccattagctttgtgagccgaaagcttatcccacctcatccaatgaatccccttgttagaagtagatctccaccagaattgactaatggcacgctcaatatcattgcagattccaacagggataaggaaaacattcatggtgtaagcaggcaaagcttgaacaactgatttgatgagcacttctttaccagctctagaaagaaacttgttgtcccaagtctgaattcgcttatgcaccttgtccttcacataaccaaagacagaatttttatttcttcctaccgtactaggaaggcccaggtacttgctatgctcatccgcctccggaatacccatcctagcacaaatgatttgtcttgttgctgaagccgtatttgtactaaaaaaacactgaagacttctcaaagttcacttgctgac

SEQ ID NO: 338532 - DNA, 723 bp, Cannabis indica
ctcttgccaattgagcataccacaaaactaccctaaacaaatagggaaaaccataaaaatggtacaaaagccataaaaggcacataaggaacaagtaatgtaaattcatatgaattaaagtaaaaatattaactaaaatatattaattgatttataaataaaattgaaaaattaattaatataaaaatatacataaataaatcaattacaaatataattaattgtgtaaatgttctaaataaattaataccaaaaaatcaaaaaataaattcaccttacaaaactataaacttagaaaatattatatacacaaattattgttaatataattaaaaaatgctcgttcactgtcaatcatataaagaatttttaatagaaataagtaataaaatataaaaagtaagattgacataaaattatttaagatttttaaaatgtgagtgaaattaatacaattacaaaggcataattgacgcacaaatcaacttgtcaattactaaaaataaaaaatctaatttataaccaaaaaggataatttaatgtaaaataatttgaaatgaatataaattttaataaattaaaatatagaaagtaattacttagcttaattttctccaccatttaattctatcatgtgcatggacttccggctaatcaaaagattagcttaaaattaaaattaaaaagtaacagctaataaaataaatcttaatagaccaaaag

SEQ ID NO: 338533 - DNA, 426 bp, Cannabis indica
tttaaatttaattttcttctaaaaaaaaatattttaaaaattataatttttactatattatctagaaaaaaaatttttatgggtcaagttagtgttgataaaattagacacgagttaaaaacgagtcgacacgcctaacacgaaatataaaaacaggtcaaataaaatataacacgaacacgatacaataacatattttgccactcctaagtaagaacgcttgatttcacataattataaaaataaaaataaaaaccatttatatgttttatttttaaattattatactatattaatacataacatagcattggagtatttaactaatttaatttggcatatgtcgtgcaacaggtgtaatttttaatattttttttttaaggctaattacaatttttttttctttccctctaaactttgacatgt

SEQ ID NO: 338534 - DNA, 944 bp, Cannabis indica
gtacgctcaaggcctaaccgccccgacatgtacaatcttcatctgctcgctctcacggctcctcaactttagccttacccttacctacacatagcaatagcattgtgagtcgacagactcagtaagaaaagcataacataataaacatactaatatcccaagttataatcagtcgcccatacacctaaccataaccctaactgaatcaggatcgatcttgacaaagtatgtctaaccgcgaatcgagcctatactcagtattctaatcgcactgatgtggtagcagttaatccatactatctgatagcctagcatatatctgatggaatcttggtgtaactctatgtacacctcactgttgccctgatatgctaatctgattgctatagatttgcgtaacatatatctgatatgttattcttatggcaactaaaatgtacgctaaacatgtataaacatatgcaggacattatactaatcttaccttgattccgaattcaggtgtgccggccaacctgagtggaacaactgcacagcgaatcacaggctcctaaatcacatcaatcacaacactagtaagtgatacgctaaatcactttctggggacttaaaattgaaactaaaagtttccctattgataaataacatggaaataccccaaatatctcaaaatttggaaaaactagggctcccaaaactgcccgaacctgtagaccggttgcccaactggaattctggttatgtggggtttcctgggagtcaactggaattccggttccaacaggcccctctgaatcggaattccacttcagtgcaggaaagattaaaaatttcctaactcatttaagtcaaccccaatccacatgaaaccttccagaactgttctaagcatcctaaagatcattttccaagcaacaaaatacagctacaagcacagaatcaaa

SEQ ID NO: 338535 - DNA, 655 bp, Cannabis indica
agaatcaggatagggacctgggaaacagaactaggaccgggatctagtacccgacctagacccgaacttgaacctaggacccagctcctgacctggcacaacaaatggaacctgactaggacccgagattgggatccagattttggaccctgggcttggacaaaactcgtagtcgatgtctggatttgggacccagccctggacccgaaccctgacacggacccaagcccacagtcggacctgaacccagtcccaaaccaaaaagtggacgcgaacccttaccctgtgacccaaaatttgagcccaaatcagaagttgaccgaaactggaagtaggacttggacttggaatcataactgaaattggacatagatccagaaccgtaaccggaccaagacccaaactgaaaatcagacctagacccgaattggaagccggacccggatcccaagccaaacctggattcgggacccgaacttgaacctgaactcagacccaaacatggaatcagacaaggcacatagaaccacgggacctagaaccgcaccctagtctcgatcaagaaccaaaactcagaaatgggagttgcgacctgaactagaaccagaccgagaaccgtgatagtgatccagatcttgactcgagattcgggtaa

SEQ ID NO: 338536 - DNA, 876 bp, Cannabis indica
ggtggcatgtctgattgacattaaggacgtgggttattacgtggggacttatgccggtcatgtcttcttgataccacgcgaaaatgtctgtggcgcccctcagtgtctttattattttttctttttcctccggttctaggctctttcctagccggaggactttggtggagtcaaggtcgcacactgacacttcctcgacgtcctccatttattctacaattttttcgaatcccacgcggggatccaactcatcttcttttgccatttctgacttaataatttctcggaccattaggtcgggtaggtgggcagcaatgttataacactgcctagcctccccttggattcctctcacggtccctatcccagcttcttgagtggggaatttcaggcacaagtgccatattgacgtgaccgcaccaaaatctaccagggtcgatcgaccaaggattgcattataagctgttggacaatccaccaccacaaaggtgcaatatttaaaagtgctttggggtgtgtctgggcacaaggtgactgggagcctcacttttcccattgggataagtgttgttccattaaaccctgtgagttgggaaccacttggtgaaagatctcggtccgttaggcctattgtagtgaaggcctctttgaataataaattcacagaactcccgttgtcgatcaagactctggccacgatcttattggcaatgggagtttctatgaccaaggggtcatggtgaggaaaacgcgctgtcttagcatcttcttctgtgaatgtaatgggctgatccattagccagggccttttgagctgggagttgagtaacctccaaaaacctcatcatgttttacggcccctgcgtatcgtttgag

SEQ ID NO: 338537 - DNA, 636 bp, Cannabis indica
ttcctttcttaccaaagcgcttgatgcctttcatagacgatactcggagaaataccatatctctgatctgaaaatcaatgttctgacgctttggatcagcataaatcttctgtctgctttgagccacgagcattcgcgctctaattttatcaactgtctcacttgttctcaaaacagcttcaggacctaggaactttctttcacccacttcatcccagtgaataggtgatctgtattttcttccatataaaagttcataaggagccatcctgattgttgcttgatagctgttgttgtacgagaactcgatcaggggaaggtactttacctatgatccttcaaaatctaacacacatgcccgaagcatgtcctctaaaatctgaatggtcctctcggactgtccatccgtttgaggatgaaatgtcgtactgaatttcaactgagtacccatggctcgatgtaaactctcccagaatcttgatgtgaatttacgatccctatcagaaacaatggacttttggacaccatggagacgaacaatttttctaacatataattcagcatattgatcaatggagaagttcgtccgaacaggtaaaaagtgcgctgattttgtaaacctgtcaactatgaccc

SEQ ID NO: 338538 - DNA, 503 bp, Cannabis indica
tgagagagttattgtattttaagtggaagtactttttatagaaatataaagaaaacaaattacaacaatagtagaaagatgacaatttttgacatagaagaacaccgaattggtgaatagtttcttgataaaaattttagatcatcaaataagctttccaacgatacaaagatctttaaaaacagatcaatatcaagagagatatcgtcacattactgaaacttgttttttctgaaaacgaaaaatatagtaagtccgaaccctagataacatttagcattattgagcaagaaaatatttcatacctcttcaaaaatttctacttgatgtctcaagcccgcaagccttgattataaatccaaaactttaagaataaaggtagaaaaataagaagaagtgtggaaggtttgagaggagcaaccatgaagaagaatgatgctttgactaattggtttggaaagaaaaactaaaactatgatagtttagggtttgataaaaaatat

SEQ ID NO: 338539 - DNA, 400 bp, Cannabis indica
cgaaggaccaccgctcatctttaggcccgtgatcaaaccgaacttagactacccaaatctaacttcaattttacccacgtaaaaccacacttcatcatctttgacctcactcacttttttcttccttagtaacagttgatgcacaataaccccagagaatttcaattcactagcattccaaaaaactccaaagggcgtctccttcaccttctgagtcaagttaaaaacttcaaatttagcctttattgaagcaaagtacccgttccctctataagttatacgcactggaaagtgctctgacaatgggagaataagttctggagccatctgcatttacaaacaaagattataattgattagattatatcgcataataatcgcacagaagtcgcataaagac

SEQ ID NO: 338540 - DNA, 801 bp, Cannabis indica
atagacatttatataataggtaagattggagaaaaattgacagtaccataaacgtgtgagtatattcaattaatacacacgtacggaattgtgagtattcacctaaaatgaatgaaaacttaaaatatagactggaattaaaagacaaaaacaaaaattataaataagatgagattatagtgattcagtcagaaattgatctgtttagtctacttttaggaaaaaatttagcttagtctatttgattcagatcactcctttatatagaaagcacgtgttcatttggatttacataaccactcagacaggatcgttattacattaattatacaaattaatagtaaaaaatattaaagaataaatgaaagaacaattttgactgttcttgattaatttcttgaatgtacgcaacttgttaagtcacacattgattatccatatttcgaaaaacatgatgtcgcaggttccttggtgttttatttgcatattgggccttcgggtccataattgtagttagataattgactgcttgcatttaccctgatcgtgtatttggacattcatgtgttgacaacttaaaacttgtgagatcctaatgagttgtctaacacattatagtttcagactaaacatatgtaaagatgcggtctttacatgtcgcaagagagatatactttctcattggatataatcagtatacgtgtgaccagtactaacttctctcagtcttgcgttttatcaactatgctgggcatattgtgcgattagaccttgtctcggtcgcacattctcgcaagttta

SEQ ID NO: 338541 - DNA, 833 bp, Cannabis indica
atattcacgctctcaatgaaagcaccaaactgttgacctcaaaaagtgatcaactgacatcgagggtcgtatagatccgatgcttgccacgtgttgcacaaataagaatgaaaaataataaccgcacatatttgttatagaggtttggcccccttgtgatagtgggtaatgacctactcaccttttagttgtattaatacagagttaatactatccaaatcactatagatgggatctgctatagcacccttaggaatacaaagtatgaatcaagaatggcaaaactcaagtgttgagatgatgctagtataagcgtgtgagagaggaagtgaggaagagagaagttgtaagacttaggcttagagctttgaggcaggtttcaagcttagattcaacttaagtttctaggttagagttatggccttcatataggaggccttaaccctagattacaaattgaaaccctagacatttgcatagtttactagttaattacaaaagataaaaatgccattgaatctggatattattcagctattctgttgggcttgtaaggcccaatttgctgctcatgagttgctatctacgtgtagaagtgcacaggaaaccttgcagagcacctcttggctggccacacccttgtggaaggcaggctggctgaccatagggccagccaggggtggcctgccagctcctatgagggtgctggtgtgtcacttgatgcccgtttgagttttggggtttttgtttgcttaggcgttgacttgaccttcttattggtgagttgtactgccacgtggcactaattttgtccacgtaaacatgccacgtca

SEQ ID NO: 338542 - DNA, 383 bp, Cannabis indica
gtacgtcgacggagcttctaataccgaaggctccagtggcagaatcatacttatcagtccgaacaattttaaggtacacgccgctttacgatttgaattttctgcatctaacaatgaagccgagtatgaggctttgatcgcaggattaaagctcgccctcgaaatgaagatagaatacttacaggctttcagcgactcccaaatcgtcgtatgccaagtaaacggaaaatatctggccagaggtgagcgtttggctaagtacctcgaaatagtatgcgagttattgcagaaattcaagaaagtagttgtctcccgagtaccgcgtgctcataactcacacgcagaagctttggcccgcttggcctatgttgggttttatgccc

SEQ ID NO: 338543 - DNA, 957 bp, Cannabis indica
ggccttaatatgcctaacaatgttctctacttgctctagtctcatgatgttggtggtttgttggttctagggttctgaaaataaaaagtaactttttaaaactactaaaatgcacatacaatacaatcatgcaaaaataatacttacttcgtagcaagtggaacttttttagctgatatgtgtaacttatgagaacgctctgataccaaatgtaacgcccaaactttttcataatttacaaatttagttacaagcattaaaatgcagaacaactgtaattaataaataaaaataactacacataaatttaataacacttaataaaataaatggagcgtgccctagaccaccctcagttatatggtccttagagagtacacacataagcctccaaggtctcacttgccaccggttttttaagttttacaaccttaatatgcacatggtaagtttgatagctactaaactcagtaaggaaatgcttgtcacgtagtcacataaaataaaagaaaacatataattaaaacttagatgcacatatttagacaaatagcaatatatataagcttaatcttgtcactagtaactaataactagtttttaagctaagtcagataataatagttacgcccaagtctgactttgggaaataaacccgagttattagactaaatggcggagggctaggttcagtaaaattgtacccactactaaatggccccctatctaccatatagaccaaacagtcaagtatttaaccattatcttctcggtcaaaccatgtcacataaattataatctacctaatttaaataatgtcaaactactatacattatttaaataacataacaatcataactaaataatgtgaatcttataaacacactatttacatacatacttaaataacttgaatcttataaacatattatttaaatatatacctttagcaatgg

SEQ ID NO: 338544 - DNA, 533 bp, Cannabis indica
aacaaaataatgaagatgaagagagtcacaagcaaagcaaggtgccagtactttgcagtgacgctcagaggtgcgttgtataaatagttcaaatagttgtcacttgggtctatcacatcttggaaacagttcgtggatgaattcttagcccaacaccatgcgtcacgagactacaccatccctagaacttgcttggaaaacattaaacaaggaaaagttgaaagcctcaagagctacatctagcgctttgacgctgaagcagctaaggtggggagactgactaagaatgaacacaagatggccatcaccgcggtcgttcatctaaaaagcaagttgtggaataacatgcttaagaaaggtagaagaattctacgaaagggccaagaaatacatctgggttgaggacagacgcgagaatctcacaatagggaagagtgaccctaatggattggctaacccctgcacgcatgaagaaccatgaaggaaaaaagaatttgataggggcatgagtgaccaaaacaagaaggttagga

SEQ ID NO: 338545 - DNA, 579 bp, Cannabis indica
acaggattagctatccacgagggataaaatacctcgcgtataaagtcattgactaacaacttgtccacttcctgtttttagtgcccctagtctctcgcaatccaagggtctcctttttttgtctcttcgctgggtagtttggatcaacatttcaatgatgacagataatgttagggtcgatccctatcatatctccatggctccaggcgaattgatcctggttcgcccttatgaaacttattagctgctatttgagctgctcgtccaggttcatcctaatgtatacacactttgtgggatttcccgggtcgagaataacttcttccaattcttcaattggttttaacaagtttctttcatcttgaacccgggggtcaagatcctcgtccttcttttaacttttttctaccaagattgccatcaactgatgaacgactttcctatgctgcaactctatgcgatagaaatcgcgagccagcatctggtcgccccgcaccaccccaacaccttcttgtgtttggaacttcaaggatatatgcttgatcgaactaaatgttggatattattttaccaggatct

SEQ ID NO: 338546 - DNA, 1430 bp, Cannabis indica
agaagccgccctatgtgggccttaacaaagccaacacttaaggggcttcttccccattgcagcatcacttttaaaggaggggctagattcaggagtcttctttcccctcccccacttttactcggccattactttcttgacttcttactcgcagcattgttggtgctatccgaagatttgtcttcttcagctgcgaattctcaaaggtttaatcagtgagccgctcggctgcagcttgagcagtggcgagatctgatacccgctgcctttgcagctattgtttagcccaacgcttgagtccttcgagaaagtagaaaagtttgtcgacttcgttcatgtccttaatgttgagcatcaatccggagaacttctttacatagtctcggactgtcccaacttgctttaactctctcagctagcgtcaagccaagtaggcgacattctctggcaggaattgggcattctattctttcttgaggtcttcccaagtctcaatggtgcacttaccactctgaatgtcttcatacttcatcctctaccacaatttggcgtccccggacaaatacatggtagttgttgctacctttgcttcttcagagtcagtccgcacgaccctaaagttttgctccatgtcaaacaaaaatttttggagctccttcgcatccctcgcccctccatagcatttgggctcaggtgctctcggtcggccatactccatacctctgtgcccctggtatttgcacgctctgctgctatcatggtaagatttagcttagttgacattcctgctaactcttcccgaatggctgtgacagacacatgacaatcctctatcgtatcattgagggagtcttgtaatgcagcctgcacattttgtagcacagtgatagcagcctacatgtctattgttgcttgttttaatgccctgatgcaatcttccatctgaggcacaattgatgttccggtagcagcgtcactcctctcgatcgcagctaccctagccaacaagttagcatagtcttaagccaacgtgataacttgttgttgtgtcattgttggccctgagttctgatggctagaggttagatccctgaccctcttgtccatgccatctagttcctctatgtgcttctcaagctcttaaattctttgggtattgctcaccattatgtcgttttaccaagcttccctttctattggctctaataccaactgtcacgggccgcctatttggacactcccaagtaggtggaacgtgcggcacttgctgacacagtgagctagcaagtcagcctaaatgcgcctgcaggcaaacaagttcaaaggttaggcaggatacatgtctcgcacatgttgagtgcaaacaagaagcatgagcaagcaaatgttgggttttatgccctaaataaaactcattacaatctgattag

SEQ ID NO: 338547 - DNA, 872 bp, Cannabis indica
caggcgtcagtgatatatgatgagtaccgagtgtaggtacgagctcacttgattaggtgtggtgatttttctggcgacgtactaggcgtaattacgggcgttagtgacatatgataagtaccgggcataggtacgggctcgtctaattagatgatgtgatatattggtgtcagattgtggcacgggctcacctgattaggtgatgcaattatatgatatatgggtgcaggtctttagcacaggctcacctgattaagtgatgcagttttgcgatatatgggtgccaggctacggcacgggcttgcctgattaggtaatgcaatacaaaattatcatattaaagcatcgacttgcctgattaggcaacgtgatgttatgaagatggttactttatgaggtaatatatataatttatatgattaaatgaatatgaattctattattggtataatggctttttattaccaaatatctatatattgatgtttatttgtggcagatgtcagtagtgatttggattttatcctacgaacaatgcctattctaattgtgtataaatgacaatatttgaataataaactatattattattattacttcttgctaagttcttgtgactcacgggtactatgtggtgcaggtaaaggcaaagaaaagctagataaccatgaggtggcagtcttctccagaaatgtacatattgacctcaccgacctatgtgccgagttgccaagagttgttctaggctggttgtatctgctgtgtattttgattttgtgtttaaatggttgtcgtaaatatttatttagcaaaactttctataacggggatccccgaaatacactttttatgttgttataatgtccattttt

SEQ ID NO: 338548 - DNA, 895 bp, Cannabis indica
cagaaccttgggttatggttttgggtttccttagattagggttttgaccatgtaacttacctggtttgaaatgtgattagggcatccatctagcacgagactttccgttcaggtcggtcagcacacttgaatctagaaggaagataagaattgaatataatgtgtgatatcaataactgaatgtatgtatatgttatgtgtatatgcatgcttaaaatgttagttgcactaccaacacttatatggttaaggtatagagtgtattggtatagtgattgttgtttgagagtaccgtgataacagcataagtacggagaggtattgagtatgtgtggtacataactcagaggtactcagggtatgaaataaaccctaccaacactcgtacggagaggtacgtagtgtatgtggtatagtggttgtaccctagtattgaacgttcttactcatctattgagccttttaaataggtgtatgggcgcctagatacaagtcaaatattatatgatgtgttatatgcttttcttactgagtctgtcgactcacaattctgctttcatgtgtaggtaaaggaaaggcaaaagctgaacatgagtgaacctgagcttggatgaagttgtacatatcgaagcggtgggacctggagtattcggtctcggcacgtctggggttacattttgtagtcgctgtgcgacctggattatatgtattttgggatattatattttaaaagtttgtaaacgggatcccgatacttgaaatagttttgtatattataaagtttattaattaatttaaaagttttaatttgacatgttttccaagaaaattctttgattagcaaagatagcactgtacttgaaattgcaatgtagcgtgccttagcattagggcg

SEQ ID NO: 338549 - DNA, 1282 bp, Cannabis indica
ctacaagatgatattatccaagaaaatgtggggaccatgggcttatgtaaccaacctcctaataagaagatttgaaatttactaactaaatttcttagcttattaattcctcctaactccaatctagattcgaaattatactcttaattatacaaaatgctctatatactaaatttagatatgctatgaattattcattgtttcaatctgaacaatcattgatcctctatagatggtttacatcgagtaaggataaatttactattttacccttcaatgtatttcatccttaaaacacttagctactatatatgattttcagtaaactaatataattaccgaaatgattcttctatcatttattgcatttagccaagcttaaagaaaaccgtcattttatttctaaatagaagctataaattctatatctatgatgaacactcctactcaattgtactattgaattctgaagatgtaagtatgggctagtcctacaggcaagctcgtaacgaacaagtcaaaaaatacataaagtacaattaagctaaaacttaaccatctccagtttgatattgacttagaaaagacataacaataagtttataatatcttattaatatcggtcaagttccatgtatagacgatacatcagatacaagtttactttactaatgtcctagaaaggacattccacttatacaagtgtaagtaaactacatcactcattatcacgtcagtataaatctagtgcactgataaatcgtgggactaaatagtttgaagcatataatcatgattattttccattgtgtagataacactataattatgagtaacaatatattcaggatttattaaaatttatatattaaatatttaatcatgaaagtaatcatgtgaaccataaatttaattagggcataaaatcctaacacaaaaatcacaggaagtctaatgacaatttggtaatggaatttttattgtcttaattcttagtattgtcctaagtattcattcaatcttaaaaagcaagttaaagtatcacacctatattagtggttccgaatttaagagtcctctattaacagttagttgtctgttgaaaatccaagactttcgaaatctagatatttagctaaataccttagggatgtaggtggtgaattggcaagacagactttttttggaatggtaaagaacttcctgttattgtgttgtctaatttttcatagggtcttcacaaaatggctttgtccaattatttgtcaatttcacatatctc

SEQ ID NO: 338550 - DNA, 996 bp, Cannabis indica
gtaattggttaaaattacaagatatcatgaattgtaaaaatataaatttaatagctaacaattatggtatataattatgagattattgccttattactttattatagataacataatattaattttgggtatataaattataaatatgagtttattatagataacataatattatagataacataatattaattttggtatataaattataaatgtgagattttgtaataaattggaggtagggacattaattgtgaattgagaatactttgttttatttttgggaagatattgaaataaatgggaagtaaatgctaatgaagtattgagattattgccttattagttgtataggaagatactaatatgaatagtttttataataatttgaaggtataataattacgaggttatctatttaaataataaataaggaagcattatgtcataatactgaattggattaattaatattattaattaaatgtatgatgaagtggtattaggaaaatggtacttttgaatgtgaaaagtgcaatcttaagttttaaggatattaatacaattttagtttaatttaggttgaataaagattatagataccatgttttacgctataaataaaataataaataatttgacttattaaggattttgacatgttttagtctataaataagtaatatttttaagagataaaatgaaataattagtatataatattttgaatatttaaggaataatgggtattaaaaggaaaatttatttatgtttgattttaaaagggtaaaagtaaggaatagggatcctatgaaggttatgaagtagaatgctataatttagttgttactagccaaagggtaatccctttggctagttctagtattttatagggagatctagttgcttagtcttggtggttggttgattctcttcagtttgaatagttttctaattaaagttttatgctattttttgatgttttttttttcagtt

SEQ ID NO: 338551 - DNA, 939 bp, Cannabis indica
gaaatcagcctaaatagtggctataatggtttggattcatccattggatccattgaatggatccaatccaatccaaataaaaaaccagttaaagcatccaatggatggaaccgatccaatccaatacatccgttggatgtgatcggatcggatgactcaattcaattggattggatcggatgacaaaattcaatatccaataaataattggattcgatcggatgggtccaaatccattggatgttatccaataaacacccctacaaaagatacccctaagagcatcaataataaggggtgatattatttttaaatgttaagtaaagggaaattatatttacaccccataaaactataattacaccccattacactccgctttgtgtaccaaaagggtatctcttgaatacaccccaaaactttaggattgaaaaaagaaaaagagaaaactagaagtcattaatggcttctacacattgattgtccaagtaaatctaataaaataaataataataaaaattaaagtcattgatttgtgaaaagaattaaatggtatgttaagaaaaatcagaaaatagtagcagttttagaattgttttgaggaaaaaaataaagtaactgaatattttttattttgtttctggtctaatatttcttagtcttgtatatcactaaattcatcaaatgtatatttagttgtttttcatgagaaaagaaaacacatacatatacacagaaatttgttttgtatcgaatgattccttcgatgaattacaaaaataaatctctgtgttttccattaaaaattttggagtgaaaaattatatagaaatttaaatagtatagtgtttataagaaaaaatagtggggtgtacttattaaaaattaaattaataacctaataaagatgtgaagatatctattttagtcatttcacaa

SEQ ID NO: 338552 - DNA, 1440 bp, Cannabis indica
gcacatttgagttttgtaaaaaaaaaacatacatttagatttgaaactaaccttggtcggccttggaggtcttgcttgagacctacatggtcctatgacttaatcatggaagttgcccagttttaaggtttcaccctataaagctagccggttcatgcctgggtttggcgaccttggctggttcttgggtgagtcatgggaccctggccgactctctcaaggcttagggaccctgtctggcttgggcctatgttccaagcgagtggccagctttctgtcctcttttgacttcgataagaatcctctcatggccctgtaggaatatacaaccttagtcacatacgtgatttccttcgaaacaatatatgaaacttaatggtgagtctattatagtcgaatatttaacttaagactcaatatttgttcaagttgttacacttgagacctgtacttcgctgatacccagccttatacaatgacattgtctggcaagtacccttggatacgggttgcccaaagattgtgatttttctgttttctgaagggatgtgtgttaaccaataaattctgttattggttatatgcggaagttagttatctgtcagggattagttagttggtttttcgttattttctgttactaattcctttgtacttcagcatctataaataaaggaaaggctcctttagtgagtcaagattacattgtcaattttctctgcttcattgttttgcttttgctctgttcctggtgtttaccacttctggtttttaccttgtttttactattctacatggtatcatattattgccaatggagtcgtctatacacacctccaccttcgatcctgctggtctaaatggccgaaattctgctgcgtctcaaggttcttaccctacgggttggaatctattttctagttctcttacctcctccctcaccctcaagctcgatcgtcaaaactttctagcttggaaatcacaggtggttcctactgtgattggtcatgaacttgatgacatcttgttcagcaatgtttcccctccatcgaatcttgttactggtgctccgaatccagcttttgcttaatagaaaaagagggatcaattactactttcttggcttcgttcttctatgataaagggggttcttgcttctgttgtaaatcacaatacatcgtttgctgtttggcgtgcgttagagcaaaagttccaatctcaatccggttagatttgtatatttttgtttgtaagcctcggtttaatgtaaccaacactagtagaaaaataatttctaactgacgtccctattcaatacggtcagttcctagccgacatatatgatgtgagagtatgtatatatatatctttatatattaaaagtgtctatctaacgacatttcttggtttaacagaatatacttaaaaataaaagaatat

SEQ ID NO: 338553 - DNA, 2003 bp, Cannabis indica
ttttaataattaattattctattagtattaaactagtttataaaatcacacacgtggcgtccctatagattagggcgttacaagcaacctgtccagatgctcccagcgtgtcctttattcttgtggcaaagcctttgtttttacccaacgtcacaattgcttttgaaccaggtgacttggattttaaaattatgcctcccaagccacgtacatcaaaaactcctcaggatcccagtgtcacctttgaggctgagttgatagaatccagggtgcgatctatctcaggttgcacgggcgagatgctgaagacttgtggaattgaacttgggaaattatgccaagttagatcagtacgagagggtgagttcagttacaatccccctgcatgttttgcaagcagtaacccagggaccagtggtgagagtagtaccagtggttcaattagtatgagtgcctggagccttgagcatatcagtgcaatagcatccttcctcttcggaactactttaaagactatataaaccacattggaatttccctattccagctaactcccatctcctacaggattcttggtagtttgaaagtgttgtacaaaattctaaattgggggtgtcccactcaagtagagatagagtatctttactcaatcaaggttgttccattgaggaagaacactgcaatgagctttttctatttcagtactcaccctggcgagcctaaaattattctagacttgccaaataaagtgtatttaaagaataacttcttctggacgtctggtctttcccccatcggcacaaccacatttatcaaacttcgtaagtgattgttctcttcttacttatttacatcagtcttcctttttcaagttttttgactaatgttttgattattctgacagctcttttgacgagacctactcctacccgcaagatggttagtaggcacaggcgcctgttaactcttccctatggtcttcggtcatgcaacatccttttgagcgaggctaacctacgattggtgggccttctcactgataaggaataatatatgtgattataaattcccaagtattcctcttggcaatagattattgttctgcccgaggatcaggcctaggatcgcttgggtcaagcacaataccttcaaagtactgcccctcaggaatctagtgaaggagcatcctgaggtaattaatgtggttggtctcctattgtacttagagctgagcgtagtacattagtcaccttcaaagattcccgccttaattttcatatttgaaattctcttctcgtggaccacattgctcataagtttgacagctggtatcctagattccacatccaagttaactgtcacgagtcattttatggtataaccgagcaatacggtactatggaagataagacaggtcacatagatgcgatctgggatttagaaccaaacgagcttttgatatattcaaaattataggctgtaggaaatttagtgaatattatggtccttctgcaccttcatctagtgatagctcaccttctagtgattttggtaaataccttaggcagaaaattatattcctcctctttttaatcggcctttttaatgattgtaatgcctcgccttgttttgcagacatgggttatgaagatacatcgaagggaagaaaagggcaaccaatcctgggctctctatagccggcgaggtggctccctcaagagacaaaggaaaaccacgacccataagaagaaatcactggccgaacctatcgatctcaaggtttcagacaacgagatccaagagcaagttcctcctctagtcgtttccgacgccaatgcttctcatcccgaggcaacccccactacagcttcttcgagccaggctattgagcccttgtcggttgcagtaggggaggttgggtcttaatttgcccaagcatatggagtcgcctgttggcgcaaacttcaaactcttcttccccctgattgggattttctcaatct

SEQ ID NO: 338554 - DNA, 1483 bp, Cannabis indica
atcaaggaaagattggtcaagaaagttagatgacgcactgtgggcctatagaacagcgttcaagacgccaatcgggatgtcaccatatcggttggtgtttggaaaggcttgtcatctaccagtggagttagaacacaaggcgtactgggcaatgaagactctgaacatggatttaaaggctgctggacagaaaagattactgcagttggatgagttggaggaatttcggaatgaggcttatgagaacgctaagatctacaaggaaagaactaaaaggtggcatgaccgaaacttagtcaggaaggagtttcaacctgggcaacaagttctacttttcaattcaaggctgaagttgtttcctggtaaattgaagtcaaggtggtcagggccatttacagtggtcaaagtgtttccttatggagcggtggaactgaaaggtgaaggccctaatactttcaaagttaacgggcagcggttaaagctctacttgggaggtcaatttgatcaagccaagtccgccatgattctggcgccactatgaagactcgatcaacgtctagctgtgcgacgataaaggcagcgctaattgggaggcaacccaagtgttctttatgatttagttgaactcttttatgttttagtgttattttctttttctgttctgtctagttttgtttaggaaactggtaaaacaatttttagttttcttgtcatttatgtagctaaaaaaaaaaattgggacttcgcccagtggccgcggccagatgaaatgtcgccgcagccatttaagagatacagaaaggcctaattatcgaggttatctggccgcggcgaggggaaatgccgccgcagccatttaagagatacagaaaggccagttttttcacggattttggccgcggcgaggctatatgtggcctcggcgagatgaggcatacgggattaaaaggaaaaattcccaaacattttaaacacactcccattcaaaatccctaaccttcacctccaaaaatacttcttctccaccatatttttttcatctaatcccattcaaatcccttttccttcaaatctaaccataaatcttcatcccaaatcatcctaaattattatttctctcatcaatcactcattcccactcaaaatcaaccccaaatccttaaaacctcacccaaaatttcaaaaacccctattcatcttcttctttctcaagaacttcaagttgtctccaatggaggatgattaaaggaggattctcattgaggtattaattctaagactctctgtacaatttttattgaaaaatttgtgaattgttggagaattttggatagtttgttgaatatttgggattttttgctctatacattgttcaatattgtctgtgtgagtaagattgggtttgattgtgagggaattaattcccaggcagtggatttttaaggggaagtgctgccgaaattttattaaaaaaaaaagaaag

SEQ ID NO: 338555 - DNA, 1085 bp, Cannabis indica
agatgaaggctgacttcaagagaagtcataaagagatgaagaatcttatcatggatcaaattgcaaccgtgataagtttgttacagaagcagccttcggagccgacacaaccatcggggtcgacacatcaatcatcgccaacacatccatcagacccggcagagccattacaaacgatacatccatcaccgccgagagaagatgatgatgatgtctatccaaaagattggcaacccaacgtagatgaggttccttctactcctgcaaacgccattgtgatttccttgggtgatacaaaatctcaggatatggaagagttgaaggggccaccggctggggtggacttctgcagggttaggcgaaagcggaagccggttttcttgaaggactacacagctgggaagaagaaacaacgacatgggcccgttgaagtagacactgtgaaaccggtggactcccggctgttaaaatttttctaggagtggatcacttacgctagggacaacgaccgtcctagggatgttcacactggcgtagccactcgatcctggttcgtgaaactgatggtgcacggagaatggctcgacgatgctgtaagtatttcttaacagaattaattttttgtgtttttaaatgtttgtgcgagtttaatgcgatttatatgcaaattagtgacatttatgcgattgatatgtgatttaatgcgacgtatatgcgaatatatgcgatttattcagttctgtgatttatgtattatttgtgcgacatatgtgcgattaatatgcgacatttgtgcgatttaatgaaacaattttttggtaattttcctgtgcgatttcatgcgataattgtgcgacttttatgagatttctgtctaactgttttcttttgaaacatagcaaattgatgtcatggcgcacttactgagaagaagacgaaacctctatccagaagtctacactcgaaaaggtgtagtgttggacacatctgctccagagatattcgccatgtactggaatttctatgaggatgacaagagcaagatgaaatgggatgaggccgttatgaattatgtggaggggata

SEQ ID NO: 338556 - DNA, 1273 bp, Cannabis indica
aaagcttgatactttatgctgtctagcatggtcgaaacctttgaaacaaggtttgtcaatactctcacgactgcagatatcatgaaccagttgactaaactatttgggatggtgtcagatcaaggtcggtttgaggcgaccaaaaattttatcaatggacggatgaaacctcatcagaacgtgcgtgatcacctgctccaaatggcaagttacttctagaaagctaagaataatggagatattatagatcaagaaactcaagtgagtttgatcttgaatagattgacttcaccttttctgtccttcacctcaaattatgtcatgaacaagttgacttttgacttccacaagttaatcaacaaccttcagacatttgagaatttgattggaggaaacaaagctcctagttctggcactgctaatggtacgaccaaggctgaggcaaacattgcctctacatcgaaacccagcaaatagaagaagtggaagaatagcaagaagcctcttaaagctgttaacacaactaataagagaaaagctgctaatcccaatgcaaagcaagaaggaaagtgcttctattgcaacgaaaagggtgactagaaaccccagtgtcctaagtttttggccaaaaaacaaggtatttctatctttgttataaactcatgtgttttagagaattattatccccttgggctattaattttaaatctactaaccatgtttattttcttcttatttcagatccagctggttaaacttggattgctatcctagaaagttggatggttggacaggagggtggagattgtccaagattgaagatgaagctcgaaatcttctttaatttttgatttaattgttttagtttatgagcaattcagtttcaattattagctgggattttattccctatttcatattattacagataattcattatgacatttttgagattattaataatattttctctttaagaaattttcattatgaattgcatttatgaattgagctttatgtttactttatcttgtgtataccaataccaattatattttatgtttatcacgtttgtatctgtttgtgttttattattggtacaaaatctatggtatgtaattctctgcaaagagatatatcacataaacacttcgaattcaaattcaatgtttatgaataattgttaattcttaagcaattattagatttttttttaataaaaagatcatttgatctgatagggtggatgaagttaagaaacaatatatgcagt

SEQ ID NO: 338557 - DNA, 1972 bp, Cannabis indica
tccactacaatgactatgaatccaaaacaacctctgctcatcaaatctttagctttcaaaagtgttattcttggtatgcgcgtcccctaaactatacccacaaacactgctaggttagcactatcgggctcaaacaccaccatcttccgcttacagtcgattgttgccccatacttagacaaaaaatccattcctaggattatatcaaaatcagacagttgcatctctattagattggcggttaattcacaatcgtcaatccagaaagacaaagaccaaatccaccaagtggatactataaggtctttcgaaggtaacagggcaccaaaccccaaagcatatatatcacatggtttaggaaaactttcaattactcttcgacacataggaatgagtagctcccgagtcaaacaatacaatatatgaacagtcattaatagattactgacctgtcaccactaacggactagcatctgttgtgataaatctaacacgcaagtatacgtatcgctttaacaagcaatactcaggtaagtgagatcgttcccatgaggactgtagctaagtaccaatcaattgaattattattttaaaataaaaaaaaaacaagaaagttaaagaaaacaataaaggtgtttaatcaaggatgagaaattagggaaacgaatcctgctatttcaattacccaattgttaatgctaattattattcctctttctttatgtgaatgacaaattatgaaaataaactaactctttttcagatcttttaggccctaaatcatatgttatatattgcatctctgagatagactaacatacaatccgcattaagcaataatctcaatgtcacataggctatgcaaatactctcgtttcacatcaaaatccagtttattcaattttagcattctcaatactcacttttcagattttgtattgagatcataaagcatgcctaaggtgatcaatctcaaacatgaaattaagcacaaacatgaataaatacacaatcaagaaagaaggaatagcaattaacattaactcatggcataaaatcaatcaacattcatcatctcccctaataggagtttagttcataaaatccataataacatccataatcaattctaaaacaaaaattaacatagaaatcaagagtttaagaaagaactagttggtgattgtgctttggatcgccacaatttcttcctttgcctccttctttcacttttgcgtccaattcctacctcccttcctcctaaaacacgagccccttaaatagaaattagggtttctaactctgaatggtgtccaaaactgcccaaaattctcgtattttgcccatagtcgcgactacatatagccttgtcgcgaccataggacaaatacaaaatcaagctctctgcctgctccatagtcgagaccatgaaaaagggtcgcgaccatggaaaatggtggtcgcgactacagaagcaaatttgatagcttcagcatctttcagtaaaatataaataactttcacatacgaactccaaatgagttaattcaagatgcgttggaaagaagaaatagaattctaaagcttctatgttttgacttattccaaaatatgatcagaagatagtcaaatttaggcttgaagtttcagctttattttctttcaaaatgttctctatacaatagattgttgtttttcgaaattcgatcaattgatatattccaagtgtgaaacctgaaaccaacaaaaacaagcgtaattccattccaaatataataacaaagaagaaaaacaactataaaaagtgacccaaaacgtaggctaaaaatagcctaacagcatctgcgtcagcctgagtcatggtaaaatgtcgtcccgagttctgagtagattctttttcggctcatctttctgtgcatgaggacaatctctgataaagtggcccaccatgccacactagaaacaagccttg

SEQ ID NO: 338558 - DNA, 802 bp, Cannabis indica
tttgacaagttttgctcaaagtttgttgcatttgtgatagtttaattatttagagatagtccaaattgcataaaccacaaaaaccacaccgcactattttttgcggtgcgatttttgcgggtttttaatttagcagtgcgggtgcggtttgggaaatttaaaaaacagcatgtgcgggttggtttgaaaaaatagtcaaagaccgcaccacccgcaccttgaacacccctagttttgagttagaaatgagatgtttgaaaaatcttccgtagaaaagggcagaccatttttacagaattggtctaccatttttactggcagtgacccaaaaaaatggtctgccatttttacaaaaaacggcttgctgttttttggggaatatttcaaagtctcatttttggtgatttctcaatatttagggcatttctatgttatttattgatagagaaactattagttttaattttaagtcccctatagtgtttagagaaacacttacgtagtttacgtaaatgtaacaaaaaaatttatggaaaaaataggtatttttatcccgagaatgaagccagtggattcgagatctctgcttccaataggtcttttccttaaacaagagagtatcaaggttagcctacaagaattttctatgttgcaaggcagtaggggtattattctcagagtttctggcctgttcaacttccatcggacagatttcattatcttattatttgagaaatggattatttgagtattgaattaaaaattaattatttttttgtttaccacatgccaatcttccacc

SEQ ID NO: 338559 - DNA, 747 bp, Cannabis indica
ttgttttagtgttgttttaccgttgttttgccatgattatttatttttctctgcttttgttcaacctcaccagaattaatgattatttttcaggtgtgttcgtgtttttatagtagttctgtgcgtgggtatagaagatggatgcattattcttgatattcggtgtctatagtataaaagaaaaaaaaaaggttcaggacagtataaaagtaattttcaccgtgtaatagtaaaattataaacatttatttaaaacccagtatttttgtaagtttcccatatttaatatattttaccccaatagtgggttttttttttttcagaaatcctagatggatcatgggtatgcccatgcttgtactttagcctataaataccactttattttcacataaaagggaggatcgaaaaaggtgatgggcgaagctctgtgaaaatctctccaagctttcttcttcttcaagagaaaccaagagaatacagttagggtttcctactgtaaatactattgtaatacactaaagaagccttcgaaggtcaatatactggctcgtggactagggatcattaatattcgaactacgtaaagctctctatctattttatttattgttttactatttcttaagcactaatttaattagcttccaaaaatattggtaaacagataatttttttataatataatttacttaggtagtttataaaaaaatatatatatcattttggctacaaaataatatttta

SEQ ID NO: 338560 - DNA, 744 bp, Cannabis indica
gttttgagatttttgctactgttattgctgttggtgtttaagttgtgtttctgaagttagattatgttcaaatatgttgaattggactggttttatgggttgttattaggtttgagcaagctttaagttttagaactcaagcttggctctttaatggtaatttttgattctgagcttgggtagttgttttagtttatgtctattggggtataatatgcaggtctggaaggtttggtaaagtttggaatcgatttggttaggttttggaattttttgggtttctagtataaactagctaaccggttttacaggacctgtaaaatcgattatccagatttgctactacgttccccaaaaaatttgtattgtcaattcgtgctagttttagatttttggttggctaactccctgctaatttagggtattgccatgttaagtttcagtagataggtttttggtttaaaacctaagtctccggttgtgatttagcatgtcacttatctatgttgttatcgatgtgatttaggagcctgtaattttcttccactcaggttggccggcacacctgaattcggaattgaggtaagattagtataacgtgatgcatatgttattacatgtttagcatacatactgtttatgcctgttagaatacattaatagcggtaataatatacgtagatttttattgattactgataaatgtatggtaggttgaaatactgatcgatgttgtcacatcaa

SEQ ID NO: 338561 - DNA, 545 bp, Cannabis indica
tcttgaaggttggaggctcctttttgctgtaactcgttccagaacggagtccccgtacggatccctgcttaaagaagggcaagctgttgtacgtcatcaactttcttggtctttgaggcttgttccttgaacctttttatgaaattcttcaatgtttctgtaggcagctgcttgatgttagtcaaggcgctaacctccagattaactttcctcgcggcgacaaactgtctccgaaagctggtttgcagcttattccagcattctatggatcctggctccagtttcttgaaccactctttcgcggacccgctcaatgttaacggaaagcataaacacttggcgtcattggtgactctcatgactgtcatgacttggttgaaccgtgacaggttatcgcttgggtccatgttcccggtataagttgccattttgggcatcttgaaatttttggggagctccgattccaggatgtgcctggcacatggctcccggtcttcacagtcagagttggagtcatcacctttttgtctccaggagactcgagc

SEQ ID NO: 338562 - DNA, 712 bp, Cannabis indica
cttattcttaagtcaatacaaataacgaggattaggcattaccgaactgcttggggctgaacctcataaaattcttgtgcctttatttgctttattatatttaactcgtataaactacttgtcgcttacaaattagactcattgtcgttggctaaaagcaaggtcaacattttggtgctttcattgagagttaaactcaaggatcgctcttcattccaaatctaatcacaagtacgattatggtacagacacgtaggggcgtggttgatccagcgaatccacaggccatggatcatgcactgcagattctaggaaacacaagggttctgccaatcgtaaatcctagacaaccatcgactgcgggtcacggtgtgacgactcctgtggatgaaatcacacctggcatgcaagagactgggaataccaattaagcagccaaccatggcattcataacacagtcgttccgcacactaccaatgttcaaacaaccattgcagatgacactgaaattcagaatctccgtgctgcccttggaatcttgcaaggtcatgccaacaccctgcatcatgatcaggaagaactccgttctgcggtgaacctcgcgtttgaagagcaaaggtgcatgttcactgaatggagggacaaggagatggaaacgctaagggctcagcaagcagtcattgaagatcgtagtcggcaagctactgtgct

SEQ ID NO: 338563 - DNA, 460 bp, Cannabis indica
ctcatttcgttcagatctctaacccttgttcctttctgtcatagagtaataacaagatctgagcctaaatctccttctcctttagtttggttaaccactgtcttccgctctatgattgagtacttgacttgctatgagtgggcatgttactctatcactaaaggcttgagttgatagaagaacattaagaggagttagaaatcactatgaaggagtctctcatctactaattatctgacagagttagaaaactaggtttagattggttgaagtaggttggatgagaatgagagcattatgttccttttatagtatttcaagtagggtttagaatttaattatatgtcttaaaaaagataaaacaataggcatgcataaatcaagctagtgcccagccatagatcgtgggtctcactagttataattttaccactttatttcaatcatttatcttttcttt

SEQ ID NO: 338564 - DNA, 467 bp, Cannabis indica
tttttcaaatcgttaaaatattttccgaattattgacattgttaaatttaacgactttgattaaattttattgatgggagtatgatgtgtatgaaagtttaagggcacgatttaatacatgtcaaagttttgcggggggggggggggggggggggagacatgatatgatagatatcaaaaatttaggagacacaatttggtagatggaaaaatcgcaacatgtcagtaagtccttgaattcaaaaaaactactgaaaaaattatcagccaaaaaaatagagaatccgcttgtatgcagttccaaaatgaacgatgagtccaaagtacaaacaattcaccattcaaattgctgagtcgatagaagattaagataaagttccactatgctttgctttatttttcataaggtatactgttgggttttatgccctaaataaaactctatttcaatgtaatctattttattc

SEQ ID NO: 338565 - DNA, 2831 bp, Cannabis indica
taaatagagtgaaataagtatcaaaagattaatacaacccttaaaataatgagttttagttataaggatattcagtctccattgttggttctacatagttcttggtttagtgagattcatcccaaataaatgttcgttcattagtaatttaacaccgtagactcttgaaagataagtattattataagtcttttattgatagtaacgaccaccccaatagtggctgcgaagagtagggcttacaaaatatgaaataatagtggaagctcaaaagatagaatggccttagctctcacctaaatgggataatgttggattcttatcttgatcgaataaaaggttgctagaatggtatccattttagatgagttgataactctattcaataaatgatatttttgactctcgccttaacgagacactttatcaatttcttgcaaactaacttgaaaattatttaagatgtgttttttttttttttgtattttcacatgtctttattacgtgctaaatgttcgataattgtgtatgaatttatattgaacctattttgttttctgttattaattgttgtagtttcaattttgaatatttattgttggtataacttagtttcttatttttaatgggacaaatcccaaaggattgtaatctgttagacaaacataaaagtgttatatctcaatagataagtatttgtaaatgtaacatctagttgtacatccaatgatgacaacttagactagtgtttacaatataaaataatgaagaatttataaaataagaataactttgactctcgcctaaacgggacatcgttagattcttattttaatcaaaattatcctttatgttttccttcttagctttttcattaagaaattacttagatattatatcattggataaatagtttataaatcatatgcttatgatgtaattcaattttcttcactgaaattgaatggtgtagatgattatattgcaaatattctatcccgaaatgatataaattctcgatcttaaaaaattttctacttgtgtacgcttactaaatgcaatctaaacttagagttagattagtagtgatggtccaagaaagaatgacaactcaagatatattcagtttctagaagaaattggacaatatagtataactttcacaagttgttagtatccattttctgtcaatggatcagaactgtatatttatatatggaatatgagttttgtattctatgataatgatccacttggactattctaagaacttcttattgtaactagacctaagtcatcaaaagaccacaaccacaataatctatttatggcatttgcatcttgttaataatggttttgacaagatcactctctgaaaaggaaaaatatgacaatatcctcttgaagtaagatcatttatattcaaaaatatggatgtacattcaggggtggatatgagttatcattaaattcttagacgatcactctagatttcactttatgcaaagaaatttaaaatgtttgagaaatttcatgaatttctagcaatggtgaaaaactattaaggtaagtggttaaagatcttgcgaactgatagggatggagaaatatttggttatgcagttcaaagactatttagttgaactttgaattgtatccaaacttacctccccagacattcagattgcatattaatgatagtataatgttaggattagttactagcagctgcctaagtcattctagggaataccctagtgataggaaaactttagaatgatgaaattgttgtatacttagagtaaaccattactagattcatggatgtcttgatcatgaactttagaaaagctagaactgttaactaaggtttgcatgtttgatagcttattctaaagtgattaggggtggaccatcctatggtcattaggataagaatatatttgtttcaacaaatactacttttctaagaatatgactaaatctaaaagtagaaaagtagaggagatattttcaattctaaagtgttctatcatcttattgtatataagatggtcccacggcctctgttgtattgacacaaccaatgagcacaataccattattgttcctagatagaaagttatggtaccttctcatagtagaagggttttaaggaactcgccctgttatgacttgggagacacttgtgattaaaaatctattgttagtttaaacaagtaatgaatagtcagaataaggaactgagaagtaaagccaagagaactatggttaaaaccattcatatggaataaccaaaagttttctattacaaggacaagaaaggaaattttttgaaaataagtctattcaatggacttagtaaaacttcccgatcctagtattataggtttgaaattatctaagcatgtgacttgtggtataccaggtaatttacttactctataagaagatgttgaaagcatttttctaattgctaactctatagtaagtcttttggctcctagacatagattttatttatctgaggaacagtttcaactgttccataaaagataaaagtcataaaaagaattccttaggatcgacagtgagaggtctcatgtatgctatgcattgcattagatcagacacctgttgttgagtgggagttttcagtcggtatcagattaatccaggaaaggaacattcgaagacaatctaatgaatcttaagatcaaaaagatgaactatatgttagttgataagggtggtattttaatactcttagattacaccaaatcatgcttctagacttgcattaatgctagaaagtctactaatgagatggt

SEQ ID NO: 338566 - DNA, 662 bp, Cannabis indica
gtcctggtctgagtttgggttcgggtctggatttcagtttaggtccagatcaggctctgggtgtgggttcgcgtcatgggtcttggtctaggttgggttcgagtcccaagttgcaatcccgatctgagtttggattcagttctgcgtcaaagtccttgattctgatcttgttctgggttcgagtttgggtccggttctagctttgggtctgattctaggtgtggatgtttgagtttgggtccgagtctttgtcagggtttgtatccaagtttggacaccgatctgggtccaggtccaagttcgattcccgagtgcgggtccaagtttgggtctgggtcacgatctcggtcaagatctaggtctagcattttgatccgagtctgggtcttggtccgagtccaggttcgtatctggatccctatctaggtccaagtcaatgtttgggatcgggtcccagatttaggtcaaggtccgggtctaagtttcggaggttacaagactgtgtccaggcacgagttccagtctcagttttggtgtgaggctaggtctgtgtttggttctaggtctgggtccggggcctgctcatggtcctagtcttgttctagggtcctggtttggcgattcttattcaggttccaattttgggtcccaggtctaggtct

SEQ ID NO: 338567 - DNA, 687 bp, Cannabis indica
tcagcttcacatcgagtctcgaacggtcacactcgacacgtgtccccatccagaggcagaaccagctcggatgaagtctatgcacaacctcagaagtctcgtacagacttggggggcaaatgttatcctaaattttgcactctaacgtggcatcacgagaatggtgacacgtggagtccacttggaacatctgctcgggaagataggccgagcaagatgcctcggtggcatgtccagagtaaggtattcagcgatccgtgcagagcaatcaacacttagcgaattcagctttcgcatcatgagtcatcagctcaatccctataactgagggatcaatttacgtggatacggcatacatacgatcccactatcagtgtattcagcctcaatcccacgatccttgaattcagcattgatcccatgatctttttgtttatacgcattgtaatgagagaggaaactcttcctcctcaagcttcctagcccaataaatagtgatgtatattcactaggcaggggatcagtcgaaaagtatctaagctaagactagactatttgtaaagcccgcttagttaatttggaaattagcagctgtttatgtttaatcatgaaattatttatagctatttaaataatctatggtactgttatttatggaattcagaaatgcatgattatgtcatcagt

SEQ ID NO: 338568 - DNA, 1061 bp, Cannabis indica
ttattgttcaaaatcatgaaaaaaaaagtgtatgatgttcttggtttgcatgtggggagaatcaatattaatcttgagaaatttgggtgtgaattgcttggttttgtaatggattatgttggttggattctagatgaacttttagggtaatttcatgtttaaattcaagtttttgtttgatgtgttgttgctggaaaataattttgatgcttgcttgaaagttgcttgaaggttcaagttcttgattaggaacttatgatgaattttgctctaggtttggagttttgatttcatgttgttgaatctgaatttctatgcatgtggactgaaattttaagcttaataatttgtggtttaacttccttttgtggttgtttaattgtataagaggttatgttggattgaagcatgtttgggttgaaatggatgagtttagggggctgaaattcattgtaaaatgctgatttttatgttgttggtttttggtgttgttggagagtgaattaggtgtaatttctctctaattacttggtttatgctaggtaaaagtttggtatgattgtgggttgatatagcatgaaaaattagtatttttggatgcattttcgtggctggaaactgggtttcctggggttttaaacccagtagccgcgaccaggttatggcagcatgttgtgtttttttcgggtttttgttttggtcataacttttgacttgggactccgtttgggatgttctttatatcgttggaaagctctttctgagctctatgtgaatatctggaatttaaatgccaatttaataatttgtggaaatgaattcaggggttaactatgtattctgggtttgtgactaggattaccgtcacttggtcaggagcaccgggggatttggaatctccatatttgcgggacatcagataagacagtagttagcacgtagagataaacgcaatggcacttatatagaatgtgatatatatgagaaactagaaattgggattagagttattactctaaagtgagcggtttatttgcttagggttattacccaagtaaatt

SEQ ID NO: 338569 - DNA, 819 bp, Cannabis indica
ctgctttttggcttgacgtacttgaacccagacgcttgattccttgagtaagttctcgatttcctttatgtttactttgcacattttcattctgaatgcactttcgattttgccgtataagatatgtaggaaaccctaagtttagaaactctgcgattttcctttgttacggttcatgcggtttcatcgtccataatgcttgctttttgaactgcataatgtttgtctttcatcttgcttattctaagcttcatgaaaatcttttgccctaactcgtaaaaattccaaacttcccgagttttgacctttcgttgagtattcttactctttaaattgttgagtactcctggtcggcatatttgcctgttttaacgttcgatatcctgaccaaacacttatcttgtgtgttgtcttttgtagatgaacccaggtgagttttggggaaacaaacaccaaatcgaccaagatctgcttcaactcttgcacgaggatcatcatcgtatttgttccagtccaacttcttcgagtgacaggcattcttccttaagtcttttgtctagcaataggatgatggctcgtaacaaaaaaacaatgcgtagggttgacggatcagaccctcaagtggcccggcacggcaccttacgcagcgccgaacaagatccaaccgttcaggaggaggaggatcaagaaggggacgttgaggtctaggagattgaggagcaggacgatgtccgtcctagcagtccctccgaggcgaaggaagaagaggaggttgcacctgggatacaatgacgtcggggagccaattgatgctgatgg

SEQ ID NO: 338570 - DNA, 504 bp, Cannabis indica
atgaaaacaattacaaagtcatcactacgaaaacggctttaggaacatcctcctttcgagtcttcaaatggtaataacccgatcgaagaccgaccctagagaaaagtaatccttccctaaattattcaacataacatctgtccttattaaaggacacttatgcttcacaaataaaactggtgtactccagaatgaaatacttagactaataatttcaaacccaacctttcctacaactgaatctttactcctttcaattctacaattaccatccaattcagaatttttagatacaggttttactcccattaccacttcaattcagaatcaatttcccgcttaaccaataaccctagtggctcctctaaaagcatctagaaaccttgagccacaagactgtatccccacttttactaatgttccctttatagtattggccacactaactaaaaaattaatacatccatcccataataatcccttcagccttaaacgccgggatca

SEQ ID NO: 338571 - DNA, 587 bp, Cannabis indica
ggggatagttgtaaagaccgcttactttaaatttagaaattagcagataattaagatttaattatgaaatttatttatttatgtttaattattaaattttgatgatttatttgaattcagaatgcatattatatgttatgtttaaaatttcataattttgcatgttcagtgcccagcaacattggaatgcggtgtatggctcagtagaatcacattctagtattttagtatagcggggcggtatattagacattggaaatgtcgaattaatcgggaatttagaatttcccaaaataccccttagtaccttttttatgtcattttaatgtgagagagcaaaaaggttcattttgcccatatgtgctttgtcttttatggatttgttaataaagctattaatctgatttttctcacttagtttggctcaaataaaataaggaaaatcatccatttactcattttatgaaaaattagaaagttagaaaaactaacttcattttcactctcaaattctctctctttcgaaaccctcaaaacccagctgggattgctgtgtttttctccttcttctttttgattccagtcag

SEQ ID NO: 338572 - DNA, 568 bp, Cannabis indica
acaaaaagtgtggaatacatgcccttcttcttttctcttgcgactgttgtcaatagctctgtttggattgcttatgctctaattcggttcgatcccataattatggtattcatcaaactcacttcttcactgtgttttacgaaagttattaattaattattctattttgttaaatgataattagactttctataattagaatataacgatatactgaacctaatttcggtcaaactttttttaagattggaattggattagtttcgggccacaattgataaggttagggttaagaagagaaagtttcaattacactagaatctctgttcaagaatacacttgagactaagcaaattatattctaattgagaggttatatcttaatagagttacactagaaaaaaaaattcaaaatataaaaaatatcaatgtaacaacaatgacatttaacaatcattaatattatagcataatagaattatttttgagtaaatataatatttatacatgtattagaatttggaataaaattactaattctacataaataattttataaaatatatgt

SEQ ID NO: 338573 - DNA, 548 bp, Cannabis indica
tgaaggatcaaacttgaagaagaaggaaattcgggctcagatcttgattatactctgctacagaaaggatacgagggttagagatctgagcggaaggagacattaattccactgcatcaatgtaaggttttcttaactttatatgtgtttaatttatcgttttagaaagttcatatttagggtgtttaaaaaagatacttgtgagtcgatcgaaggtcctggtaaagtaaattctaacagagatatgggtctctcagaatgtgtatcgactaccaggagttaaataagctaacagtcaagaataaatatccttttcctaagatcgatgatctttttcatcaactttaggggaagacggtattttcaaagattgatctccgatcgggctatgatcagttgacaatccgagaggaagacattccaaagacggctttccgtactaggtatggacattatgaatttcttgttatgtcgtttggactaaccaatgctcctgcggcatttatggatttgatgaatagagtattcaaggatttcctcgatatctg

SEQ ID NO: 338574 - DNA, 672 bp, Cannabis indica
ttgacacttaatattttgaaatccaaatttctctctccacggttgacggctgcacttgattattttttatttcccatattcatttttaaggagggaagcttaggcgtctgaggttcttttgagacggttacctcttttcgtgacttgcctataaataccaaacaacattggcacataaactcattttcatcacctttctttgctaagtaagcttcggagcgaaaagagagattcttgacttcaaagttgtcaaagtgctctcatacaaactgcttattggattgacgttgctcgcacccagacatctgatcttcgagtaagtctctggtttcctttatgcttatctttgcatgtttatatgtcaactgcatcctctactttgctgtagaaaaatgtttaggaaaccctaggcccagaaacctctgtgattcttctttatcatgtcttcgtgcattttttcagtcacaacatttgtgtctgaactgcgtaacgtttgtctttcatcttgcttattctaagcttcatgaacttttttgccctaactcgagaaaattttgacttcttgagttctgacttttcttcaaacataatcgttctttaatttgttgagtactcctagttggcatattttcttgtttatcgctcgatattccgaccgaacactcatcttgt

SEQ ID NO: 338575 - DNA, 673 bp, Cannabis indica
aataggaggagtagtccattcctcttatatcttctattatctttccacacattaataatgtggtactctctaacatctccttaagatggtgactatatatgctcactatcttagacaactcgatcataagtagctcttttttggctcactatctctgatcacaagtggctcttttgttctactttttggatcggtatttttggatttttagtggctctcttattttttcttggctctacttcgatcgagtttttttttaggttggatagttactagagattttttttgtttgtttatttttgctctgataccatgttagattttggggaataaggtgaatgtggttccatcttaaaaccaattggcaatgggaggagtagcacattcatcttatgtatcacaatttatttcaacacattagcaatgtgggactctctaacactataggccttagtgatcgatgcttagttagcaccgtaagggtgtgcataaattgatcaaatccaatcacaattgatcgattcaattacaactgaccatcaaatattagatatccaattataatcggattagattggatgctaataattttaaatatctaattagaccaaatcaaatgttggataggaagtctaaaaatttaatacatctaacatctattcgaattaattag

SEQ ID NO: 338576 - DNA, 453 bp, Cannabis indica
gtaaattttacaatcttctttgtaaaattttacaatcttctgttcgatatcctggccaaataatcatctcgtgcattatcttttgtagatgaaccctggtgtgttttggggagatgaacactatatcgaccaagatcttcttcagcttttatacgaggaccaacctcgtcttcgcgcaagtccgtcctcttcgagtgacagactttctaacttgagttttaaggattgggaggtgagtagtgaaagttcaactactctagaacccgaggtgaaccactatttttactccgaacagatcgtaggagaaggttacagacgatttgtttgggagcttaggaaggggaggagacgttatctcccatccaactggacctatatcgtccgacttggtgtcactgacactattcttgtaggccgtccaagttgtaacgccctaatgctaaggcacgctac

SEQ ID NO: 338577 - DNA, 721 bp, Cannabis indica
gcaaaagttccatctggtccaaacccgcgaaatccaccaagttctgtttcatacccactaggatggagccaaaaagcaaaagttccatctggtccaaatccgcgaaacccaccaagttctaattcaaactcactgggatggaaccaaaagataattgttccaactggtccagatcctttacacaatccgaaagttccaccaagtttcgattcaaacccactaggatggggccaaaaagcgaaagttccatctggtccaaatccgcgaggcccaccaagttctaattcaaactcactcgggtggaaccaaaaaataattgttccaactggtccagaccctttacacaacccgaaaagtccaccaaatttcgattcaaacccactaggatggggccaaaaagcgaaagttccatctggaccaaatccacgaaccccaccaagttttcatcttaattaactatttgtaatctttattattttttaattattatgaataaaaataaagaaataaagttcaattatatttatttattttgttttttttttcaaattattatttttttattcttttatgctcattagaatatatttatttttcattaatattagcccatgaaatgtatatgaggaacagtggtttgaagtctattttattttatttttcattatatctttatatattaaaagtgcctatctaacgacatttcttggtttaacagaat

SEQ ID NO: 338578 - DNA, 682 bp, Cannabis indica
atctcgcatcaaaatcataaacaataaattggtgggacaattaaaagtaattaagtactaatgaaatagaatgtataaaaaaattaagtgaaaattaaatcatattaaaaccacaaataaatatcaaacaatctccatctagactctaataaactatttaactacttatatttattgtagcgatttcacacatattaatttagaataaaagaagaaaatagagaagaaaagaatgcttaaaaatgtatagagaaagcttccaatattgatcttgctctccaaaatccgtactctttgattgcttctaatttccttctgaattactttctaattaagagtttctcataataataataatgtgtttatataggctatcaagattacctaaaagatactaagaagatttaaaatttaaaattaaactgttaaacaagataaaaatcgcaactcaatccttttttctcgctatctttttatctttttttttcagaaattttctgctacgacgactagtattttggccataactctctcgatattgcttagaattagacgattcaagatgttcccaaaagctaaaagagagacactacaagaaatttgacttttgccagcacatttttgtgctggcaaaagttgatattgcgttggtaaaatagaattcacctatgatgtgttagca

SEQ ID NO: 338579 - DNA, 623 bp, Cannabis indica
aaaatcccctcatttcaattcccccaaatctctctaaattccctctctctcctctctctcttcttttctcggtttcaagctcaccactgttcccccattcgaacctaaccctcattctcaccaccgcaccattcgaaccaccacatgtagtcgacccacacgaacccattcgaccccacacgaatagggacgacccacgagacctgaaccccacgagacccactccatcccagtcgacccacgagagccactcgatcccagtcgacccacgagacccatgagatccattctccgttcatcatcgtccccggcaccgtcgacgaaccaggtatgggcttcctttaatttttttttgcaatttatcctttaaattgtgaatctgtgatataactgaaatatgtagtttattaaagttttgaattgctagtttttgtgtttggggatgaatgtaggctagggggaattggtttttctggattttggtgttttgtgcgattttatgcgactttaatgcgatttaatattgaattcaagtttttgttagggattttgagcgatgttatgcgattttgtgcgatttttgttagcttagatagtttctgttatattatgcgatgtttatg

SEQ ID NO: 338580 - DNA, 1082 bp, Cannabis indica
aaattgtgccatgtgtacattgtatccacgtagatgcacacgtggacagtccgacatggcacttaacacttaaaatggacagaaatgttaaattgttaatagaacgcgagtattgagagttttaccgcccaaacttaagttttagtggttaagtgaaaccaaaataaaaaatttgggggttttgccgccatgtacccttttattatttatgttgttttgccataaatatacactaggaaatatacccacgctttatgcaatttttgtaataatgtaagtataatttttaattttatgttttataaatataatgtacattccttttttactataatattatatgttttttttttatataatgtaaaattcaaataaaatattttaggaatattgacagctaaatcacctgaactttaaattttttaacacttaactacaaaaatcggttttttggaggcaaaactacctaaaaccccattccgttttgctctatacccatccgtccaaaaatcacagttaagtgtcacagtggactacccacgtgtacacacttgtacacgtgaaaattttttagtggcccgcgtaatatttattttaaaaaataattataaatattttaaaaattaaaaaattataaaaaaaaaataattttaaaaatattttatttttagaatattagcggctaaaccacccgaactttaaattcttttacacttaactacaaaaattgattttttggggggcaaaactacctaaactctcatttcgtttttaacatttttccttcttcttttcttcttcttcttaactgaaaaaaccctagcacccagccacctaccccacgacccaaccttctccgactcccctctcacacactctctctcacggtgcacaatgtcggccttctctgaccaccccatgtcaaacgggccacagaactaaaccccacgatccaaaaaaatcccaaccctgacctgccctcttctttctctccttcaatctttctccaaacccctcatttttttttttcgttcagtccgacccacctccggcgaccaccacgaagagagagagagagagag

SEQ ID NO: 338581 - DNA, 790 bp, Cannabis indica
tatatgtaatactttaagttttcttttaaaaaagaaagttttaattaatcacatttttcattaatcttgttgattagcaacgagcaacacagtacgtttaaatcacgttaacatgcctaattagttagggtgttacataacgagacagtcacctcacaatactaaatcaaatgagggatgtgacgaggtgaacaaattggcaatacttagcattttttccttattaggatggacaaggagggtaactcatatcaagcgagacacaactttccaagttaataataaccatctaaaggataacaataaagagtagttgggtagttattagatattatcccacatgaataaatgaaacatgaggattgttcacgtttcatgaatagttatatttgaattaatcccaaaaagaataattgcgaacctatactcctgtaaataggggcaaattctatggaaaaaaggggacagaaaaattatgagagaaaatactattattcaaattctattgtattatgtactcaataaatatccctaataagaaggactcgtgaagtatgtagattttaactacaaaaccacataaaaaatatctagagtattaattatttattattgcttattaatttttgtaaagtatttattactgaaaggctaattaattttggtttaacaaaaatttgtgttaacagtttggtgctttcattgagagccttagtgataatacttagaaaaatccctccttaaaaatagaaatctatccatattcaatggctgataacaatcaaaatga

SEQ ID NO: 338582 - DNA, 797 bp, Cannabis indica
tttttttactgttgttttcaagtttttctacaatttcttcagcaaccggattcgcatagtcaactatgtccaatttgatgttctcaaattctcttatttctgactctcctccttcttctgattggtgtttgagtgtgtatgattctgttgttgctgtgttgttttcaagcattgctgtgttgtttgcaagcattgccatattttcttgatatggtgttgttgtggatgtgatatttgggattgcagcatgtgttgtgttgttgttctgttggttggcgcataatggatatgtgttgaaatctgtttcattgattcttttttttttttgagcaacgtttcattgatctttaattgcaagtaaaggaagaggctgacatcgttgaatatttttatcggtggtattcattttttcgctttgtattgcttttgcagtgttgttcttgtgttttcgcaccccaataaagtaagtagtatttgtaatagctcttcatacttgaaatcttttggtatgaattctcatatttgacataactatgttcttcttcccattgtccattgctctttatcagaattggtatagattccataacctgtcatttttcacaatatttcatttacttgaccttttttccaattaaaataccaataaaataacactgaaaacaaaaataaaaattattttgctggtgttctttttaattatttggctgattctcctaattaacaatgaatatatggttataaataaaaaaaactttagaacaaccttgaattttgtaatgtacattattaatcgt

SEQ ID NO: 338583 - DNA, 466 bp, Cannabis indica
ttgtaagaagactgaaccaaatagaaccaagttgtgttcaagggccataaaatgtgcatttgttggctatgccaacaatagtaaggcatataggctattggatgtggaatccaatgttttaactgaatctagagaagtagaatcttttgagaataagttgtatgaggacaactctcaaagttccacacctctaggtgagaatattttatatgaaaataattctcaaacttctacttctaaaagaggatctcaagaggagaacactactaaagttgtagaagaacccattgaacctaggataggtcaaagggtgaaaaaagagaaaagtctaaataaggatgaaatagattctcaactaatttctttctacgtggtagaagggactagagaagacgtaataaggaaacttcctttaatacttcttattgaggatgatcctagggcttttctagaagccatgcaatct

SEQ ID NO: 338584 - DNA, 542 bp, Cannabis indica
aaatttaaacctcaaaatagcaagcaattaattataatctattaaaaaataaatattattaatttaaaattgatatttaagtttaaatattttaaaaaataatattttattttgatttttggggtttgaaattgggaaaaattcgaaaaaattgaaaaaatcccaaaaagatcgggttaggggtgttaatgcctaggagaggttagcagggtgggatgtgcgactaacacgggcacttgcagtatctggacacgggatttgtagcctccaggcgtgcgtgtcccctgtctgaaggagtgctgtccaagcacgtgcgtgcgctgggtctccttgtccgagtgcctggtgcgatgcaccaactcgacccattcaacccgaaacttcaaaaagtcataacttttccaatttttattggaatcgagttccgtaaaaaccaaaattacttaatttttaacaaggaatccaaatgaaatattttcagaacgaaaataaaatattttgatggaaaaatttcataattacatacattcatcaaataatca

SEQ ID NO: 338585 - DNA, 1036 bp, Cannabis indica
tctaaaagtgatacaccagcaaagcaatagtcataactatcacttgcttcctaaaagtagtctatctggctcgggatatgcttcttagaagtggtagcagtttcgttcccctagcattccaccccaactaactattgcactcttccaaaactctcaaactgttacaacactcaaacatatgctatcctagcaaacattgaattgatataatcaatctctagtttgcattctgtttaagatagcaagccacaacttaaatcaatatttaggaacattaaattgatcacatacctgtctactccaatttacttcttcaagacttgtacttatagcaaaatataccactttcagatagagtattaacttgacataacattggctctgatattacttgtttgattttccctataattttcacaacttgcctccaataccaactgctactctctttggattcatactcctaccaattttgattctttaaatagatactgtggaatagtttctctaaataaaaagggtctcctaaaattatttttggaaagttatctatctttcagaagtatgttcccaaacaactaacctgttaattcggaagaagtcttgtgaaatgacggttgccatctgaaagggagttcctagatgactatcttgtccactccggatgtagtcctcagaaaaactagtcttcctccggaaatgagttttagattgctagttgttcctcctggaagagagtctcgaatagttaactctacgtggctcttctttatctgggaagttccttcagcgagtgccttggtctgtgattctggaagccctcttacacgtgcctggatgcactcatacttatgctaacgtggagacctcgctcaaatgggagttagttaagctggttattacttaactaacttaacaacctcgcttctttcagcaaccgattttaagatcttgatcctaagcctttaattaccaccaacactaattatttcatacacaaagatcagattgagtttcgaaatatatatatatatat

SEQ ID NO: 338586 - DNA, 588 bp, Cannabis indica
gtttcactttgaagttatttaactatttcgtttattttttttgttacactaaaaaactaagtattccaagatttttgttacaataaattttttttaatattcttatattttaattaaaataatataaaaaagttttcaaattttgatatttgtagttagtttatttttaaatttgattttaaattaaactagaatattttatgtcaatttaaaatttattaataacaaaatataattattaaattattcattggaatggactaaaaatcaatcagacgccactctaataattattttacatgccattctaatagtgggtattctgttaaatctatctccattgcttgtgatatataagatatactactctattgatcatatcaatattgattaaatctacttccaatagtaagttttttaattttattgctcatctcctcttttaattaggaaacaaattcggaaagaaaattaaattggaagaccatgcttggaaaatatctaaatctcagaggaatatataaaagggactcttaatagtttctaatgaaataatgttatacatgtttatgattaaatcttttcagt

SEQ ID NO: 338587 - DNA, 751 bp, Cannabis indica
ttctttcttagtttatttaattaatttttctattttcatatgaattttcatttgtggatttccatgtttatgattcaacatgaattttttggattttcatatgaatatgaatatattgagattaatatactatttaatattaataacaatgtgcatatcataactttatatacataattatggttcacttacaccaagtttacttttataaaacaaatcgttcaaataataatataaaattagttaccaaaatctaaaaaaaatattaaaacttaaataaaattaacatttatgtggcttgccacgtaacataacgttttcttctgttggattacgcgaaatagtgactaacatccaaatttcaaatttgacgaaaaatctgcaactgaatgaggtaaaaactatactacaatactttataaaacttttgtgtgacaagtttatacaatcgcaaggaaaaaaccacatgtgacaagccaacatgcagacaggaaggattttctacaccacggtatattacaaaacatatgatgttattgaaattaagttaaaattaaaaatatactaacaatcttattatgcattttacagtgctatagcatatgttgaacttgatgacaatacaaagagcctacctggtgtcgtcgcagatattgtgggaaaaaatattttcgtgtattgttgcccaactaatagaatatactgctgcccaacactgccactttgtcgacactaccatattcaatttaat

SEQ ID NO: 338588 - DNA, 495 bp, Cannabis indica
aaagcctatgagagttcatctctggtaatatctctccctctcaagctgtcaattctaaattttattaccatgataatcagcgtgattggaatatttatgctacccgtaagtttgaaagtgagaggaattatgatttgcatgctcatagggtgtatggtattgttaagtttgttcaataccatcaatgggaaaacaccctcactagttttgaagggtatatcgaaagtattgtcaaagaattctatgccaatttcactaatgatttgcttgatgagaactctgaatgtttttggtgaagtctatgttcgagggcattggttttcacttactgttaaggacatttcaatggctttgcaattacccgaaggtgtgtccaatgttatcatgtctattgatcgccatttgatgctcactaaactccctggtacacgagttgaatggaaatatgggcaaagtcttcgaattacacatctcacatatgctcatgcatccctc

SEQ ID NO: 338589 - DNA, 546 bp, Cannabis indica
gaaattgcttgacattgctctttcagattaatctctgtagtactaagaaaattaccttgattttggttggccatttgagtagtcagtcaactgccctatctgaatttctaagaccttaatggaagatttaatctctatcatgaactgaagtaacatatctatctggagattagaccccctattagagctttgttgttattgattttgttgtgactgatttctctgttggtagaacccttatcgctactgatttggaaactgcccttgaaaattttgttgatgtatgacccccttggttgtaaccataattattgttttgatagttcccaatggcttgggcttgctccattggaaaactgtttacatctaccaggaaagtatcataagtatgaggtcctccacatagctcaccaatcacttgagcttactttgcttgagcagtcactaacttagtcaaggactccacctaagttgtcaactttcttatggcatcaacttcatgaatacccgtaacttttttagattggcttctttctgttgaccatt

SEQ ID NO: 338590 - DNA, 536 bp, Cannabis indica
acgaatttctccattgatcagtatgttgagttatatgtcggagaaatagtttgtcttcacggtgctttaaagtccatagtgtctgatagagatccaaagttcacatcgagattctaggagattttgtaacaagctatgggtacgcaattgaagtttagcatagagttccatcctcagacaggtggacaatctgaaagaacaattcaaatattagaagacatgctacgaacatgtgtgttggattttgagggatcttgggtaaagtaccttcccttggtcaagttttcctataataacatttatcagtcagctattcgggccctttatgaactgctctgtggcaaaaagtgtagatcacatattcactgagatgagttaggtgagccaaagtttctgggtcccgaagctgttcaaaagcaagtgaggcaattaataagattagggcttgatgcttattgctcagagtaaaaaaaaagagttatgctaatccgaaagtgattggatattgacttttaggttggagatatggtatttct

SEQ ID NO: 338591 - DNA, 737 bp, Cannabis indica
taaatgaattatatgcttcattgatttgttgcctagattagtctatctatataaaactcaatgttttatctaagttaaataaattgcatgcttcgtggatttactacttaggtaaaagagttagttattgagcgcttcgccttgattacatacaatatagagattcaaataattgactgcttcagctttatctgcgggattaatagtttgattgaaaactgaaaattacattctttagtaggaattaggaatgattgttgagggtggcgaataacttttaattagtttctcgtattatagtctctctttaaatttgttttacttttatttttatttttattattgccattttattataatcatcaaaactccccttttctaacttttgacactaatttctaaataattaaataaacatagtcctcgcgggattgacccttacttacaattatactaaaataattggaggtattggaaataaatattagtaaatttgttgtggcttacgacacgcatcatgtggacagcaagtcaaaccacgaattgggcttgaacagcccacgaaaatagagggaaaatattaacaacttttctatttttgaggggcgatttagtcatttatattttattaattaggaaatatttgcacccccaaaaattataaccacaccccattactaaattgacccaattaaatattgttttttataaccccaccccaccctatttaccaaaag

SEQ ID NO: 338592 - DNA, 648 bp, Cannabis indica
gtttctaggctttattgtcaacgcccgaggaatcgaagccaatccagagaagattcaagccctcctggatatgaaatcgccaacaagaatgaaggacttaactggtcggatcgccgcactcaacagatttgtttcaaaatcaatagacaagtgtgttccattcttcagcatcctgcgatgaaataagcaatttgagtggacggaggaatgtgaaaaagcttttcaagagctaaaaacgcaactcgcaaaacctccagtactctcgaaacttgtatacggagaagaacttaagatatacttagctataacggaccatgccgtgagtgttatactgatcagagaggaaaacaacatacaacatctagtctattacgttagtaaaatactcattgaggccgaaggccgatacccattgatggagaaactcacctactgcttgattcaatcaataagaaagttaaggccctattttcaatctcatcctatttgggtgtacactgaccaaccgttacaccagaaattgcaaaagtcggatgcctctggacggttactcaagtgtgcagtagaactgggtaagtatgaaattactttccgtccccgaacagcaatcaaaggccaggccttagcagactttatggtagaatgcac

SEQ ID NO: 338593 - DNA, 780 bp, Cannabis indica
aatacatgttttatttggttttgagctgctggaaaaatgttgataatatgttggtttgaagctcaagtttagagcttgaagttatggagtttgagcatgattttgagttgatttttacaatctgaaattgagggtttattgttggaattgatgcatgagataggtttatttgagcatctattaattggtagcaaccctatttgttaatttgaaagtttggtggtgaaatgggatgatttggtgatgaattgaggctgaaaattcgagtttttgctgctagttttctgggtttggaacccaggtgtcgcggcatggtttgagcatgctgcggtccgcccctgttggtggaaccagggattttgtcccaggtgccgcggcatagcttgggcatgccgcggcccgccctcgattttctgggcagtttgggtgcaaactttgaaattccataacttttgattctgaactccgatttgggagttctctatattgttggaaagcttttccgagctctgtatgattatctaaattttaaatgccatgaatatattttgtgagtatggaattaggggttaaccctacttgtgaaatctcgggttgtgtgactaggatttctggcacctgatcaggagcacccagggattcagaatctcttttattgtaggacaataagtaagacagtagttagcacgtagaatatgcacagtggcgcttatattggaaatgatatgtatgatcatttagtaaccgagattagcgttattaccctaataggaacggtct

SEQ ID NO: 338594 - DNA, 677 bp, Cannabis indica
gtaatgggttttatttagggcacaaacccaacagtcactgtaataagttgagtgctgatcttatagaacttgaattaccatagtttgacattatacttggaatggattttctagaaagagggtttggaatcctaatgcgtagcggagagttagttatctccaataggcgcattaggtctatgccagttaggattgaagataaagagttgagtgctaatgaactggaattaacggagtttgacattatacttggaatggattttctgtccaagtattcggccaatatacactgcaagagaaaaatggtgacttttcagctagaaggtgaagatctatttgtttatgttagatcggttcaggggtatcggatcccagttattttagtattaaaagatagggatctactacacagtggatgtgtaggattttaatagttgtgattgactccagcagacctgaaacatttgggcctgcggtagtcagggttgttagagattttcttaacgtatttaccgaggagttgccgcgattaccacctcaacgagaaattgactttgtgattgatttggcacctggaggcaaacctgtatctaaagctccgtataggatggctccagtagaactcaaggagcttaagttacagcttcaggggaagcttgatattgggtttacctgac

SEQ ID NO: 338595 - DNA, 929 bp, Cannabis indica
aaaggccaggccttagcagactttatggtagaatgcacatgcgaggccgaatatgaagctatagatcaattgttcggcacaggaatcgacttggtaacgacatggggggcaacacttgcacgctacagtcaagtttggatttaaagcatccaacaacgaggccgaatatgaagctatcatcgctggactaaaactagcccgggagatgaaggccgaacatattgaaatctacagtgattcacaggtggtagtaaatcacgtatttggagaatacgagctcggggagaaaagatgatagcatatttgagcaaaatacacgatttgctcgcacagttcaaaagctacgctctcagacaaattccaagggaagaaaacacgactgttgacgcattagctcgtcttgcgagtagtaatgtaagtgatagagcgaatttggttcctatccagttcctcgaagaacctagcatcactggcacggaagagattgaaatgattgatactttcccaaactggatgacgccaatagaaccctaccccaacattggggaactcccagataatcgatatgaaaatcgaaagatgagacggaaggctgcacggtacatcatagtagagggaattatgtatagacgaggattctccatgccattgtttagatgtgttacccaagaagaagctacacgaattttgtctgaagtgcacgatggattttgtggaaaccacaccgccgggcaaagtttatctaagaaaattctaaggtaaggttatttctggccgaaaatgatcgaagattcgaaggtctacgttaaaaaatgtgataaataacagagattttaaaagatacctcgagctccgcccaacgagttaactcagatgcaaagtccttggccttttcccatttgggaaattgacctgatcgtagacccgta

SEQ ID NO: 338596 - DNA, 1251 bp, Cannabis indica
aatttcatccaagccaaaagaaaaagaaaaaaaaaaccgtaccagggaaccaagccctatacggtaccctttcgaagaaaaccaggggaagaaccccacttccatcctcatgagaaagaaaaaggtgcaggatctgcgaaaggtccgctcagatttcccgaaagggaaaggcccgcagaggggtaagctcccaaaagcgagtcttggccctcaggatcaagacgaccgaaagagcgtatctgtgcaccaagagcctcggaagagaggaaggagaaaccggaggtaccctccagttgatttaagataaaaaaatcaacgaaaaacacgatgatctacgagatcacctagacaagaagaaacatgtagcagcggtctctgcgggaacactaaatgaaggaattttggcagagttagcaacactatgcaaagacattgctcggatctcttggaggcaaaaaggggacgactcaaattccgattgcgaggatcaagagccatgcgcccagaacatattggaggcagagctcctcaagaattttaagatgcccgagatggtagcgtatactggagactcggaccccagcgatcatttatccagtttcaaccgggtaatgatagttatgagggtcagcaacgatgccaaatgtctatgctttccgctaacattaagcggttccgctgaggaatggttcaaaaagttggaaccaggatcagtggactgctagaacaagttgcaagtcagcttctggagacaatttgtcgcagcgagaaagattaatctcgaagtcaccgcattgactaacataaagcaacaacccgcagaaaccttgaagaactttataaaaaggttcaaagaggaggcttcaaagaccaagaaagtagatgacggacaacagcttgcacttcttgaagctgggatccgtatggggaccccattttggaacgaagtgcaacaggttggagtggctaatctccaagatttccagaagagggtccaataatacaacaacttggaagaggcccagataatggcctacgggggatactatccaaccggagtatgaggatatgtactcagagctcagctctcgggagccatacccccgaccactcctcaaatgagcggcatgcaattctccgctacaccaggatataatcagagcctagccttggctcccgcatcatcgcattttgggaatctctttagcaaccccaccgggatgagtggacaagctgttgggttttatgccc

SEQ ID NO: 338597 - DNA, 521 bp, Cannabis indica
accattgatattgacttagaaagatataacggtaagtttataatatcttatcgaagatccatatcggttccttctaatgcatactccatacatctgatactagtgaactttgccagtaccctagaaatgacatagcacttatccaaggtctaagtataccttatcgccaattatcatgtcagtctaaatccaatgaactgacaaatcattggaattaaacttttgaacaaataatcatgattatattctattgtgctgacaacactatgatgaataaatatatatagttacatatgttctggacttaatagaatttatacattaattataatcatgaaataaattatgtgaactatgcaaaataaaagtaatttatgatcttatattaattagtaaatctgattatattaaaatatgttttatttagggcacaaaatccaacataatcttctaactcttatcattaattgttgaataattgaataaacatagtcctcgtgggtttgacccgtacttacttt

SEQ ID NO: 338598 - DNA, 587 bp, Cannabis indica
atggtttgatcagcactaaccttaataactatttgcacaacatatatattatagcacatttttttagcaattctatcatgttttgcacaacttttaataactatttggactcgatcgcagttggggcattcggggcatcccaacacggcgtcttggtttcctgctccgcttgaaactcaggtcccaacccttccactgccaacaacatcgctccttggatactgaccgtcggtgcttccaccatcgacagagagttcccaggcaatgttgttttgggtgacggtagaatattaatcggcgtctctctgtacgcaagagagcctttggctgcctttgggtaacgcaagagtggaaattattttttaatgagccttgcttagatattctgcagatatatgtaaattttttttttttaaaaaaaagaatgtatacataatataaatttagtatacgtggtcgtgcttagatttagtgctgttaagctcgcaggtggtcttgctttggtgttagctaatacagatgacagtggcgaagagctcatagctgattcttatcttataccaccgacctgttgggttttatgccct

SEQ ID NO: 338599 - DNA, 551 bp, Cannabis indica
aaaccaggttgagaattaggggcattaaagacacggagaaacacttgggcaacccatttctctttggtcgaagtaagaggaaggacttcaactttctcaaaactaagctttgtgaaagactttgaaggatggaaatttagatctttctcaaaggttggtagaattgtgtatatcaattcagtggtcttggccatgcagacttactctatgtctacctttaaactctgatctcttgtcgtgaacttgatgcgtggttagaaggttttgcggccaaatcgtggaattctttgtgccaaccaaaaatgatggggggcttaggtttcaggcgttttgaagacattcactacaagaaaaccagcttttgccggcgcattgttgcgccggcaaaagtaccctaactgcgcctgcaaagctttgccggcacagttgtgcgccggcaaagattatctgggaagcttggtcggtaaaggactttttaccggcgcgtatagtaactgcgccggtaaaacttccttttactggcgagaaataacgccggtgaaaaataagcg

SEQ ID NO: 338600 - DNA, 644 bp, Cannabis indica
aaaaaataaatataattacattagctaaattgaaaaataaagtgttcacaaacttgcatctcatcataaatagttgagttgattcccactacattgatgccatgttttactaaaagtgtaggggccataactttgcgttagacccctcgacctatagatgactttgttacatcttttcaattccagaggcaattgattcacttgcattgtaaagtgaatctcactgtgaagcgagatattttggagacacctgctttattagtggtatcgttttagatgtaccccattccagtacctttgtacatgcactggattcaagtggcagtcatagctaaccaacttgtatttcccgagttttagtgcatcaatgatgacatatggcatagccttgcggagttcagagttctgtttgttttcttcaatttcatctatagactcaggcagtagttgatgatttatgtgttgatcataactgagtcttcgttgcgacagtgaggagagctttacaggtatcattactttgtacctgtaagttaaagcaaaaggagtatgaatggctgctattttttcgtaatgcggtatgactatggtgcttctttggtgtatctttaagagtttggttaatgacttcaacttgccaactt

SEQ ID NO: 338601 - DNA, 620 bp, Cannabis indica
gtagtcttgaaggggaagcgatggttccggacatgagatgagtctggctctaagcttcgaaacatccgtagttgtgattgggcgactcttcgtctcgaggcaaacggtgaaaaaccccagaagcggacggcttgatgccagtcacggtcacaattttttccaactggtgggcacaggtcagggtttagcgaagctcatctgcctcccaaccattggatcggcaagtgtagttctcctgggtgacaggacccttcatcacttcctctagggtggccagagtaactgcccccttgcgggaagatttggttccggatgtaggagtagacatttggttctgtaaaaggaaaaaattaagcagttagcccccaaaccaaaccctagtattaaaagagggaatgggggtcccttaagcgctggaaagaggccacctccgaatgtttgccaaagatggaaattcaaaggattttcctaggaaaacatctggtgcaaatatctcaaaagcagtgaaagcagagggaaagtaaaaaacacagaacgtgggaagggctagtggttgaaataaccctgtcggcctttgatgttcagctttaatttttgggcaggttaagcacttggacacg

SEQ ID NO: 338602 - DNA, 1237 bp, Cannabis indica
tcaggtatacaacaagccataggtttaaatgttctcatcaaaaccatgatactaagagtaggaagttagcttaagtccattgaatgcacttagcaaagtttcatttcttatccttgtattcgaaagacttatagttgatccatattttcttggcttcgagtcttagttccttactaggactatccattgcttttttaaactaacaatagattatcatcactagtgtcatccaagtcaaaacaaggcaggttcctaaaaatcctcccactacgaagaggtactgtgactttctgtctaggaacattagtggtattatcctcttcagttatcacgactcgcgacgatatagcagaggccgtgggattatcttcagaaattacagaagatgatggaacacttatgggttcaaatcaaatagtatctcatctactttgttactttatttccggatatagtcatgttcttagaaaagtagtatttatagaaacaaacacttccttattttaacaacaataaatagctcaccctaatcacttcagaatagccaataaacatgcaaaacttaattagcaattatagcttttcttaagttcatgattgtaggatccaaggttgtcttatgatcagacttagatgggaggacatttagaatgtcgttttctatctctaaggtatatttattgaaggactctgacaactgctagtaactaatcatagaccttaccatttttatcactatgtgattctaaagttctgaggaggtaagtttggatacaatttgaagtttaacttaataatatttgaattgcataatcaaatatttctccaccctatcagtttgcaagatgttaacgacttacctaactagttttcaccatttttagaaattcatgaaatttctcacatttcacatttcttgtataaagtaaatatcgagagtaattatctaagaatttggcgatatatgttgggttttgtgccctaaataaaacccatttcaatataatcagatttactgattaataaagatcagaaatcacattttatgttgcatggttcacatgatttatttcatgattatattataaattctattaagtccagaacatatgtatttgttcatgattatagtgttgtcagcacagtggaatataatcatgattatatgttcaaagagtttaattccctaatttgtcagttcactcgatttagattggcatgataaacagcgataggt

SEQ ID NO: 338603 - DNA, 652 bp, Cannabis indica
ccatagaagaagggtggtggaaagcaacaatgaaggagaatgaaatcgttatccccaaacccatgagccaatggaccacagtcgaaatggaaagagctaacttcaacttaaaggccctacatgctatgtttaatgctgtctccacgaactagttaaaggtcattgccaactgtgaaattgcaaaggaaggatgggagaagctaaaaattaaaaacgagggcacaaatgctgtcaagaaatcaagattgcgtgccttggccaaggcctttgaaaatctgaccgtggaggaagatgagtccgtagcagaatttcatgcaaagttgtgtgatatctccaatgaatcctatgctctggagaaaacctactcaaattaaaaattggttcgaaaagttcttggtgttctcccccgaagattcatgtccaaagttacctcatttgaagaaatgagaaacattgaggaacttgatcttgatgagctcattgggtccttgcaaaattatgagctgtcactgtccaggtggaggaaaaccaagaaacagaaggatgtagtgaaggaaaaatctgatgcgagtattgcacttattcatccagaaaacaagaaaccgatcctagaggaattgaatggcattactgacgaaactgttgccttgtt

SEQ ID NO: 338604 - DNA, 1326 bp, Cannabis indica
cccacttcaatccctgggagaaagaagaaggtgcaggatccgcagaaagtccgctcagatttcctgaaagggaaaggtccgcagaggggcaagctccctcgaacgagtcttggccctcaggattgacaggatcgaaaaagcgtatccgtgcaccaggagcccgaagactgaggaaggaaaaatcggagataccctcaatttgaccaaagacaaaaaatcaacaaaaaacacggtgatctacgagatcacctagacaaaaagaaacatgcaccagcagtctccgcgataatactaaatgaaagaattctggctgagttggcaacactgcggaaagacattgctcgggtctcccgaaggcaaaagggggacgacttcgattccgactgcgaggaccgggagccatgcgcccgtcacatattggaggcagagctccccaagaatttcaagatgccccagatggcagcatataccggagacttagaccctagtgatcatttatcctatttcaaccgggtgatgacaatcattagtgtcaacaatgatgccaagtgtctatgctttccactaacattaagtggttccgctgaggaatggttcaagaagttggaaccaagatcagtggactgctggaacaaactacaagtcagctttcggagatagtttgtcgcagcgagaaagattaatctcgaagtcagcgccctgactaacataaagtaattgcctgcggaaaccttaaagaacttcataaaaagattcaaagaggaagcttcaaagaccaagaaggtggatgacgaacaacagcttgcccttcttcaagctgggatctgtacggggaccccattctagaacgaattacaacaggagggagcagccaatctccacgatttccaaaagaggttccaaaagtacatcaatttggaagaagcccagatagtggcctacgggggatactatccaaccagagtgtcaggatatgtacccggagctcagctctagagagccatgcccccaaccactcctcaaatgaacgacatacaattctccgctacaccaggatataatcagaggctagccttggctcccgcatcatcacactttgggaatcccataaacaaccccttagggatgagtgctcaagctccatctcagtctgctcctactgcaagcctgattggacctcctcagagctcccggagcaagcagtcctcaaagggtagcaaccggacagaggataagtaccaacggagcggatacacccctcagtatactcaatacacggagctcacagacacacatgagcgggtatactttgccacaaggaaaaat

SEQ ID NO: 338605 - DNA, 560 bp, Cannabis indica
tcttgagtgacacatctgagcaatggcatcgagaatcctcttctttacatgactccctccactataatataccgtgttgccttccttctcattttctgagcttcattttgatatctgggatttccccaaagttgaggtaggctgctattgacgtcatatttcttccgtgtcagtgatgctaggcttttcgaggaactggataggaaccaagttcgccttgtcacttacattgctacttgccaatcgagctaacgcgtctggagttgtattttcttctcttggaatttttctgagactgtagcttttgaattgtgcgagtagatcgtgtattttgctcagatatgctatcatcttttctccctgagcctcgtattctctggatacatgatttaccaccagttgtgaattattgcagatttcaatgtgttcagccttcatctctgagctagcattagcctagcgattagagcttcgtactcgactgcattgttagatgccttgaatccaaacttgactgcagcgttcaggtgttgccccccaggcgtgacgagggcaatccc

SEQ ID NO: 338606 - DNA, 515 bp, Cannabis indica
acataaacaatcattgaaatagtaaaattgaataaaattagacaaaagtctctaaatccaacaatctcaatagttcagggggcattttcaatggccttaaaagttcagggggcatgatttggtacatgtcaaagttcagggggtaaaaatcctaattagtcaataaattatatacttcactaatttgccgcctatattaatctatcttcataaatcttaaagctttatctaagttaaataaattacatgcttcgtgaatttactacataggcaaaacagttaattatttagcgcttcgccttgattacatgtaatagatagattgagataattgattgcttcagctttatttacgagattaaaagtttgattgggaattgaaattacattcattaatagaaattaagaacgattattgagtgtgacgaataatctttaactagtttctcatatcgtaatctcacttttaatttgtttttattttatttatgctattttcttctaaacataaaaac

SEQ ID NO: 338607 - DNA, 593 bp, Cannabis indica
cgtgcccaccctgccaacagcctcctctgcccgcaaatctcaaaatttgcagccttccaagtgcgcgcctgcatgatccgtgcatgaaaattgcatggttatgattttcatcgaaattttgctaaaaacttacttttttttaattatttcaaatgccaaattcccagaaattagcataaatattgtatttttaatatttgaacctaaatattaatttaaaattaataatatttaattttgaatgatttttaattttgttcccaaaaattttaacaatacttattctgcctcctaaaatatatgacttgttaaaaaattttcctaaactttaacatttataaaaatttagtccttcggtaaggtatcatcccattattttgtttaaatgctgacgtgtctttataaaagaaactttgcaccctaaactttgaaaactatcaaattgtgttccctaaaaataaaaatgagaaagattcaacatttttttagtaaatcttaagaaattaatttagatcttaagaaaaattattttaaataattaagaaaattaaagttttaaaactaattaagcgatttaaaaaatatttattttt

SEQ ID NO: 338608 - DNA, 867 bp, Cannabis indica
agcttatgttttgttgatgatcttataatgttatgttttaaaccgtgccctatactataggccacggtatagggcacggtttaaaaccatcgccttgttataggcgacagttttaaaccgtcgagaagtctacattagcgacggtttttaatcgtcgcctattttgccaattttacgacggtcgtataggcgatgattatagaaaccgacgggaatactttaaacgaatgtttaaaaatattgagaaaaatcatttttgtagtagtgtctctacaacaaattctttagtaaagtcaggaagtttgagaacatgagtctcagtcatagactttttgagtttttcaaacgccgtggctttagcaagtgaccattgaaaattatcctttttcaacagctccgtcaaaggggcagcaatggtagcataatgttgcataaaacggcgataataccctgttaaactaaggaaaccatgtagttgtttcatagattgtggttgcggccattgagtcatggctgtaatattcgaaggatcggcttgaaccccatgagaagataccaaatgtcccaaatactcaaccgtgtgctgaaaaaactgcacttacttgcctttgcaaagaatttgtgttgtcgtagcaactgtagtacttgcctcaagtgttctacatgtgcatcctcattggagctatagacaagaatatcatcaaaaaaatacaataatgcatcctcttaaaagtggcctaaaggcttaattcatggctgcttggaaagttgacggcgcatttgtcagaccaaatggcatgactaagaattcgtagtggccctcgtgagtgcgaaaagtcattttttgtatgtctctcggatccattc

SEQ ID NO: 338609 - DNA, 1099 bp, Cannabis indica
gttcaaaacaatctgaaactacactataattcaagaataaatgtgaaacatagataacgtcaactcgaatgtaagtgtccattttaagctttgacttcatctcacttggctttttgagatcctttagccctcagctgtgcttgcttcttttataatttttcctatcatttgttgagcttaagtttagagacatggtgaaaataagcattcttctcttttcacagcttgctttcttagctatatactgagaaataaggtcactaacactccatgctatattataagtgttgtaggttatattgataagacgaaaagagacaggaagtgcgtgaagagctagatgaatgatgtaagagtcaggaagaggaatattatgatcttttaattaacttagactaaacattcacatttttcaaaataaatctcgcaaatttatcatactgaatggttgtcatttcattcataagatgtccaactgcggtgttttcactagtgtcaaatagtttttctactgttttgaaaaactcattagcatttgtagtattcgacataccattaaatgaatgttcaggaattgaacttttcatagcaatgaaactaagatgatttgaatttttatattgtgcatgaagagttttctaggtaacaatattgatatcagtaagatcaccagatttttcttctcaaaggcataagtccaattctattatgcctaaagtaatttttacatctcgtttccatgtcttaaagttggaagcattcagaattctgatgaaagcgttattgttgatctcagaaaggagaccaaaaaattcaaaaattaaaacttgatcaggctatatgagccaagcaattagaaaatattataaagtcaactgatcattataaactcccttttagagtgctaatataacacacacatgatctaccttcatgaagttaacaatacatatcaattaagaatttattactgttgggaaaataaatttcttaaataatatatattaattcaagctaaaaataataataaatatatatttaaattattatctgtggataaataattaaaatatacacatttaatattaactcacttcat

SEQ ID NO: 338610 - DNA, 703 bp, Cannabis indica
accacttttcaaatcccgaagccggtggttgggaatgagtccagaacaccactttctgaaagtatccaacaatcgctcatccggtggcgccaggggatcaaacgtcgaagaaggcctctgtttcttctttatctccgtgtagtcattaaaccatacagggggatttctcttcctcttcccacacttaacccctgcaagtcgtgcctctatcgccaaaatttcaccctgggactcgttgtcatctatacagataacacctgcaccaataggggtagctggagctccctcataaggatcatacccgtcaggaaagacctcctcatcttgtagtgggggtgatgcagctggtagtgggggtgatgcagctggtagtagggtagatgcatctgctggggcctccggtgttgaagctgtcattggggtaggatgcaacatgctcaatatatttctgagctgctccataattaggttctgaccagccttcagctctacatgactattctcatatgacatcttcaactcagcatgacaagcgtacatacccttctggtcagcctcgatcctgtccaacctccccactaattcactgtactcggcaccaccaaggcctgatgaagatggtgcactgggctgagggtctgaactagtggcctaaaaaaaatatataccaaaaaaatacggtaagcatacggtaataccacaa

SEQ ID NO: 338611 - DNA, 568 bp, Cannabis indica
atttttgtctcaaactttgacatgatttatcatgctaacctaaattttaagattactaaaaaaaatcctatgaactattgagaatattagatttaaggagttttgtctaattttcataaaaaagtctaacattgatgaaagttcaaggaacatgatttagtacatgtcaaagttcgaggggtatgatttcgtatatatcaaagtctggagagcataatttagtacataaacaatcactgaaataataaaattgaaataataaagttcgaggggtatgatttcgtatatatccaatctgcactaagtgcaaattttatattttggatccaatccgatccgcatagcagttttaatccaatccgcaatagtacggattggatcagttattttggatcgattgttttttataatgataaattatttaatattttatagaaaaaaatttaaaaaagacttgtttcttaaattccaacaataatctatttccatctccattcatatataaatcaaaccaatatacatatacatatatcttaatacatatgtactcatctttagatttacacta

SEQ ID NO: 338612 - DNA, 398 bp, Cannabis indica
aagatctgagcctggatctctttctctccttcatgattggttaccaccgtcttactcactatgattgagtacttgacttgctatgtgtgggcatggcactctatcactaagggccgaaataggaagaacaatgaaggagggcttgaatccctatagaaggtgtctctcatctactagttgtcagagaatgaaaactagatttaggttggttgaatttgattagttgtcaagtggataagatgagagcatcatgttctttatatagtgtttcaactagggcttagggctgaattatatggattaaaaaagaataaaatattgggcaaaaatcaaccggccatacaaaggaccactttctagttacaattttgccactttatttcaaccacttattcttc

SEQ ID NO: 338613 - DNA, 537 bp, Cannabis indica
tgctgacaaaggatctcgaagctactgatcattttgaggagaccatcgagatcttatctgctgagttaacagtcttcaggatgagaggacttctctgcggcaagttcttcttcggatgaaggaggagaaggacgccaaggtggccgaggaggacaggttgaaggagaacgtcaatgccttggagacagccgccctcgagctcttcttcgatttctggaaggctaatccccaggccaatttagactaattgggcgaggctaaggacatgtacctttagtactgtggggcccaagttgcttatcgtgggaacgaggcggctgcttcaacatccgtccaagcctctggccaagatgttgatgcttctcctgttcgaacaacagatcctcctcctctagttggctcagaagaaccgaaccaagagcctgggactccagctgtttaaacacttctctttttatctcctttatatatatatatatattgttggaaattattttaacaggatcttagatctactcacaagtatgtttatgaaca

SEQ ID NO: 338614 - DNA, 474 bp, Cannabis indica
tctacagatccaatggttgaattaaacactcatcaaggcggtagaaaatgtttgagtacccgtctgacacccatttaatgcgccgtattaataaatgaacaagaaacgaattgacgcctgcaaaaagcaaatcacttcagtaatgatggtcattaatatatccccacgtgcccaaagcacgtgccaggaagctgataaggcaacctgaggcatctaagaaagccttgttcacttcatcaccaaacaaggcttggggggtaaatgttgcccctgattttgcccaaaaaatgtggaccaaccagatgatgacacgtagatggaaagggtttagagtttaaataattcagctaagtcttcttaggcacagggatcaaccttagacatgcctcccggagaaggcatgtaaatcccacatactcccggagagcaaagctacaacaaagcatcttcgggaggtgtcagatcctatctgaa

SEQ ID NO: 338615 - DNA, 740 bp, Cannabis indica
tattttattatatataaaaaaaaatcatgtcaaacgtgtcacattcgtgttaagcgggtcgtgccgtgtttaacccgtttttatttcgtctcaagtcgtgtcgacccattttcgacccgcgtctaattttctcgaccctaacccataaaatccgtgccgtgttcgtgttcgtgttcgtgtgccgtgtcgaaacctattttgccactattctatagaaattcatgtgcgtctaatgatatatagagtgataaaaagtactaatggcattgaatactattttataaataagtattaaatctcatataatttatttaataaaataacttttataaaatatcgctaactaatcgtaatgcatcatctataaataatattagacactactaatacattataaggatatttgtggtaaaacccctttaacatttataattattatacatatgaccttaattaaaaaagtagctgttaaagtattttatcttacgattttgttatatttgtactcttttttagttgttaagtgtcaattaagtccgttaagtgtcagctcaaaaacacgtggtaacatatttctttagctaatttaatacatagtctaataataatatattaccacgtattttcgagttaaaacttaatagctaaaaaaaaggtatgactacaacaaaatttaaaataaatttaccgctgtttttttttaacagaatcatatgcataataattataaatattaaaaa

SEQ ID NO: 338616 - DNA, 1149 bp, Cannabis indica
taaaatatcaaataattaatattgatctaattttataatttaaattaataaaatatattaaaaataataaatttttaaaaattgatcgagttagtaatttgaaatttatctaaattatctttaaactttattaatattttattgtcaaagtaaagtaagatcgtttcatattttattaattaaatatgtaaatatttgatgttataattaaacttaataaatcaaataaaaataataaaatttcaaaataaccatagtagcaagtttgttgagaaattaatttttcaaatttaaaacctgctaatatctaaaattaatttaaatttataataaaattaataaaaattgattttaatttgataattagaattttatttgaaagttaagattctacaccaaattctagtaaaatttgaattttatttcactgaaaaataattttcaaaagctgaaaaatggcaaaattgggaaaatgagaggagtatgcattacacactaccccgcacgcgaaatggggacatcagctgagtgggtaggctgcatgtagggtccgtgaggcccatatctcggtcaagtgcaactttggacagccccttgtcctagaaaactcagacagtgcttgtttgaagccttgttcgactgagcttcacctcaaatccgcgtgcaccagcacaaaaaccctagcctagatattttccagcttcaaaaaatcataactaattcaattttaatccaaattgtgttctgtaaaagctaaattgattaatttttcactaactttccaaaaaaaaaatacttctagaacgaaaataaaaatattttttgtagaaaatttgtaatgaacatttaatcatcaattatgcacataaaccagcatgaacacatccaaatcaaccaaattatcattttaaatccatatttcataaaaagtaatcattactatggctctgaggctaattgttggaacttattttacaggatctagatttgctaatatgtatgtttgattatgttctataatctaacaccctaaatgaaaaaaagatcaaactaaaactaaaaactaaaaagaaacaaaaactaacaagtcaattattggatgataatcaagaaacttagaccaaaagtaattaatctcaaaatacaaac

SEQ ID NO: 338617 - DNA, 535 bp, Cannabis indica
taaaaaatgttccatatatatatgttagtgagtagtagagttcaatgctattctctcgttttctcatataaactatatataaatgttttttttgaggtgatatatatataaatgttttgattaataatgtatcatatacaaatattcttttgaatgttgaataatgctgtggattagtgagatggccgattaatcacacaggtagcaggaaatttcgatcgtaagattgatttaataggctcaaacgggacagaagtagagaacggaagaaattaggaatgatttattttaggaatttagagtttttttttttaatatttgaaactgggccgggcccgaaataatatgtgttgggccgggccgggccaagcctcgagctcgataaaaatccaaaataatcgggccaaagtcgccccgtcaggctgggggcccggcccgacccgcgaaaatgacccaaattgccattcctagttctgtccgtgggtgtggaagatgaatgcctcatttttttttggtgtttacagtataaaagaaa

SEQ ID NO: 338618 - DNA, 550 bp, Cannabis indica
gtaagacctaacccaatgatctagttttttttttaaagaaaacttaagaaccctagaataagaaccataaaataactaaattaaaactaaaatacaactatttagaaacagaaaaaagtaagaaacataaatcattgacaattcttctaactaaatacatcggaaaaaatataaacataacaaaacaaatctttgaaactagacaaaggcaacaaaaactaatacattaatttttaaagttacatcctcatcatcattatctcacattttccttgaaaaagcctcttcaatggatgacttggtgaaacaacaataacaaaataaattaaaagatgaaacaactatcaaacaatttataaacaatgttacatcaacatagccattaaaatatttagataaaatctctaattcataaaaaagataaaacatagatcaacaaaagtgttggattttgtgccctaaataaaacctattttaatataatcagatctactaattaataaaagatcagaaattattttatgtttcatggttacatgatttatttcat

SEQ ID NO: 338619 - DNA, 568 bp, Cannabis indica
attattaaataaatagttttgtcgcttataggattgaattagaagtatggtattattgaaagaagaataagtggttaaaataaagtggtaaaattgtaactagagaatgatccattaagtggccggccttagtgttaatttttgcccaatatttttattcgtttttaagccgtataattaaaacttaagccctaaatgaaatattataaaaacaacatgatgctatcatctcatccaacataacctaattcaacctaccaaacctagttttcattctctgaaaactagtagatgagagagttccttttatagtgatttcacctcattaattgttcttcacctattcggcctatagtgatagagtgccatgcccacacatagcaagtcaactactcaatcatagtgcgaaagacggtggtaaccaaacccaaaggagagaaagagatcgtggttcagatcttgataatgctctgtgacaaaaaggaatcaagggctagagatttgaacgcaaggagtcatattattccgctgcaatcaatgtaaggtttcataaactcttatgtgttta

SEQ ID NO: 338620 - DNA, 576 bp, Cannabis indica
ggtaaaatatatccaacaatttttcttgatttctagaagattttcatctatgttcaacctagaaactatgaggtaagttccttgttatatggagtagtgattttcaagtttaagttagggttttttgcgatttcggggttgtgggattgaattgaattcagagcatgatttctaagttagattcaaggttgtgtaagtttgaatttgatgattctagagctattaggtttgaatttgaaagaattgagcttatgaactcaaggttccctcaagcatggtgaattgtgtaattggatgaattaatgtgaatgaatgctttgaaaatgttatatttgtaatattaaactgatgtgaagagtgtgaacaggtttggaagagattatgtcgtgttttggagcagcaaaccagggttttcctatttctgcaacagggaaaatcggttaaccggtttcacaggcatagtgaaactggtccaccggttttggcagcaggggaaaacctagttttaggtttcgaaaccgattttgttcggggtattttccagagcttagaataggatattttaatgatgtttga

SEQ ID NO: 338621 - DNA, 529 bp, Cannabis indica
ttctcatgagatggtaattacagaaagatgctaagtgtttaagctctagtttttagagatagaaactagagagatatactctgaacttctggttagttttctgaatatgaaaaatatgctagaggaactctccttttattggtgaaggagatccttaaaaatagggaaaaataattcaaaatatgaaaaaaaaaatctaaattggtgaattttgaccgtagatgatgatctgatggtcaaaattaacttctgaagttgatagtcaattttctgagcttgggtcgcggcggcggtactcgctttgggtaagtcagagcttattttataactctcttggggtaaaatttagagtagataacttcagaattgcaattgaagtgtgagaaatacttgatagaacattgaaatagctccaaaatacaattgaattgcgttaatcgaatcaatatcgagtgagttatgattgtcttactgaaagcagttcataacccaacacccaagttgacatatgacgtcaacctggatgttg

SEQ ID NO: 338622 - DNA, 1028 bp, Cannabis indica
ggcaaccctgatcacaaacggaaggctgagactttcagagcatcagagggtgggtaacaaaaagttttggggaaacagaggtggccgccagggccgcgggtcctcattccgatcatatcccgagtgcccaaaatgcaagaaacaccatccgggtgagtgtcgggccaagacatgtttccagtgtggcatggtgggccactttatcagagattgtcctcaggctaagaaagaggagcctaagaagaatactactcagaactcggggcgactttttaccatgactcaggctgacgcagatgctagtccatcagttgtgacaggtcagttgtctattaatggctgttcttatactatgttgtttgattcgagagctactcactcttatgtgtcgagtagagttattaaaagtttccttaagccatgtgatatttatgcttcggggtttggaaccctgttaccctcgggagaccttattgtatccactaggtggattcggtctttgtccttttggattgacggttgtgagttgaccgccaatctaattgaattgtaattgtctaattttgacataatcttggaaatggattttctatctaagtatggagctacgattgattgtaagcagaagatggtagtgtgtgagcccgatagtgctaaacgagtggtattcgtgggtaaggttcaaggggcacgcataccaagaataacattgttgaaagctgaggacttgatgagcaaaggttgtttgggattcatagtcactgcattggataccagccaacctgtgacatcaaggcctgagaatacgagattggtatgcgagttccttgatgtctttccaaagatttgtcgggattgccacctacccaggaaattgaatttgttattgaattggttccgggagtggatctagtatctaaggcaccgtaccgaatggctccagttgagttgaaggaattgaagatacaattgcaagagttgctgaggttagaagttttctgggtttagctgggtattaccgtcagttc

SEQ ID NO: 338623 - DNA, 671 bp, Cannabis indica
tctactcttccgcccagcaagctgacgacgggattgttcggcgcccaaagaggcctatgacaagcttctattccgatcctctttcccatatgattctttcactctctatcggtactatttcttacatttttaactttcatttgattgagattatttatttaatttttttttggatctgtgatatcacataatttttttttaaaaaaaatgtttaatttaggtatgtgatttagagactgttggagatacttttagtttgggtgactattcaatggttacatttttattgtaaccatatggttacatttttttttacctataatagaaggttaccaataggtaaaaattccatttttagatttaattaattataatttattatattttaagtaattaaataaatatttaagaagatcttaattagcaattaaaatttataaataattttttttatttatatataaatcccttagcttaattattttaacaattaaactatttaattataatatttacaattttttttttactaaaaattaaaattatttttatataaattaaaattgtatccttataatgaatttttttttataagaacacaccctgcttctttttttttttttggtacaggatgtgtccttataaattaaaaaacatgatattatattgac

SEQ ID NO: 338624 - DNA, 701 bp, Cannabis indica
ttccgaagatcgtcacgacatgtacaatcatcatcagcagtcagctcgttccacggttcaataagctttgattgctttagtagtttattttaatagtatgatttaagaaaagcttgttaggaagcatgtaaatagcctaatagtagagtaggtgcatgtttttaatttccaaataagcggcattagtaagttttctttaatcacgatttgacaagactagctctttgttatgcaggttgttcaaattagtatggacgctaggcaaaacaccaggagccagggcaattcggttggactaagtggtggtcaggcagctcagattccccttaatatctgtggccgtggtagaggtcctaggggtagggcacgtggtcggggtgatgctaacccgcaacaggctgcccaagctacccaagaatgggaaaataggtttgcggaaatgcaagctagaatgaatgaacaagatgaagagattcagcatttaagacagcaaggtgctcttgtagtccctgccctagaaattccagtagcccctgcccctgctatgcagatggaacctgttgttgcaatgaatcggatggaactcctgtatgaaagcattcgtaagtagaggacctccagttttcctgggaggttccgatgtcatgaaaggcgagcaatggataaatgtgatcactgggatcttgaactttatgggcatc

SEQ ID NO: 338625 - DNA, 927 bp, Cannabis indica
attgcccatttaaggaggcatcccgatgcatcgggttttcgtagcacctggtgtaagggttggttagtgagtaccgcaatggggtgagcttgaaagtagggtcaaagcttccaggatgctaagagtaagcagtaggtcaatttttctatgagggggtatctacactcttgccccaatcaatcttttgcttacatagtagactgggtgttgtactctattttcctcccttactaagactgcacagaccgcatgttctattactgctaggtataaacttaacccttcaccatctaggggttttgaaaggaccggaggctggaataattgttgctttaaatcttggaaggtattttcgcattcttcagtccattcgaatcttttgttaacccttaggatgttgaagaaagggacacacttgtcggttgactttaagacaaatctacttaaggcagcgattcgacttgttaagctttggacgtctttaactttagttggggatttcatgtggatcaaggcctttatcttttttgggttagcctcgatgcctctagagttcactatgaatccaaggaactttctcgagcttactccgaaagaacactttagaggattgagcttcattcggtattgtcttaggatctcaaagcattctttcaagtcttcaatgttcccttgggctttcttagacttgatcagcatgtcatcgacgtagacctccatgtttttgcctatttgctctttaaacatccggttgaccaacctcttataggtggctccagcatttttcaagccaaatggcatcactttgtagcaatataagccgacctccgttcgaaagcttgtatgttcttggtcagctgggtgcatgcttatcagattataccctgagtacgcatccatgaaagttagaatttcatggccggctgt

SEQ ID NO: 338626 - DNA, 581 bp, Cannabis indica
ttatttcagatttttctgatacagaactagggttctttacaatcactgtattctctttttctctaaggatttttcgtcccctttttctgtataatctacccctatttatagtaacataagttagcagttaattatttaagtttaaatcccacaagaatatttccttgaaatcgtgggctttatttacgctccacgtaaataaatacagttattatttgaagattacacagctgtgatttaaactgcttttaaagggtcaacactgacttggattaagacacgctgcaaaacatatctcgttgaggcatctcgctcggtacaagaataacttggctcattcataagtcttctagtaatggcatgagcatcagtgtactgagcaaacttaagaactgctctttgaccataaggtcttgcagactggacaatcatgtcctgggagttctcaataacaacaataaccttggcagcgagctggagtttaccaagagtttgccttcctacagcgagatgaatgtctcactatccgttatctatgttctccttgggattatgccttctgacgcgaaatggtttctctt

SEQ ID NO: 338627 - DNA, 385 bp, Cannabis indica
gaatagtcattttaccaaaatggtggaaaggttattctattggtatgacattctaatactttaatatgcaaccaaacaaagaaatagaatgaagattgtttcctttccattacattttatttcattacctctaaccaaacaccaccttaagttttaaattgcattcccaaacctcaaaggaggggcataggactcttaccaaatttgactttctctgcacctctcttcgaagaagccaagaaattcaagaagtcctctctgatttcatgcattttttgacttccttgcagagaaactcaagaagaaaaaggctcctcttcaactctagcaactaagacctaaatctttgattcatcctttgtgaattctgttgggttttatgccc

SEQ ID NO: 338628 - DNA, 1199 bp, Cannabis indica
acaacactctttgttaaatgtggaatagatcacttttttaattttgggaggtgagtttccatgtgctcattaatattttttcgtcttttgaataagttgtttgtggtttcttagaagaaaaaaacactctttacacgttgttaatttttattggaatactagatagatgttacgtgtcaagtcacacatgttaattttatttgaaatactaatcagttataagtgaaaagtcgttaaagtgatatcatgagcacaaaatggatcacttctcttgtccattgaccataacacaaaactacactaaacaaataaggacaagtcataataaatggcacaaacaccataattaaaagacacataaaccgtaaaaacaggggcggatgtacatatggggttacagtggccgtggcccccttattttttacaaatcatacatagtaattgatatacaattgcaactaatatacatagctacaaataattaaaaaaaatactttgaaaaaagtcaaaagtaaaatcaatatataaaaatgtatgtgattgcaatttcaaaagagtaaaaaaataatattttaatatgaataataaaacataaattttaatttttaaaaaataaaatattagttaaaatcaatctttataactatttttttttaaaaaaaaattaaatataaatataaatatatcatcgagtaggataggataggataataaggaagggtacacatatacccgtacccaaccttatacatgtatcgtgtacatattttcatactcttaaaccctattctatacccaggcccgaccctgggcataggctggctaggcctgtgcctagggcccacccagcccagggacccaaaaatgttttttccctcttttaaaattatacatttttttaccgattttgataaaaactacattttttctaacataagggtccaaattttttttttccctatagcccactttatttcagggccggccctgtctataccctaattcaacaggtaatatcgtaataccatacacatacaggtagggtacccactggtaaatgaatttaggtaaaattgtcatttctaatgaatatagtcaagactattttgaaatagagacattggtcactaaaatttataaacatgaagccttatttttgcgggctatttacaaaaatatgggaaaataaagataagttt

SEQ ID NO: 338629 - DNA, 813 bp, Cannabis indica
taatagataaaaaaaaatatatatattcctcaacttatcctcaatttttttaagaattatttcataaaataaaatatacaaaggcaaaaaattaagtaaaaaaaaagttttacaaaaatatttaattttaagtaaagatttacatatttatattgtcacatggcaaaaattacatttttactgccctggtcttttttcttttcttctatactgtaaacaccgaaaataaaaaatgaagcctccatctttcacactcacggacagaccaccacagcaacactagaacagtcataaaataaccattaattctaacgagataaagcacaaacattaaaactattaatattggggttgtcgtgatttttttaatattatttttgggttgttgcactgttgtttcgtatgtttaataaatgttggtttcaaattacacaggttaaaccaactactgaatatttaatgtagtcagaatgaaagaatcatagacattaatagtcttacctcctattgaaagggtgaaatttgaaagccaaaaaaaaaaggaatggaagttggttgggaaaaaaaacaacataacaaatgcagcaaaatgtggggagctagggcacaataaaaaaaacatacaggataaggtatcaaaaatgaaaagaagtagaacatatattggagcataggatactgaagaaaataacttccatataaattttattataagttgaagaaaatgataagttgaagaaaaatatgataaagaaataaaagaaaacaaccttaaaataataataaaataaaaatgataagttgaagaaagat

SEQ ID NO: 338630 - DNA, 563 bp, Cannabis indica
ggttccctcaccatgatcccctggtcatagagactcccattgccaataagatcgtggctagagtattgatcgacagtgggagttccgtgaatttgatatttaaagaatccttcacagcaataggcctcacggaccgagatctatcaccaagcagctcccagctcacgggattcaacagaaccacgcttatcccgatgggaaaagtgaggttgccagtcaccttgtgcacggacacaccccagagtactttcaagtactccacatttgtggtggtagactgcccaactacatacaacgcaatcctcggccgaccggccctggttgattttggcacaattacgtctatccagcacttatgcctaaaattccccacccaagaggctgtagtggggaccgtgaggggcaatcagggtgaggccaggcaatgttataatgtcgcggcccatttaccaatattgatggtctgtgaaagtatcgagccagaattggcagaagaagatgagttggatccccgtgtgggatccaaaaaaattgtagaacctatggaagacgttgaggaagta

SEQ ID NO: 338631 - DNA, 870 bp, Cannabis indica
gcaaaagttggtgcctatgcatattaagcaatattcactttcactttcaccttaggcaagagttatcttaggtcatctctcaatttttttccttttctttttctaatgctactgttatggtttttattagtgatggtattggttataactattagtgatttaatagtacaagtcttgccaattttaggatgttaatatggtgttgtcattgttttatgttttccatttacagattgattacatgactgtgaacgctaattaatttttgttttgtaaaatttacgtgcttcggcacgtaacttctaactaatatatatatatatatatatatatatttcataatttgattaattttttttttttcaattgcaggccatacataaattaaaggtgaagatatcaatgatattgttttatattagttgatgccaatgaaaatatatactagatttattttgtttaattttgttatcaatgtataggttatttagtctttgaatgacattaataattactgtgactaaatactcgcatatgaattttcaattgggaaaaattaagctttgtaacccaacctaaaccaacccgacccaacccataatgtattgggttaggttggattatacatcaaaaatgatatgaatgggttagaattttataggccaatttaattaagttggcctattaaaatacctttaacccggccaattcaacccatgctcagtcttaactatgatggttacatatttaatataactattgaaacctcctttatatatacattttaaaagaatactaatgattttttcaaaaaaattatgtaaatattttcttaattaaataattaataatatttataaatttaataaa

SEQ ID NO: 338632 - DNA, 571 bp, Cannabis indica
tattattatcaaattatagaattttttcacatctgttatatttttggatttgtcattttgtattgtgtttgaactcatatttttttttttgtgtcatatcattttatatcacatcttttgaactcctgccttccaaattcgtatcgtatcaaaaaaatttgatatgtatttataacactactttcaagcataactataactatgtacgtatcgtgctaacctaacccatattatgaaaattcgacaataaaatagatagtatcataccgacgtagaaaaaatatggatcgtgctaagctgtgccaatattttaaaaactaagtccaacacaactcgtaaactcatatttttatgctatactcggattagtgcccactcaatttttataaatgggtcaatttattttttttttatatgaattgaactcgtactttacttttttattaattttaaaattttaataaatacaattttggaccctgtgttttgcaaaaattacagattggattctgtattttgttaaatgataaaatggaccctgtattttctaaaatagtaaaaataggaccct

SEQ ID NO: 338633 - DNA, 692 bp, Cannabis indica
tgttcaaatattctaagagggacagataagttttttaaatgagttgtgattctcgaatatttaaatattcaatttaaatatcagttcaaatattaatgagatttgttttattattattttattatatacaaaataatattttattattttattaaataaaaataaaaagtcacccataaatttctcataaaccaagaattttagttatataggcacactttatatagaatagatatactataaaaaaactctaaattttataattttatgctaggtttttttctatgttatttgaaagtgagattattattgaatactgaatgcaatatattagtgtttaagaaagcttaatgatttaaatatgttcttaagttaatccaaaaataaactaaaaattgatgttccaatacttaaagaaacattacttaaatgggggtaagataaaaagaaaattaaaaatcaatctctaaattgttgataattgaagatagcattagtctaaaaattgtagataagaaaactaatgatagtcattggtggatttcaatcttcattttctttgatagagacaatagtgtaatttttgtattttgcactaatgctttctaggatttatttgtatagtaatgcgtttgcattttgatcagttcgattcaatacaaaaaattctgttagcattgattttttaaaat

SEQ ID NO: 338634 - DNA, 748 bp, Cannabis indica
ttaaagcactaagggcagccaccgatatttttgcgtggtgccaaggacatatgaccggcataagtcctcatgtaataacccatgtcctcaacgtcaatccggacatgcctccagtataacagaagcggcgcccccttgatccagtaaaggcagaagctctagaaaaagaagtggacaaactactagctaatggcttgatccgagatgtgtattacccggagtggctagccaatccggtattagtacccaaactgaacgggatgtgacgggtgtgcatagactttaccgatctaaacaaagcctgcccaaaaggctgcttccatttaccccagattgacaagatggtggacgccacctctgcattcaagctactgtccttcatggatgcctacgccagctataaccagattaagatgcacactgcagatcaagaatgtactagcttcatgaccgataagggggtatacttctacttggccatgcccttcggactaaagaatgctggtgcgacgtatcaaagaatggttaaccggatgttcaaaagctttctggggcagaacatggaagtttatgtagacgacatgctggtcaaatcaaaggcatgtggaagtcatgcaggcgacctcgcagaatgcttcgaggtggtccggaggtatggaatgaaacttaacccgaagaagtgcactttcgtggtcaaatcaggaaagtttctgagatatatcgtcagccaaaggggaaaacaggcgaa

SEQ ID NO: 338635 - DNA, 880 bp, Cannabis indica
caaaatggaaataataatgaaaaaaataattagtttagatccgccttgagttcatggctcatcaataacgactctcccatggcttccatcgcctacatccgccttcccggcggcgactcaggccgctttcaatcctcacctttcaccagagcttcttcctcttcttcgacctcttccgtttcttcttcttcttcttctggtgttcaatactctgcggttcgtcgctgggtagcagcttaattactccatcaatatcaacatgtgttgtttggttactaagaaaatttgaagtggtggagaaaaattctctgaaagtctacgtacgttctacttatcaattaagaatatgtgatattgcttactaaattaaccgacggatacaacccaaaaacccgtccaccacactgtcatacgaatccaaagccatatctgattcgccgcctaccaaaccgtcgtacactggtacaatacaaatggactcaaagacgagtccaaagctgaaggaaacatgaagtcagcacaaatctcgatggacatcataaaactctctcgcaatatcaacatataccctcccgattcagaactccgaccaagcctagattaacggctagtaagattccgatcgtgattcttttccatgcggcgttaggttcgtcgtcggttgccatcagtggttgcgcatatgaatagtggctgaagtggtagtccgtttttcatgcgtgatggtcgacttggcgctcccttattttttgtaattgctttattattattattagttatctaaatgtcttccttttattttaactaatcctaatataaatatttttctattttcttcaaaattttttaaattaaatatatttttttttcaaaataaaat

SEQ ID NO: 338636 - DNA, 544 bp, Cannabis indica
gggcatatttattaattaggaaactttaattagtttcattattaataaaataaatgatagatttgacatttatgtggttgaacaaaggaattggcagtttttgacaaaacaggaaactatcagtgtaggaaaaggaaagttggaaaagtggcaagccttgtttccacaatgcctagatgaagctcacaccacaccttattcattgcatccgggaaccaccaaaatgtaccaggatttgaaaccttacttctagttgtacagaatgaaaagagatatggtggactacgtgtccgaatgttttacttgtcagcaaatcaaggttgaacatcagaggcaggcagggttactacaacctttagtccttcctgaatggaagtgggaggacattgcaatggattttgtaactggattgcctagaaattcgggaatttatgattcagtgtgggtcatagtggacagattcccaaatcagctcactttctactagtgaaagttacatattccgtggatcagtacgctgcattcactactacaaaattagctt

SEQ ID NO: 338637 - DNA, 582 bp, Cannabis indica
ttatcaaagataagtttttcttcatcttttaattgttatataagtatatatatattaaaaatttggttcttaaatttgatttattttctttaagttaattccttacctcatttatcttttttggtattttgtaggttgtttatctatacttcaaaatgcgaaaagttcacatatcgcagaagatctgaacctattggttacttcttagtcattcaagctgaagcttcagtcttaatgatagtgctggattggttttacatgttgttctttctctttgttaagtagagcctatttatttagttttggtattcgttattcaatagtgctctttcttttgatttgagctaggtttttattgtttctttttgctagtttgctttccaattttcctaaggcatccctaattcatgttcgtttctcatgaattagttgtgcatgcacttagggtggatggtgaattagcttagattgaatattattcttcttttcttattgatatgtattaaactcttggttgttgttaataagagtttaatttcaaaaaaattagtacttgaagttttttaaaattaatatatttta

SEQ ID NO: 338638 - DNA, 711 bp, Cannabis indica
gcatattaacaacaaaactgtaaaccgcaccgcactgcgcagtttaagaaaaattcaaaccgcaaccacaccgcgaagaatttcaaaccgcattttttttgcggtgcggtatggtgcgaccggtttgagcagtttgatgaacacccctagatgtatggagtatacatcggactggaccaatattgacattagatatgatatcataaacttactgttatatctatctaagtcaatatcaattagttgatcttaggtcaataaatcttagtcctgatatggttaggttctacttaaaagtatttatctatgttcttagagttgttccttaaagctgaccaatggatcggcccaatacttacatcttgaaaatatggcagttcaattgaatgggagcgctaatcatagatatgaaatctatagcttctataagtatttagaagtgaaacgataatttccttcgagcttggcttaatagagataaatgattgagatctcacttcagtaattatattagtttaccgaaatatcatttatagatagctaagtgttttaaggataaaatacattgaagggtagaacagtaaatttgttcgtattcaatgttgatcatttataaatgatctttgactatttaaattgaaacaatagggaattcaaatcacatccatttttagtaatagtgtgttccatgtaattaatagttcaattcta

SEQ ID NO: 338639 - DNA, 769 bp, Cannabis indica
gcaccgatttttttcgtgaaaaaaaaggatggaactttacgaatgtgcattgactatcgaagttaaacgagttgacagtggagaacaagtatcctctgccaaggatagatgacctatttgatcagctacagggaaaaatcgtcttctccaagatcgatcttcgatctggttatcaccaattgaggatttgggaagaggatattcctaagacagcttttcaaactcagtatggacactattaatttctagtaatgtccttcggattaacaaacgccacaacggcatttatggacttgatgaaccgagtgttcaaagacttcctagatgattttgtcatcgtctttattgatgatattctaatttactcaaatatagaagagacacatgaaagacatcttcgaatggtgttacaatgccacagggagcataagttgtatgtcaagtgcaagaaatgtgaattctggttgcctcaggtaagtttcttggggcatgtggtaaatatagatggtattctagtggattcggtaaagattgaagcggtacaagactggcctcgacctaagtaagcaaccgaagttagaagtttcctgggtttggcagggtaatatagaaaatttgctgagggctttgctaggattttgtatgcccttaaccgagttgactcgaaagaactgtaagtttttttggactgataagtgtgaaactagttcccaggagctataggaaagattaattaccactcctgtgctaactttaccagtcagtgatg

SEQ ID NO: 338640 - DNA, 1018 bp, Cannabis indica
gccgattgtgtggtggccgattgagttatggccgattgagttgtggccgattaagttggggccgattgtattaatgtctaattgagttgtgaggattgtttaataatcaattgcaatgagttttctaggaaaatataatttccattaaacaacagtctctagagaaaactaaacaatattcaaagtctttaaacaaccgcaggaaaattcatcgcagtcttggaaacgacaatactgaatacactaaaggattgtggttattaaaggattgtggtacggtgtcccatggcttctaatagtaaatcttatcaggaggtggaagaacaatatgcgaatatttccctagatggagaggatgatggggagttgagtattgattttcttgtccttgaggaccaagttttgaatgttgagttatgtattgtgggctggttcttgactagcagagccattgatttcgaagctatgcgccatgttatggcctctttgtggcaaccaggtaaaggagtttatgcaaaggagattgacaccaattgttatctatttcaattttttcatgaaattgatttagaaacggtggtggagggaaccccatggacgtttaatagggttcagtttgtttttcacaatctcagaaggggagatgatccaaaaagggtatgattgaacaatctcgacatctgggtgcaaatccatggtctccaactgaggattaagtctgcgagtgttgtggagaggttgggtaattttgttggtacgtatgttaaggctgatcctaagaacttccagaatgtgtggagagattatatgcgtgttcgggttacattggacatcactgttcccttgagacggcgtaggaagctccgtcggactgcaatggaggaggggttttgggctgagtttaaatatgagtatctccccacgttttgtattatctgcggtataataggacactctaagaagttttgtcctaagttttttgatacaccagccgagatgctcgtaaagccttatggtg

SEQ ID NO: 338641 - DNA, 847 bp, Cannabis indica
cggttggttcagggctgtaccaaccgaaattctggttggactgcatcgagaaaggtctattttagtaattttgccataacttattactcaggtgtctgttttagacgttctatataccgttttaaagcttatgatgagctcgacgatatggtatataaattagagccaaattgtgtattttattttagagtgtctccaccacatagtttggtagaaaaccctaggctcttttcagacattacaaaaatgttctagagtaaacacttatcagtttatacgtatgttgtgacttagggacctgtaaatagtcgagcagcagttttcactcagagttaccgacatacttgcattcagaatcaaggtaagattagtataatggttgcatatatgtatacatgtttagcgtacatgttagctgccgtcagaataacatatcaggttttcagtgaggtgtacatagagctgcactgagataccaatatacatatgttaggcaaatcaacagccatcaaattagtatataagagttttagtgaagtgtacatagagttgcacagagatgccaacttatatgttaggctatttgatggtatgagttaacggctaccacatcagtatgactagagtactgagtataggctggattcgtagttagtcatactttgttgagaacgttcctaaccaagttatcagattgtgattaggtgtatgggcccctagttacggtctagatatatgtttatgtttattattatacttttcttattggagtttgtcgactctcatagttattacatgtatgtgcaggtaaaagctagaaccagaccagtgagagtctaaagctaag

SEQ ID NO: 338642 - DNA, 580 bp, Cannabis indica
gtgaaggccctaatactttcaaagttaacgggcagcggttaaagctctacttgggagatcaatttgatcaagccaagtccgccatgattctggcgccactatgaagaactcgatcaacgtctagctgtgagacgataaaggcagcgctaattgggaggcaacccaagtgttctttatgatttagttgaatgcttttatgttttagtgtaattttctttttctattctgtctagttttgtttagaaaactaaatttttagtattctttttcattatgtactgccctaaaaaaaaaatttgggattagcccagtggccgcggccagatgtagggtggccgcggccatttaaggcttacagaaagggcattattttcacgaattctggccgcggcgaggggacatgccgccgcggccatttaagccttacagagaggttgttattttcacgaattttggccgcggcgaggctttatgtgaccgcggcgagaagtgtcagcgagtttaaaagaggcaaaattcccaaacatttcaaacacactcccattcaaaatccctaaccttcacctccgaaaatacttct

SEQ ID NO: 338643 - DNA, 764 bp, Cannabis indica
ggaatgttgttatttaaagctcgggtatgtgtcccgtgtaatgttaagcttaagaagaaaattttggatgaggcaaacactaccccttactcattgcattcgggtatcactaagatgtatcaagatctgaagtcctgttactggtggtacggaatgaaaagggatgtagtggattatgtggctaaatgtttaacctgccagcaaatcaaagtagaacatcagtgaccggtaggattaattcaaccattagcacttccagaatgcaagtgggaagacatcgcaatggactttgtagtcgaattgcccagaactacaggaatgtacaactcagtttgggtcatagtggatcgttttacaaagtaagcacatttcttgcttgtcaaaataacatacacggtggatcagtatgttggcttgtacgtgaaggaaattcttcttcttcatggagttccaaagtttattattttggatagagaccctaaatttccattgcagttttgggtgagtttacagaaggccgtgtgtactagtttgaagtttagtacgacctttcattctcaaacggacgtgcagtctaaatgaaccatacaaatacttaaagatttgttacgagcttgtgtcatggacgttggaggttcgtggagtaagtatttgcctctgattgaattctcctataataatagctatcaaagtaccatagtaatggctccctatgagctgctatatggcagaaaatatcgctccccaattcattgggacaaaac

SEQ ID NO: 338644 - DNA, 658 bp, Cannabis indica
tatgttagtatatcgggacggtttattagacattgggaatgtcgggagtggtcgggaatatagaatttcccaaaataccctttagtgccctttatgttattttagtatggaggggcaaattggtcattttgccccattggttttttgtcctttagtggacttagtaattggaaaatatgtgattatgtgggtttatgttggctgaaataaaggttagaaattatatttcttgtgtcattctttcaaaatttaaaaattagaaaagaaagcaaaaaccattttcctctctagcctctctctctctttcggcctccttgagcagcaaggatccttgccatttttcttggatttcaagttaattttagcaagagttagtgatcacaagttgttggtatgtttcctttagctttctttttagttttatgaagttttgagaaagtttgatagttgcatgtttaagaaatggtggctgtggttaattgttgttgcattcagaggtttatatgtgtttaattgagtgaattcatgctagttgtgttgttagttgatgggatttaaccttgtgtagagattttaactcaaaactatggtttttcaaagtgaaaatgtgaaattagttgctgtagagattgttggtgcttgagttcattttctgcag

SEQ ID NO: 338645 - DNA, 1232 bp, Cannabis indica
tgctatagtatccagatccgaacttgagtccagctcaccaacatgacaaggtcggactacttttagtccgaaagatgtcgtgttagctcaaaagacaaagagttcactaggaccaatccgaataccctcatggtgctattcggatatgggcaatcggagaggcactcagaaggcttctagacatcaccctatgcggaactctccagacaccaagtcccacatgacagagcttgtcccctacttcgaactcgtgggtgcgcaagctgttaaaattagaatgtaacccttttgttccaacgccatattgtctgacattgttggtgcagacataactgcacatgacacttgacatcctcaaatggtccctccttgtacggacaatcttcacctcgtgaattgggcctaactcaattagccgaaagtcaataaatattatattttaccccatttaaagacctatttgacacttttaagacccatggtgtgcccatacatggttctcctatatacatagaacattaccccttcatacaaatggttggatattaaattcttaggagaataattaagaattaagattcttcaactaagacaaaaataccaataagaaatattttaaaactttttagctcgataataatattgacttgtagactaaagttcattaacactcgaaccatgtaaaattcttggtctcttcttctttaatttacttatttcttaaatttatttatttaattttttcagttttaaaaatctcggtcaatatatattataaaagctaatttgattatattaagggtaaatactattttggaccctgtgtttgcaaaaattacagattagaccttctgttttgttaaatgacaaaatagaccatgaatttttcaaaatggtaaaaataggaccctgagtttaatttttgacaacttttttttttttaatataactaacttgaagataattcctaacccgaacagatacagaatacataaacagttttgtcataacacatttttagatcagatttttattaaattttattttgacaaaaaatcagtttaagatcctatttgtacttttttgaaaaatatttagtctattttgtcatttaacaaaatagaagattcaattggtaacttttgcaaaacacaagattcaaaatagtatttacccttatattaatagtgtgtgatgactagtcactagtgtcttatttcaaaacccaatta

SEQ ID NO: 338646 - DNA, 805 bp, Cannabis indica
aaaaatatacaactattagcttactcatcaaatacgtgttagaatactaaatttttaatttttcataatatcaagtttttataatttctgaatatctgttagtagagtttttaaaatatttgaagataaatctttgattttatcttatattttgctacgtgttgagctaattggtatattactgctgagtcattatatatacgtgttatatgattgaaagttatcctctctttaaaagttagtataagtatgctattctaacatgatcaaacttatcaaataaactgttttaagaaatggaactttgcttcttcaaactctcaggtttggtttactgagtcattatataaacttgttttgatgtatacttaagtcatgctttcatgtatatatgattttatttggtaaaatttattattatgtatttaagttttatgctttgatgggtattatatgtgtatgttttcggtttgtgattgaatctttgtgaatcttttcttatttatatactcttgtagttgcatgtgagtcttaacatctctctctctctgttttctttttctcttttgcaagcatgttctaactctgttttggtggatttgggtaacataattctctcatacctttaaagattaatattttgaattgtaaaacatatttacagtaactgattctcttgttttaattcaattattggtaaagatttcaaattttagctttaaatgacagcggagccagaaaattgaggtgtattcgaatcataggagctagtaattgacgatatgctcatattggtgacgttatt

SEQ ID NO: 338647 - DNA, 1026 bp, Cannabis indica
aataataataataattttgaatgattgagatataaaaataatacattatggagaacacggtaatttttttctagaccatcctatttatttatttttataaaaataatttatttaacaagaaaatttaaaatactatatataataaattttaaacttcttaataaaataattttaaataataattaataaaattatctatttaatttttaataaataaaattattaataacaatgtaaaataaaataatatatttataattttactatttttaagtaactataaattataatattgcctagttattctaataataataactgaagataaaataaaaagaaaaaggttcctaattcctaaaccctcttctctgagtctcacaaagcccgctcacccagacctccactgcctcacagaccccgacggtctgttcctctcgcgctctcctcaccacccccgatcgacgtaggcgagctgcgaactacgatcctccctcctcaagttcctctcggcagcggaagccgaggagctcgacggtcatccatcctatcgaatttccaccactttcggccaccattctaacatgtaataccatatacttagaagagattggaaagttttaattattttcaccatatgattcgaaaaccgggactaaatgctgtgtttttcaatcgtttttctttcatttataaatttctgattattgttaactgttatgtgtatcagcttatgctataagcctataacacttaccggccggcctggtctagccattcattcccgccactctgaagcatagagtttgcttgcctcgccgtttcctgcagaaagataagaaggtatgtttctgggttttctttactttgcaaatctggaaattattgaatttgccaagaaaaagaattgcctcctccacactaccactgtactttgtaaggaagactacaaattttatatctgttttaagtttttatgtttcaaatcaaagttgagtccaagaatctctatgaataatgatcttgcag

SEQ ID NO: 338648 - DNA, 1140 bp, Cannabis indica
agggagagaagaagggggtttcgaatattacgttactcttttctattttctaattgtttggcaaaaggagtctaatcatgttatgaaaataagagcttataatatctatatatgaagaagtatgaggcggtgacatgacattctaaaatcacttcaaaactatttttctcttctctccttaaatctctcaatttcaatattttattaaagcataaatctacaaattgatattttactattattttaataatttttctatatataaaaaagtataaatctataaattgatattttactattattttaataaattttctataaaaatataaaatattttaaaaaaaattagataatttactattattttaataaattttctataaaaatataaaatattttaaaaaaaagtttgaaaataaaaataaattccaaaaaaaaatatttaaacttaaatcaaatataattaatcgtatatttcgtttatatacatacataaaatatcaatcaatatatataccttaatatttttggatttttttaaaaaatatatataataataataataataataataatataaaaataagaactctaatatgttcattttcggccttttttaaaaaaatataagatataataataataataattaattgtacgtgatacttgaaataatatttcaattgctttttatcatgtttaaatttattattaaaaatattaattaatttttaataaaagtgtactttatatctttttttgaaatgattactttaatgtcaagtatcacaaaattataactaaagagcattgctattgggcatttgcagtgcccaacacctttcatatgtggcactctacgattggttagtgatatttcctaaatcttatttttttaagttatatgggacctgctacttaattacaccaatagtggtatgtgttaacgcagattttcattaactatatttgagtctcacgataatgattgcacacagaaaaagaataaacctatagaaaattaatatatgaacacagggttttttacgtgattttgaagttaaaattttgcatagtccaggagtcaatcttattcagatttctgattgtgtggttttttagggcctctcttgtatgagt

SEQ ID NO: 338649 - DNA, 639 bp, Cannabis indica
gatccaaattttaaggatttatcattggtatgtattttttggaagtatattttttttttaaatttatcttcttatctatgttcaattttttagttggttatactagataactgattttcatgtttaattgttgttttacgtaattgaggtttaagtttcatttttattttaggaaactagttttactgtgtcagatttacgtaatttgcttgctttatgtaactggcaattctgtgcactttttaattggttgtttaacataactaggtttagtaatttaaatttaatatatttatttcatgtttcaatatatctttttattgttttatttaggtttcttatgttttgtttttatattaattattagtttttttaattagctatctaatataattggttcctccattttttttaagaaatttgtttttatgttttaatttatctaatgtaactagtttttataatttaattgttagttttttttaagaaacaaatttttatgtttcaatttatcttttgattgtcttaggttatattggtaactggttttcctatttagttattatttttgttgttttacatataactgactctaacattttaatttttaatttcagttgatttaaataattggttttt

SEQ ID NO: 338650 - DNA, 506 bp, Cannabis indica
tgagttaattaagatctatatgcaaacacgaaacctacctatattacttaaggagatttaatatttgttgggctctaatatactaatatgacatttttcttattaaaatttggacaaatcaattaggtcagatttaatacgatagtagtccctatgatagtattacccaacaaaattaacaaaactaagttaattaactatgatagtggtcccaacaacgattatgatgtcaaattttaataaattattgactactgaaatgagtggatgtcgtatcacatttttaatttcaccatttaaaccatgtacttattatttcaagatggtgatgtgacatttttagatagccgtaattaatcaattgacttcattcattatgtcttccatgtgtactaaatacttgaaagcattttatttttactttaattctggaaattagtacttaaatcataaaaccgtaggtatatttgtttttaatagaaaaatgtcacatcacatagtacttt

SEQ ID NO: 338651 - DNA, 844 bp, Cannabis indica
tgaggtcctttgtcccaacacccagaatcccgagagtgagaaggcgcttagggaggatatcatttcattcgatgaagacaagtataacaattacagatacaagagagagcaggagctcgcgtacattcgcctccaggctgccttgaagagggttacccgtgaggagatagggaaagagaagactccagttcagaccaaattttcgttctcgatcccgaacttcggagcccctggtgcaagtacctctggagcttataagtctcctttgaatattcacttcgttccttctgtccaagactacgctaacttaaggctagtggaatttgataagagattgtataaattttggatgccccattcccagtggggtgataacaccaaaagcttttatttctccaatttaagtcatttcttgggtcgatctcggatgggctctggtcctcctgtaccgatccttttggaccattcctcctacttaacctcgagttggtttctccctgtagatagctttttaggagatgacaacaccaacttattaatttatgaacttgctagggcagaattagatcgccagggtaggattagtctcgctgcactatacttgcatttgtaattctttgatgttattctatcgttctgcttattttgaatagcaaaacccatggaggatcttctagccgcccttgcccggactcacagccccgagtcagacatgccagagcaccctcgatgagtgtgactctggggggacctgccaatgaaactattgggaaccaggaggtggttttgattgatgaagaggaagaagaggtggttcctccactcgactggaagcataagagca

SEQ ID NO: 338652 - DNA, 999 bp, Cannabis indica
taacctcaaaatttcttcctcttgttggcagattcaatcttgcatctccgcaaacctctcctcccaatctggagaagcttgtagtggatttacaggacgaccaccctgaactctgccacggccacggccgcgaccacggggattctggggaatttgatttccctgaccgcctccggtcttaaccacattaccccgacttcttgtatttcgctgggcgtccattttataggacttagccttcgaacccataagccaagctggttagacagtgatcataaaacttaataccgctcatatggatttaagggcaacacacttaaaataaataatcataatctaatatacttcctaacatactttaatattaaaataaatactaaacaagtacgagcttactgaaccgtgagccgagctttctcttatgaagattgttgtacatgtcttggcaagcttcgctagtcatttacatagtcatttccaaacaccgaaatcccgtttctaaacttttatacaaaatatgccaaaatacataaccaagtcgcacaacgactataaaataatatcccaagatgtcccgagaccaaccactccaggtcgcgctaccacgacatgtacaacctcatctcagccaggttcactcctgttcagctttcacctttcctttacctacacatagaagcagaactgtgagtcgacagactcagtaagaaaagcatataacatatcatataataccgacttgtatctaggcacccatacacctatttacaaggctcaacagatgagtaagaatgttccatactagggtacaaccactataccacatacactacgtagcttgttgtacgagtgttggtagggtttgtttcgtaccttgagtaccactgagtgatataccacagacaccctgtactttcccgtacttatgccggtatcactataatgtactcttaaacaatattcactataccaatgcactctgtaccataactgtacaag

SEQ ID NO: 338653 - DNA, 1047 bp, Cannabis indica
tccttcagatttggttaccaccgtcttactcactatgattgagtgcttgccttgctatgtgggggcatggcactctatcactcaaggttcggatatggtgaagaataatgaaggaggtgaaatcactattgtaatgaccgctttagtaatttagattagtaaaggcaattagcactaatttctgatatttttataattatttatgaaactaattatttgtgggtccctttgttagaaatgggcattagagttataatttctcaattctcgagatttgattaaactctaggggtattatttgacttatatgtgaattatgttatttttgaaattttcgctcggcgataatggaaaatgcgacggatggctactttgataacatgggtaagtttagaaccttatttcttagtgggatatatattggagaaaataaaataccggggttaagcggggttatggaatttgactattttacccctactcttgagaaataccaaagtataacctaaagggtattttagtcatttaaatggttttgtggctgcctagttgagtgacacatggccatttaatttcagccaaggataaatgtagaaatccatttttcatttagagaaaattaaaggaaaataaggggaaaaaagaccaaaatcaaagaacctctcttccccttcactctctcttcgaaccagccataaactagggaattggtggctaatttctggtgttatcagcaaggaattaaaggagaactcaagttaaggtaaccctagaacctatggttgttgtattttgaagcttttacatggtttgagtttatggtgttaaaaagtaggagctataagggttagattgttgtataattcaaattttaagtttgatttgggttgattatagcttctagcagctgttttggttctgttgtgatgaaactatgcaagtttgaaccttggaactcaagtttaggtctttaatggtatttcttaatttagtgtgttttttgtgatttattggttggaatatattgtgtataccccaattaggtac

SEQ ID NO: 338654 - DNA, 636 bp, Cannabis indica
ggtaaaataattccaacacttaggtatctaggctaaggttaaggcatttatataggaggcctgaaactctagattacaatttaaatcctacaatacttgcatagtttattagatatttacaaaagattaaattgtccttgattttagatattattcagctattctgttgagcttttagggcccaatcgacagcccatgacttgttgtccacgtctagaagtgcccagaaagcctgaagagtacctctggccagccaggaccttgtggaggccaggttggccggccatggtgaattcccaaggctggccggtcatagggctggccaggggtggtcgaccagctcttgaaagggagttggtctgtcacttgatgcacatttgagtgttggggtctccatttattcaagtgctgacttggccttcttattggtgaattgtaatcccacgtggcactgattttgtccatgtaagcatgccaagttaggagaacgtttaccccctaagtccctgtgtggatgtctatacgaatagggacttcactagctacattggtggtagggactactgtagcctttgttgaataaagttaatgcacttttagccttttaaagcactttgtcttgactgtctgatctca

SEQ ID NO: 338655 - DNA, 507 bp, Cannabis indica
aaataaaaaaaaaaaaagttacaataatacaaatttataattttgtcaatttttttatgaatttgaagttttttagatggttagtatgtctgtctcttaaactttttacactatctaattgtgtattatagtatatgacctataaataatactccttgaaatataactttcagagtaatgtaattcttccatcacattttaaccctaaccatgtataataaaatatatatggtaagaaatattaaaaaaaaaaagagtaatttgcggcataaatacttaagttttatgccaagtagcagataaatacctaagtcgtatttttggcggtaaaaatacattctgtcactagtgtagaacttccgtaggtacctctctgttttctgccatataatgtgccagatggcgtgccatatcattaaaatatattccacatcactctcaccattattaataactcattgtatatgtcaaatagatatacatatggcaatatttaattggcccatg

SEQ ID NO: 338656 - DNA, 936 bp, Cannabis indica
aatattaattctaatggcaagttattttctgggctttatgatataggctgcgggagtggtgttaagaccattgaaaggaagattggtgggtcggggccaattggtgttgggccagttcgtaacaatgatttgctaattgcgcctgtggctattattgccaaggaaaaagaggataacaacgtctctagtacctcagttttgagacaggactactatgagcaccttgatgaaaaaagaactcttacaaaattcttacaagctcaagaaggctatctccatgaactggcggagtttgcttctcatggccctattaaaagaaaagcgggtctttgtgacattggggttcaaccaacttcggaaactactgagagaaccactctggtgaagaagcgaagactagatgttgagtctcactcattaaagaccgtgcctaaatggaatttaagaagagttaagtgtgtggttagggattttccacgtggtgttggtcccagagtcaatgagccggatggatctagtgattttcctggtgattctgaggagccgtctttgggtgatgggagttctccaatgaccgtctctgctggtcactcccattaggtagacaaaccaatctttgccggtcaatccttgagactcacggcttggaaggcgagggccaggttgacggatattgctatccctgagaaggatcttggtattattgatgatgtgggcttggcagtgggctctccttacaacaatttttcccctgtggaggaggtggacaaccctcctccacaagagccatgagaggcattgcttgaaactgtacagggtgggggcagacctctacagttctggagattaaagcactagttcggtcgtgctcgcctgacttcttattcatttccgaacttaaaagcgaccccgctcacttggtacgttctctaaaaa

SEQ ID NO: 338657 - DNA, 1543 bp, Cannabis indica
gattttattaaactctaggggtattatttgtcttatatgtgaaatatgcaattttgtaattcttgcttggcgacaacggaaaatgcgatggatggttagtttaatcacatggataagtttagaaccttatctcgtaatgggaaacatattggagaaaattaaaatatcgggattaagcggggttgtggaatttgaccattttacccctagcttaagaaatacccctagttttaagtaaaaggggcattctagtaaattaccaatgaagtgagttggtggctgccttgtatggtgacacctagcaaattaaattcagcgaaggattaattagaatccttttcatttgagggaaattaagaaaaataaagaaaagttaaaaattgaggaaactcattcctttttcctctctctttgcttggccaacctagaccagaaggaaaccaagctcatcaccattatttttctgaaaattaactaggaattcaagtgttcttggagctaaggtaaccctagaacctatagttttgtgttttaaaacttttactttggtttcatgttgtgattttgtgatataggcgctgttagggtttgattcttattcagttcgaattctagggttaatttggattgattttagttattgatagctggtttggttgagttgtgatgattttatgcatgtttgagcttagaaactcaaagcttaggtctttaatggcatgtttttttttttttgagtttttctgtgaaatactggatggaatatgttgtatatgcattgcataggtctgtgagttttttttgagtttttttgagttattgatagccagttttaccagtacccgtaaaaccagctagccagttttggcagggtccccaaacgcttcattttctagattcttgtccatttcagtgccgtagttgggtgtttccctatttccagagttagagtaacccttaaagagtataacagaacctagggttgtgggtttgggtttcacggattagggtttttgatcgtgtgatttactcggtttcattatgtgattagggcatccatctagcgtgagactttctgttcaggtcggccagcacacttgaatctgggaagaaggtaagaattgtatataatgtgtgatatcaatatctgagtgcatgtatatgttatgtgtatatgcatgcttaaactgttagttgcactaccaacacttgtatagttaaggtatagagtgcatcggcatagtgaatgttatttgagagtgcattacagtgataccagcacaaatacaggaaagtactgagtgtgtatggtatatcactcaatggttctcagggtatgaaacaaaccctaccaacactcatacagtgaggtacgtagtgtatgtggtatagtggctataccctagtatggaacgttcttactcatctgttgagccttgtaaataggtgtatgagcgtcaagatacaagttggtattatatgatatgttatatgcgtttcttactgagtctgtcgactcacagttctgcttccatgtgtaggt

SEQ ID NO: 338658 - DNA, 615 bp, Cannabis indica
gagaggaaggtgttccgggaggaggccgagcagaggaggcttaggcagagcagaggcatcaagaggcactaaaggccaagactaaggatgacgccctgaaggcctgagatgaggccatggccaaggcaaggcgcgagcttagggaggctaaggacgcagttgaagatctgactgccaagctgaagtccctggaggagctgcaacaggctgacttgcagtcgacggccaacttaaccgttgaggtgaaggagctcagggatatcaaggatcaagccctaaagaaggcgaaaagagatgagctcctgatccccgttacctgccagcacggcaccaaaagcttcgatgatggcgtctttatggcctggcagactaatggccaaaatcttaagctcgacttctatccaaagcctgaagaggttctcgtccacttctcggagaagaagaagagactcgatgccttgctagaggagcgcagggggcctcgtcttccaccctgcattgattaagccattcgttgatcaccattgctattatcactatctctttctttttcttttatatatttagtccttcttcccccctctaagacaatttattatatattttcttaagggg

SEQ ID NO: 338659 - DNA, 712 bp, Cannabis indica
tggtaatggcctactccccttgtattgtattgattgacttgagagaaaggaacacaaagtgttcttcctcttgaaagctcttacaatggatctctgagtatgtttctctcttagatcactctttcttctctagaatgtatttctgcagtaattctttcgatgcctttcatagtgagattaggccactattcatagggacttaatacatgagggatggtttcccttttgcttataatgaataaaataagaaactccattaattctataattactattcaagaaataggaaacttaaaatatgttgtcgttattctccgactcaatcccatgattatagggattgtctttgcatctggacacaacgagaataatctttgaagttgccatctctcgtacttcgctaggcacaaacatgtcccaacctcgtcgaacatcttctccagaatcctgttgggataacagatgctggttattcatttataggctacgagggatactctcctccgtccaggtatactactacaaaaattatgtttaacaacacttaatcaacaacccttgaatagatcgtgtttctaatttatctatttttataattacacacactaaaagaaaaaatgttgctgaagaacttatatttttcaataattaatctttaaaaaataaaaataatagtcaatagcaacacctgttgataaatgttatcaatact

SEQ ID NO: 338660 - DNA, 921 bp, Cannabis indica
atcgacgacatccttgtgtactcttaattagaagaggagcatgaacaacatctccggatggttctgcaacgacttcgagaacataagttatatgccaagttcaaaaaaagtgcaaattttggctattttaggtgtccttccttgggtacatttttagcaaagatgggatcaaggtggaaccaggaaagatagaatccgtcagagattgtccgggaccgaaaatagtgacagaagttagaagcttctttggtctggctggatattatcctcggttcgtagaagggttttctaaaatttcaatacccttaaccgagcttaccaaaaagaatcaaaattttgtatggacggataaatgtgaaataagtttcgggagctgaaacaaaagttaatcacaactccagtgttagccctaccttctgatgaagagaagttcgtggtttatcgtgatgtatccagacagggtctggggtgtgtactaatgcacgtcgatcaggttattgcctatgcctcccgtcagttgaaagattatgaacagcggtacccgactcatgacctagaacttgccgcggtagtgtttgctttgaagatatggtggcattatctctacggagaaagatgtgatatttatacttaccataaaagtctcaaatatttctttactcaaaaagatttgaatatgagacagaggcgttggttagagttggttaaggattacgactgtgagatcctttaccatcctgggaacgccaatgtattggccaataccctgagcaggaagggtcccaggtaggtaactagtacgattaagatttcaccccaggtaggacatggtcagatcaagcatcgagtttgttgtaggcaaacttcataacttgatgctacaacctgatctgttacaacgtattaaagttgctcagttaa

SEQ ID NO: 338661 - DNA, 669 bp, Cannabis indica
aaaaaaaaaaaaagactaaaaagttcttctaaatgctgaaacagttagggattacactaacgtattcttttagtgaggtgcattgtattaaaattactttacctaataagttatatattcatatgtgtgtatatagatagatatgagtacttttcagattaagagtttttataaccttaattttgcactttttctagttctactatacatgacttatattaattaattaagtttgaatatttgtccttaagtttaattaattatataaaactttccctcagtttccaggaaagtgattgatgaaatcatggaaagaaaaagataaatggacggtttggcctgaggtggtctaaattgaggggataacatacatagccaaacacaaaatatttagtacaatgaaccaacatatattatatatatatatttatacatatattgggacacgattttgttccgtgatgagaatgtattctgtgatgtacgacagccgttaaatggggagttatttgatctgagaactgggattgatcaagaggtaattagggttgaaaaatggcaatataccctgagacccatctaatgtaccatataatacattccgtgaaagtacatcacgggacaaaatcgtgtccctatatatattagagtaacttacggtttaaatat

SEQ ID NO: 338662 - DNA, 822 bp, Cannabis indica
ggatttgcgaggctttaaaactgacgcaaatatataattttttttaaaaaattctaccttttgtcgtcgattttgtaattagcgggggagagagaaccgacgctaatcattacttatttgtgtcgtttttaaaacgtcaaattatttaatctggcactattcacgtcggtcaacgcaataaacagtcgtgttgactgacgtgaatagtgaattttgtagtaatgagtaaactaccatcaaatgtattggctatacatcggactggaataatattcatagtagaaaaattatcgtaaacttatcgtaaatcttttctaagtaaatatcacttagttgatcttagagcaatgatcttaattctaagatgattaagttctgatttaaatatatacatgtgttctttgtcttgtttattacagtcgacatggtattacaattaagtgggagccctaatcgtaaaagtagaatcaacaacttctatacatacttaaaagtgaaatgatgatttccttagagcttggctaacacataaatgagagagctcttatttcagtaattatactagtttacaaaaatattatttatatgaagttaagtattttacagataaaatacattgaagggtaatggtaattttagtccctactcaatgtaaattatctatagatgatcaattaattatttgattgaaataatagataactcatagtgtatccattcttagtgaatagaacgctctatgtaatcaagagtgtgttaggaatattttaccagggtctagatttactaacaagtatgttgaattaacatcctaaatatgaa

SEQ ID NO: 338663 - DNA, 607 bp, Cannabis indica
tttccattgattgtcctttctcgacgttaagtagttaatttccttctttacgtgcacccaacttatctgctcactcctcaatctgtgatccgtcatcaattccatctcgcggtcataaaaaatgatcccattttaagcacattcaaatatatttttaatgaacttgtcattttatatatattattattgcttacatgagtagttaaaatttctacccacgtgttgggtttaagtattttttcaagacatttggatgcctcgtttaatacttcctcccagcgcgaactgttagtattcagttttatgcgctagttgtaacttatgacttttctttctcgtcagataggttataaatcaaaaattacaatggtttgatccctttcacgtcagaaagatttgatcaaggtgttataacgattcgacccctcttccgtcgaaaaggcttggtcagggagttataacagttcgaccccttttctgtcaaaaaggtttggtcatggcccttttataaagttttcaaaatttggaactatgggtttgcattgttgtaatgccctaaataattaggcacgctacccaaaaatgattatgaaaccctaatccccta

SEQ ID NO: 338664 - DNA, 593 bp, Cannabis indica
tttgaatttccttttttgtttaatttcccttactaagctaaaaatgtaaaatttaagtctaaaatacctattatagaaaaaatctcttaaaacaacgaataatgttataactaaatataagtaattttttttttttcatatttacaactcttcctatcaattttccacttgattcaaaatcaacataattcctgttctcttattatttttcatgtcttaatataagagatcatataagtttttgttttaacatgtaaaactctatttttttacttgttgaacagctagtgcagtgtataaaaattcataataattttagaacaacataaaaccaacttgattttatataatattttaaagttgaaataagatgttgctaatatctttaattaatttatatgttatggttaagttgttttctagttggttttgtgatgttgtttagttgttttgcgctgagaaaatacacgttaaaatccactttgtccgaattcgccacgtggcaaccactgctgcgttctaacgctacagtttgtgagcgtcaggcaactatgaagactttgtccctcactcgcccacatagccacatgtgt

SEQ ID NO: 338665 - DNA, 1315 bp, Cannabis indica
tcaagaaggaaaatacctctggccagagtttagacaaggggaagagcattgtcgaataggaacttgcccaaggcgggaatgaagacatggatctctaacttgggaaaacaaatacaaatgtcgggccaatagaagaattagaagaagtggaaattgatccaaatatctcgaccaggaagttcaaaatcggtgaaggcttgctactcaaaataaaattgtgtcttaataaaatttctgagaataaatcttgacatttttagctagtcacatgaggatatggtcagtattaaccccactgtcatgtctcacaccctaaacattaatccagacttctgtcctgtccagcagaagagaaggctattggacaaagaacgtgcacaagcactaaaagaagaggtagaaagactacatgtaaacaagttcattattgaagctttctacccggccggcttgggtggctaacctcgtactagtacccaagctaaaaaataatcgcgagtgtgtattgacttcaccgacatgaacagtgtcccaaggactattttccactcccaagaattgatcaacttgtggatgtaacagtcgggtaagaaatcctaagctttatggacgcatattcggggtacaaccaaatcaaaatgcatccactggaccaaaaacatacaagcttctgaacagatttgggtctatactgctataaagtgatgtcgtttggtctgaagaatgctggggctacctatcaaaggttagtaaacaagatgttcaaaatcaaattaaacggaatatggaagtatatgtggatgacatgctcgtcaaatccaggaaggttgggggcacatagaggatttggatgaatgcttcaaaatcctcagataataccacatgaaactcaatcccttaaagtgttccttcggggtcaactcgagtaagtttcttggatttattattaattctcaaggaatagaatccaacctagagaaaatacaagccctcctagatatgaagtcgccaacaaaaacaaaggaagtacaaagcttaactggttgaatagatgcactgaacaaatttgtttcaacgtcaaaggacaagtgtgttcccttcttcaacatcctccaaggcaacaagaaatttgaatggacagaggaacacaaaaatgctttccaagagctaaaaagacaacttgcaaagtctcttatactctcaaaacccttagacggagaagaattagggatgtacttagcagtcactgaatatgctatgagggtcgtgttgataagagaagaaaatattgtctagcatccagtctactatatca

SEQ ID NO: 338666 - DNA, 517 bp, Cannabis indica
tggcttgccgactacgatcttcgatctctgcatggtgaacccttaatgcctccatctctttatctctccattcatcgaacgtacgaatttgtttttcaaacgcgagatttattgaagcacgcagttcgtcctgatcatgatgtagagtgttcttatgaccctgcatgagtccgagcgcgtcacagagattttgcaattcggtggcgtctccgatggtcgtctgggcgttggttccaggcggaagagtcgtattatgaatgcccttgttgggtgcggaactgttatttccagtctcttgcacactagacgcaattccagtaataggaactatttcaccttttcccacgcttccagtctgtccgggattaacagcaggcagaacccttgaactccctgggtcctgtgatgtaggatccagcgtctgtgaatttgctaggtcagactgacctctacgagtttgcaccatcatgttggcggttggatgtcgaataaagagcgatttgtgatccttctctca

SEQ ID NO: 338667 - DNA, 432 bp, Cannabis indica
gtaaaataatttccaacacaccagaccagacatagttcatgctctaagcatcctaagtcagttcatatccaaactgtgcattgaacattggaagaccctcaaatggttattaaggtacctaaagagcacttagaattatggtctgacctataagaatgcaaaaggagaactagagttgaaagggttcatggatgatgactatgcttcttatagagatactagaaaatcaatcatattctacgtgttcatgacaaatcagaaatgtatatgctggaaggcttagtaatagtacacactaaaagaaatgtatatctataaatttctaaaccactccaagtcttttgtctcaacctgtttcggccatgtactatatattctatgctttaccatttctttgactgtacaacttactctatttacatcctcatcttt

SEQ ID NO: 338668 - DNA, 639 bp, Cannabis indica
cccattcccattccccggcccactcttattcccattcccattccaaggcccattcccattcccattccccagcccattcccattccccagccaattcacattcccattcccatccacattcgcattcccattcctattcccattcccattcccattactaattctattccgattcccattcccattgcccagcccattcccgcttccaatccccattcccattccctgacacatgcacattcccattccccagaccattcccatccccattcccaaaaccccgaaaccctcatggcacgtttactatacagtactcagaatcagaataaagtaatggagaaatgtaacagaataaatgaaaaataatcggaatcaatatttgtaatatgttaattactaatctttttttggaaatggaatagtagtgatttatattgtttactttattagaaaacgtaatcagaatgcttaaattgactaaattgctcttttgagttaaactatactatatggaagttattttgtaagacatattttaaaggacaaaattgtcattatatatttaatatcaaaaaatacaaaattggtgggggaagttctcccttttgtttctccgttatttaattaagttctcccttt

SEQ ID NO: 338669 - DNA, 634 bp, Cannabis indica
ggacggaggtgtgcagagcaaaacggaaccagggtttaggtagtttagccgccaaaaattcggtttttgtggttaagtgttacaaattgtaaagttcaggaagtttagccgccaatatcccttaaaagtaataatagaattacttttcaatattttcatacataacgtgacatcaatcaattaaattttaaaataaatttccttaaaaaaataaatttgaaatattaacaaaaataggaattttgtatatggtaattaatctatatatttatataaagaaaatcccaaaaagtattaagtggtattctatatgtttttttttttactaatttttgaggcattatatgtatttataatgctattgttagggaaaatgagatggcattctaatttttgttctttttacacttatctattttttccatttttttttaattttttgctaacttttattttttttaatttattaatattctattaataatagtctaaacattgttatatattgatattcatttattatagtactcatggtgttggagtttgactcaaattatttagggataattatataagtcaccatttttttttcaaaaaagttatatttttatgtttaaatatattttttttttac

SEQ ID NO: 338670 - DNA, 1040 bp, Cannabis indica
ttaattttagtcacaagttttgttgtgactaaaagtaagattttttgtagtggtagttaactatttaaactttatttttggcactataaagtaaactattcgcaattttctaaaaatttataaataattttaaatagctataacgtacacgatcataaaaaaaataaaactaaaaaactatcataaaaatcgaaataaataaaaatttactagaacaaccttttaagaggaatctactacaaaaattttctataatttatatataaagatataatgagtttcttcttttagatttattattattattttttaccaatttattaaactaattgcaaaaagattcaattattaatgtaatcttaatcctactttaagttaggaagtactatctctttctttattgaattaacgaaatgagtaaaaaacaccaaatgtacatcttgaaataatctcggaacaaacaatcaatttcaaaatgttcttttttttcttgattcataggcaaatatttttaacacaattgtacttctcaatacatgacaagagcaagtttcatctcaaataaacaagaatttttcgctaaatccaactctcactcgctaaattgagctatatctctctttcttttaatacttgaatattgattattacaaccaaatttactttagctctttccaaccttatcacactacaacaaaaagtgttattagaggcgagaaaaatcctaatacaccttgtattagcagtagagtaggagcctcgctattattaatagtttaaaataataaaaaaaaaggctattataactagggtacattattcaatccaatctaattgaaccgaatcgatccaatttaatctaattacaaaaaattggatatccaattacaatgagatgttaaaagttggattctaattgaattggatcggttattggatatcaatctcaaaattcaattacaaactgatccaatcaaattacatttatatatattaaaaaattatttatataataaaaaatattgaaaaatataatatat

SEQ ID NO: 338671 - DNA, 782 bp, Cannabis indica
tgtcagggcattacaagagggatggccctcaactcagaaccgaggaaccaaaggcttcggcgaaacccactccagcaagggtgtttgccattactcaggctgatgcagaagccagcccatcagtggtgacaggtcagctctcggtcaacaactctttttactctgtactgtttgattctggggccactcattcatgtttggcaaccagaatctttagtaaattggatagaccacacgatagttatgaatcagggtttcgaaccctattacccggcggagagttagttatcgccaaaaggtggttaaggtgtatgccaatcaggattgacaatagggagttaagtgctgacctaatagagatgagtttagaagattttgatattattctgggaatggatttcatatccaaatattctgcaagtattgactgtaagaggaagatggtaatcttccaaccagaaggtgaggaacggtttgtttttgtcggttcggttcagggatctcgcatcccagtgatttcggctttgtcagctaaagaattgttgtgtgacggatgtctagggtttctggccatgatagtagacaccactcggccacactctgttcggccagaagacatcaaggtggttcaggaatttctagatgtttttcctgaagaacttccaggtttaccacctcagcgagaaattgatttcataattgaatttggcacctggagtggaatcagttttcaaggctcctatagaatggctccagctgagcttaaaaaaattgaaaaattc

SEQ ID NO: 338672 - DNA, 968 bp, Cannabis indica
tttgtagcagacttatatggctaaattgctcatgggcttattcagacaagactaactgaagaaaacttgtttagaaatgtaaccgctatttaagagacgtggaaaaagaacgatcaaaaaccaaacagaataaaatatgctctagaaaaacacaagttgggtgtatattgtttcacacaaataattgaaaaaatggggaaacagcagttggttggggtcgtctctagactgttcagtgtcttacctcagatagatagaaaacctttccaaaaagagcttgaacagctagttttctcttgaaacccttttcagtgtagcctgacaaatccatcacaacaggacctggagttcataaacaagctatcagcacattgaattacagagcccaaactatatccagttttgtctagaggcctggggacaataaaaggaataaaaaatcagacagcactgctttaccaagaatcataaatttagagcagcaatcaaaccgataaagaatgaaagattgaaggtacaacaagacatggtggaaagtaaaacaggaaactaagcattaatactcataaataaccttcctactttggttagcttccaagtcctgagttctttgaaacgtactcggctatttaaaataaacaaatctaacagacttttcccttcttttttttttttaaagtaaatggtagcaagaaatacaagtccaatgagtcggaacaatcaaatatgatgggcagctgcattagaaaaaactaaaacacaactcgaagtgcaattcagaagcagcaacagggaaggaaaagtgttaagaaaagaaaattcccaattcagaaaatataatacacaagaggctggcgtttagtaagaaaatgttgcatgccgcttatctcaaggtagcataactttgttatcattaaactttaagggaatgtacgtaataaaaaagagcagttctattacaccataaa

SEQ ID NO: 338673 - DNA, 1325 bp, Cannabis indica
aaatattaaattaaaatttatatttagagctatctaaattagtaaatttaattaaataaatatattaatatcaaaaataaatagattaaaatatatattaaatgaaaataaaactctttaaaataataagttttagttataaggatattcggtctccattgttagttctacatagttcttattttagtgagattcatccctaatagatgttcgttcattagcaatttaacgtcatagaatctcgaaagataagtattattgtaagtgttttattcttagtaacgtccaccccaatagtggctggtaagagtagggcttacaaagtatgaaacaatggtagaagctcataaggtagaatgaccttgactctcacctaaacgggacaacacgggattcttatcttgaaagaataaaaggttggtagaacggtatctatttttaatgagttgactattctattcaatgaataatatctttgactctcgcctaaatgggacactgtatcagtttgttagaaaccttagaaattatttaagaacatgtctttattacatgataaatgtatgataattttcaaatgtgtatgaatttatattgaactatattattttctattattaaagttgtagtataaattttgatcttcattgttggtctaacttagtttgttgttttaatgggacaaatctcaaaggattgctatccatttgacaaacataatagaattagatatcgacagataagtatttataaatgcaacatctaattgtacatctgaagatgacaacttagactagtgtttacaacatgaaacaatcaaaaaaatcataaaataagaatcactttgactcccgcataaacaggacatcattggattcttattctaatcaaaattatcctttattctcctattagctttttcattaagaaattgcttagatagtatgtcattggatagaaggattatacattatttgcttatgatgtcattctattttcttctatgaaattgaatggcgcagatgactatattctagatattctatgccaaaatgatataaatcctcgatcttagaaatctcctacttgtatatgctaagttaaggcaatctaaacttaaagttagattagtagtgatggttcaagaaagaatggaaactcgagaaacatttggtattaatttaagtctttgactttattttagattccaaatagaaattttaaatttcagtttccaaaatacattggacaaaacaatatgactttcacaagttgttaatatccatcttctgtcaatggatttgaactatatgttaatgtatgga

SEQ ID NO: 338674 - DNA, 779 bp, Cannabis indica
gaggacttcgacaatgtgtgatcggatgaatgagattcatcatgatcaccaaacccaggtgttgaagaagcaattggagaagcaacgacaggtggagaggcgagattgatcactgattttcgagcttgggtcttcgattttctggcagatttcgtcggagcagaggacgaaccaggagctccggtcgctggtgcaggcggcgcaggaggggtgatcggagatgcagaggcagagccacgagagggcttcttggacggttgggcattcttagttttggccatttctctttgaaaccctagaacacaaacactctcacactttgaaaaaaaattagacctttgagaaaaaaaatagaaagagaagagagagtggtgatcgtgggtgagtgggtagttgagaatatatacacatgattttacttacccaaaatcagaaaaaattgaaaaaggaaagtaacttccttaccttagatacacgtgtggagaggaaaaaggaaaccaacaaaggtttttcaaaaaatggtcaatgtttccctaaatggaaaaaggaaaccaaatatccccacaaaatctaagtattaaaaaacccaaccaaaatcgaaattgccaccaaaaaggaaaccaaaataattaattattgaaggacaagtttcctaaaaacaccaaaataaggccaaatctccaaaaataaaggaaacacaatataaagaatacaattaaaacatgttttcacacatgaaaaaataaaagaaaaaataattaacaaagaatcgaaaaaat

SEQ ID NO: 338675 - DNA, 620 bp, Cannabis indica
tttagtttttttttttttttttggggggtttttagtagtaattattttgggtagttttggaagagaaaaagagtaaagaaagtattttgccttttattttgagtttgagttgagactacaataagggtttttgcctagattgatgtcaaagaaggcaagccataagaaaaagaagaagaagaaaaacagaaataatatgattgaattgaaagaaagttttttattagtttttcagcttgatcataataataataataataataataataataataataataataataagggatttttttaattattactcttcaaaatatttttactgaaattcacatagcaattaacggaataatttagattgtaatctaaattcatatagcgacaattaaggacaaaatctatggtagttagtttttaatggaagtggaggattttaattattcaaccagtttaatgagtttttatttataaaaatatagattactgatgtttttatttattttttggtttgtaattttgttattatttttttattattatttgtatgtcgtttttatatgttactgtaaaattataattgaaaaataaaaaatcataaaattgtaaaaatattaaaa

SEQ ID NO: 338676 - DNA, 651 bp, Cannabis indica
aatcaacaatccaaatggatttaaaacaaagcttaccttcgttccaattgtctagaagtctaggacatctttcttccagatgtcccttctcatcacaatatgaacattgaagagtacgactatccattatttcaatgtttgaacttgaagaagcagcattgttagaagcatcatacttaattattttcctcttactcatgtctgcaaaactggaagatggcctccttgcaggcaaacaacgttcgtaagcacgcaactctgcgtccagcttatctacgttggatgacttaaaattgttgaccatgtaggatacaaaaaatccattatactcagctggaagactattaagaatgaattgaaccaatttctctttgataaatcaattcccaacaaattttttttctgaaacttcagattcccaacaaattaatgctcttaccaggagacattttcacactgtagagttcatttgaaaaggcatatacaaggtgaggttcgaggtgtgggttatccattttgacactacaaaaatcaataaacataaataaatcatttggctctcttaaattcatacacaagtttagaaaataacaattaagtaaacatgcttgtaaaaataccaaaataaaacatattcaattattttccaag

SEQ ID NO: 338677 - DNA, 664 bp, Cannabis indica
gaacagtcaactcgcagatgcggaagacgcatacgttgatgaaattagtaactgtcattcatttattaatgttaacgttgcttagtttaaattattgtaatttaatgtgtaataatggattaacaatgaatgcaatccttgtataactgatcggacacctgcttagtatataaaggggtgatccaccgtgaaatagcacctacgaatctcttgctacagtggactaagcagactataatctgactgaaccactataattctctgtctcattgttattttcaagtttttggttaattatttctcattcccagttgagtattcgccattctaggttgaatactcgcacttgtcttttcacataaattgcttcttttcactaataatatcatataatttggtgttgcagaattcactcgaaaacatttggcgccgtctgtggcaatcagggggtttaaatatccaaatccctcattaattgggatcacgacacgtggcagttggaatacctagagttgccaatccaacggccagaaatggccacgcctacacagaaaccgaagagttttgtgacgtggcaccataaatacaataaaagtaatgattatagccgtcatttttcgaaaccctcgaagggacaaccaaaggtcacctcctcgtgacaacc

SEQ ID NO: 338678 - DNA, 1003 bp, Cannabis indica
atgcctcatatgcatgcctgaagaaaagcgatcaacaatccgcgtagagtggccaacacttagtgaattcagctttcgcatcgcgagtcatcaaagaaatccgtataacttggggattagattgcagagatatggcaagctgtccaaatcccacaatcagtgtattttgtatttatcatgcaatttttctgcttatatccattgtaacgagaagggaaatacttcctctccatgtttatagccctataaatagtgatgcatgctcactgggcaaagggtcaaaagattttacctaaaaggcatcatctaagaattcataatcagagataccgttgtaagagctattagaaaaggaacctttatccttgttcttgagtcaatcccaataacgaggattaggctattaccgaactgctcggggctgaacctctataaaattcttgtgtctttacattgctttactatatatcaatcgccataaattacttatcgcttactaaactagactcattgttgttggctaaaagcgaggtcaacattttggtgctttcattgagagcagaatcaaggatcgctcttcattcaaaatctaaccacaagtacgatggtggtacagactcgtaggggcctggttgatccagcaaatccacagacggtggatcctgcattgcagaacccaaaaacgcaagggttccgccagctactaatccggaacagccggcgaacgtgggtcacggtgtaacgactcctgtagatgaaatcgcacctgatgtgcaagagactaggaataacagttcagaacccaaccagggcattcataacacagccgttccgcctgctaccaacactcaaacgaccattggagatgatactgagatacaaaacctccgtgctgctcttggactcatgcagggtcataccaatatcctatatcatgatcagtaagaactctgcgctgcggtaaatctcgcgttcgaggaacaaagtgttggaaatattttac

SEQ ID NO: 338679 - DNA, 614 bp, Cannabis indica
gaaagaggttaaattgtataccttggtttgaagtacactaaatcaacaagattcactagattaaactaagaaaaatccaactccttgctggtctttgatagctcgagagaaagagagaggataggtgagactcttctaggtttttcttccactttctattacttagttgctttaggataattatgaattaagcattactaaatataacctaaaatcagctcatttatgccctttgacataaaacaaaaacaaacatgccatataagggaaattcggtaaatttccaaaccccgtcaattaccatatattttcaatgcctaaccacaatgcctcgctatctataacattctaaaccataaagaaacgtcactctctaatggcccaacgtcgtcttccactgctaccgaacacaaacatagaaaattgagaaattcacatatagcataattaatacattctgaatttaaataaatctccacaaacatgtaaatcataattaatagctcaatattataattaactctaattatttaataatccaatatattgatcttaagcggtctttacaattatccctccacttaaaggatttcatcctcaaaatctaacttgaa

SEQ ID NO: 338680 - DNA, 735 bp, Cannabis indica
agtaatggtttacaataagtacacaattattccatcattctaaaatctcctatcactagggtatttcctagaaggacttaggcagctattcgtgactaatcatagacctttcactttcatcaatatgtaaaccgaatttctagggaggtaagtttggatacaattcaaaaattcaacttaatgatctttgaactgcatatctacataatatttctccaccttaattcacaagatctttaaccacttacattaatgtttttcaacattgctacaaatcatgaaatttcttaaacatttcaaattttttggcttaaggtgaaatcgagagtgattgcttaagaatataacaaaaactcatatctacccctaaatatacatccatatgtcaaatatagatgatcctactttcaagtggatatatgcatactttttctttatagagaaagatcttgtcaaaactactatgaacaagatgtaaatgtcttagaaatatataagaatgtggttgtggtcttttgatgacttaggtctagttacaataaatacttcttagaatagtccatgtggatcttggtcacagaatacaaaactcatattccatacattaacatagagtttggattcattggtagaaaatagatattggaacttgtgaaagttatattgtaatgtgtaattcattcttggaactgaaatttaaaatttatattaggaatctaaaatttaaagtcaaag

SEQ ID NO: 338681 - DNA, 1592 bp, Cannabis indica
tattacctttgggcaaataaatttcttaaataatatatattaattcaagcaaaaaataataaatatatatttaaattattacctttgggcaaataattaaaatatacacatttaatattaactcacttcatggaatgtgaactaatatatataactactacctttgggcaagtaattacacatatagccaaccaaaataaatattttctataacatatgaaatttggtgataaaataatcattaaaaatttaataattttcaaccaaatttccaaaaagttatatataaattgcttgtaatatattgataatcaaaaataaagtatccaccataacacattatttttgtatcaaacaataaagttttacaaattgtagaataacaaataatggaaagatgtgaaacaaagaatattggtggagattacatagtcaagataaatcaaataagagagtgactatgtcaaacagaacgagaagaaactcaatttttttttttatgatttaaggatttcgaaaaatcatcaaaaattatttttaataattttttaattgcataattatcattaaaatagtaataattaaacaaagtcaaaaaaattaattaaaaatcacgaaaaaatcaaaaattaaattctaaaattctaatcacattgaaaaaaaaatgtcgaaaacggagtcacaaaactacctcactctctctcactctccggcagctgcgagtgggcttcgtcccagcaggttgtcatcaacctctagcagccacctccatggctgtaaaacgggtttgtgcgacccggttcaaacccgtacgggtcgggatgaaattttggccaaaaaggtgacgaaacggacgagaaaaatagggattttgaacggtttacaatttctaatagatctatgatattaatttcatgtaaaaacacataaacttaggtagatctaatttaaaactaatccgagaattaaagaagcaaagtaacctgaatatttgatccaattaaaaaattaaacgtgtagaaatattttgaattatttattgatgagatatgcacaatcaatttcaaattataatcaatataaatgaaaaacacaaaattaatttcataaagaaaatatacaaaccctaaaatttttaaccttaaaattcttctaatttactcaataattttatgtaaataatatatcaaaagaaaaagaatttaatgaggaataaaacccctaaacttttaaaattgaaaaataaaaaataaaaaattcaacataaaataataacgaaattaatatgtaattgaaaaaacaaatacatattaattgttatacaaattataggttctaaatcatatacaatagacaatttgataccacatgttagataaaataataataaacccaagattaatttgtatataacatagaacacaataataatatataacaatttggtacgcgtacctgattaatctatagcaattaccacaatttgatagtgcaatactatcaactaattaagtcttaggtctttaaatcataagcagtttcattttttgattatcaaaaatatacaattgtgatgagacaatatgtattta

SEQ ID NO: 338682 - DNA, 1155 bp, Cannabis indica
ggaatctaaaatttaaagtcaaagacttaaatgtataccaaatttttttttgagttattattctagcttggaccaccactactaacctaactatatggttaagttgccaatggtaagcatatacaagtaggagattctataagatcgaggatttatatcatttcaggatagaatgtcgggaatatagtcatctgcgccattaaatttcatagaagaaaatagaatgacatcataagcagataatttataaaccatttatctaatgatatactgtttaagcaaatttgaaatgaaaagccaataggaaaactaataaaggataatttcgaataaaataaaaattcaatgatgtcccgtttacgcaagagtcaaagttatcattattttataaatttcttcaatgattcatattgtaaacactagtctaaattataatctttagatgtacaactagatgttacatttacaaatacttatctgtcgtgatctagcactattgtgtttgtctaacggatgaccatcctttgggatttgtcacattaaatacaacaagctatgctagaccaacaatgaaaattcgaaattatactacaacattaataacagaaaataacacggttcaatataaattcatacacattaagaaattatcatacaaattgcaagtaagaaagacatgtaaagatacataacaaacacatcttaaataatatctaaggttcctaacaaactgatacagtgtcctgtttaggcgagagtcaaagatatcattcattgaatatagtagtgaacccatgtaaaatagataccattataacaaccttttattcgatcaagactagaatccagtgttgtcccgtttaggcgagagtcaaggccattctattttatgagcttccaccatagtttcataccttgtaagtcttactcttagcagccactttagggtggacgttacgaagaataaaacacttacaatattacttatctttcaagatctacggcattaaattgcttttgaacgttcatctattagggataattactcactacaacaagaaattatgtagcaccaacaatggagatcgaatgtccttataactaacttattattctaaagaattatattttcatttgatacttattttaatctat

SEQ ID NO: 338683 - DNA, 817 bp, Cannabis indica
tgcccacaaccaggctgcaagcagccatgatgcgtgcgtgaagatggactttgcaaggtcctttgtgcagcaaaacacggagtgtgcagcctctgtgtgcacgagacgcagcgtctcgtgtctgaagcctagggtcatgcccagcattcagataaagcttgtccccttcacgcgcgtgcaagagcaccttgtccgagtgctcctgtgcgtgcgattgaagcatgtgcatccggattttcaaaacaccataactttgtcaatttttattagaatcaacttccctaaaaatcaaaattgcgtaattttttttacaaggaatccaaataaaatattttcagaacgaaaataaaattatattcatggaaaaaattcgtaattcacataaaattatcaaataacacataaaccaacatgaacacatctaaatcaacaaaacattattttgaatccatattagatgaaagtaaatcattaccatgactatgagactagttgttgggattattttaccaggatctagatttactaacaagtatgttacactaacatcctaaatatgaattttctaatacgatttaaaacataagagtttagaagcacaatgaaggaggataaaaatcactatagaaggtgtctcccatctactagttgtctgacagagttagaaactagatttggtaggttgaaagtgttggatgagatgagagcatcatgtcccttttatagtatttcagctagggtttaggtttgaattatatggactaaaaaagaacaaaataataggcaaaaaatcactagagtggccggccacttaagg

SEQ ID NO: 338684 - DNA, 1157 bp, Cannabis indica
gaggattgggattgattttgaaggtactcgtgtcgcgtgacgatagagacagccctaaatcaaaatgtatgtgttaattgaatttttgaattttcgcttttaaatatcagtagtttaattaatgcaataacctctcttggtttgaacaattagttttgatcccaatattatgggtctgtcttcgattacttctgctatttgtaagcattcatcgtggactttatgcccccacatcgtcaaacatactggtttgaagctacaactttgtaaagaaataaaaaaatgtattagcataaattttgttaaatagtatttaatatatcgcaataaaaatgaacacaagggtgtatttatagtggtagattaaatgtatagtttacctttcatcaattaaatatatctcttgaattgtatgtagtccatagggagtgttgacttcttttggtgggttcattttgagagcaatagccaaaatatctaataaattgaaatattaaatagttagtcaatgaggaatatatatttatgaaaatcaaattgtaaatacctattggtttgctgaattctttaggtgtatgcaggtcgctaaacggaatgaaatcatagtttggtgctgatatctggttgtcttctgtttggatttcttcgatttctgttcttgagttcactgtccaagaatatttgtagtctcgctttttatcgaaaggtggggctgttttttttacataggcgttgctgatgtagtaagtgtggaacacttccaaagtgttttctctagcatcaatttcagtgccaaatattactgcttcaacatcattaccctgtgttcatttttaaggaaaaaaatatatttatgaaataataatctgttgcagcgtgtttatagtcagaattcggaaaatatagcatttattagtagagtattgacaatttcaacggtaaataaactaattgtatacctttttatctgctaacataagcttttgatatttgagtggtgaactcttgcttgtccgctttccagatttttctaacactctcatttcaatcttccaactttctgtagttggagtgatgtccttaattgttgtgtatattgtagccatttattcacctgttttcaaataaaacaatagatagacaaaataaaaaatata

SEQ ID NO: 338685 - DNA, 528 bp, Cannabis indica
tccccaatccgcattcgtataagctttaagttgaatctctgatgtagcggggaagaataaaccttgaccagggcaattcttgacatattgaaggaccctttcagtagccttcatatgtatagctttgggagtaacaaggaattggcttagcttgttgaccgagaaggatatatccaaccttgtaatggtcaaatattgcaactttccaatggctctcctacaaagcttaggatcagccaatctatcttcctcatcttgacttagtttcaaattggcttccataggggtgttcacaggcttgcaccccaaatggccaagatcctctaacatttgcaaggcataatgcctttgtgatatcatgattcccttaggagatctagtaacttctaacccaaggaaatacttgagatctccaagatccttaagctgaaacttattgttcaattgaactttaagagtctccatctcaaccaaattattaccagccaagataacatcatcaacatatataagaaggatgatgaagtt

SEQ ID NO: 338686 - DNA, 869 bp, Cannabis indica
aggaaggcccttatcaagttataaaaataactagtaagggaagcctacaagttgggaaggtgcaacgaaaacatggagctcggtctcctaccaagatactagaatggaaagcacctccacaaatactaccaataacaagcatacagaactctactccactgtagcggttctatctgctcaacattagagtacaaaaagtgctagtacccacgacccttcttgggcatggtctcccactgttctccaacagtggcctttgctttggtaggcgagcaggggtagccacttgacatttacaagctaaatttgtgtaacataggcttgtagattcaatttgttgacttcacttttagccaacgacaatgagtctattctataagcgataaacgatgtgtagtaacatatgataataaaacaataataagacacataaattttatagaagttcagccccgagcagttcggtaatagcctaatcctcattttttgtattgacttaagatcaaggaagaagattccttttcttatagctcttacaacagtatctctgaatatataattcttagataataatatagtcttagcttagctgcgtttcgactttccgatcccccatgcccagtgaatatgcatcactatttatagggctgggaaacttgaggaggaagagtttcctctctcgttacaatgcgtataaacagaaagatcgtgggatcaatgctgaatgcaaggatcatgggattgaggctgagtacactgatagtgggatcgtgtgtatgccgtatccacataaattgatccctgagttatagggattgagctgatgactcatgatgcgaaagctgaattcgctaagtgttgattgctct

SEQ ID NO: 338687 - DNA, 708 bp, Cannabis indica
ctcattttacttactttcttgtttagtttttagcttagtttaaattatcacttcttgtttgttttacctaaattgtttagtattgattttttcataattaatttctaatcaatccttgtggagacgatacttttttacttatcattgtattacttgtttatgactacgtgcacttgcgtatatctaattttagcacaacaagtttttgccgccgttgccggggattgatttagagattttttttctggttaaaatcaattgcttttcaatttggtcttttacttttcttgttttcttttacgtttgcttgtttcgtttgagtttttcttgcaaggtacttaagatgtctcatcaacaagtacttactaatttcattcaacatgacttggagcctttacatagagcattgtggagatataaggatttgttaatatggtttcctaaccattgtttgtcttgaagtcttcctaaatgggttgcatccaagcacaagagaatgggtagaaggaggagatggtaccaccaatttctaccaactatctatcgatgaagcctattggatgttagaggacattgtggagtatgatgagtgttgttggaattcttcatcaaccaaccaagtttgggagaacacctctagccatatggagcaaacttttgatagtgacactcaaggaccatgggaagatgatgttgggttttatgccc

SEQ ID NO: 338688 - DNA, 726 bp, Cannabis indica
cttatattccaatataattttctagtacgcattggatgttagaggtcgttacgccaaagaaaattatccatttagaccctattcgtggccgccaagttcctgaacaaattactcaattattgggaaagtaataatttaatgactttttatgtaacaaattttaattaactaatgaattgaaatgctaatataatttttcaaacaaggcattcagatatgtaggggaaacacatgagtatcttgtcccgtggcaaggaatttcactagcaaattgtctaagaaacctaaaaaccaagaatgtggtttttatattttgaaatacatgactgacatcgtcgcacgtgcgaacccaaactgttacatacaagatcaaaaacctgtaagttttaattattgattatagtatttattataataacaaataatacacatatatataaactgatataaatttttacttttttttaacaatttggagataagcggtaatacaatccaaaaattgaattgttacagcgatagtggatagaacggttgatggcggggattcacgatgacgattgatgctgaaaggtccaagaatttttcttccctaggttatttttttaggttaacttgtagttagatttattaacttgttaatacttggactaattttacaatatttgtgtaatatttaattacttttatgaaataaaattatgtattttagccaattctaaaatt

SEQ ID NO: 338689 - DNA, 515 bp, Cannabis indica
tctaacgaggacgcctataccgaggacatgtcatctatattgcaattttcgcaccagcgggaaaaatttgcgcttttttttggtgtcaagtttctgtaccgtggacatgtcctcgttataagttctaccgaggacatttttatttccttttacttttcagcttctttgtcttctccaaactctcataacctgaaatccccatttcagaccagaaaactctcgccagataacccaaaattggagatcgtctacctccctccctgacgttttcttcgttctccggcgtctctctcacctccggcggcttggtcctcaaagttacagagtaagtttattaatatctatatataactgaaatgttttttgtttttctactttgagttttaatttttccttttgtttcagatttacatattgttgggaatcatgggtttcatctcaaaaccaattggcaatgggaggagtagctcattcatcttatatattctattttctttccacacattagcaatgtg

SEQ ID NO: 338690 - DNA, 697 bp, Cannabis indica
ggctctgtccgacaccttgagggcggaggcagacttggccaagaaggaagctgaggaggccacagcggaaactggagctgtttggctagagctaggcgaagccaacaagaagctgtttgctgccgagaagaagatctccgtgctaacaaaggacctcgaagctgctgatcgctttgaggagaccatcgagatcttatctgctgaagttaacagtcttcaggatgagaggagttctttgcggcaagttcttcttttgctgaaggaggagagggacgccaaggtcaccgaggtggaccaattggaggagaaggtcaatgctttggagactgccggcctcgagctcttcttcgatttctggaaggctaatccctaggccaatttcgactacttgggcgatgctaatgacatgtaccttgagtactccgcggcctaagttgcttatggtgggaaagaggcagtttcttcaaattctggccaagcttctggccaggctgctgatgcttctcctgctcgaacaacagatcctcctgctctagttggctcagaagaaccgaaccaagagcctgggactccagctgtttaaacacttctctttttatctcctgtttatatataaattatatgcggcctcaaggcctttaagacatcatgaccaaccaagcggtctttaaacgtggaattatttttcattttttgg

SEQ ID NO: 338691 - DNA, 661 bp, Cannabis indica
tttctaattatttttaatttggattcttgtattttttattttaaatgtttggactttggacttttttgttttattatggtgatgtgaatttggatttggacaattgaatatagatttggatttggaatattatgtatttatgtggttaatttttattttagttgaaactaaaaaaaaaaacctcttaattcggtttaggcgggctaacccgaccaaaccgcccacaccgtcgatcgggttcataattttttttttaaattgggcaggttgcgtgcagaattttacaacccgatctttacgttgggttaaaaaatatgtagtataaaccgactaaaccgaccgatgtacaaccctacttttgactttggttctattttttggattggtttttatgaatttggtgggtctttttttggactatacattttttttgttgatttttttaatcggatacttgttggagtttggtttaactctttgtaacgtccccgcttcaagcctccattaagcccttacacccacggaataatatacacaagtacgtcgctctggctgtttcatagactgacgattgaccctacaaaccaatacgagtgtttccagcgtgctttgtcctcactcgcacgcttcttggaaaacttcttaggaggtcacccatcct

SEQ ID NO: 338692 - DNA, 1142 bp, Cannabis indica
ttttaccattcgatctgattcaattaatttcgtcatccaatcgatccaacatccatcggatgttggattggatcggttctatctattggatgtatatcatatatatttatttatttattttgggtttatccaatattttggacttagtaattttttgaatcggatcgaatccatcaaatattttagatccagtatgtattggatcggactagatccatttaatccaagaaaaagagagtaaaattttaatgttaattttcatatatacatataaaatttgacgtataacaatataaaatctaattactcatccaaactaaacgaaaatactaattagttcgattggatgttggatgtattggatttttagacacaccatccaccatccgatccaatccaattggatatttaaaaataacatccaatccgatccgatcacaattggatatccaatgtatgacggtcagttgtaattggatcggtcggttctcattggattggatcgatttatgcatacccctaaggattattattattgtggatcagtgagtctaatattttttataggtgatactttataattagttagccatatttaataaaaattattcttttgatttatatgagacttaatacttaattataccaataacagtatgatactaaaagatatactagacactaatagtattttttagcgattctccaacaacaagacacaatacctccaattttaatagagcattgctatgagacaacactgaatggttagcgattttttataatatgtaggctaattacaagttttgtctttaaattttaacatgtatcaaatcatgctctttgaatatttttagtccttgaaagttccctctgaactattgatattatcggattttaagaatttttgtttaatttcattcaatttttagtacattatgccctcaaattttgatttctaccaaattatgccactcgaactttgatatgtcagacttctcctagtaaaattggacaaaattctttaaattcaacaatttcaatagttcagaaggaatttttaacgatcttatgtaatatccagattaaaatagtattaattttttttttttttggatattaattgagcgaggataattatc

SEQ ID NO: 338693 - DNA, 658 bp, Cannabis indica
gtacggatggtatgctgtgcataccatccgcacgcgcatttgaggtgacctgccgagattcctcggcgctgagaggctgcaagcagccattctgcgtgcgtgggaagggtgatcaccaccctgattttttttttcgattttcaaaaattcataactaattcaaataaaatcaaaatcgagttctgtaaaaaagtcaatttcttaactttttccaagatatccaatagaaataattccagaaacagaaaatcaattatttttcttagaatttcacaaacatcaatcaatcattaatacaacacacaaaacaaatgataccatccaaatcacaaacaaatcgttttaagtccaaaattcttgcaagcaaatcaattaccatggctctggtgccagttgttggaattattttaccaggatcttagatctactcataagtatgttgattaacaacctaaatatgaacttctaaaatgataataaataaacacatataaagtatgagaaaccttacagtgggtgcaacagaataatatgtctccctccactcagatctctaacccttgattcctttctgtttgcagagtataatcaagatctgagcccgaatgtccttctattggatgtgatccttcacagtcttccaatctatgattgaggt

SEQ ID NO: 338694 - DNA, 501 bp, Cannabis indica
gtattaaaaaataaagggatttttcaaaaaaaaaatgtacttttatgttctatttacagttttatgaactaaattttatatttatatttttataaatttaattttttaaaaatataattttaaagttttaaaattacaaatatatgtttttctcaataaaaaaataataagtttaagaaaacaactaaaaaataacgagaaattaacctcataacaactataaataaattataaaataacaaaaaattacttatcaggacaactataaataaactataaaataaccaaaaaggaatgttaaacagtttattgtttttactgaaaatgtatttttgtaaatatgttcaaatcgtaaaaataaaagtttttccatattaaagtatttttgtaatttttttttaaaaaattggtatactatgtaaaaatttcaaaaataaattcaatagttggtttaagtatgtgataattatataaggcgctattttttgtaaaaaaaattac

SEQ ID NO: 338695 - DNA, 567 bp, Cannabis indica
aagtgtttaagcagctggagtccaaggctattggttctgttcttcttggccaaccggagcaggaggatctgttgtttgaacaggatgtgcatcagcagcctgactggaggttgaagcagctgtctcagtttcgccataggccacttgggacgtgcagacattaaggtacatgtccttagcatcgcccaagtagtcgaaattggcctgaggattagccttccaaaaatcaaagaagagctcgagacctgttgtctctaaggcattgatcttctccttctagctatccacctcagtcgaaagctcctcctccttagcttccttttcctccttcatccgatgaagaactgctcgaagcgaagtcctcttgtcctgaagactgttcacctcagcagataaggtctcaatggtctcctcaaaaaggtcatcaacttcgagatccttagtcagcacagtgattttcttctgaccagcaaaccgccctcagggtgtcggatagagccgtgttctttgaagcagaagacttagcccgggagtaagtgtaggcaaacttcagaccggcctgcacaa

SEQ ID NO: 338696 - DNA, 479 bp, Cannabis indica
ggattcttcacagtcttacacactatgattgagtagcaacttgctatgcgtgggatgtactctatcattatgagggtttgaattttcaagagagagagaaagaaggattcaaacatagagagagaaagagaaggctcaaatttgactgaaggctagtgaaagctaaagctgtatcaactgtcagttttgagtccatcactatctatttataggaatccttctaggtttaggtttgaattatttgacattgaaaaattgataaataaatggtaaaattaagtattagtagctggccattggatgtgggtccactacttgtaattttgccatttttcaactatttatcctattcttttataaatgtcatattatcaaattcaaccacttaaatgccaaaactatttatttaataaaataaaattaccaattaatatatttattaattagacttaataaaactctcttaattaacaaataaa

SEQ ID NO: 338697 - DNA, 568 bp, Cannabis indica
atatgaggtaattttcttaaaaaatttaaaatataagaacaattaaattggtatacatatagaatttttctcttaggtgatgacttgtgaagttgagaacgtctatttttatccgtgttgtagtactttgtttagactatgattttctccttcatttttttatcctcctgtgacaattaaattcttttctatccttttttattgaaaagattggtaattgcctaattcttccacacccatggctttcaatattctacatgacgcctatgatgttttgtcactaatctcaacttttttttttttcattttattttatttttaaaatttggaatttaagtttgctagttcaacactcaatgaaataacatattattttatccatttaccctaattaatatgaagaaaaaaaactgttaatttttaatatatagaaataataaagacaataataaaaagtaacataatacgaatactactactttttaataccataaaatttagagaaatttacaaaaatactggaatttaggttaatttttacaaaaatactgtcacacagaaatctttt

SEQ ID NO: 338698 - DNA, 1686 bp, Cannabis indica
gatttaggagctccatggagacaagctgtctccttcacatacagctctgcatactgatccactgtataagtagtctttactggtagaaaatgagctgacttcgtggcacagtccactatgacctatactgaatcatacattcgcgtggttctaaggaaactaaccacgaagtccattgcaatatcatcccacttccattcaggaagggctaatgattgtaataaccctaccgacctttgatgttcagcttagatttgccgacaggttaaatatttagtcacgtaatccactacatctttcttcattccacaccaccaataatagggtttcaatcctgatacattttggtggttcttgggtgtaacaaataaggtgtagcgtgagcttcatcaaggatttccttttaagctcaccatcatttggaatacaaacccgagctttgtaaagtaacattccattatttgagatcgaaaagtctttaggtcgactggccaatacctcatcccaaattttaactagcttaggatcttccaactgtggccttctgattctttctaacaaatcttattgaagtgtcaaattgtataattttcctaccacaaatttaatttcagccttaaccatttttgaagctagttgaggagctatcattacggtgctgaaaacctgtctgagacattttctgtttaaagcgtctgccactacattggctttttttagatgatacagaatttcacaatcataatccttaactaattccagccaccgcatctgtctcatatttaaatctttcttgttaaagaaatacttgaggctcttatgatgagtgtaaatcttacacttttcaccataaaggtagtgtcgccatatttttagagcaaaactacagcaactagctctaaatcatgcattgggtaatgctgctcatattcctttagttgatgggaggcataagctataactctgtcagcttgtatcagaacgcatcccagaccctatctggatgcatcacaataaacaacgaatttttcttgatctgatgtgctaacaccggtgctgttatcaatcgctgtttcaattcctgaaaactcgcttcacacttgtcagaccatatgaccactgattctttttagttaattctattaggggcatagagattttagaaaatccttcgaaaaaacgctgataatagcttgctaacccaagaaaacttcgcacttccgtcactattcttggcctcggccaattttattttactgattctatcttccccgggtcgaccatgatcccatccttttcgactatgtgccctagaaaagatacctccgacagccaaaattcacactttttaaattttgcatacaatttgtgatccttgagtcattgtaataccatttggagatattgctcatgctcctcttctgtctgagagtacacgaggatgtcatcgataaacactataacatagttatcaaggaaatccttgaatactctattcataatattcataaaggtcgctggagcatttgtcaatccgaatgacattgccaaaaactcatagtgaccatatctggttcgaaaagcaatttttggaatatcttcttcccgaattctcaactgatgataatcagattgtaagtcaatctttgaaaatatagtcttcccctgaagctgatcgaacaaatc

SEQ ID NO: 338699 - DNA, 816 bp, Cannabis indica
atttcaattttatttcatttaaacattcaattaattttacattttttctactaaaatttcggcagtataacgacataaaaagtgtaaacccaaaatttttaatacctaaaaataacacaaacaaatatttccagacaatatataaacaaaaaaataattcacccatccaacagcagtcaattttatcacagaacctacttctctaacatgcatagacatattaactaataacaaaccctactatgtactaagcgaaagcaaaaaaacatacctgaatcgagtgcaaaaatgacaactgcaggcagctagcggtaatccggagcggtcgaacacgaacttaattccataaaaaagtaaaaccaaacattcaattaataccgataaaaatttcaaaacttcttcacatatccattaccctacactaacttacacatatacacactcatacacatacactcacacacactcacatacacttatacacacacacatacacacacatacacatatatatatttacatacatatatacatatatacatacatacacacatatgtgcatacatatttacatacatacatatatatatacatataccaatatacacatacaaaatacatgcatacatatatatacatacccacacccacatacacataaatacttacacatatacacatacacacatacatacatacatacatatacacacatatatatacacatccacatacacctacacatacacatatatacacatacacacacatacatacacatatatatacataatccaacatatatacacatacata

SEQ ID NO: 338700 - DNA, 488 bp, Cannabis indica
gaaaaagataagatgggaaaaaagataaaaatatcacacaaaaagatgatatttaaaatagagaaaattgtgcaagaaaataaagctgtaacttcaagcttgaattagactatattttgattagattttggaaaacttcaaaacataaaagttgtagatctctgatttatatttctggaacatcttgaatcatcaaattctaagaaatatcaagagagttatggcaaaaatactatcagtcgacgcagcagaaaaaatatctcgtttgaggtttcccaaaaatttaaattcgaatgggaatttaaacatgtgcgtttttttccatatttttaggtcttcaatgcctatataaagggaataagggagttgatttcagcaatcaattttagagagaaataaactgagaatacaggtgtgaattggagagatcaactacaatattgcaaacagtgttcagagagttttcagcattcttctcttctctattt

SEQ ID NO: 338701 - DNA, 957 bp, Cannabis indica
ggccttgatttttgcaattttgggaagatgcacgtctcgttttgggaagacttcatataacttcatcctgttagcgtcagcgaggcttacaatcctggcaagccagaagataacattcaaattagcctcgaagaattctttataaataacaatcgcgatcgacaccagacatacatcgtcgacctctgaaggaagaatgaccccaactcaccattgagatcactagaactaagtttctatcgagacatctccagatacaacgactaaagacgtgtttaatacacgattgttttgacccagtaaaagcgagaaaatcacagctacatgattttcaaatcataaaccgcagttacactacgtgatatgtaatcaaattccacgattttagggatgattgttgtaaacatattacagtcaactttgtaattaactttccactatgtaattataaatagtgacaaacaagatcgaaaaggaaaaaaaaactcatatggggaggcccttaaaaacaatcagaaatctgaataagattgactcgtggactacgcaaaattttaactacaaaaccacgtaaaaaaagcctatgttcatatatttttatttctatatcttttattttttctgtgtgaaatcattactattaggttcaaatttagttaacgaaaatctgcattaacaatttggtgctttcattgggagcctctgtgaaaaagctcagaaaaaccctcctttcttttgatgaaaagccacctccatcatggctgaaaatccagaaaatgttaacaccccacatgaggaaactaatcatcattcttggaaagagcccatgggctccagaatgtctatcaaccagcgatccagaaggacgacccgttccaagagaactcaacctgagggtggccccagtgcgcagaccacacgttcccagagaacccaacccgacgttggtcctagtac

SEQ ID NO: 338702 - DNA, 727 bp, Cannabis indica
catcactgcctttcttctgtcaagtacaaagtcatttgcggcaataatgaaactgatcatttctatccttctagaggtataaggcaaggagaccccctctctccttatctatttctcatctgtgctgaaggtctttcaactctcattagaaaatttgaaggtagaggatggttacatggctgtcgtgtttcaagaggagctcctgttgtttctcacatgctctttgcagacgatagctacctctattgtcgagctacttctacagaaactgctagagtaaatgaacttctgtcaattttcgaaaaagcttctggccaacaagtgaattttggaaagtcgtctgcctttttcagtccaaatactccaactgatacccgtacaagaatttgctctgacttgggaattttggaagcatcagaggatagtaaatacctggggttaccaagcatgcttggtcgaaataaaaattctgttcttggttatcttcgggataaaatgcaaaagcgtattcaaagttgggacaacattttcctttctcgagccggcaaagaggtcatgatcaagtcagttgttcaagctcttccaacatacgctatgaatgttttcctccttaccaaagacatttgcaatcagatggaaagtttaatgacccgcttctggtggcaaacaaaaaagactcatcaaaggaattcattggaaaagctggaaaaatctcagcaaacacaag

SEQ ID NO: 338703 - DNA, 718 bp, Cannabis indica
ttagaacctataattagtataattagtttgtatatgttaattatccttatttacatattaattttgttattattttatgttgaattttttgtttttaaatcttaaaactttaggagttttattcatcgttaaattctcgttctgttgatatattatatgcatgaaatcattatatatattatgagaattttaactttaaagttttagggtttatataattatattatgaaattataatttgtgtttttttattttattatttttgatctaaaattgataatagatatctcattattaattgtttatcaatgttcttacacgatttatttcgtgtttcaaccgagattgatatcaaaatcaattttttttatgttctacaattttcagattgccttatacatgaaatctacacatttaaccttttcatacccgaaattagtagtctagatggactagaaatccaatcctgatcgaaacccctcaaattcccgaagttttccgtcagttttttgccggtttttcagaccagacccgaactggacgaacagggtcgcatgacccgtttgtagacccggctggaggaagtaggacactcccagccgtaaagcccactctcgcaggcggtgcgtgggggcgcgtggggccacgcggttcgtcgttttttgacgtttttttttccaccgtgcttaaaattaaatttctgatttttctatgattt

SEQ ID NO: 338704 - DNA, 674 bp, Cannabis indica
gatcccccgtttactccagagataagtgctctagagctgccccacaagttcaagatgccaacctggaagatgtataccgggaaagaagatcccttatcacatctcaaatagattgaaatgcaaatggacttacaaagggtacgaggagatgtgtgttgcagagtttttcctgctacactcttagaagcctcccattaatggtacttcaagttgacaccggcaaggttcaactcttggaaggctttctcctcggaattccatgcacaattctcttcttcttgccaactcccgttgcatttagaggacctggtcgaactaaagcaaaggccaggagagcctctctgagcttatatcagtagattcattacgaaggcgatgaaagtggcacggttaaccgaagaagggaaattaaccgtaatactagggtcatcaaggttcccgaagagctttggatggacatcaagaaacattgactagtagattctatgagtgacttcctcgatcgtgcggatggtttcatcaagcttgaagaggccattcagcgagcagaagtcgagcataaactgagccaattacaagctccctcagctgaaacatctgtttaatgccccgggtacccaagaaattcaagctcggacagtaaaagatctaacaactgttggaattattttacc

SEQ ID NO: 338705 - DNA, 540 bp, Cannabis indica
ctgcttctgatttagagatctagggaggaagacttagttgatagtattgcactatcaaattggagtaactgctgtggatcaaacagagataattgctatggatcaatcacgtacacatacctattattatatcttattattgtgttctatgttatatacaaatagagcttgggttaattgttaatttatctaacaaggagtagtcatgccaatttccattgaccttagagacaaggttgagacaatcggagaaaatatatgttggtgtcaaattggaggacaaacaccattgcagcccttccttaagagcttgagcttcagcaaaaattggagaggatgcccctggtttgagaatccttgcagactgttgaatatgggacaagccctgcataaagaccatcccgatgcctgtggctggagaattggagctgagggcagcatctacaaaaagagcagtggttgaaggaagcaaaatctgatccagaactgcaggggaatgatccttagtcacacttgttagacttttatttgggcttacat

SEQ ID NO: 338706 - DNA, 896 bp, Cannabis indica
attataagctaagtgttttcacaatcattatattccatccacgtgacgaggttagtgcctcgtcttgtacacttgaagttacatggtttctcattaatgcacaaggcaacaatttgtatatttgtatctcgcagaagactatttagtcatctgagtggtaaacatactctgtgaattatttttttacgagttattcctcctcaaatataattatagttatgtgcctaggttcatattttttctaggttgacacgagtcctcctttgatgtgctagccgaatttcgggtgtaacaatttcaccattagatcatcatctatactaaaaaatagcctaaatttatttttctatattttttggattattttattgtgattgtaattggacatcattctctaaaaaaagagagctctgctagctcattttttatgttcacaaaagtacccataaggtcaaataatctctctctagtttattgctctagaaatttaagtttctagacttagccatttttctgtaatccaactcttgagaaataaaaactcaaagtagaggtagctctattactttcgcgatacatggaatgaactactagaaatctttgtgtctttcttatttatacttaactcataatacaatctcaccgatctagcgagcaggtgtgaccagatatctgtgtccagatttttacgtcaataattttgtataattatttatttatgaattaaataattaaatttattgaactatttaattttattcacttaaaactatatattagttaaatataatattattgattaaagtatattatgagagaaaaatatattatttagtagaaaataatatttatttgattcagtttttattgcaaaataaataataaatattatttaa

SEQ ID NO: 338707 - DNA, 630 bp, Cannabis indica
tgagagccatcttattctttttacaataatttatctagggttagggtttaaattatatggaataaaaaaaacagcaaaataatgcgttaagtggccggccatacatagtggaccacactagttacaattttgtcattttattcaacaaattatcttttctttcactatgctatattttctaatttcaatcctataaatgtcaaaaatatttatttaataataataattaattatcaaataaaattgctatttaacttatttattaattagaccttacaaagtcttttaattaacaaataagccctaaaatttcttttcttcacaattaagtccttacttagtgaaaattcttaaataagacataatctaatttagaattacaatggatttattaaaaccaattaactaagtctacaagcagtattatctcaactagtgtagggaccatgagcttatataattaagcttccaataagtagttctagaatttatcaagtaagttctctaacttattaatttctcttcactctactaaagatttgaaattgcactcttaattatgtcgaacgctctaaatgtccaagatatagatacgttgttagttattcattgttataatctaaataatca

SEQ ID NO: 338708 - DNA, 1098 bp, Cannabis indica
tgtctggtttttgttcgtgtccttagtcataatcaaagttttgatttgggtccacgtcctggtccaagtctgaggttgggtcctagttccctggtcttattcccatgtcccagtccactttcggttccagttccagtttcaagtcaaggggtacgggtccaggtttgggtctgggtttgggtttgagttcggctatgggtttgagttcgggtatggatcccaaatccaaacatagactacgggtcaggtccaagccctgggtccagatcaggatcccaatcttgggtcctagtctagttccacttctagtcccaggtcttggtccgggtcccagttcagggtccagttttggggtgaagtcctcggtcccggtgctagttccgaagcccgagtccctattccaggtcccccatccaagtccgggtcctaggtcttggtccgagtataggacccggtcggggttcaagtcctagtctgagttcgggttcaggtttccgatcctggtccaggtccaaatctgggttctagtcacgggttcaagtccacatccaggtccgggtctgagtctcaggttccgatttgggtttgggttccgagacccgggtcctaggttccagtctggatccatgtttgggtttgggtcctactaccagttccgatttcgattctgtttctgggttcgagtttcggtccgggtctaggtcaaggtctgagtactggtcagagtccagggttgggtctgggtccaagtcctgatccctgtcagggtcttggtttgggttcgtccctggtttttgggtctggttttggcttcaggtccaggtcccggtctgggtccagctcccggtcttggtttaggtcccaagacacaggtcccggtctgggtccaagtctcagtatgggctctggtctgagtttgggtttaggttgggtcctattacactcccatgtccgagtttactcccagtcctggtccgatcacggtcagggtatgggtccgggtatgggttcgagtccagtttcatatctagatccatgtcaaggtccgagtctgggtctaagatcgagtcctaggttcaggtctgacccgatcccgga

SEQ ID NO: 338709 - DNA, 830 bp, Cannabis indica
tatacaaactaagtgtaatagtcaggtaaacccatacaattaatagctaggcatccatctcgctataggaaggcacgctcgtggtatcttcactaatcagctctagacatcttttagtgagattcacaactctttcaagtcagttgtctcaaatacaagctgacattcaaatgatgttggctgctgaagttcaccttgtcgccaagaactgcaattgttagatagatcgttatatcttcaatagcataaatgacgaggttcacattatcaacctcggaaagatgtggcgaaagctctagcttgctaccaaggttgttgttgctatattcccagcgagttgatccaaaatgatacgatttgcaacgttcttaatacatgtttatattgacccagtaaaagcggaccaatcacaatggtgtgattgttcagatattaatcgcacttattttatgtggaatgtgatcaaatcccatgattttaggggatacttgttgtaaaatatcagtcaacaatgtaattaactacccacatatgtaattataaatagaggcaagtaagaatgaaaaaggggcgaaaaaattcataagagaaaaaggccctagaactgtatcaaaaatctaacaagattgactcgtggactatgcaaaattttaactacaaaacaacaaaaaaaaccttcgtgtgtttgacttttttctatactgtttctattttctgtgcaagtttgtcacaatttaggctcaaatatagttaacgaaaatctgggatgacagtttggtgctttcattgagagccttcgtgaaaaaagctcagaaaaaccctccttacat

SEQ ID NO: 338710 - DNA, 663 bp, Cannabis indica
agttcaaagatcatttaattgaacttggaattgaatttcaattgattgcccctagcaccacacagcaaaatggagttgtagaaagaagaaattgcacgcttttggaaatggtcaggtccatgcttagctactcaactctacctacgtcctttcagggatatgcaattcagatgaaaaccaacattttaaatgttgttccatctaaatcagtccctaagacacctttagaattatggaatggtcttacacctagtttacgccattatagaatctaggggtgccctgctcatgtcttaagaaagaaagatggctaacttgaaaagcaaactgaggtttgcatgtttgttggaaattctaaagagactaggggtggactattttacagtcgtagggataataaagtattcgtttccacaaacaccactttccttgaggatgactatattaataatttcaaaccacaaaacaaagtagtattggaggaaatgctttcagatataagtccttctaatgttccatcctcttctactcaagtagaggataatcccacttcctcggttgaacctttgcaagttgatacaatcgaaaaatctaccactgatgttcctgttcagaaggtcaccgctcctcatcgtagtgagagggtttccacaaaaccatctc

SEQ ID NO: 338711 - DNA, 773 bp, Cannabis indica
tagggaaaaaatagattttctgtaattttttccctgcattaatttataaattttgtacaattttgaatagccacaacaattaaactaacgctattattatctaaatatatttaaaattatgtatagtcacaataattgaactaacgctaattaatatcatcttaatatatttaaaaatctatagttaagttaacgctaattataataatctaaatacatttacaaatctatgtagtaacgataaatctagatgtatacacactgactaacacagtaactattgtcgctccgcttctgctttcacgtaatgaatccatcgatcacgcataatatttatctcatcatttgtatacggagtatagaacttatcatgtcgggtcaacagttgtattggatcttgtacgatcatgaaactttcaatgaatttcatgacgtagtatccacactgtttgtggtcaggttgttgaggacagataggagtcatccactgggttggtcaatcaggtcgtcctatcatttagttatacatggtgaatgatctacataaaaagtagattttattagcatatataaatttataaataaagaacatgcttactttcaaatgggtataggcatattttctctttgcagagaatgatcttgtcaaaaccgctatgaacaagatacaatgccatagatatataattttcgtggttatggtacatcctggtcagagaatacaaaactcataatccatacataaacatacagtttggatccattgacagaaa

SEQ ID NO: 338712 - DNA, 907 bp, Cannabis indica
aaaaaatctagttccacgcacgcagattagggaaaccctaatatgatttttataaaactttaaaaaatcacatctttttcaattttaatccaaattaagttctataagagactaatttgcttaattttttaccatctttccaaataaaataatttcagaacgaaaatcaaattacttttcatagaaaattttgtaatatcaaatcaatcatcaagaattcacataaaccaacatgaacacatctaaatcaaccaaacatagttttaaatttatctttcttgaaaataaatcattaccatgactttaatgccaattgttggatgttattttaccaggatctagatttactaacatgtatatttaattataatactataatctaacatcctaaatatgaattccctaagacaattaaataaacacataaaagaatatgtaaactcttacaatggttgcagcagaattatatgattccttctattcagatctctagcccttgattcctatttgtagcagagcattatcaagatctgaacatggatcttctcctccttcgattgtgtttaacacagtcttccacaaaggtctgagtatcaccttgaatagagtgggctaatactcaaacatctttggaacaatatttttgagagagaatacatgtaatttttgaaatatacaaagaaacaagagaagagcgtaatctgacaataaaattacttaagttcattctctcttctcatcactttctttatataggcttcacttaggggtaggtcagatgagattgggcttaaaatagagacttgggctgaagtctaactctacgaccgaatttctcatgggctttagagtaagatttatgtcactttatttcatttaaataaaacaatgtgtcttttcctatttt

SEQ ID NO: 338713 - DNA, 534 bp, Cannabis indica
acctcagtctcctcgagaagacttcccccaccaccttgggttggcgtgggcgacatagcacgaaaagcctcggccatttcagcggcttctgctctaaggattgaaaagtcgaagtctggaatcttggagagagtggtgtagatgtagttcgagactgcttgttcatattgctttttttccattctccttctcagtttccaagtcgcgagacatctcttcgatcttcgtcttggcctcaagctcgaattgctccttggccttgcgaagttcctcgagctctttgtccttagaagacgcatcttgcttcagcttcttattgtcttcttgaagctgagcaatatgtttcttcgcgagttcaacttccttggacccagtagcaaaagccttcgagaacatggccataaactgcgaagctagctccgcagagcgtggcagtagctcctcagtaggagtcttgtcaatcttcgactggaactcatcgctgacaaatctctcctgaaggtacaacacatggcgagctcgaaccgctgggtc

SEQ ID NO: 338714 - DNA, 466 bp, Cannabis indica
gcccttagcaggcctcttgatagaatctgcaacaggagtaacccaccacatcgcttttcctcttctgagaagcgataggggaagttgctattgtcccaagcttcagttgcggttaagagcaggagcagacttcaagaaagtcatttctgcagttacaacaaaaaataagggttaatactaacaaggatgaaatcctaacaccctagtttatgtatgcgataaactacctaatgatggtcgaggagtttgcttggaaagacgcttatcaattcactcttcttgcttttcagaaggttccttatacaccggctctctccagagactcgcgttctcagggatcagtttgtgttctcgcagtttagcagtcatacacaataatcgccagtcgcgatcttgtacaggaaggctcccaagaacttcagctgtctctctgccagtcgcgtcgagtgcagcgcgagctggtcta

SEQ ID NO: 338715 - DNA, 518 bp, Cannabis indica
  modified_base (7)..(7): a, c, t, g, unknown or other
caaaaanaaaaaaaaaaaaaagaaatacactggtcttataattttttttacacgaaaaatatattatttaatctacataaaaaaaatattcttgttttaacaataatctataaattgttttaggcggtgatattgatttgggcaattcgatttgaacagaataaattcttgtgcaaaggtaagaaaaattgagtggatttcattgtcaatttggcttgtatcacccttgattagtggaaaaaagttcaagaaaaaagtttatttctttaatttgatacttagtatttcagatagggctgaactattgtttaaaccaagttatgaaaaactcaaggtgaatattaatactgccttatttgacgaggagggaagtcatggttttggtggggttgttcggcatcactagggtcaggtcgtggctgggatttcaagattacaaattaggcaagttcttctagagattgttgaagtcgtgactcttaaggaagttcgttcgtggttgaagcatgctttcccag

SEQ ID NO: 338716 - DNA, 723 bp, Cannabis indica
tatgtatattatagtacttaattgcattatatatgcataaaaaaatatttacaatttataatacattttattaattatgaaaaatatattcttaatttttattaacaaacttgaaagaactacttattcaattttcaagattcaagttatcgaattgttcatggttagattgtttaatttcaactcatgcattcaagaatcggattgaagataaagcagtaaagcagacaatgatttacaagcttcatctgcactgtgaacaaatctcagccgactagtgcttgagttccccgaactagagtaataacatctactaaatccaaaagattcatactacaatctccagttcacatgcacttaagaatttaatacaatctttacaacaattagtactgaattaccaacaacaatcaagattcttgattgtatgcacacaatcccttgtgcagcagctaagttcgtcttcgacacttttcttcaatcttaaatcccttcagatctgatgacgaagatgacactaaactcccttcagtctgaactcagcaacaccaggctctgatctttctgctatggatctccatctccaagctatgcaatcagacctgaaagacaacaacgagcaatacaggataccacacaacctcacacgatataacagtagaactaaccaaaaatatcaattagctagctgactcatttacagaatgaaactagctatttata

SEQ ID NO: 338717 - DNA, 619 bp, Cannabis indica
tatcatgtagtgtaaatgcggttattatttgaaaatcatacagctatgattttctcgcttttactgggtcaaaatgatcatgtatttaaacacgtctttaattgttgtatccgggaatgtctcgacagaagcttggttcaagtgatcataatagcgagctggggccatttttccttccgaggtcgacgatgcacgtcttgttgcttctttgtttaaaaacttatcgcttcatttaggacaatcgtaattcttgttaatagagtttctcaaggctcacttgaatgttagcttctgactcgtcaggattgtaagtctcactgagaagatgtctgaagttaattgggtgaagttgcaagaagccttcccattacgagataggcacctcgcttattaggtcttgagccaacccgactgttatacttagtttgtacattatacactaagtgcttctgcaatcgatatgtgtcgcttttgtcttcttagatgtaacgtacttgatacctcgctattcacatttaacgacatatggttcctcgttaatatactaagcaacaatttgtatattttttcctcgcataagaccttacagttagcaggttgcaaatatactctgatactt

SEQ ID NO: 338718 - DNA, 956 bp, Cannabis indica
aattccaatttaataacaatatccctttaattccattttatttatcaaattaaaataaagtgtctgttgtaataatattataatgtaattcgtcataacaaatatgactttttttttttatgttaaatatgtgtgttattttatttgtacaacaaaaaaaaaattaaaatgaaataaaatattcattgaaaattgttcaagacatgacttgatagagtgcttaaatagcttcaaaacgtaagttaatcgcatcaattggataaaaattgagtgagttatggtcgttttactgaagacagttcaggtcccaatgcccaagttgacatctagtacccaagttgacatctgacgtcaacctggacactatataagtttaaaaacgtccaaggggtgtcctttgagattcctaattgataatttgacatcacttagcacatttataagttctggtgaagttggtcacatgatctcgaagatgttgctattttgcagaaactatagacttgaaacttctgatttctgagtgagtcaatttgccaaaaaatttgaagttgtgaatttgattgatctgacttcatggatcattgcacatgtgaaaaactagacatgcggtagaaatagcatcagattgggataagcagaacccagcgaaccaggctatttgttgacctggacactgggccctttaaattaagcattcaagattctattttcgatacttccaaggcttctgaacttgaggacggggtgtcctcccttgtttttaaccatgtcggattcaataattgcatcggatttggcatttgagcaattgaaggtagtgtgccaggttgattgtcaacctgggcgctaggcccagccctaagtcaacctgggcactgtgccctatttttagggactcaggtttatggttttctcccctagtttacttgaatcttcgttatttctgatgatgg

SEQ ID NO: 338719 - DNA, 1492 bp, Cannabis indica
agtcatttaattctgctgcacccaatgtaaggttttctaaactttatatgtgtttatttcttcgttttagacagttcatatttagggtgttaatcaacatacttgtgagtagatctaagatcctggtaaaataattttcaacaatgccactatttaacctttttattattaaatgaatatgattcatattattggtataatagttttgtattaccagatatctatatactgatgcttatttatggaagatacaagtagtgatttgaatttcatcttatgaacaatacgtaatggtttgattttgattatgtataaattatacattctaataataaactatatgattattattattgcttttcttgttgagtccttgtgactcacaagtgctttgtggtgtaggtaagggcaaggaaaagctagagctgccatgaggtgactacgttctccaacaatgtacatattgaccccaccagcctgtgtcccgagttgcaaggagttgttttggactgtttgtatctgttgtattttgaattatgttttgaattgctcttgtctatagtctttagggtaaatatttttataacaggaatcccgtgaacaccttttcactgccattataatgtctgttattagtattttattttagtcaagtctttaatattctcacaatttttttaaaaaaaattatagtgtatgatgtgtacatttgctgcgaacacatgtctgctcatggtacagtaagtttttatgttatttgcttttgccttacttacttagacaattatagtgtatgatgggaagaaatagtgtactgattatctatactaagaatatgtgtatggtatacgcatattgatattgatatctatatgaaatttaagcgtttggaagatgtggattaaatgtgtgacaagttatacagtaagggaaattgaattgccggattagcgagctatctgggctcatgaaaaatggtaaggaaaagaatcttttattgtcataatacttgaaacatgtaaattctgctatgcaagatgtgattagacaacaaggagaatcaaatttgagatctaggaggacaacaagctcgtcttgtacgagcagatcagcggacaaaaactaaatgaatcaccaattatggaatagaacaaaaggttctagggcgaccaggataccggtcaaagtgagaataagaaatagtaaccttatcctgagtgctgaagatgtaaaaaggctccatgtgggctattgtaaagcctgattttgttttgtgtggggtagtaggtcatctgataagggcctacccttaatttagaaaggttaatgttaaaggagaagagtgtacgggtcttatccaagtactggttacgactccaaaaaacttggataacggtcctttgaccaacttaggataaaattttatgggcaatgttatattagctattttgatttatattggtatctaacattgtacactcaacgagggaat

SEQ ID NO: 338720 - DNA, 880 bp, Cannabis indica
ctttggcaccaggaccggattggctagccattctgagtagtagacgtctcgaatcatgccactcgttaatagtttgtccacctctttctctaaggcttcggcctttactaagtcgaggggacgtcgtttctactggaccggaggcatgttcgggttgacattgaggacatgggtgatgacgtggggacttatgccagtcatgtcctcttggcacaatgcgaaaacgtcgatggcacccctcaatgtctttattattttttctttttcctccggttctaggctctttcctaaccggagtactttggtggagtcaaggtcgcacaccgacacttcctcgacgtcctccattggttctacaattttctcggatcccacaaggggatccaactcatcttcttccgccatttctggctcaataatttctcagaccatcaacacgcgtaggtgggcagcaatgttgtagcactgcctagcctccccttggtttcccctcatggtccctatcccattctcctgggttgggaatttcaggcacaagtgtcgtattgacgtgattgcgccaaagtccaccaggccggtcggccgaggattgtgttataagctgttaggcagtccaccaccacaaacgtacagtacttgaaagtgctctggggtgtgtccgggcacaaggtgacttgaagcctcacttttcccatagggataagtgttgttacattgaaccctgtgagttgggaaccacttggtgaaaggtctcggtccgttaggcctattgcagtgaaggcctctttgaacagcagattcacggaactcccattgtcgatcaggactctggccacgatcttattggcaatgggggtctctatgaccaatgggtcatggt

SEQ ID NO: 338721 - DNA, 731 bp, Cannabis indica
tgccctgaagttgatttaaaggcatatataggggaaccatttttatcgaaggatgatatttctgcggcttcagggatgattgtcgacatcatgtattgagttgagaaaactcttggagttgtttcattctttgggaaggatatttcgattgaaccatcctttttggacttgaacacgggatctgttgagtgaactgatggtagtggcttttgggtcttttcgtagttggtgatccatgaggttggaagtatttgtagttaatgataataataataataataataataataataataataataataattgtagttaataataataattgtaacaatgtcattaaaatattttatatatattttaattgattttagttgcctttcaattatattagtcgtatttataaaaatgtcatttaattattattttttatatatataattaaaaacaaagtactggtttcttttatgtcattttctaattaacttcattgtatttttgttaaatattatataaataattcatttttaatgtactagtataataataaataaatatattttaataatgaatatttcataaatataggaattgagagtataatttatttttttatgacataaataaataatatcataggattataagttttttattttttttatatatttatatgagtttttttataccatatttttgtaaaaaaaaaaaatagaaatctcatatttgta

SEQ ID NO: 338722 - DNA, 522 bp, Cannabis indica
cctagaacaagacaaggaccgtgaccaggacacggacccagaccaagaaccgaacccagaccttgcctcagacccaaattgagagtggaactcgagctcggacacattcgtgtacccagactggaaatgagtttgggtttgggttcggatttcagtctagggtcagatcaggctccggtctaggttcaggttcgagtccaagtctcggttcgggtttaggtctctgtctgggttttgatctgggttcgggtttgggtttatgtcctgatcctggtcctagtcctagttcggttctagtttcatttgcgattctgagttcgagtttggggttgagttcgggtttgagttcgagtcctggtctgagtttgggttcgggtctggatttcagtctaggtccatgtcaagctccgggtgtgggtttgcctcctggatcttagtctaggttgtgtctaagtccccagttccaatcccgatctgagtctggattcaattctgagtttaagtccttggttctgatcctga

SEQ ID NO: 338723 - DNA, 881 bp, Cannabis indica
tggtaaaataattccaacaacatatacctacagggccatgatagattcttgtcgaagtcaaaagaggacagaaactggatacccacttgcaaccaaggcccaggtaggccaaggttcccaagccttgaaagggtcgaccagcatcccatgactcagccaagaataggccagggtaacaaaacccaggcatgaacaggctagctttatagggtgaaaccctagagctggccaactcccatgattaagtcctagggccggccaggtctcaagcaagacctcctaggccgaccaaggttagttttgaatctaaatgtgtgtttttcttttgaaactcgaatatgtgcctcgtattctttatggctcgaagagtcaagaatcacaacaaggccaaaatcgaatcttttccatcaaaaagtcacacattatacattccaaaactgtcatgaggatcaatataccaaggagattacaaactaacatgagaatcaaaaagtttccaaaagcttaaaaagcttgaaacttgttaatggcatgtacaaagaagagatatccaaggagaaaaaatgagatgtatatagagagagaagatcaaagatctaaaagcatgccatgaaaaatgccaacactcacctagacaaggttgctcgacggagactactacaaacaagacgagagctagaaagtccttatctgaccaaatgttcaaacaaggacttaggagcaaatgttatcccaaattttgtccacctgacgtggcatgtctacgtaagccaagacagagtacatgtcgaatacaaccttaccaataacaagacagggtctccatacaaggtatggtgaaacgtcaagcagcaaccgaaaagagtgaagcgagccatcaa

SEQ ID NO: 338724 - DNA, 628 bp, Cannabis indica
tataagttttttattttttttatatatttatatgagtttttttataccatatttttgtaaaaaaaaaaatagaaatctcatatttgtaaaacaataataaggttcaccaaaaaagttaacagtgccggaaagttgtcagaaaagtcaccggtgccaaaaaagttgtcggaaaagttattatcgtcaaaaaagtcactgttgccgaaaaagtcattgttgccggatcttgttattactctgggaccgaaaggaacaagagttagagatctaagcggaaagagtcattattattccgttgcatcaatgtaaggttttataaactcttatgtgtttaatttcatcattagagaattcatatttagggtgttaataaacatacatattagtaaatctaaatcctggtaaaataaatctcaacaagttgctattggaactgtaatgcaacagttatatctattgcaagtcaactagcgtgcaacttaattgcaattaaaaaatgtaaaaatatgaatgtgtatatgtaagaagctatttatcagtatttttttttgtcactgatcgataattacttgtaccttaatagtaacatgtggagatataactgttagcaaaatgtttatgcaattgt

SEQ ID NO: 338725 - DNA, 635 bp, Cannabis indica
attataagccctactcttttgggtcttcttcctcttcaccacaaactctctccactcttgcaaatccattatgtttttcataaagtttgggtggcttctcgagaagatggggagccacatctttaaatgtaaaaataccttctattagggtatttttccaacactactacaaatatcagaattcgcgacggttctaaaacgatttttttcggggaccgtcgctaaaaatattaagtaactatttaaaaccgttgggaaaaatttagtattctcgacggtttaaaattgtagtaaacaaaataggtcgacgttttttaataaaatgcaattttctaatggacctttaaaacaactaactaacatacttcttccatggatggttgttcaggatcaacactagatccttctggcatggatggaccatcatcaccatcataatctaaccacacactccactcatcatccccacctcatttcatgatataaaatcctacacaaatttaatattatacattataatatataaaaatatgcaaattaatagctaaatataaatatattaaaaagactaaataccaatacgtgtttgatatatgactcatgtattgatagattcgttcaaccataatccttca

SEQ ID NO: 338726 - DNA, 562 bp, Cannabis indica
taaaaaccaataaaacctccaccaaacctgctcaaaccttccaaaacagtataataacataaatataacataacccaagcttcaaaacacaaaaattcaatctctaactcaaaatcacatgttcaagtgaagaaattcaacttttagcttcaaccaacacacttcaatccaagcagccaaagaaacctctcaaaaccattctcaacatacacaaaaacataacctaaacataactcaaactcaacctaatccctacagccacagaaacacaaaactctaaccttaaaccaaccaaaatccattaaaaatcacaacccataaggtgtaaacttacctcaatcacttctaggttgagcttaggttgaataatatgctccaaagacaaaagaaaatggtgaggagagcctctcttgctggctggttggtttgcacgaaggggagaagaagaatgaagttttgtttcttgccttggaagctattaccttaaatagggttttcatttcatttttttcttttctttttttttcttttaaaaaaaaggtaggcagccctaaaagtaaaa

SEQ ID NO: 338727 - DNA, 723 bp, Cannabis indica
tatttttgttattttttaaattttcaatggtaaatttgttcatattaaatcacaaatagaatagtaaattctcatgtagatagagtcacgtacgtggaaacactgttctggtttttatatttcataaaagttgcattacagttgtataaatattttactaactctctaaaacttgacatatcaattattacaaactgattacgatacaatggattttatcatattggcaagtgtttcatatcgtcaatataatacaaagctctttaaaaaaaatttataacatgtttagtttaattaatatactaaattagttgatataaaattggtttacggaggtctaacagttgtttctctacatattactattaaggtacaattaattatcgaccagtggcaaaaaattacagacaaatagtttcttatagatacacattcacatttaatattttttagttgcaattaagttgcacgttatttgaataatggttttgctactgtgatatatagtattataaaagcaaggctcgaaattatcgaatacgcgacctgaacatataaaatacgattgttgtaatatttgtttgtattaaatatgaggaattattagttgttttgtgaatttgtattagtttgctcgcaacagatataactgttgcattatagtttcatcacagttgtgataaagttgacttacaaacttaaacttttatactcttaggaaaa

SEQ ID NO: 338728 - DNA, 1091 bp, Cannabis indica
tcagtaaccttcgacggagggcttacccacctggtgcccaaggcactttgtcttctacgaggaacagcagcagcaagttcctcgctgacgtagtccacgccctcaatcaggacgtctccgtcagcatcgattggctccccagcctcgttgtactccccgtagtttgggggttgaacctctgccttttcctcttcctcggaggaactgccatggcgaacatcatcctacccctcgatctattggacctcagcgtcccctttatgatccccctccatctggacggctggatccttttcggcgttgaggaaactggcgtgccgagccatttgagggtcaaatgcgtcggccagacacgtggttttctttgtacaagccatcattctatggttgggtacagggtttgaagaatgtccttcgctagaggaaggtgggctagaacaaagacgaggatgatcctcgtgcagaagttgaagcaggtcttggtcgattcgatgtccattttcccaagactcacctgagttcatctacaaaagataacacacaagatcaatgtttggtcggaatatccaacgataaacaagcaaatatgccgaccgactcaacagattaaagaacgattacgtttgaagaaacgtcagaactcaagaagtcaaaaattttctcgagttagggcaaaaaagttcatgaaccttagaataagaaagatgaaagatagacgatacgcagttcaaaaacaagcattatgactgtgaaatcgcacgaagacatgataaagaagaatcgcagaagtttctggacctaaggtttcgtaaacattttctacaacaaagtagaaggtgcattgtacatataaacatgcaaagataagcataaaggaaatcagaaacttactcgagagtcagatgtctgggttcgagcaatgtcaatccaacaagcagtttgtatgaaggcacttcggcaactttgaagccaagaatctctcttttctctctgaagcttacttagcaaagaagggtgatgaaaatgagtttatgtgccaatgctgtttgatatttataggcaagtcacgaaaagaggtaatcatctcaaag

SEQ ID NO: 338729 - DNA, 517 bp, Cannabis indica
aaaattctgttaataccacttacaacttaaaatacatatacaaaacaacacaaaaatagtatttctttttaataaattttaatcacttattgtatttatcttgtcatactcagtcacacaaaaataatcttaataaatgtactataaaaacttaatatatatatttatttttcccttacttaaacaactagataataacaaacaaacaactaaataataactcactgcaatataaaaattaatttagcatcaacacgctacgctacgtcaactaaaaaataacataaaaaaaataaaaaaaaactacaaaacacaaatatatcaactcaaaaatatatgtaggcatataaaaaaaataatactcattattttattggtcaaacaataataacaactaatagcaactatataacaatactaattagatatacaatttaattggacatcaacaaaataagtgcagataactcgaaagacacaatcaaacaatctcaaaaaaaaaaaaaaaaaaaaaaaa

SEQ ID NO: 338730 - DNA, 580 bp, Cannabis indica
ttggcattccaattgttgttcctacttttacggttgcttgacattaacaccatccatccaacagtataatgatggcttgtacaaagtaaacgatgcgaaaggtcatcgcatctaatcctcatgtggcttagcttgccacattaccgagcaccgaacaagatctacccgtcatggaggagggagatcacgagggggacattgaggtccaggagattaaggagcaggacgacatccgtcctgacagcccttccgagactgaggaggaagaggaggctgaacctccaaactttgaagggtataatgaagccagggagccgatgtctgcagagggcgaagtcttggttgaaggagtagactacgtcatcgaggagcatactaaagcagttcctcacagaaggcaaggtgccttgggtgccagatgggtgagtcctctgtccaagatcactgaagcacgcatgagggccttggagaaggatggatatctgtgcggtcatgagtgttacgtcccttcttcgaaccactgagccactaacccgcggaaaaggatgtgtgcttggtcgggtgctcacactaaacaagg

SEQ ID NO: 338731 - DNA, 1122 bp, Cannabis indica
accacgtgacacacgggtgtcacacacattcaaacatggggctgtccaaaggaacatgcccaggtgcctgtctgaagggtcaatccgcacgcaaagtggttgcaagtagcctccatcaccgagaaatctcgaccagccctccttgcttgtgcgagtagatggtatgcactgcataccattcgcacccaatgcaaaaaaattttgttttttgattttttcatgttttctcatggaattaatttcgaattttttgtctaattttgtatctagatttttatttttcaaaatttaaatctaattatcagaataaaattaattaattttagatattagtagattttgaacctaaaaatggataaaattagatattttgcttaattggttaccttatatttttttaaaaaatttgattcattttatcttatttttaaatttaaggttagatattgtatattttatattatttaattaattttatataatgaccttatttaaaatttaaaataagattattttaatttagaaaattttaaaactctaacgagatattttgtcgactttcaaaattttgttattttatttaaattcaattataaaatcagataaatgatatttatttattattttattttattatgaatttttttttaaataacataattttgaaaagttagttggcatatttgaatagatctttaggtttgttaaaaacctaatttcttaaatttataggtttaattttaaattaattgtttaattttattttgtttaatttttgtaaattaattaattatttatttattttctaaaaaattaatttaattatttaattaatttaaattaaataaatcctataaccatctatcagtttattgcatgtgtgtgttttatatattgtttattatcaaaactttatttataaaacttattattgtttgatctaaattgctatggttaacttgttgacagatccaatgatctgattttaactaatagttcaattatcaataagtcaaataaataattgtaaatggtaaatttgcaatcttctttcatctgtgtataaacctagcaacatgatggaatacattcaaattagtgtgtgcctgtgtgagcctatat

SEQ ID NO: 338732 - DNA, 675 bp, Cannabis indica
ttttttttctttttcttttttacagctatttttcttttctttaagacaatctttaacgtagttgttttattttctaaggggagacaattattaaggcctgtcctcgggccctttgtattatgtatatatatttttttgacctgcccttagggccaggatattttatatatatgatcctttcgatgcatatttgttttttttttaacctgccctttgggtcaggatattttgtttttacttttggcctgttttacactgtttacatctgtccgttttgtatgccttagtaccccctgagtggcgtgaaaactttgtttttaaggcactcagttttatttaaaatttagaggtcgcatacactttgacgatacaaattctttaaacaaagcctaagttaacatatttggactattggtattacttccggagatgatcagcgttctaggctcttggcacaatggttccatccatcctttttagcttataggttccggagctgacctcgtcctctatttcatatggcccttcccaatttggcccaagtacccccactccgggttcttgagtggttgggaagactcttcttaagaccatatccccaatagtgaattttctgtttttaactttggagttaaaatatttagtcaccttcttttgataagctgccattcgtat

SEQ ID NO: 338733 - DNA, 504 bp, Cannabis indica
gtaaatctactaacttattaattcctcattgcatccaccatagaacttggaattgcactctcagttacgtagaacgctctatatgttccatgagagctctatcatttatctctatttagcctagctcgaaagaaatcatcgtttcacttctatgtctaaatagaagctatagattccatatctatgattagcgctcccactcaattgtattaccatgttcccaaaatatacgtttcttatcatttcttagccattaagaatcctctacttttaaggtattggcaaattttgagtatcctaaaatactccaagatttctaaaatcaacttatttcaataatctcatcaagatttctaactaaaatcgttgtgatatttttggcctccaatcggatctccagaatcgctgaacctgaaaatatttttatttcacaaataactcatattatatccatgtatttcaaataaatctccataattaacaaattatgcttatttatccact

SEQ ID NO: 338734 - DNA, 779 bp, Cannabis indica
attttagagtgtcacgtcatcgcctcatacctttcctttatatatatatatatatatatattgatgtttggaaggatttttgttaaggaaaaaaaagtaggaaaaatgtagagaaaaaatggtgaaaataaaaaaataataataaattcttatattttgtatggaaagaaagattgaaaaatacattcaacaaaaaaattcatattaagcttaaaaaattgacccaaaattatattttatacatgtattttttatatatgtataaattcacaaatataactcttagattgcaatagaaagagtttcatggaagaaaaagccataactttttgaatgatacaaatatttttttgactattgtggacgatcactcacgatacacattgatatactttcttagagaaaaatcagatgctccacgaatcgaacaaaatttcttcatcttgatcaatgttcagttcaaaactaccataaaatgagtaagaactaaccatgcaaaggaattaaaactaactgtcttctacaccagtggaggtgtgatcaatttcgatacttgtgtaggcagacaataactgtaacgccctgacccttagggacgccacgtgtgtgcttttataaacttattatcactaatctataaattttggaaaagtgtggtttaatttaaatctgtaattaaattcaaaataaagactttcattttaaatactgtcgtaatatagggatcccctgtttataaaaaaaaatcttttgcagtaggttacatttttaaacataga

SEQ ID NO: 338735 - DNA, 671 bp, Cannabis indica
aaaacaaaaagaactaaacaataaaaacataaattgacagcgacactaacatgcttgcaccagataaaatactgctctttcacactttgtttagcgacgaaaaatgctctcagaattagataaaatagaagtgtaattagtggtagtgaatatgcattgaacttgtgtgtttcaatcgagttttacatgctatctatgtccttaataattatcaagagtaattcaatcaataaagtgtgcaaatacttcccaccaacaccttgaatttttataacaactaccctcgatcctcaagtttaaaaagttcgcttccataagttgaactagtgcaatcctctccactaatgtagcttagctttacaacttagatcaaaaggacttgattaggcttgaaatgtgaggtttaggttccggttttgtaaaggatgacatttcttaggctcatgacctaattacctcaatttatcaaggacttttttttttctcaagcgctcacctaaaatttcattctcaacccacaatgttcattcaatctagttcccactctcttgctatatgtatgtactatatatacatatgtatttttttttttcaaatcaactagaaaaagagaggaaaaaaaacaacctttttctttggttaggggagggtacaccccaaacttagcctta

SEQ ID NO: 338736 - DNA, 830 bp, Cannabis indica
attataattaaattttattttgacaaaaaatcaattcagggtcctatttgtactattttaaaaaatacagggtccattttgtcatttaacaaaacacagggtccaattagtaacttttataaaacagagggtccaaaatggtatttacccatttattatattaaaatatatttacttatttattatatagtactaaaaaaatatatttaaaataaataatattataataaaataaataaaatttaaatctctaatttttttttattttgttaaaaaaaatattttttatttattataattttatgttaacaaaccatacaaattagttttttttttttttggagtaatctaaaatttcttatatacttattataatttaaaaataccaaatacatttttttttgtataaataataaaatttttagaatgtccataaattaaaataatagcctgcaattcaattgggacatctccctgttagagacacgaccaaagttagaattagaaaaatgagttaaataatcagccgcctaattcatagatcaatgaggacaaatttcgttagtgaaatgctccttttttgttagtaatgcatatcaataatgacattttgttgatgaaaagtcgtcagaaaaagtttgttgacaaaaagtattatcaacaacgacatttaaaatcgttggcaatatacaatatcaatgacggcaatatcatcattgataatacttaattttttattttttttttaaatatttgtgcacatcacgacaatattgtcattgattatgttatcaatgacgacattgtcgtcattgttaattatgtttttt

SEQ ID NO: 338737 - DNA, 541 bp, Cannabis indica
tctttccaaaattatttttcaaccaaacaaaataatcaggcccattagtattccattccattcctttctggcccattaccatcaaccaaacgggcccttaatttcttttgtttcagaaaaatttgtggtaaaaagcaaatattagagaaacgagcgaaaatagtgaaaaaatgggtcaaattagagttattatgccttttgatttactttgcaatgtgtaaaggacacttatcctcccggtagttaggagttagttattggttgttatgttcagttgtagaattagttagctacttcttgcagctgttactttgtaacaaacatatataaaaactatctctttaatctttgctcttcaattcaatccatacaacttaatcttcttcctcgtcttctctgtgctttctctgtgaaagattgaacttcacatggcatcaaagctccattaatcgttcatcaatagaagcatcttcagtgcacaactgaggagcattaagattgaacaatgctgaagtgcaaaacatgttgggaatattttacc

SEQ ID NO: 338738 - DNA, 853 bp, Cannabis indica
ggtttttttttttttttttttttttttttgaaaaattaagaaaaataccaaaaaaacaaacagttaaaacttcataatcattacaaacaatgttggctagaatccaagagagatcaactcagccatatacatttcttgcaaacattcattttatcatattatggacagcaaagttataaagttctcaaaaataaaaaaaataaaataaaattacaactagtcaaaaggtgagggtatttagtttgacatgtaacatatatatgattatttaaaattaataattaatcaattttagaagaccaactacttaaaaaaaaaaagaagtgtaagactacaaaaattgttatttttaaattttttccctttagtttaacaaagaattttcctattatcatataaattgcattttttttttggtgaaagaaattattctaaggaatattctttaatatatgataaagaatataggttgaggaagaaatgtttctatttccattgagttgtgtggtcaacaaatctagattaagaagaacgaaaatctatatgataccatatgattagcctattaaaatatatactaagtaaatctcatattatttattaaagtatcccatttccattgaaaaaataaataaataattgacaaaattaaaactcactctggactttatttaatttaatagtttccactttcattcgtgtggttatatgttacaacatgtttatggaaaatgatgtaattcattatttttaaaacataaataatgtaattcattattaaaaaatatatatttatagactacagactaattttattaatattattttggattttttattttacaaaatttat

SEQ ID NO: 338739 - DNA, 423 bp, Cannabis indica
taaataattggaattgacatttaaatggttaaattggaaaattggcatttttgagaaaatgggattgaaaaatgacaaaatggaaaaattgcaaagtgaggcccattatccatatcatggccggccactatgcaagtattttaccattcatattttcattattttaatgccatataattctaacctaaacctagatggcttactataaatagatagtgatggtttaggaaataatgacttgcatctcattcctttcagagaaaaacctgagcctcctattctttttccctaaccgccactcttattctcttttcttctcttcaattttcaaaataccctagtgatagagtagtgcccacacacatcaagtggtatctttatcatagtgtggaagattgtgtagaatccaatcaacaagaagga

SEQ ID NO: 338740 - DNA, 839 bp, Cannabis indica
ggcgagacaaggccaattcctgcaccggatagttgatctgtagctgacccgtccacatgtagcttgcaagtcggcttgtcttcactattactcggttgaagtatttgtactggctctgggttgttttctaaaatgctctcttctttacccgtacattcaagtacaacatatgccaaggcctgacccttaatcgctgttcggggttgaaagataatctcatactggcccaactccactgcccatttgagcaaccgtccagaggcgtccgatttttgcaatatttggcataatggttggtcagtgtatacccaaacaggatgagcctgaaagtagggccttagctttctcgttgctaggattaggcaataagtcagcttttctatcaatggataccagccttaagcctcaatgactcttttactgatgtaatagaccgagtgttggatgtttttttcttctctgattaatacgacacttacagcatgttccatgatagccaggtatattcctaattcttctccgtccagaggttttgagagcacaagaggtttcgcgagttgcgtttttagctcctgaaaagctttttcgcattcctccgtccatgcaaattgcttacttcctttcagaatgttgaagaatgggacacacttgtctgttgactttgaaacaaatctgctgagtgcggcaatccgactagtcaaactttgaacttccttagtttttattggtgatttcatatctaggagggcttgaatcttctctgaattggcttcaattccttgggcattgacgataaagcctagaaacttacccgagctgactccaaaggagcactttta

SEQ ID NO: 338741 - DNA, 961 bp, Cannabis indica
aattgataagatgaaccaaaacatacacaaatgaatgaagaatacttctgtttctttattgatgttgaataaactggattacattgaaatggagttttatttacggcataaaacccaatagttggtactgtagtgcatttggtacagtggtcgtacttcccttaagaacgttcttaaccatttcgtgagctcggtttctggagctcaggacggcttaggcataaagccgatataagtattgtttatatatatgttatgaacatcttactgagtctgttgactcaccagtttgctacctggtctaggtaaaggaaaagctaagctggaggaacagtgagataaagctcgatagtgattgtacatattgcggcagtgcaacatggagggtttcggtctttcaacatttttagttgcttttgttgatgcctgtcgtttgtaaaaataaataaatagcaaaaggttttatgatagaaaatgtagttttcaactgtattttataactcgggatcccgacctatatggttaaattaattattatataataaaactagcttttgagtttagtaatttcaaatacgggcgttacatttaattatttagattaaaacaatagataattaatagcatatcaatgttcggaatcctctctctcctttcttctaatattcaaaccctatgagttgagtgcttgcttgcccacacaattcaagtcaatactcaaaagtgtgaaagattgtgaagaattttgtcacctaagagcatctccaatgggaaaactttagagaatgcttggtgaggtagacatattatgtggcaagatactgagatgctataccattggagaaaagagaatgtcattctagaaatttgcatggatgctatgttgtagtattgatgctattcattatttttttaataaaaaattgaagctaaaaagttattgtagctaaaaattaggata

SEQ ID NO: 338742 - DNA, 505 bp, Cannabis indica
attaaaaattaattcacaaatattaataaaataataaaaattagtgttaattgtcttttctaatccacattacaagagcggtcattacataaatgatctcaagataaaactaaatgaagagtttgacatgaaagaccttggataagccaaaagaattttgggaatagacatacatagacctactcaaacttgtatcactctatcacaaagtagctatctgcacaaggccgtagacaagtttggtatggacaaatacaagccaattgctactcccgttgctcaacatttcaaactatcaacatctcagtctccaaacaatgaaactgagagaatcaagatgaccaaaatctcatatgccagctgtgttaggagtcttaagtactccatggtatgcacaagaccagatctggcacatgccatgaatgttgttagtagatacatcttagatctaggcgcagaacattgggagcattaaaattgaggtatgtaatgttgggttttatgc

SEQ ID NO: 338743 - DNA, 671 bp, Cannabis indica
aaagcattcaagtaatcttttccaacatcttcaattctttttcctttttgaggttgtataagatcttctgccatccatattaagaatagtttttctctatcaaattcaccaaatttgtagactttgggaaatatcgaaagataagagaaacatggttttagataaggaggtagaaatcggtagctcaaccacaaagctggaataatttcgatgttgtgagaattgggcaactcccacatatcactctgatgcacatgtctccactagttaggagttgacatagatcgtaacagtccagccattgattttacagctaaaggaagccccatgcacttcttaacaatgtgtcttccgatttcttgcaactcagacaatgctacctccttagagcctacattatcaaaagcatgctctctaaacaacatccaacattcatcatcagacatgtttttaagcttataagtttgaacatctcttgtcttcatcttcaatgcaacatcttcattacgtgtggtgacaataatcttgcttccttggatgccagattgaaaggagctcttcaaaagatcccacaactcgtaattctcattccacacatcatcatgaacaaaaagaaatttcttcccggccaaagcctccttcaagtctttttgaatttgatgtagctcttt

SEQ ID NO: 338744 - DNA, 478 bp, Cannabis indica
ggagaggtgcattgtcctcagttggagcttcaggtcatacataccactgaagagcagcatgtttttgtctgataagaaattctatctcgtccccaactgattacactcattagtgtcatgaccataattattgtggtagtgacaaaatttgttcatgtccctcttccttgactctttgaaaggaaaaggtttgcaatatgacaccattgactatgtagccgtatggatctcctctcttggtgtcaaaataatggagtaggtggtaaagcaaggctcatactctcataagggcttgcccctagtcttgggctttattccaccaggggagttgcctggcttaccaccattgttttctctcttccctccatttgatttgtattgcaccttagtagtaggggttttagagtttagtgacctcttctcgccaccttttaagcctttggctcgggtgacgacttcttttagcttgataaagcca

SEQ ID NO: 338745 - DNA, 916 bp, Cannabis indica
tttagaatctatagcctctataacttctagaagtaaaacaataattttcttcgagcttgatttaacgcgataaatgattgagatctcatttcagtatttatattagtttattgaaatgtcatttacaattagctaagttttttaaggatagtatacattgaagggtagaatggtaaatttgtccctactcgatgtaaatcaaatatagaggatctttggctatttagattgaaacaataagtaattcaaattgtatctatttttggtaatagagcgttctatgtaattaagagttcaattccaaatctatagtggagtcaggaggacttaataagttaggaaatttacttggtaaattttggatctacttattgaaagcttgattacacaggggcatcatccatacactaattgggataatattgttttgtagtctcaattaattagttttaattaatcaattagaattttaaattagactatgtcttgtttgtgaattttcaccaaagaagggcttaattgagaagaaaagtagatttaggatttatttgttaattaaaagactttgttaggtctaattaataaatatatttaaatagtaattttatttgataattatttatattattaattagatagaattagtatttaaataactagagcagaaaaatgacattattgaagaaagacaagtttctttcattaagaaaacaaaatattggcaaaattctaactcatggactttactaaggggttcgaccatgagatggattctaagccattggatctttccaatcagcccattaagttctaaccctaaatctaatgaatccctataaaattaagggtttttgattctatagaagactctagactctctcttgtctgaccaactataaaaagtcattagcttgca

SEQ ID NO: 338746 - DNA, 632 bp, Cannabis indica
taaagtaccgggtaaacctcttgaaaatctgaaccatctcatacaaaagtgtggcaggagcctctttgagtggaacttgacacaaaaaaagttaactttgctagatccaaggagttaaaagagaagattgattggctttccaattcgcctaatttaacggattgcttagctcgtcaaaaattggagaaggatctcaattgcgtggaaaaaaagggagatgtattggagacaaagaagccgtgcactttggttgaaacatggggatcgaaacacaaaatttttccactttaaagagtcagctaggaggaaaaagaataccattttggggctgtatgacagccaaggtcgatggcgcacttctgaaaaagacctggctgatattgccatcagctactttcaacaactattctcgcaatctaatgggggatccgagataagcgaagaacttagaggatgtgttccttgccgaatcacttcagctgaaaaccgagcattactagaacctttttcaagtgaagaaataaagtctaccttattccaaattcatcccttaaaagccccgggaaaggatggactaccgggccttttttccaaaaaaactgggatttaataggcccggatttaactgctgc

SEQ ID NO: 338747 - DNA, 843 bp, Cannabis indica
tacttgttaaattaacaagccttggtgcattcgcgaatcgatattgatttaagaatataaatgcacctaagattaactttggtgcaatccagaaatatttagttttataattagttttatgcgtgttttattgtggatataggatgtcaatttccctttcccttttctgaagtccccaacctaatatagaggagatcaattggaatgattgttaggtaataatgtataaagctgattttggttcaattagaaaaccgatacattaagattcaataaccaaaataataattttgcttcaaaaaataaccaaaataatatccatgagcaccatgttgttgtaccattaaagactcagacatttgtatcaagtatcaattgattctgcacaacaaattgaatagaacgttcatatgtaaaaccaacccattttctctcaataggaaaaaaaacaacaaaacaaccctaaatgattaagttagttgagttagtatttttataaactcagaatgttacaaatttagattttaatccttaatcttactttacttctaaaagaaaatgaagggagtatattgtatggtcattgagatctgtaagacccatcaaaagcataggaacaagagaatatatttctgaattttttattacacgccccacctaaacatagtatatgaattacaattgctatagaacaaagaactactatatgaattagacaaaaaaaaaaattgttgaagtgttatttgcctagctagctggacttttggatgggtatttgtctaaacctgcattcataaaacaaaattaagttcaaacataaaatattttaccaaaaaattaaat

SEQ ID NO: 338748 - DNA, 774 bp, Cannabis indica
aaacctagacactagaaggagcctaacagggtttgtgttcactgctcttgggggctgaatcagctggaaatctaacctacagaaagtagtagccttgtcatctatagaagctgaatacatgactgctacaaaagccatcaaggaggttagctgggaagcttaaatccacaagtcctttttttttttttttttttaggggatgtattatgatgcatagttaaattattttaacacgtacttctctctgggaagcttaaatccacaatgcctggattgtatggaagcgtagtatcattgattatctagcttaccattctgtttcgtttttctgtttctcaactaagcaatggcggatgcaactcttagtgctttatttgaggattcagttcaagtatcaacaaaagatctctcatatgatctccatccaggagaagtcgatcaaaacgaagaacctagccgaatactacttggtaaaatatactgttattccaggctgggacgtaaagccatacacggctctctaagaaatgcatggaactccctcacgggctggagttggaaggaaagggaggatggcattttgcagttcacctttcaaactagaatggatgctgagaatgtattacttagacgtccctggctggtttgtggccatttacttgtccttatgccatggccgtcctggctctcaatctcggaggtaactttcgaccaaactcccatttgggtccgcctaaagagcattccccccttctactggaacaagacaaatct

SEQ ID NO: 338749 - DNA, 522 bp, Cannabis indica
cggggcctggaacagaccagtagtcggtgtctagatctggtactcagactaggaccagaacgcagatgaagaaccaaaatcgaacccagacatagacctgggacacaaaattagaacctgaacaagaatcgaggaactaagccctagaacaagacaaggaccgcgaccaggacccggacccaaacctagaaccgaacactgacctagcctcagacccaaactgagactggaactaggtcccagacacggttgtgtacccagaccggaagtgagactcggacctggaccaatatttgggaccagatcccaaacgcagacttggaccatgataggcatccgggtacgaacccaaatacccacacctagaatcacacccaaagctagacccgtacctagacccgaactcgaacccagacacggatcagaacgaaggacatagatccagaactgaatctcgactcagatcggtattggaacttgggactcgaacccaacctagaccaagacccaggacgcgaaccc

SEQ ID NO: 338750 - DNA, 582 bp, Cannabis indica
atattcatccgtagtgaagtaggttctgcgaatacatgtactgcggtcggattggtggataaattttgtattgtttatgttagtttctttgttctgtattgttatatttgttttgtttgttactttaggcacttttaaaatttttgggaacgtccaattacagccgttatgctgccaaaatttcggtagaatttggatcaaatttcggtagaatttagtgttagtagcatgattatcaattttgtttgttaatggtgtagatatggccaactcgagttcaggatctgattcagacccagaggcagagtgtccaacagtaatacctacaagagggcctactcaaatgaatgaaatatccaagctaatggatcaaggcaaaagagtggccctcgaggttaatgacaaaggacaatactgcgggaaaagctatgctaagctcgtatccactctaggtgtcagatgccggcagacgatagggttgtcctataaaaactggaaagaagtcaacccgactctgaaaaataaagtttggaacgacatacaagtaagctgttatttgttagaattttgatttgtttttct

SEQ ID NO: 338751 - DNA, 979 bp, Cannabis indica
gtgtgctatgttcttggagtaaatccaccattgcacattcttgaaggatttgcaaaaaggatatggcatgataaggttgatcgagtgaaagctttatctcatggattttttattattcgatttacctctcttgaattcagagatcaggtcatgaatgggggttatgtgttctttaatcgcagacctgtaatattgaaaccttgggaccctaatactaatttcaagaaagaggatgtcaagtgtgtcccaatttgggtacaacttgaggatcttgaattgaaatattggggccaaaggtctctctttaagattgttgggcaaattggtaagcctcttatggaggatgctgtcactaaagatagggagaggctgagctatgctagagtgccaatcgaagtgcaaatggaccaacaactcccgaacatgatagaattcgaaaatgaacatggtcttaatacttcagtgagtgtcgaatatgaatggaagccgattacatgttcccactgctctgggattggtcactctgctggagaatgtaaaaaagctgctgctccttcaaagaaacagtgggtggtgaagaatgacaatcgaaaacataaccttcctaaggtagatgctgaaggcctcacgaaaattgtaaaagggccgagaatggtcaggaatgaagaacaaaagatgcctactgcagtaaggatgggaaacacatttcaggcacttactttagaggaacaagatggaaataatgggggaagtaatggtgaatatggttttgacaaggtcagcactggtgaagagaataatggcaatacaagaggggggagggccctctctttctaatggatagattgttatgttggaatgtccgaggagccaatcatcaatctaaacaacaactaataaagaactttattttttctcaaaagattgattttgtgggtctcctcgagactagggtaaaggctccaaagcttggagcctt

SEQ ID NO: 338752 - DNA, 781 bp, Cannabis indica
gcgcccttcagtgtttttattattttttctttttcctccggatctacgctctttcccagctggagtactttggtggagtcgaggtcgcacactgatatttcctcgacatcctccattaattctacattttttcgaaccccacccggggatccaactcatcttcttcagccatttctggctcaatggtttcccggaccatcagcacgggcaggtgggttgcaacattgtaacattgccttgcttccccctggttttctctcaccgtcccgattccagcttcctgggtagggaactttaagcacaagtgccgaatggacgtgactgcgccaaaatctaccaaggccggtcggccgaggatcgcgttgtaagcggtcgggcagtccacctccacaaaagtgcagtacttgaatgtgcattgggataagcatcgtttcattaaaccctgtgagttgggaaccactgggtgagaggtctcggtccgtcaggcctattacagcgaaggcctccttgaagagtagattcacaaaaattccgttgtcaatcaagactctggccaccactttattagcgatgggggtctctatgaccaacgggtcatggtgagggaagcgcatcgtcctggcgtcttcttccgtgaacgtgatgggttgatccatcagccggggcctttgagctgggagttgagtaacctcccaaacctcattgtgttttacggccccagcataccactttagcccttgcgggtagttcctccaatatgaggacctccggagatcatggc

SEQ ID NO: 338753 - DNA, 672 bp, Cannabis indica
cattgttggtctaatttaatgttgttttaatgagacaaatctcaaaggattgtcattcattaggcaaacataatagtgttagatcttgacagataagtatttataaatgcaacatctagttgtacatccaaagatgataacttagactagtatttacaatatgaaacaatgaagtaattcataaaataagaataactttgactcttgcctaccgggacatcgttggattcttattttaatcgaaattattctttattttttcctcttagctttttcatttatgaaattacttaaataatatatcattggataaatagtttataaatcatatgcttatgatgtcattctattttcttctataaaattgaatggcacagatgactatattcccgacattctatcccgaaatgatataaattatcgatcttagaaatctcatacttgtatatgcttacttaaggcaacctaaacttagagttagattagtagtagtggtccaagaaagaatcattactcaggcaatatttagtataaatttaaggctttgactttaagttttagattcccatagaaatgtttttagaatacaatacagtataactttcacaagttgttaatatccatttcatgtcaatggattcgaatagtttattaatgtatggaatatgagtt

SEQ ID NO: 338754 - DNA, 614 bp, Cannabis indica
aattttcctattgatttgttatcccttctagtaattgagtttaatggttaataaatactgattttctaattaaaaaaataatatttcaaaaaaatgaaaataaaacataatattatcatatgttaaattaggattttttttttaatttagctaaaaaaaaaaaatatttttggtttttttttcttccctttttctgaaaatgacaaagaatgatatcaatataaatggcataacaacacactaccgaatccgggcgtgatttatatggaatgatatcaatatattgactccatttttgcttcattattgagctttacagtacagtccagcaaagcccatttcccttaataggacctgtttcctgcggcccaaacaatccgaatcaccgaactgaatatattaacaaagcccattttcctttgagcacatcaaagtgctataataactaaattgtaaaaataattaaaaaaaaaatagttaagtgcttcaaattaattaatagctcattgaatagtggtgagctaaatatattgggaaatttagatagtatacaatttttgtcatttttttataaaaatactgtcaagcaaaatattttacttttttactgtgtt

SEQ ID NO: 338755 - DNA, 511 bp, Cannabis indica
aaagtagacagtacattacaacaaaacaacaatggtggagactcgaagcacacgtcaacctcgccctcttcaagacgctcaaaatccaaatgatgaggacgtggcctcaagagcaactgtgggttctgaggaagaagaaggaacccctgatgacgactacgaaggaaacttcgatgagtacgcctacgacgaaggcagctactcagagttggtactcttaaggcaaaaggctgtcgatcatgaagctgaaatcgcagcccaaaaagagcaaaaccaaaagatgcaagaggtgatgctggccatgcaaaaagccatggaggcagcaggaatccacgtgcatcctaaagccatccctgctggacttggaaaggaaccagaggaatcctcgccaagtacccaaaagcagaaatctagggaaccaagccctataaggtatcccgccgaagggaaccaaaagaaaaaccctacttccactcttgggaaaaagaaaaaggtgcaggatccgcgaaag

SEQ ID NO: 338756 - DNA, 544 bp, Cannabis indica
ttgttggcgaagatcaggtttttttttatttcaagtgctctcgcagatctgactgggagtaattactggcatacctcgttttactcatagattgcgtcctactcatggaccttgtcttgctcatggaccttgtctttgagtgactcgtggatttactagctcccatgctttctcgatcattagctcgtcgagcactctctcctcttcaagttgatcggctgtgggtccttgaacgccctgaggtcacacttgcttcttcacgctctgttcttcaccctgagtgtggtttgtcgtattttccctaccagggtttgtacgagccctctctttgatgggttcgggaagaacgctggtgattcctcgcaggtgacctacgttccctaggttgagtcccagggtcttcctcatttccatgaggaatttcttgttcattggtttctggttgcctcctccaggaggcgtctaaggtggcggttttccgttacgtaagtgctatctcccttaggctgagtaccttcacgattgggtccttcatccctcattc

SEQ ID NO: 338757 - DNA, 636 bp, Cannabis indica
cttgaacttttacatttacagaagtttagtccttatgttaggtttcatcccttatttcgtttaaatgctgatgtgtctttgtaaattaacaactttgtctcttaaactttaacaactatcaaaatgtacccccacaaaattaaaatgaaaaaaaattaatattttttttaataaatctaaaaaaattaattaagatcttaaaaaaaatattttgaatgattaagaaaaataaaaaagaaattaaaatttttaaactaattaagcgatttaaaaaatatttattttttttattaaaaaattcattttagatattaacaaaatttattaaaaattttatttttacaaaaattaaattttacggaaacaaacttgagttattttatttttctcaaaaaatatagattttttttttaattaaacataacattttttagtttaatttctatttttttttcaaaataattttatattttattgaatttttaattaattttctttatttgttaagatatgagtttataaatataaataagtttaattttttgtttaaaaattcttagtttgtttaaattatttattggattctcattaattttggtttgattttttaagatatgtatttataaataaaataaa

SEQ ID NO: 338758 - DNA, 887 bp, Cannabis indica
agcaatttaacgctatagaatcttgaaagataagtattatttgtaagtgttttttttagtatggatcaccctaatggtggcgactattagtaagacttacaaaagtatgaaacaatggtggaggctcatgaaataggaatgaccttgactctcgcctaaacgggacaatgtcagattctattttcgatcgaataaaaggttgctagaatgtttgtcattttagataagttgactactctattcaatggatgatgctttaactctcgcctaaacgagacactgtatcagtttgttgaaaaccttggaaaagaaaaatatatttttttggtatttttataaacatatttgttatacttgttattttttgaatttgtgcatgaatttattgaaccaaataatttacatctgtttattgatatttgtagtgtcaaaatgaacaaccccacccgacccactcctagtaaatgcctttgcaaatgaactctatagtgtgaaaatgctccctggaaagagcattaactcatacttgtcaatgatgaatctgaaattccaaaaagcaaacttgctcctgagttcattcttaatagtcttcctcctgagtataatggattttttgtatcttatatgatcaacgattttaactcttccgacatggataagctagaagcagaattgcgagcttatgaacggaacttgattgcaatgccgcaccccagatttgcaaaattatgtaagaggaaaagaattaaggatgatgcttctaacaatgctgcttcttcaagtacaattgatggtagtactcttcaatgttcaaattttaatgagaagggacatcaggaagaacgatgtcccaaacttgtaaacaattcgaatgaaggtaatgcttt

SEQ ID NO: 338759 - DNA, 1099 bp, Cannabis indica
taaaataatttccaacacgtaggtcactgacgaggaatcaccagtgttcttctcgaacccatagagagagggctcgtacaaaccccagtgggggaaatatgacaaaccacgctcgaggggaagaatagatcgtgaagaagtaagtgtcacctaatggcgctcaaggacccatagtcgatcaactcgaggaagagaaaatgctcgtcgcgctaatgatcaagaaagcacgggaaccagtaaatttgcaagtcactcaaggacaatatccatgagcaagacaagatccgtaagtaggacacaatctgtgagtagaacgaggtctgctaataattattcccaaccgaatttgcgagagcacttgaattagaaaaaactagatcttcgccaataactcgatccaaagtaagaggatcctatccaattacgaatagacgagttggaagataagtttaggagatatcaagtgggggaatgaggaagacaatctggatacgagtcagacgaggagctcgagtcgtaccatccagatatcatgaatactccattccctcagagggattaaaaaaccctcacatttcatcgtataatgggaccaccgatccggtctcgcatttgaataactttaacacaataatgcgagctagtaatgtgacaaacaatttacgttgtattttgtttcccacctcgttagttggagcagcaagtagttgattcaacaaatttgctcatcattccattacttcgtgggaacagctgtccaacgactttaaaaaatagttcgaggcctcaagggataggcaactcgaggcatccttgctaaccaatataaagcaacagtaaggctagacacttaaagcatatttaagttattttagcacgggtgctacaagagttagaaatctggatgatagtacacaactcattgtcggaatatattttaccatgatctagatttactaccatgtatgtaacaccctaactaacataggcgtattatgtgatttttaaacatactgtgcagctcgttgctaatcaacgaggtttatggaaaaatgtgattaattaaaatttttacttttaattaacttataaataatat

SEQ ID NO: 338760 - DNA, 932 bp, Cannabis indica
tgactaaacccaaattacaagaactgtaagtctgtggcaagcaactgttttgtccaccatacttcctttgtgttcataaaacattatgcaacatcattttctatatgcattactcatctagggatattgaattctttactgcttattaagtgcatctgaatatacagaagacatatctctaattctatccaaatggaatagaaataaaccagtttaagaactttttcagtttgaataactttccagtacttttcgaaagcaacaaagttatttagcttcactgatggagcttaaattattatagatgggtttttacatccttgtaaataattcctccacccctagagtaaccaccatctataatattctgagttggtgtagatataaggattctaatatacacccctatcatctaacatataggtcactttcataattctttcttaattatctcttaatgttccttgtttaattaacatcttagatggttcccactcaacaatagaagtctggttaaattcgtacataggagtacatttaacctcttactattggttctcaaggacctttcattgtgatattttatcttagtctgacactataagtttcttctagactaagtcatcaacatatcattctagtactaacaataatgtaaaatacttgcttaagaataagtaatcattaaagataccataaaacatttcataaggattaggtattttgcctaagtcattcgaatagacattgcaaaattctcttatcttattctcataattctaataagttgtttatatccatatgaatggttagatttactttctcaattttatttaaagttcctatcatgatcataacatagtaagctatcacaagtgtcatccaaataaagatgcgctagaattttaaaattctcccactcagataaggta

SEQ ID NO: 338761 - DNA, 757 bp, Cannabis indica
tttattgtatattttcagctggtgtatataaatttggtgtccatattttgtgtatctaaacttggaaggaaagttatctagcttttctatttatgaaaattgaggtaaaaatggtaagttttgattaaacaatttattcttatctaaccagctggtatattctgatcttatgtgagtttcccattttcttagatcatatttcttgaaaagaaaatcggagcaaaactttccttttctataaaaggaaagttgtacttacttctcacgattctgtaggtacaaaaatgaaaattcctcggctaattgaagatttattgtaggaaattttctagtgggctagggtcttgttcagaccgtgtgtaagctgccaataaggtgtatattgattatagatacaccttattacagctaggtttagtatctctttgatacacttagaattgtattcatatcttaaggaaagagtgtctttatttggtagagaagagcttattcgactcttactctgtttatatgtattttgtattgtcttgagtctgtattcaagtctacaaagaagaagaacattagggctaccttcggcagaaggttttacaaggctttcgggagattgcttttcaagtcttgcatcgggaggaagcaagcactcttcaaggagatcgaagggattttagctcttaaagttttatcaagattcggttagaaggtggaatacatcaagcttgtgacatataataagagggagtctatttatgca

SEQ ID NO: 338762 - DNA, 786 bp, Cannabis indica
tattaattattcaaaactacaactaaataataattattaattttttattactactgttgacacgatttttcgtcaacttaatctaagaagattattaattcaagaataaaatcaagaaaagaagagacaaaaataataaatgagcaccatatatttttacatagttttgtagttaaattctacatactccacgagtttatattatttttgagttttagatgtgtttacaatttggcaaaatttctctcaatcataattttctccacctttaccctttgaatgaacccctatttataggaataagatagtggttactcaatcttatcttagtgaaaaattatacaattgatgggtggttactgctcacgtctcacatataattaacaggatatttagataagtataaataactgctttatatttaaaatacaaaaaaggagtctttgaagtggtagttgacttggtcacatcatattatttgagagtaggtgcactgttgctgtgtaatacgaggcaatacattgctacatgtgtattacgaggtgattcatcactggttatgtattacgaggtgattcatcattgctatgtattacgaggtgattcatcactaactcagtattacgagcagctacaagatctttgttgcgagatgttaaatgtttatcgaaataacatcctaaaaatactaaaatacctcacttcatgaaccttgtaatctttatttagatgagatcacctcactggttgagtcttgagttttttttgacctgtcccacaatgtat

SEQ ID NO: 338763 - DNA, 961 bp, Cannabis indica
atacaaaggggacgacaacactgcctatgttcgaggagtgaatgtatcagtcactatggaatctatcaacaactcctttagcacttgatagagaggtcttatctgatgttgcaattgcccaagagttggggcaggagggcactcgatttcatgttgaagggaatcagaaccaaaagttcctttaccggtggcaactcaacccagaagccagagcctggacatattttgttaactctagaatactgccgacgtcacacacttcatccttagactatgagcgatgcgtcatagtttatgctattatggctagaatgacattcgacattggttgggttatcttgagaaacatcaaccattttgctgagatgaagacaacagcggggccagtgcacagtgccctaatcactgccttatgcttgcaacagggtgttcctgagattgaaggagacgtcttaaaagcgcccatgcagaccatctctcgccggatctactatgacttccctcttgcctcattagagccgccagaagaagcacgcaaacgccaaaagggtgatgctgatgttgaggaggaggacgcagcaggcgctggcaccagtgcatcagtgccacctatgtcccagcctgagccaccattggacacccacacccagggcactaatgatagactggatcacctcataaggcaaaaccattatctggttcagtctaaccagtatcttgttcaggctcatcaagcacaagctgcgtattacaatgcatatcttgagcagcaacatcattttgctcagagacaagtccaagaattgaattctgctttttcgaggtggacaatgaacccagaggatgctgaccatttctcgcagcccccaccgtggcagccataccagccaccaccacctccaccgccatactgatgtggcgctcaggtaagtttcctttcctttttctttaatgtcacatt

SEQ ID NO: 338764 - DNA, 690 bp, Cannabis indica
ttcttaaaaaacaaaaataaaaattacttaagggtttttgcaacaccctaatagattaggcgtgttaccgtgatttcttaattgttgtgcacacctttactaatcaaagaatttattgaaaaatgtggataattaaaattttcttaaataacttaactttaaagataaacataatttgtataatttgggatctcgttaaaatttacataagtctacaaaatacttgtgttacaaaagttgtcttcatatgattattaaaaggtgagcctaaattttcccgaagaccctaaacgctctaggtctgaccgttttaatatttacaatcttcaccattagctttagactcatctcgattcaattctagctcttacatgcacatacacgtaataactgtgagtcgaaagactcagtaagaaaaatataatcataaacataaacatatatccagacggtaactaggcgtccatacacctactcacgacctgataactgggtcaggaacattctcgactaagtatgactaactgcgatctagcctatactcagtactctagtcgtactgatgtggtagcagttaattcatactattcctagcatatatttattgacatctcagtgaaactctatgtacacctcactgataccctgatattagggttgtacatcggtcggttttggcggtttatccta

SEQ ID NO: 338765 - DNA, 732 bp, Cannabis indica
aatcttttaagcattgaaactcaagaaatcattcaatctagagatgtttactttcatgaagatatttttccacttgccaaaactacatctcctgcatctataaatgaattattctcactttccttaaatccttctacaggatattcacatactccctccgaggacacttcacatgttcccgaatttgatagaacttcatcctctaacaattttcctgtcaccaacattactcctgatgaagtaccatccacacccaagaacatatcaactacttctcctatcacttcaacaatgggaagaattttatctaaaccaaaacgttcctctgatcatatttgcaataccactgctgcttcttctactgctcaccttattaataaatatttgtcttacaaggttgacacaacactttcgagcagcagctctcgctgcccacacctttgtagagccaaccagctacaaaatggcagcaaaggaccctatatggcaaaaagctatggatacagaaactgatgctcttgaagccaatgacacttggattgtcatcactcttcctaatggtcaccatgccattggctggaaatgggtatacagaatcaaatacaatcctgatggttccgtagatcgatgtaaagctcgattggttgccaaaggtttcaaccagaaacaaggtattgattatcttcatacttttgcccctgttgcaaagtttaataccttaaaacttatgct

SEQ ID NO: 338766 - DNA, 542 bp, Cannabis indica
tccgaaatcaatctctttgtcttttgcattttatttttctgcaccttgttttcgggtctacactcatcaacaaacaaagattattttatctttgttattatttttttggtttgtctatttttgtgtaggttcttgtgtgaaagctcttgaagagcgtgaaagagaagaggtagaaaataggtgtttcggctgggttgtgttgcagcaagggaaaggaagaaacacaaggtgtttcggctggtgttgatctgcaacaagagagaaggaaggagaagaagtgttcggctgggctgtagcaagaagaaaagaaggaaaagaagtaaacttggctgctgtgttttcaaaaggcttgaaggaagttgtcttgctgttcaaagaaaatagaagaaggagaggagaagaaggaggccggctgtgttagttgaagagagtgtttgtgctagggttttagaaaagaaaagaatggttttatatgggaataaaaggcattaggttttaaaaataaatctgatattcaaaaagggggcatattcggtttatag

SEQ ID NO: 338767 - DNA, 1680 bp, Cannabis indica
aactttttcttgactgccttggtcgcattctcacttggctgctcaggagcctctttagttaacacaaacagggtatttttcacctatgagagcaatattaatgttctcttttcatttgacaaagttagctccagagagcttgttgtcagtcaacagtgacaccatggggttgttcatagtcatattgagtactacaaatatcaataaatagaaatcaagtaaggttcaaaacaaaatcatacacattcaaaaattattaagcaattagcatgtaggaatggcaagtgaaaatacaaaaacaagtaatcctaaataatatccaagatttacaacaaactaatacaatgtcccatttaggcaagagtcaaagataacattcattgaatagagcagtcagctcatctaaaatgaaaaacattctagcaaccttttattcaattaagatgagaatccggcgttgtcccgtttaggcaagtttcaaggctattctatcttatgagcttccaccactgtttcataccttgcaagtcttactcttagcagccactattggggtagacgttactaagaataaaatacttacaaataatacttatctttcgagattctacggtattaaattgctaatgaacgttcatccattagggatgattactcactaaaacaagaactatgtagaaccaacaatggagatcgaatatctttattataaagctcattatttaaagtgtcttttcatctaatatttattttaatttatatatatttatttaattaaaattaaaattactaatttaaaacactctaaatataaattaaattttatttaatatttataaaattatacttatatagatctaaaaataaattaataattttccatattagtattaattctcaataaatattacgaaaattgtttaattcaagttggtccaaattaattaaaattaaattttcagctcaaatttaattttctataaatatatatgacaaaattcaaaatctaatgtatttaaaataaataaatttttcaaatttattataaaataaaataaaataaattctaaaaaattattctaatttatgttgatccaaaattaattaaaaaataatttttaacacaaatataattttaaaaataattttaacacaaatataattttcctatttaattaaatttctaagaaaaatatcaaatatttaagtatcttgaataaaatcaacttaaatattaattttccatttaattaagtataactagaaaaataccacaagtatacaaaaaataactatctagatatttcactaactaattacttattttctaactaaaatataatatattttaaattaccaaaaaaaaatataatatattttagtctatttattttaattaatcattaatgaaaaatttactagatttaagttagtttaaaattaatttccaactttgatctatttttcaaaaaaaaaaaattatctgcattaaaataatgcattttgaagtgtctagaataaaatcaacttaaatatttaattaaatatattaaataaaagaatcaaataattaagtatctagaatagatcaacttaattattaattctaatttaatatctaagaaaaatattctaatttaagttgattaattaataaatcaatttttaacttaaatatat

SEQ ID NO: 338768 - DNA, 796 bp, Cannabis indica
atattttggctctaaaacatacatcatatattagatctcgttgcaaccttcaaaacaatatatagaacgtccaaaccagacacccgagtcaaaagttatgataaaaatatgatttctgatctcctaagaattttcaaaaattataaaatacaaatatctcaaattttgcactcaccgaaaaactaccaaaacttatccaaatcactccaaacatcacatgacacatatataccataaattttaccatccttacgtagcaaaaattaaaatttagcccttaaatgaatattgctagtaacattcgaactaagccttaaaaagtttcaaactcaattctaacctaaaatcacctcagtttcaacaagaaaacatcgaaactagtcacatgactacccgagaacaatcctataaagttagaaccttcataacacttctaattcacaaaacccctatacgaaacaaattgtttttacacttaaaataaaattaaaccataccttaagcgttttctcttcaaggatttactattctgctactactggagcttagatcgctaggttttgtggtgaaaatcgaagaaaattgatataaggggagaaggttttgtcgaaggggagttaacgagggttgattcgttcattctttactgttatatgtaaaaattaatatatatatatatataatcaaacaaaactgatatgtttcgtttatataaataataattacaataatataataatataatatttgttaacgcaaatttttattaaccaaatttgagcctaatagtgacaat

SEQ ID NO: 338769 - DNA, 505 bp, Cannabis indica
ggacagtggtatgataaactcagtaccactttatatgctaaaggcttccattagtccttctcccataactcattgttcataaaaagaacaccaaccatttatttgggtattttaatttatgtcgagatattattgtggccagtaacaataactctgccattatacacttaaaacaattccttgataaaaaatttaaacttaaagacattggttctcttcatttttttctaggccttgaaataggcaaaacaaaataaggtatttccctttctcaggaccatttaccttacagttgcttagtgatactagttatatgggaggcaaacgagcttccacacctttggaacccaatcttaaactaagcaaagacaaatgaaaactgattttagatcccacatcttatagaagcttgattggaaaactcatatgtctgaccattacaatgttaggttttatgccctaaataaaactccattacaatgtaatctattttattcaacatcaa

SEQ ID NO: 338770 - DNA, 620 bp, Cannabis indica
tctgccatagcatagttgtgcttagaaattcggagttgctgcctttcttcatcggcaggaacgggggttagggcaatgctaggaggcacagtatactcctccgcttcaggtgggatccccgagtcagagctaaggcccggagtgtcaattcttttaggtttcttggtagcctcaaccgctaccatcttgcctttgcatttcctgtccagcggggtgagaatctcgccctcttcttcctcgtcaacctccttgtcctcatcaatcaagacaatttagcctaaagggacgctgaaagaggacctcccaagggtgatcgtctggtcccgtgcctgaggcaaggtggggtcgggactgtaggtctaggcaagagttgccaaaagcttgtccatcggcctagctgcttcaagaaacaaacaaataagtgttagaacgatgacgagaaattacacacacaggaacaaagcagtaaaactagtcctacccagaaaatctaattcagccctaccaaagtcctgcactataatgctggcttcgtcatccccaagaaagctgtctgaggggagaaaccagctggaagacagataagctgaatgatccagaaggataggtgcgggaggccc

SEQ ID NO: 338771 - DNA, 731 bp, Cannabis indica
ggctttttaatttgattgtatttactttcgttgcaatgttcgtttgtgttttaggttctgtatatgtttgtaatttattgttagatatttttgaaacttctgttttcgttttagtgtgcgtaatcagtgggttgtagtttcctcttagtttatttatagtttaatctgtttatgtttgatgtgttttgggatttttattaggtatagttgtttgttgttagtttttaggtatcaatacgatttcagatgtttgcagtttatattcgtatggttgtttctgtttgggagtttgtttttagttttgttatagttttattatagttgctatacttgattattgacaatttatattttattgttgccattttggttatcttgcaggtctgggactacaaatttagtccctctgattattacagatctaaatgtgtttgcactagccttttttctgttattgataatattaagaaaactttatctgtcaatttactgtccatgtttcgtgagactcaatttgatcattttctagatatgcctgagtatgttttccatccccaagttgttcatagtctattattgagggaagtttaccagcccaatcctaaagaattttgggctaaggttgctggtcgttgcatacggtttagtgctgaggagttttatttgattactggaattgattgttttggtgattgcaacaaattgttgttttcacaggaatcaaatcagtt

SEQ ID NO: 338772 - DNA, 634 bp, Cannabis indica
caaaaaaaaaaaaaagttaagtagcatacaatttgatttactaattattatgaaaaattactaatcatttataaagcgtcacttagtggtggtattttgtacttgtgctaatggtggtggtcaaactaaattgtacacaacgaatacccaattaagaggaaatatctcaaattaagtgcagtagccattaggcaattgttaactgtaaatttattcaatgaaattaagtcaataactacgacagaactaaaataaagaaattaaaataaatgataaccactagaattcgagaggttcgactccattgtattgtaacaatctactcaagatgttatttatgattggactaagactagatcacaagaacaaggttctagtgagtttcaaaagccacaaagagagcacatataatagaagagttcttgtataatgaattgcatgtgaaataattggtcatttagcctcctatttataggtttacaatgtgggccatgatctaaaatggacctagtggttaaagaaccatgtcatagtttgactaaagtaaataataaaaaaaaaaattcaagcaaaatgtttctttaacactgataattttatgaaagtaaagttattttaggtttttttttttttt

SEQ ID NO: 338773 - DNA, 736 bp, Cannabis indica
caagtaaactacattgtagattattctatcagttaaatcctgtgtactgataaatcataggaatacatttaatcacataatcttgattatttttcattatgttgacatcacaataaacaagaatatcaatgtgataagaaattagatgaacttataaatcaaacaagtgaacaaactccactttgacttacataaaacatcagttacatttttaataatcctaaattcagtctgtgcttttaaaatgacagtttacaaatcaaaaatttttggtgaaatagattagctaagttgtattcagtatcaattttctccaccaatacgtcccatcttgccacatattccctagtgatgtggtatttcctctctatgtgtttgtttctcttgtggctttaaggctctttactattagctatagcaccagtgttgtcacaaagtaaaactagtggtttttccattccaagaacgacactaagttctgagaagaacttttttagccagacaagttctttagcagccttagcggcagctatgtattcgacctctatggtagagtctggtgttgcaatttgcttagcacttctctaaacaactgctccacccccaagagtaaataccatcctagatgtagacttttctttgcggcttgaagctctaaatatagtcttcttcaaggaatgtggcatttgtagaaacaaacactttattatccttgtgactataaaatagtccaccc

SEQ ID NO: 338774 - DNA, 599 bp, Cannabis indica
cgaggcaatgctgccaaagaagtcaatattgcgacccacatacgagatttctataatcaagaagaaaaccaaggactattaaaattggccttggatctacttgaagaaaaacgtactgagtcacaaattactaatgcaacataccaccaccgagtgacaagatactttaacaataaagtgaagaaaaggctcttcaacgttggcagctttatgctaaggtgagtatttgcagatacgagcgatacatttgtaggagtatttaacccaaactgagagggtccttatgtaatcaaagcaatagtaggaaccgaggtttacaaattagctcggcttaacgaaacgctaataaagaaccactagaatgtgtagcatttgcgaccctactactagtagactgatgctgtaactgttggaaattttttaccaggatctagatttactacaaagtatgtttcattaacatcgtaatatgaattctaaaacaatgaaaataaacacataagagtttatgaaaaccttacattgggtgcagcagaatattattactccttccatttagatctctagcccttgaagccttcctgtagcagagcattatc

SEQ ID NO: 338775 - DNA, 452 bp, Cannabis indica
gtaatgggttttatttagggcacaaaacccaacagcagtatccttaggagcatcttgagcaggaagacgaggttgaagaggagtaggtgactccgctcaaaagtaagaagaaataccagctaagcacaggcgtgttgaacatgcaattcagatcagggagcccagtctacctactcggccatccacttctctagtaggaaaggggaaagccgtcctggaggaggaaagatactagtcagatgatgatgagccatcaggtcttactcgggaaaatgcttcttccgaagtgcaagatactccgtcttgcctttaactttcttgattattatgatttaatacttctagtgctttttctctaaccatgttgcttttatttcgtgcagacatgtctcagaaaatgcttgaagctctgaagaagagagtgggatgaagctcagacttatctcctccgg

SEQ ID NO: 338776 - DNA, 558 bp, Cannabis indica
tttttttagataggtttatcttttatctcctatgaattatgaatgcataataaatatttgtgagaatattggtttaatttatttttttcaattattttaaattaattttttattcatattaccttaaacgatacccgatgggtattctcctaccccgaatccgttggttattagacggggatggggcggggatgggggtataaataggtagcggggatgggggcgggaattgtattccccgtacattaaccgcccaatttccatctctacctattagaccctctgttttgttaaataacaaaatggactctgtactttccaaaagggcaaaaataggaccctgagcttaatttttgacaagtttatttttttttaatataaccaacttgaagacaattcctaatacgaacagatacagaaaatttaaatagttttgtcatagcacttttatatcggttataattaaattttaattcagggtcctatttgtactattttagaaaatacaaggtccattttgtcatttaacataacataggatccaattagtaacttttg

SEQ ID NO: 338777 - DNA, 705 bp, Cannabis indica
ccacccccagagtaaccaccatctctaatattctaagttggtgtagataaaaagattctaacatacacccttatcatgtaacatataggtcactttcaaaattcgttctagattgtctcctaatgttccttgtttgattacatcttagatggctctcactaaacagtaggagtctggttaaattcgtacacaagtgtacacttaacctcttactattggttcttagggacctcttattgtgacatattatcttagtctgaaactataagttccttctacactaagtcatccacatagcattctagtgtaaactttaatgtaaaatacttgctttagattaagtaatcatattagataccataaaatatttcataaggatttggtattttgcctaagtcattcgaatagacttaacaaaatttcttatcttatcctcattattctgatatgtcatttttatccatatgaatggttagattaacatggttagttttattctaaagttcttatcatgatcctaacatagtcggctataattggtatcttcgaaataataatgggcttggagttttaaaattctctcactcagataaggtactgtgatactatgtccaagaacctcgtgttgggtttatgccctaaataaaactcatttcatataatcagatttactattaataaagatcagaaataacattttatgtt

SEQ ID NO: 338778 - DNA, 1106 bp, Cannabis indica
agttggattgtttgggaactccaattcaactttttgagatatgtctttcatggatctaaaaattgaagtcatggtattagttttatgcaaattaaactagatttccagttgaattttagtttcgcagtagtttttctacactttttttatgaattcgaaacagcccctattttgattgattttggtcgtcttctcaggtgaagtcgccagaattaatgatggttctctttctgattgaatttttgtttcggttgcattgggttgttgcgtagttgcacgatagttgcgcaatggttgcgtgatagttgcccaggaagtatggatcctgggttaaaggtgtgtaagtggtattgtgtaagttttttttttttatttggcttgtatatttgtttatttggccagctggaagtatttttgtaatattgttattttttttttgttaaaactgaaaaaaaaaacccaaaaataaatacatatgttaaaaaaaattaactaaataaaagacaattgataaattaatagaaatataattaaagaatattctcacaaaatagtgatctaaaaaataaagacattgataaatttatagaacttattaatgatgtgattttaaaattgttgtcctcaccgttttatagacacaactgtatttttatcaccgtatctcacttatagttatcattatatttagggactctttgaaatgagttaatattagcaagagtaatggtaaatgtgaaacattaccttcacattaccttgtttgttctaagggtttaaccttctaatgttattcctttagtaatataactactctggaagaggataatattgataactaaaaaaaatggtggaattgaattattccattttattgtattaatttgaatactattttttgattaataaataaatttaaatatcattaatattttaattattataaaaaatattgcgatatatatttaatctgtgagataattttttttttatatttttaacttgagttatttctatgttatttagcataatatatagatgtattatacataaattttatgtgaatagtgtacataaatgacataacaaataaaaataaataatat

SEQ ID NO: 338779 - DNA, 462 bp, Cannabis indica
gtttttgattagtttgacgatactatatcgattggtttctttatttcgaccttaaattattgtgtagtattaagttggttatcgatttgtttgtcgattgttatcgattaggtttacttacttttttttttttttgtctttcacagatgcctataaaatttatagttcctgtccctgaatattttataggttttgtcacctatagaggtagtggtatattcaataagattattaaaccagaatttgataaacatagtttgactggtaaggtgaaggaaagtcttttcgatcaattcggcatgctggtcctccatcattttcttatgtattatttcaccaactgatgcttcataaaatgaaggttgatgttgagaaagcagaagaaatttggttttacatcggatggaacgagatgaaatttggcatggtcgagtttgcactaattccaaacctcaactgttg

SEQ ID NO: 338780 - DNA, 883 bp, Cannabis indica
tatcagtttgttgaaaaccttagaaaatattaaataggtttcatttttgtatttttataaacatatttggtattcttgttattttctgaacttgtgtatgaatttattgaaccaaatgatttaattctgtttattgatatttgtagtgtcaaaatggacaacccacaccctgaccctctcctagtaaatgcctttgcaaatgaactctatagtgtgaaaatgcttcctggaaagagcattaattcacactagttaatgatgaatctgaagttccagaaagcgaatatgcttaaaatttatttatctagagagcaatgggttcaattaattcttaagagtcctcctcctgagtacaatagatttgttgtatcttatatgatcaacaattttaacgcatcccacatggacaagctagaagcagaattgcgtgcttatgaacggagcttacctgcaaggacgccaccctccagttttgcagacttaagtaagaggaaaagaattaagtatgaagcttctaacagtgctgcttcttcaagtaaaaatcgttaaacaattgatggtcgtacacttcaatgttcaaattgtaatgagaagggacatgaggaataacgatgtcccatacttctaaaaattcgaatgaaggtaatgcttttgtttttgaatcatgtgttttagagaatgacaaatccttctgaattgttgattctggatctactaaccatgtttgttcttcattgcagctgcttgaaacttgggattatttaaatcaagcggagttgaagctcaaacttggaaatggcgaattagtatcagtccaagctaaaggaaaagctcgcctcacgtttcaaaagaaatttttagttttagacaatattttgtttat

SEQ ID NO: 338781 - DNA, 782 bp, Cannabis indica
ttaaataaacaagcccaatgtgttagtcacttaaaagattggaataggtctcataatcgtctctttaaatctaggattcaacagttaacccaggaaatagataatcttcaaaaccaagatgtccttactctagctgatagacatcagctaagtagattgaattcaatgctggatgctcttctttataaagaagaagtctattggaaacaaagggctagagtgaggtggctcaaagctggagataaaaatacaaaattttttcataagcaagccactcttaggaagaaaactaataccatcaaatatcttaaagataacgagggtaatgtggttaatagtcaagaggggatagctaacttagttatttcccatttttctgatctttttagtacccagggttgtaatgttgatgctgctgctgaaatcttcaatgctttgggtcctggtttggacactcctgatgtggagtttcttgagcaggcttttactgctgatgaagttaagaaggctgtttttcaattgtctggggataaggcagtgggattagatgggtttaatgcttacttctaccaaaagaattgggctgttttaggtcaagatttcactaatgccattttagactgtcttaatagggatactgatttttctgaaataaattctactcttattgtcttaatacctaagaaacaacatgccaataagttaggtgattttaggcccattagtctttgcactactttttataaagttatatctaagattatatctaataggcttaaaag

SEQ ID NO: 338782 - DNA, 617 bp, Cannabis indica
tttagtaattacacatgcaaactcttatgtttttttgagcttgttatttaccaatgctttgtacgggtatagttgccccccaagtgaccgagcagacttatgactcttggtcacttacatttcacaagttcaatttttgtctgtttggcttttgggttcgagctcaccctttgtacatattttaatggtaaattcatgagttgctataaaaataattgatagaattagaataataattaatatctttattcatttattagtttgaataattttgttaccgtagtaacttacatttattgaattatggaagctattacctgatctaattaatctttagctattttaaacataaaacaattgcacttttaaaactgtactttgaagatggtcatccgacctgagtactagttattttatctcaacctttgtgcgagattttcccagaaggccatttacttaagagtaaatgttctagcattgtgtacttgaagttgtcatcagaccttgtacaattattggtagtatttcctcaaatgttccccattccaataccttggtactagaacgagctccatatttttgtcttaccatcccaacttattgttgggttttatgcc

SEQ ID NO: 338783 - DNA, 639 bp, Cannabis indica
atgattttaaaggattcatccagatcctctatgtgccctccagtcttcctatgtttgaggaatatgtcatccacatatacttccatgttttgtttgatctggtctttaaacatcttattgactaacctctagtaggtagctccaatattcttgagaccaaatggcatgactttatagaagtatagactgatgtttgtctggaagcttgtgtgctcttcgtaaggcagatgcattcgtatttgactatatcccgaataggagtccataaatcttaggatttcatgctagactgttgcatgcacaagctgatcaattctcagaagtgtaaaatagtcttttggacgctccttattgaggtcggcgaagtcagtacgtactcgctatttttttggcttgggtactagtacggggttcgctacccaggctaggtagaaagcttccataataaacttatttatgcagagcctttctacatcttcttttagtgcttgtgcacatactttgtctaacaatctccctttttgctagaccacacgaaagtttggatcaatattgagggcatgagacatgacagtgggatcaatcccgaacatgtcctcatattaccaggcaaaaatgtccaggtttgctctttagaaa

SEQ ID NO: 338784 - DNA, 1421 bp, Cannabis indica
aacattgctgtgaggacttcacaaatgggggactttgtgaaactgactcaggggaaaatgtctgtggccgaatacactctagagtttgatcgactgtccaaatttgctggttatctgttgcctaccgatttgaccaaaaatagaaatatgtgagaggattgagtgccacaattattcaggacttgaagattaccactactcatgacactttgtacaagaaagtggtagaactagccttgattgccaaggaggctgagcagcatgtaacaaaggagtagatagcaaaggatgccaccacggcattgaatcctcctgctagtggtaatatcagtaaggggaccgacggtggtaaccctgatcacaaatggaaggctgatacttcaagaacatcaagggataatagaaagtttcggggaaatagaggtggccgtcaaggcgtggatcttcatttcgatcttatcttgagtgttcaaaatgtaagaaacaccatcagggtgaatgtcgggtcaagacttgtttccagtgtggcatggtgggccactttatcagagattgtcctcaggcaaagaaagaggagctgaaaaagaatactactcagaacccaaggtgactttttaccatgactcacgctgaggctgatgctagtccgtcagtggtgacaagtcagttatctataaattgttgttcttatattgtattgtttgactcgggagctactcattcttacgtgtcgagtaggataattgaaagttttcatataccatgtgatgtatatgcttcggggtttggtacccttttacctttggaagaccttatagtatccacaaggtggattcggtctttgtctttctagatttacggttgtgaattaaccgccaatataatagagctgcaactgtctgattttgatataatcctgggaatttattttctgtctaagtatggggcaacgattgactgcaagcagaagatggtggtgtttgagcctgatagtgctaatccggcagtgtttgtgggtaaagtttaagggacacgcataccaagaataacacttctgaaagctaaagatctggttagcaaaggttgtctgggtttcatggttactgcagtggataccagccaacctttgacatctggacctgagagtacaagattagtatgcaagttccttgacatctttccagaagatttaccgagatttccacctacccgagagattgaatttgtaattgagttagttccgagagcggaaccagtatcaaaagcaccctatcgaatggctccagcagaattgaaggaattaaagatccagttgcaagagttactaaatttgggattcattagatcgagctactctccttggggtgctccggtattatttgtaaagacgatagacgggtcactgcgaatgtgtattgatt

SEQ ID NO: 338785 - DNA, 734 bp, Cannabis indica
tcaaatagaaacaaataattaagtatcttgaataaatccacttaattattaattctatttaagttcgaagaaaaatatcctaatttaagttgatttaaaattaataaattaatttttaacttaaatatatttttctactaaattaaagattagagaatataaattagctactagaaatttttatctagaatatttcattaaactaagtgtatttattctaaattaattttaaaataatccaatgaaaaattaattttatttatttcaaaattaattatgttgctaattcaattttgattagattaaactagtataattagcctaatacaataattcaaataaggcaaatgggccttcacaattggggttgttcatgtgagggagggctggattccgcatgtcgtacccattactaatagccctctaactctcacacaaggcccaaaggagaggaatttaaccttaaattaaacaaatgttattcattgaataagcccaatactaattgggcctaaataaaactatcatgggtgatatttcattttagcaacctagtccatctaatatcttgaaataaatgggcttcctatatgcatctaagcccaaaagaaaacatataggctcacacaggtcaaattgatttggatgagccctatcatgtttctaggcttacacagatgaaagaagtacaaaatttacctattacaaattatttataagatctattgacaatt

SEQ ID NO: 338786 - DNA, 506 bp, Cannabis indica
caagtcatttgaagagttcaaacgttgtcttaactaattaattaaggagatttattcaacaaatatgagtacattaaatctgcaacaaaattattagagggagtttatattttacttaagtcaattattttatacttgagaaatttgactgatgaattatctttggacgtgtctctatagagtagctagtaacatctgaaagaatcgttaattgaaactacgtataaattttttgttacatatagctttaatacattatatgtataaactacctatatagaaatttaattgatgaattaactcttacggtgtatatttctatagtactagtaacagactctcaatctatagccacaaaatatctaattcagtactaactttatttttttcaaatagctcaaaaatttaccttatgaaatgtagctaagcattatcttagttttagtgcttaactataattttttattattttttataatgtattttatttaattgtaagtgtaaaa

SEQ ID NO: 338787 - DNA, 422 bp, Cannabis indica
ccaacaaagacaaatggttcctcattctccagttggaaagttaccattttccgtttacaatcaatactagcagagtatttggaaaaaaattccattccgagtataatatcgaactcggccaatggtaactccacaagatcagcgctcaattatctgtcctcaattctaattaacactgatctaatccactttcttgaaataattaattccccattgcctacaaaagggtttcaaatcccacctcaaaaacatcactaggcctaccaagctgattaagaactctcgatgatacatatgatcgtgtagcacccaaatcaaataaaataataaaatcaaagccgttgataagaagctgacctgtgactaaaaaagggctggcggcagcatctgcctgggtgatggcaaatatgttgggttttatg

SEQ ID NO: 338788 - DNA, 544 bp, Cannabis indica
ttttttattgtgatttcaagatattgttgtgaggttattggtgattattggttgagtttactaagtattttctaggtcagaaattatgtgtttattggttgagtttgcagttagaaattataggttggaataggttgaggttcatgtttatgagcttgatgagttgtgaattgaagtatgattataagatgattaaacaatctgaatttgagggtaaattgtgggtattgatgcatgttggatgaatttttataccctatctttgagcttgttaatgtgtggatttgttttgagattttggatgtgaatcgggatgaattgggtgtgttgttttgctgaaattcaaaggtttgcatgctggtttctgggttttgcacccagatgcccctttttgtggaacctgggttttgtcccaggttccgcggcatggcttgggcatgccgcggcccgccctcgtgatttttgggcaattttgtgtcgaacttttaaaatacataacttttgattccgaactccgatttgggagttctttatatcgttggaa

SEQ ID NO: 338789 - DNA, 748 bp, Cannabis indica
gatttgagtgcttttgggaaataaatgaagtcgtctaggggtcagaactaggacgtagcaccgaggtttccatacattttcatcaaagattcagatacaagtttttttgaaaatcaaatagagtcatctggtggcaagaaactggacctggcacctaggttgaaattttgtcaacttcggttaattccaatcattttcccgaaaaaagtgttctggccattttttaagtcatcataaataacaaagatacaagtgatcttaggagaaaattagatttctagggagccagaacagggcctcagtgcccaagttggcatggcactatgctctgtgcctaggttgagatacaacctagtttccatgttttcgctcctcgaacacaaatttttctctaggtattcttcttaaaatggtaaaaaacaaggtaagagacctcattcgcaatctcaaatgtcttagaagtattaaaatgagccccaagaaggaacccagtaagaacccaatgcccaagtttgttggaaaatttattttaccatgatcttagatctactcacaagtatgttgtttaacaccctaaatatgaactttcttaaacgataattaaacacatataaagttaagaaaaccttacattggtggcagcggaataatgtctctttccactcagatctctaacccttgtatcctttctctcgcaaagtattatcaaatctgagcccaaatgaccttctctttgtgtgtgatcctt

SEQ ID NO: 338790 - DNA, 1068 bp, Cannabis indica
tcaacgggtaccacccccagtttttctactttactgtccgaggctagcttagccaaacagtctacatgagcattcttttctcgtgagatcctttccactttctattttgtgaacttctggagcaattctctgacaatcgctacataagcagccattttttctccacgtgttcggtattcccctgatatttggttgaccactaattgtgaataactgaagacttctacccttgtagcccccacaactttggccaatcttagtctcgcaattagtgcttcgtattcaacttcgttgttggaagctggaaatgcaaagcgcagggcagcctggagccggagtccgtctagcaatatcattgctatctcgacactagatccattttcatttgacgtcccatcaacgaacactttccatgccggcattcgtggggttgacatatttgagctggcctctgcttcattacattccgttatgaggtctgccagggcttgtccttttatgaaaatgcgtgggacatagtgtatatcgaactgactcagttccatggcccatttaaggagtcttcccgaggcttcaggtttctgcaagacttgcggaagcggatgatttgtaagtaccttaatgggatgggcttggaagtagggtcttaatttccttaaagccatcaggaggcaacaaactaatttctcgattaagggataccgcgtctcggctcctatcatgcgcttactgacatagtacaccggatgctggaccttatcatcttcccggaccaaggtcgcactgacaacgttctcagagacggccaagtataataacaagtcttctccgtgaaccagttttgacagtaccaggggtttggccatgtgctcttttagttttttgaatgcctcctcgccctcttcaatccactcgaattttcgacatttcttcaaaatattgaagaactggatgcacttgtcagttggccgggaaatgaatcggcttaggcggcaaccttcccagtcaagctttgcacatctttgtatttcttgggggaaggcatgctcagtaaggcctggatttttt

SEQ ID NO: 338791 - DNA, 585 bp, Cannabis indica
gtgtaaggacccaatagaggcttgaagcaggggcgttacaatttatatttattaatctacaataaaaaatattttgaaaaacaaaaatatatattttaattatatttatagtagttgtttgtttttgttgtgttgaatttgtaatacttagttattttgtatatttattttcatgacattttgttttattttattaattaggaacgttattttacttatttcaaaattttaattgcattaaacttgtaaggataatatttttatatagtattaaactaaaagaaacggtgatatttagtttatatgtatttctttatgtttttaagttaatattaaaattatcaagcgtgtaattggatatctaattaaaaaaacagattaaattcaattagtaattgaattagattagatcgggttgaattttgaagtctagttagattggattggatgatgattttctaaattcaattactaattagatttgatcgaattaaaagaaaaatattgaattgaatcggatgtctaaccctactaataataatgaaatttatttaaaaaaaatacaactaacacaatttttctttt

SEQ ID NO: 338792 - DNA, 1237 bp, Cannabis indica
aattttaaggtacatgctgctttacgatttgaatttttctgcatctaacaatgaagccgagtatgaggctttgatcgcaggattaaagctcgcccttgaaatgaagatagaatagttacaggcttttagcgactcccaaatcgttgtatgccaggtaaacggtgaatatcttgctagaggtgggcgtttggctaagtacctcgccatagtatgcgagttgttgcagaaattcaagaaagtggttgtctcccgagtaccgcgtggtcataactcacacgcagatgctttggcccgcttggcctcaacaagagaagttgaattgctcgatgtgattcctgttgatgtgctaacccacccgacggtgagtagagatgaagtaatggagatagacgttgccagagaagttacttggctgactccgatagtcacttacttagaaaaggatatcttgcctgatgacaaaatagaagcgagaaaactgcgacattgagctgcccgatatgtcatctatgatggaagattatatcgaagaagcttcagtcagccgctactcaaatgcattgacggggaagaatgcgactatatactccgcgaggtacatgagggtatttgcgggaatcatactggtggtaattctcttgccttaaaaatcatgcggcaagggtattactggcccacactgcggcaagacgccttcaacttcgcaaagaaatgcaacaagtgtcagcgaatagccacgtatgttaaccaacctccgagtcacttgcattttatcacaagcccttggccctttccggtctggggcatcgacctgataggagaattaccaaaaggaaaaggaggagtcaaatatgctgtagtcgtggtcgactactttaccaaattggcgaagcaaagcactagcaaccatcacagcagctaaactgcgcgagtttttctataactccataatctgtcgatttggcatcccttacaagctcatttcggacaacggaaagcaatttgattgtaaggaaatgcgacagttgtgcgatgagttagggactaaaaaggcgttctcagcagtcgcctacccgcagagtaacgggaaaacagaagcagtcaacaagataataaaacataccatgaaaggaaaactcgaagagcgtaagggagtatggccagaagagctttcacaagttttatggtcatataacacgaccccccgatcctgttggaatttattttaccaggatct

SEQ ID NO: 338793 - DNA, 868 bp, Cannabis indica
tttgcttttatcattgaaaccaacattaaaccattgctcaaatgatttaaattgaagttcatctggcatgagcatcagtccaccagaaaacgaaaaacaatccatacacttcaccctttcgtttaccactgctggtcgaacaaaaatctgttgtgtaaggactcttcattatagatctaggcttcacagcccttttaacaaccttaggcgtaaaatccttcataccactcaaaccctaacaacaaacacaacaaacacaattacaaaaaaaaaaataataagaaaataaactaaaaagttataagaagaagtacataaacaaaatgacatattaaacatttataacatggaacctttgcattattcttctcatggggaaccattttctcattgttcaacaccttaccctataaaaaaaataataaaatagtttaaaaaaattaataaaacacaactaaaagaaaaatactttaataatccatgacaattacaaaaaacaaacataaaaataccttagcaatggtttcctcaatatcattgatcttctctagagcagatagtgttatactatcattcataccttgactatcacccaacttttcagttacagcaacagtagactctttagtttcatcaaataagaccttatcatcagcaaccttctcatttacacccccaccaactacctccttgccttctttgacaactgactcaccagaacctcacactccaccaccagatgcaccaacattacctccacctttaacttccttggcaccaaccccatcacctgttgggttttatgccctaaataaaactccaattcaatataatccattttattcaacatcaataaagaaacagaagt

SEQ ID NO: 338794 - DNA, 1041 bp, Cannabis indica
cagggatctctagctcagtaacaccccccattgtgcaacctctggctaaccagccatcagcaggagtactaatggccgaccagagtatagcacttcctccctaaggggagcaaggttcccataggtcaatcttcaaccgacaaggtccgggaacgggtggaaacacccaaaacagtggttcaagaagtgaaaccgatcactttaggcatctagatcaccaaactccaacatgtacaatcttcatccgcttgccctcacggttactcagccttagccttgcccttacctacacatggaaataacactatgagtcgacagacttagtaagaaaagcataacataaaacatgataatatcctgggttataatcaggcacttatacacccaacgataaccctctccccgtgtctcacatggtactgagtctagaacgttcatacgacaatactatcgaccataatgtcagtctatactcaatttgccagtcatactctagccatattgatgtgacaacatcgatcagtatttcagccaacatacattaatcagtaatcagtacaactctaagtatactattactactatcaatgtattctaacaagcataaacaacatgtatgctaaacatgtaataacgtatgcatgacattataataatcttaccttgattccaaattcaggtgtaccggccaacctgagtggaacaactgctcggcgaattacaggctcctaaatcacatcaatcacaacatggataagtggcacgctaaatcacaaccggggacttaggtttaagctaaaaacctatctattgtaacttaaaatggcaataccctaaactagcagggaattaactaaccaaagctctgaaactaacacgaattgacaacacgaattttttggggaacccaacagaaaatctagttaaccggtttacaccaaaaaaccccaaaaaattcaaaacctaaccaaatcgattccaatccttaccaaaccttccgaacctgcatattataccccaatagacatatcccaagcaaca

SEQ ID NO: 338795 - DNA, 604 bp, Cannabis indica
aatattgttactttttttggttaaaactgaaaaaaaatcccaatttcttatttcacaaggattataaatattattttctcttaaataatatattcctctctttaatattatttagtaataattatatttaactaattaatataattttatttaatgaaactaaatggttaaatactattaattatacaattcataattgtcataattaatcaaaacaataatttcacaaattactattttgcctttaaaaatttatttcctataaaaatttattctcacttgaaatctatttatcaaataaaacctttcccctgtatggacctatatttcaaagctccaataaatccaaaattaatatcaatctaatttagtttattaattccattattacttcactataaatatagaattgcactctttgacaatatagaattatatttacataattcttacttgtagtccattgatataatcgatataagtagttcgtcctctaattattagttcataattagagttggttaaaatactgttttacccttataattatctctagattccttatgtactattaattcaatgtgaacagttaatttataactta

SEQ ID NO: 338796 - DNA, 596 bp, Cannabis indica
acccgaacccagacctgaaactcagacccaaacattgaacatgactgggacctagaactgtgatcgtgacccagaactggaccctagtcttggtcctagatctagacccaaacccgaaccgggacctaggacatgaatcaaaactagactcgaacccgtggttgggatccagatttagtccaaaaatccaagaaccggggcttggacaagacccatagtagatgtcttgatttgggactcggacaaggacccgaagctggaccaagccctagacctgggactcaaaactgaaacttgaaccagaaagtgaccaggaccctagaataggaccgggaccgtgacgaggacctagacctggaccgggacccagaactcgaccaaaagccagccccgaaactcaggctcgaacctagtcccgaacccagtcctggacccagactaggactatatttggttgtctacaacaatcaaataatattctctaatattagcttcttggactatatttctgctacgttcttaaagatttgaacttaaaacttattgtcatgaattatttgttataatttagtttctagtctttttgggaaatccat

SEQ ID NO: 338797 - DNA, 944 bp, Cannabis indica
aataaaacttttccctgtacattgttgtatagaggttactcggggatcatggacctatatttcaaagctctaataaacacaagattaccatcaatctcatcaacaaattaatctggtttatcaattatattattactccactataaatatggcattgcactctttgacaatatataattatattcacagaattcttatttgtagtccattgatataatcaatataagtagcttgctgtccaattattagtttgtaattagagttggtcaaaatactattttatcattctaattatctcttgattccttatatactattaattcaatgtggcaactaatctataacttattatagatttggatctaactgttagcactcccaaaattaacactataaggaaactaatattcgatctgttagaaaagcttggattccactattgtataacatgtttccagccactcatgttattaagctcctaaaatagaagttttaaaaatcatcttctttgagaaactttaacgagtgaatcaaagaactcaatgatcacaaacatgatcgttcatgtatacttaggattcaagctgatgatctcctaataatcatcattgtgatatgataaactcttttcatagtaaacaacaagttttgatgaaagatgtttattacatatcagcctagtcatgcataatctaattatacacactacctttactacatgtcgatctaacatatgtgatccaaataaaaatcacacacacacgcacgcacgcacgcacgcacgcacacacacacacacacacactatagaagtatagtgtatagtaacacgtacttaacatttccatattaaagattctcaatactttaatacactatcgacttattttattcatatcgtataatcttaattctcttgtgcatccttacaagattataccttc

SEQ ID NO: 338798 - DNA, 480 bp, Cannabis indica
caagtttttttttattttattttctgaatggtataccatagtatagaaaatatatataccataatacaaaatgtatataccaccgacaaaaaaatttgacttgagactttggtcgttgtttggtggtaatcattgtaatttggagatgtgagaaaactagaagaagaagataatgagcagagcttcgtcacttttgattgtgaggaattaagggaaaataattggatccaacgaatgaatcgaataaatggatgagagaaaaatatttcatcaccttttaggaggaatcacgataatttatcaaaaaaatttgaagaaatccaaactaaccggaaaaaatgaggagagggaggctttgtcatttaaattttggaacagagcttcggtttacatttggagaatgaatataatgttaataatactcttatataactaagggtattttaggtactaaaaaataataaaggtcatttgctatat

SEQ ID NO: 338799 - DNA, 595 bp, Cannabis indica
actaaattatttaaattaattttatttaattgaatattaaattaattatctaactacttattctttgttaaatattatttcttcgcattgtaaggattttttattattaaatttattaattaataaatataactatatattaattatttgttttcaacaaattatatttacttattaattaactaattatttaatattaattttaataaattatacaaaaacatagttaattaactactttttaaattagttacataaaatatatgtttataaataaatagatactaaattatttaaattattttaatttaattgtatattcaattaattatctaactattattatttatttcttattaattattgaattatttatatttatttattaattatctatttatttatttttattttttaaaaaatataaaaaaaatatcttacttttttacattattataattatattttttatatgattataaataaataaaaaaaaaaaaagatatttaattttttaaattaattttatgtcattaaataattatttaattatctatctatttattatttgctaataacataaatctttattatt

SEQ ID NO: 338800 - DNA, 785 bp, Cannabis indica
ctcttagtgtggtccttttaacgtttttgtctaaaatgtcattttttgcagtttgaaattcgatttccagaccacctttgcttaatgattctaattatccttattggaaagttagaatgagggccttcatcaaatctcaagattagaaagcttggaggatgtttctattaggctggtcttctccagttgagacaaattccgcaggtaattctacattaaaatctgaactggaatggtctattaaagatgataaactttctggctacaatagcaaagcgttgcatgctatttttaatggtgtaggtgaaggctatattaaacttatattatcttgtgaatattccaaggaaacttgggagatccttcaaactcaatttgaaggaacatctgatgttaagcgctctagatttattatgcttcaaactaaatttgatgagcttaggatatttgataaggaaaccctaactgaattctatgaaagactatctgatatagctaataaatattttgctcttggtgaaaaacttgatgattctgttcttgtgagaaaaattgttagagttcttccagagaggttcgatattaaaatcttggcaatggaggaagctaaaggcttagcacaatgaaggtggaagaattaatgggttccttgcgtactcttgaatctaatcaacaaattaaacaaaaggacaaacctaaatccattactgataaaggtaaaagtatcgctttaaaagttgttgacaatgaaatttatgatagtgaatgtgatgatgaaattgctt

SEQ ID NO: 338801 - DNA, 1555 bp, Cannabis indica
ggggtcagcctccgttatttgtttacttggaggaacctctgttgggtgaggatgggcaaccaacacaggatgctttgcgaagccaggccgaaaagcttgcctccacattggaagaacgagcggaggcagcccgaatatttaaagactctacaccacctcccccgtctccaccacgtgcaccgcctgcagttccagatgggtctggtgttgacccatctccagcttcagttcctgatgggtctggtgttgacccatctgcagcttcagttccagatcagtgtggtgttgacccacttgcagcatcacaggatcctcctgttcccccgtcagcttctattcccagcacctcagaggctcgcgatccagtataccctgccattttggcaaggttggagactgtggagagggggcagattgctttgagggaagggcaggccgctctgctaagaggacaaacagcgattatggatcagttgaagaccataatgatgctcctgcaagatccaggaaggccagcagtagattcatagccacagccacaaccacaaccagaagaggaggctcaccgaaagatgacttcattctccaaaatgattaccaatcggatgatgatgacatgttctgtacacctgagaagacgaatatcaccagcatcggggatactcaggattctgaggtgcaggtgtttgagacagcatcagaagtcatggagacccggaggaagagaaggcgacctaggtggtttgctgagtacactgaaatgaagaaggctagggctactttgatactcgtgaatgcagacccacttagaggggttgatcggaagctgctcacgacttttcataattgggtactcggccagattaggaacaagtacccgagagagtgcttcaccggtcgatacgattcgtcttggttcctctaactacatactccaaggatgtggcttgggaacgatgtaagtttttaagacttttttacttcttttgcttttaaagactttatctaaatcttttttatttaatctctgacatatttaattttcatgttttagcatttggatgcggcattccatttaatgaggaggcgacaacacttttattcagaggtctacccaaatagatgtgtcatcatgccgtgtattttctcagcaggagttattgctaggtgggaagctgcgggtgatgaccaggctaactatcagtaggattagggcataatagatttgattcgaggggatgaaggtcaattcttggccaattggaagaataaggagagaatatatatggccctctacttcgatagagcaaagcattgggtgacgctagaggtagacctggatcattggttgatgaacatatttgactcgagcctcggatcgatttccccgaacgaattgaagagtcacctagaaatgtgggaaaaattactaccaactttgctgctgcaggctggcctattcgagactcatgacatgatcctcgtgcctcaacttactgcctcagagacccaggtcagaaatttcacttcaaaagtcatggaccggggcgttgtt

SEQ ID NO: 338802 - DNA, 368 bp, Cannabis indica
ctttctctccggaagttggtctgtaacttattccagtagcccacggatcctggctccaatttcttgaaccactcctctgcggacccacttagagtaagcgggaagcacagacacttagcttcattgctgactctcatgacacttagattagtagtgatggtccaagataaaagaatactcatgtatatttggtataaatttaactctttgactttaaattttaaattccatatatagattttttatttctatttccagaatacaatacaattacactttcacaggtgtttaataactatttttctagcaatggattcaaactatatgttagtatgggatatgagtttaatattctgtgaccaggatcc

SEQ ID NO: 338803 - DNA, 1364 bp, Cannabis indica
tttttttttgttttgaatatcgacattgactcgaacatgtctccttttgtgatttatagttgtttgtggtgcctagcaaggttgatgacttttggaggaagcatttaccacttatgttctaaatgagagtttatgtttcttttttattttatgctggaattgagtaactgatcaacatagaaattttaagaaatttggtattaaacaagttaaatttagaattgagcgtaccgtctagcaccataaaccattgtcaacaagttgaaggtgattgagactctaaatgtcttgcgcaagatttgttgattgcttccactttgataacgtctcttacttattccccagtttgagtgtgggtgacaaagcatgtcatagtcaaactctcacacaagaaccaggaaccattgggaggtgtagcctcgtgatcgtcaaatttttgacttgataagttatacctgggaaggtagtcgacggcagagccgtggactctccaatgcttaagtcaatagagtgattaagataaaagcaattgaaaaagcgtgaagtttcgaatacattacagattcgttttcgtgacctagcttcctcatgatttgatttaagtctgatagtatactgagcccatggattgattagtgctcatgacttgtgagcttatgattaggaatgatcgctagtttatcaattatagattttgaaggatttcctcgtctgtgtgattggggtgtagtcacgtccgatgcttaagtcagtatattattcatattaaaaaaaaatacaaaaagaaaaggttgagttagaaatgatactgttttagatgagtggcattccagctgttgcctatttctcgaccatcctctacttaaagtcgatatgccccttgtcctattactttagtaatcttgtaggggccttcccagttggggcctaacttacgagctcctgcctctttggtgttttaaaatactcaacggagcacccaataaccctccttgaatgtttgtgctcggatgtttttgttgaaatgttgagcaaccttccgttggtatgctgcggctctgatcaaggcttgctctcttttttcatcaagtgagttgagctcgaggttcatactttgccagtcaaatgttcatacctggaagtgggaattcctgtctttactgggatgactgcttctgttctgaaggtgagtgagaaaggggtctcacgagtagaggtttttgcagtagtgcgataagaccacagaacaccaggcaattcatctgcccacattcctttggctttctttaacctctttttcaatgtgttgacaacaatcttgtttgttgattctgcttgaccgttggcttgtgggtatcttgggg

SEQ ID NO: 338804 - DNA, 932 bp, Cannabis indica
atgtaattataaatagaagcaagatcaaaaaagggatggaaaaaactcatacaagagaggtcctgaaaaacaatcaaaaatctgaataagattgactcgtggactatgcaaaattttaactgcaaaaacacgtaaaaaccttgtgtgttcttactttttattttataacttttattttttctgtgtgagattatcatggttaggctcaaatttggttaacgaaaatctgcgttaacaacaattatattaggagatattaaaatggaataactcattaaatgcggagctgatagagtatatctataactcgttgactgtgaagtcttaagcgagacaagaatgtacaaactattaattcacatatcgacgagaaactatttcgtatatgaagacacgatcgtaaggatagcatcagtaatacaacgtgaggcaccaaccacgccacgtatgaagagatgtagacgagacatgttgattgttagagcacttagcatacaatatacattatacaaactaagcataacagttgaaagaatctgaacaacaaatagtgaggcatccatcttgctataggaaggcatactcatggtaccttcactaatcaacttcagacatctttcaatgagatccactaccccgtcgagtcagctctctcagatagaagctgacattcaaatgatgttgactgctggagttcaccttgtcaccaagaactgtgattgtcagatggagcgttatgtcttcaatagcagaaacgacagtatttacattatctacctgagaaagacatgggaaaagctttagcttgctgtcagggttattgttgctatcccagcaaggtgacccagcgagatacactttactagcgtatctaaatccacgttagtattgaacctggtaaaaagcgaataaatcacagctatgtgattttc

SEQ ID NO: 338805 - DNA, 588 bp, Cannabis indica
aaagtttccaacagccatatgatatgagttctaaaataatacaatgtatatatatatatataaaataccactaaatgaaactcaacggatgttcaatcaagttgtataacttgaaggatcttccgttgacttggagggctaacgtctcggtacggggacttgggttgcgaaggacttccccttggattgtttgatggttcttcctttggataaactgggtaatggggtatggagacctcggtgtagtcgagaatattgtccatgatattttcacatttttctcttaaagtgttggcatattgcaatgcttgggcggaatggtagaggtgctccgccaattttaatgactcctgcttagcttctgtgtgccttccttatgagtttttcgtactcgtgcaaaacaccctcgagcctagcacagttgacacatcctgaaactgaagctgaacgaagtctaggactccttgaaggtgtacctatggatcgttttaaagaatatggataagtggggacttttcaggacttgagtcgaaagggttgaatttcgggtaagggtccatgtttagtaggtaattctaatacggggtt

SEQ ID NO: 338806 - DNA, 515 bp, Cannabis indica
gatttatagcatcttcctgattttttgcatcgtttacacgatcccatgttccaaggttcccatccagtaacgtatttcttcccgttactactatcagcgcattgcctatataatgcgactgaacagtggaagaaaaacacaacttttcattctgaaaaattatacgatatatacacactactatattataaatttatatttatattttcgcttcgagcagtagtcggttctaggtgtttaatttcgacggttctctatcgtgcaatagagttccgatacagtgtgttcgactgggctgttttatcctggggacgacgaggctgatagtctgcttgcacaaatctgggcagtgccgcgaacgtcttaaagagagcgacctagtccgcgactcaacccagattctatttcggtaacttcgttccttttattttctgaagcaactagtttataacaccctccaccaatttactttgttagtgtaaatgaatcctatttttaatttataataacaagta

SEQ ID NO: 338807 - DNA, 1906 bp, Cannabis indica
atagacctaatccaccttttggagatgactaattctccgccatgcagtagggttccaaaccctgaatcataactatcatgtggtctacccaatttactaaagattctggctgccacataggaatgagtgtccccagagtcaaataacatcgagaagtaagagttgttgactgagagctgacctgttaccactgagggggtagcttcaacatctgcctgagttaacgcgaacacccttgctggagcgggtttcgatgcgatcttctattcttccttctttagttaggggtaatcccctttataatgtcctggcataccacactagaagcacccctaccctctacactctcccagatgatgctttttacaattggggcattttgggtaagtgtatcgggtttcggagctacccagacaattgcctcgaacctggtaccctcggaacctcttgttctgacttgagccaccggatgcagtaggtgcctttcatttttggtcagtggtcgagccactacctcccctactaaagcctgatgtaggaggagtaggagccccaccaacaacctgagtccctcgagactcctgggtgcactctaatgcaccctcaactcgcaatgccttacccaccatattagcataggtggtgttgtcatcagtagtgatcattaagtcatgtcttattttcgaattcaacccgtccagatacttctctttcttgctaaaatcggttggcacaattctcgaggccaatcttaccaagcggtcaaactgagttgtgtattcattaacactcatattttctttctgagtcagctgagtgagttatttccttttcgcgcttctgactacctcattagagtatttcgcattaaacaattcttggaacttttctcaggtcattgtggtaacatcatgagtcagggacaccatgtcccaccatactagagcatcttcttagaactggaatgtggcacaagccactctatcattgccggtgatgcccataaagttcagaattctggtaatcattattagccactgttcggctttcataacattgggatctcccaggaaaactggaggtgcctgcttgcagaacctttcatacaagggttccattcggttcactgcagcgactggtcctgcctgcacagcaggggcaggagctacctgcatttctagagcagggattgcaggagcaccctactgtcttaggcgtctgatctcttcatcttgctcattaattctggcttgcatttctgcaaacttattttcccaatcttgagtagcctgtggcgggttaacatcaccctggtcgcgtgccctgcctctaggacctctacctcggccacaaatatttgggggaatctgaactccgtgaccaccaatggatccaactgagttaccctagctcctggtgttttgcctggcgtccatactattagaacagcctgcgtaaccaagagctagtctggtcagatcgtgatcaagtatacttactaattgccgcttattttggaaattaataacatacgcctattcagctatcaagccactatcatgcttcctaacatgcttttcttaaatcatactattaaaataaactactaaagcaataaaagcttactgaaccgtggaacgagctgatcactgatgataattgtgttggaatatgttttaccagaatctagatttgctaccatgtatgttatttaacatcctaaatatgaacttctaaaacaatgtaaataaacacatataaagttaggaaaccttatagtgggtgcagcggaataataatggctccttctgctccgatctctaacccttaaatcttgtctgtagcagagtatcaccaagatctgagcccgaatctccttctcttgaaactggattcttcacagcct

SEQ ID NO: 338808 - DNA, 995 bp, Cannabis indica
taagatctcgagataagtattttgtaagttttattttctattagactctcccctatggtgactacttagaaataaatttacaaatatgaaacaatagtagaagctcataaaataagaataaccttgactctcgcctgccgagaccacattagattcttattttgattgaataaaagtttgctaaaacattgtttattttagatgagctgactactctattcaactgatgttatctttgactctcgcctactgggacactgtatatcatttagttagaaaccttagaaataattcaaatatgtttttgattttggtatttttgcaaacatattttctatacttgttattttctgaatatgtgtatgaatttatatgaaccaagtaatttatttctatttattaatatttgtagtgtcaaaatactgtttaatagtcctcatctactcaatacatttgcaaatgaactccaaagtgcgaagatgactcttggtcagagtatcacttcacgcttgctcttgatgaacttgaaattctagaaagcaactatgctaggaattgtcttatcaagggagcaaagagttcaatttattctcaacagcttatcacttgagtttaacgaatttgttgtatcttttatgataaaaaatttgaactcgtctgacatagacaagctggacactgaattgcatgcttatggaaggacaattttgattgcaaggagatccttctacagtattgcaggccacgacaagagaaaagctaagaaaattgagaaagattcctctaacaatcctacaacttctggttcagttgaaaagattagagaaagtgcttttacttcctcaaattatcttacacaatagattgaaccaacaataaaaataatccaagaacagttaagcagatataatattcaatgtcctcattgtaacagaagggacattttaaatcaaaatgtccaagacttctcaacactaagaacaaaggtaatgctt

SEQ ID NO: 338809 - DNA, 534 bp, Cannabis indica
gaattttatagaggttcagcctctagcagctctgtaatagcctaatcatcgttatttgtattaactcaagaacaaggagaaaggttccttttcttatagctcttacaaaaatatatctgaatatgaattcttagacattatctctcacgtaaaatctttcgacccctttgcccagtgaatatgcatcactatttatagggctatgagcttggagaggaattatttcccttctcgttacaatggatataagcagaaagattgcataatatatacagaatacaccgatcgtgagatttggacaacttgccatatctctgcaatctgatccccaagttatagggattctcttgatgaatcacgatgtgaaagctatattcgctaagtgtttggcgttctgtgcggattgctgattgctttgcctcaagcatgcatatgaggtatcctgttcggactatatcttgcgagcagatactcggagttgattccacgtgtcaccatcgagtgatgccacgtcaaagtgcaaaaattgggata

SEQ ID NO: 338810 - DNA, 975 bp, Cannabis indica
gctaactgctgatgatgattgtacatgtcgtgatgatcttcggaagacaacctggtggctctaataccaaattgtaacaccctaactagcataggcgtgttaacgtgattttaaacatattgtccagctcgttgctaatcaacgagcttaatgaaaatcatggtcaacgagcttaaaagtatgctattcatatacaaaatatttgtcgcccagcgactaatagccaaaaccctgatgtcccgaggatcgtacactccaggcctaaccatcccgacatgtacaatcttcatctgctcgtcctcacggttcctcagccttagccttgcccttacctacacataaacatagcactgtgagtcgatagactcagtaagaaaagcataaatcatataacatacatacatcccgggttatgatcagatgcccatacccttgacaacaaccttaaccccgtgtcccacacggtactgagtctcgaactttcgtacgatggtacttttgacatagtaacaacctatactcggtacgctagtcatactctagccgtaccgatgtgttactgtatcagcctatactctgtatgtcagtcatactctacctaaacgatgtgatactgtcaagtagtacggtactatcgacaataatatcagcctatactcggtacgctagtcatactctagtcgtaccgatgtgatactatcagattgtacaaaagccaacatacatatctaatgtaatctaataggcttcctaacatgcacgctaaatatgtaaatgcatatgcatactattatactaatcttacctcgattctcaattcaggtgtgtcggtcaacctgagtggaactatctgctcagcgaattagtggctcctaaatcacatcaatcgtaacataggtaagtgacacgctaaatcactttctaggtacttaaacttgaaactaaaagtttccttatcgatgaataacatggcaa

SEQ ID NO: 338811 - DNA, 859 bp, Cannabis indica
tcaaaggaccatcctttgttaaccgatttattttgcctaggccaatatggtctaaacgtagatgccatagatacatttcattatcatcagaaaccttttacctcttattcaattgaggcaatgctactctaaacaattcattatttaaaattaatttttcacttagcttgagcacataaagtcccgtactctgttttgcagaacaaataggtgtaccattctcgaaaataataatctcattattaataaaatcaatattgaaaaattgttcatgcaaaagggataaagaaataatattcctggtacattcaagaataaaataaacattgttgaataacaaaaatttattatcaaattttggacggacactgttaacaaccttggcaaacacttgtgctccattacccacgtgcatagtcacctccccatcagccagttctcttgaggattcaagtatctgcacagaagaacgaatatgattagtggcactagaatcaacaatccataaagatttatcatcttccactaagttagcttcgagaatgaataaatcatatttacctttcttaagctcagagagatacttgttatagtttctcctctagtctcccattatgccacaatggaaatacttgcctttacccttcttgtctttggacttagggctagctttgcttctcttggccttgggtgacttcttgcctttgggcttgccaccatgttgtccttactgttccacttcattttgttgctagaagatggaggagagttagatttgcttcaacaatgtttgattccccttccttgaacttatccttgttaaggttttcaggtcagcttatcttcattgttacttggc

SEQ ID NO: 338812 - DNA, 754 bp, Cannabis indica
ctttatttaattaaattatttttctttaaaaaattaagtgatacctcactcgctcgctagcccggctcggtcggacggatggcagcggctagcgcgcgtgtggtggtctagtgtgtgagtcctcacccatgcgcgcaaaactgggtaccccttgaggcccatacccaattctcaaacatgcactatttatacacttctaatgaagtgttcctatcccatgtaggactccaatcattcacacgctttacttattatttttatacaattttacaaaagttccaacaatcccccacttaaaatttttaaaaatattttctcgagcaatatcagacaactataagatagtgcttcagcaaatatatctttcgatttgaatcttgcatagtgaatacgatttagattttactagagtgactcgaagtcttaaactctatctctaacatcgtaccacgcaccaatctttcaaggatgtattcaaacaagcccgtgcgttaagggccatgatcttatcacatagagtacagatctcattaagagtttctattaactcatcctcttatcgcttcaggacttcatgcttctcatataacaatagcatgatcaacacatatcacctcataacttgttattacccgtcgaacctaattcttggaatctccagtcattaggttgggttaccattatgagtgacacatcttttctaagggcaatagtcttattctttttcgaagttttatggactttctctctagct

SEQ ID NO: 338813 - DNA, 757 bp, Cannabis indica
ttttctcaaggatgaagcttggctttgaattaaggcatcattttttgccatgaactccatcgtcaatacctcaaatgagcttggttgagtcatttgatgaggatcttcttctatgttgaaatcttgtaaagcttccaaaatctcatcatttggtccttgagtgtaagtgtcataatttggctccaaattattgtagtcgtcctcccaattatgattattatatggacaattacaacaccaattggtgtactccgtcatgtcttccaacatctaataggcttcatcgattgatagttggtagaaattggtggtaccatctcctctttctacccattctcatgtgcttggattcagcccattgaggaagaccactaattgacactctttggacagcccgtgatatggaaacctcattagaaatgccttgtatctccaccatgcttcatccaagggctccaagtcgtgttgaacaaaattcataaggacttgtcatgcgacatctcaagtaccttgcaagtgaaaccaaaacaagacaaacaaagcgtaaaatagaaccaaaaataactaaaactaaacaaatgaaaaaaaagaaaacaaattgatagtaattaagttccacaaacaaaatttcactaaatcaatccccggcaacggcgccaaaaacttgttgtaaaaaattgtatacgcaagtgtacacaatcgtaacaagtaataacgtgataaatcgagtatcgtctccacagggattgaaaattgg

SEQ ID NO: 338814 - DNA, 624 bp, Cannabis indica
caggccccgttacccgaatcctgagtcaagatctggatcactgtcacgggtctcgatctggttctgcttaaggtcgcagatcccatttctgagtttttgttcgggattaatattggggcgcagttctatgtcccgacccttgtattgtgtccctagtctggttccatgttttggtctgagttcaggttcgggtttggctcccgagtccaggtttgggttggaatccggctccggctcccaattcaggtctaggtctgatttggagtctgggttctcgtcctgttacggttccggatctaggtccaatttcagttatggtttgggtctggtttcgggtccttatcagggttcgggtccaggatgtgcaccaaatccaaacaccgaataagggttttgtccaagccctgggtccagatccggatcccaatctggggtccaagtcttgttccatttctggtggcgggtcacgagctgggtcctaggttcaagttcgagtctgggtcgggtactaggtccctgtcctacttctgtttcccagttccctatcctgatgttgggtccaagtgttgattattgtgtgggtttgggtcccaatcaaggttcgggttcgagtcctagtctcgg

SEQ ID NO: 338815 - DNA, 568 bp, Cannabis indica
tctaaactcaatttaacccaaaatcacctcaattttagaaagaaaatatcagaactagtcccatgactactcgaggacaattctataaggtcagaactttaataactactctaattcgcaaaagcctcatacgaaaccaattgttttaaacttaaaatgaaaataaaccttaccttaagctttcctgctctaagaatttgttatcatgttactaccgaagcttagatcgctaaattttggattgaaaattgaaaaaatagatataagagaaggaggattactgttataagcttataatatatataaaacataactgataagtttatttgaaaaaaataatgttataataataatattaatattaataatattaaccaaaacgttattattcataattatcttattatttcttagtcactaagaaatctatatttttagggcatcccacatactcctaattaccttaatacatatattatcaacttatcataatattcctatcaattttaggagtgttcatccaatccaatccgcactattttgctcatagtgcattcgatccgcacta

SEQ ID NO: 338816 - DNA, 439 bp, Cannabis indica
tgtctttggtatttaggaatatccttcttagccccatatctcccacaaagaatttttgagccttcacttgtttattgaaataccgagctactttctgttgatgggctatcaactttaagtttgttgtggttcgcttctcttcgatttcatcaagtgattcggccaagagtacgtgattagtatcttggttgtatgccaatctcctgtgggatggtggctcgagttctacaggcagcatagcttcatatccatatgccatggcaaatggagtctctccggttgccgtttgctcagttgctcgatatcaccataaaacttcaggaagttcttccagccaatttcctttggcatctttgagtattttctttagtgtatccttcaaggtcttgtactgcttcaactagaccattcgcttgaggatgtgccactgcggagaaac

SEQ ID NO: 338817 - DNA, 978 bp, Cannabis indica
tggagaaatagaaataaaattgaggaaactgcaaaatccaataatggcatttgtgatagaaatagaaatggcatttatgatattttttgagaagtccaatatgcaagtcagacgagcccatcaataatggatccaacaatattgggcccaataagacagtcagacggactcgctaggccttgaaatagactaacgagtgagcctatgggccacaagccggatcgtcccgcaaccgggtttgagcccggccagtcagccaaacgggtgaaatcaagttaatatggaaccagtcaagaagacggttactactccctaataattagggaagtaaccaatttgaacgagtccaacgggtgacgtggacagagggcaacggcactgagaacacacgataaaaggaaccatacgatagacgctggagagaacacattcgatactcacactactcactgactcaagcagacagtcgctttttctaagcttttctcttaagcctcaccatcggagttactcttttagtccgtctgtccgcttgtccactcatccgtccggctaccatttatattacatttattttccattattataattttttactataatcgtactgacttgagcgtcggagtccctttggctgacaccccaccggtgctcccaattgaacttttgtctctctctttgttcttgacaggttgctggtgcccaaattccgtattgtagatttcaccctctacaatttggcgccgtctgtgggaacctagcaatcgttcattcgacaaagactccaaaggttcaccttgagcaccatggccgacgtaactgagactccagacctagcttcccagatcgctatcctcactgccgaggcagccaaggagcgagagcaagcagccaaagatcgagagcaagcggctaaagaccgtgagcaactagaaaagctgcaagctgaaaacgcagacctgttggtgaggatggaga

SEQ ID NO: 338818 - DNA, 2141 bp, Cannabis indica
tttctcaatattttatcttttttaatccatataattcaaacctaagccctagttgaaacactataaaaggaacataatgctctcttctcatctaattattgccttcaaccaaatcaaatctagtttcctttgtcagacaactagtagatgagagacaccttctatacattcattgtcttcatactcgagctaggcatgcaaaaaagatctatttagtttagacgcgggttgggaactctcgatccgatggatcacctctgatttgaaacattcagataattattagatcttggatcaaaccgctccgccccgcctaattttttttttggatcggatctgatctgacccgatttcaatttatttaaaaaaaacttaattcaagactcggaccccatactcggatcccttgggacctagacacagacccgggacccagacccggacccgaacccgaacccgaacccgacccggccccaaacccgggacccaagaccaggttcaaacccgggacccaagaccaggatcgaaggcgggactcgagaccaggactgggactgggacccaggaccgggactaggacccgaacactgacttgggacctagacccggactctgaccaggtacccagacccgagacccgacccgaacccgggacccagacccgaacccagactcaggaccgggacccaaacctggttcgaaccccgatcccagatccgggactaggaccgggacccagactcagacccgaacctgacccagcccggccccaaactcggaccgaaccagggactcaagaccaggatcaggatcgggacccgggacccaggacccaggacccgggactagaaccgttacctaagaccaagaccaggaactgagacctcggactgggagctagaccgtaactcgggactcagacccggacctgaaaccggattgggaccgggacctggaacccagaccaagactcggacccagactcggatctggacccaaacttggacccaaacccacacccagaccgagacccgaacccgaacccaagacattgactcagacccaaactcggacccggacccaaacttggacccggacacgaccctttgttggagttggggtagagtttattagaaatatattatctttatacaatctattaatacatgtaaataccaaacatagtattgtatttaataatactaatacaaaattaaaatggatataaaattataagttaatattaaaattcttaaaagaaaaaagagtcgggtcggatcagatcagatccaatcagaataagtcgggtcagatctgatccgatcagagtatctgatctagcagggcagcgcggggcagatccttacatgatctggatcaggtcggatcatagatggattagatccgacccgacccatttacactcctaactcgagcctatagtgatagagtgccatgcccacacatagcaagtcaagtactcaatcatagtgggtaagacattggtaaccaacccgaaggagaaaatgagattcaagctcatatcttgataaaactctgtgacaaaaaggaacaagggttagagatctatgcggaaggagtgatattttttcgctggaactaatgtacggttttctaaactcttatgtatttaatttcattgttttaaagatattcatatttaggatgttaattcaacatacttgttagtaaatctatatcttggtaaaatattcccaacaccatcctcctcaaagcttgcttcaacagccaacttcattaaatgctctgcggctagggcagaagcttgaccgttaatttcatgagccaccagaaacgtagacattggagccaccctatctaccgttaactacgacttttcttcctgagctatcccgaccttccttccataactgtcaccttcctttttgacctcttctatctcctgaaatcccatctcttcttctagtttagtggcatctctttcatcacccttcttcccaaaagaatcgtctatcttctccttccctattaaatctacctctaaaacttccttcttttttgcttcttcattcttataaaacttagagtcttcatgtcatatggtattaaaaaagttattgatgttgggttttatgccc

SEQ ID NO: 338819 - DNA, 958 bp, Cannabis indica
ttggctcaacattttaagctcactaaggagcaggcaccccaaactgaggaagagagaagaagcatggatggcataccttatgcaaactgtgtaggatgcttgatgtatgccatggtatgcacaaggcctgacttggcctatgccatgagcatagtaagtcgttttgttgctgaccctggaaacctgcactgggatgcagtaaaatgggtcatgaggtatgttaaaggatctctgaacatgggtttgatctacaaatctacagagaaaagtgaatgtgaggttgaaggatttgtcgactctgattatgctggatgcattgacacaaggagatcattgacaggttatatcttcacagctttaggtggatgtatcagctggaagtcaaacctgcagaaagttgtagctctgtcatccacagaggcagagtacatggctgcaactgaggcaataaaagaggcactgtggctaaaaggtctctcaaaagaactcgggttcaactctgaggacatgactgtccattgtgacaaccaaagtgccttgcacttaatgaaaaatccgatgttccatgatagatcaaagcatatcgacatcaaacttcacttcatcagagagatcattgccaatggagaagttcaagtgaagaaaatctgcactgatcacaaccctgcagatatttttacaaaatgtgtcactcaaaccaagtttagacactgtctgaacttggtcaacatcaaggaaattggataagtttccatttccctttaatgtttagcttttcttactcatgttctctaagtctaagtgtctatgccaaggtggaattgttgtaaaagtggcctagaaacttagtcttagctgaatgtacttaggactttctaactaccttaccggttttatagttaagttagttatgttgtttgtctataaatagactaaactaactcttagctagtgtgat

SEQ ID NO: 338820 - DNA, 540 bp, Cannabis indica
catatttgtagccaccaacaaaattgactctgtgtggtccctacaaagccacaacgcacatggattcgcacccaactctcacatcaaagttgatcttgacccaatcatcaggtggaggggaccaaacatgagactcaataacttttgacgaagcaaataaacaggacccatagtccgcataacagatagagatagaataaaagtggcaacactcaaccgtctcacattattcataatgtggagatcatctcgcattattaatacaaatagaggagtacaccaagatgaagtgcatctaacactaaatattttttccaattaagatggataagaaggagaactcatgtttcacgagatgcaaccttcctagtcaatataactgtctaaaggacaaagtataaggaacgattgagtagttattagatattatcccatatgtgaaataaatgaaatgtagggaatgtccatgtttcattaacatttgtaaatgaatcaatcccaaaaagaataactgtccacctatattcttataaatagggg

SEQ ID NO: 338821 - DNA, 688 bp, Cannabis indica
tcgaaaaatgacggctgtaattattactttttattgcatttatggtgccacgtcacaaaactcttcggttttcgtgtaggcgtggccattgttggccgttggattgggcgactttaggcattccggttgccacgtgtcatgatcccaattaatgagggatatgggtatttaaaccctttgattcgaatcaaaatcccccattttccctcattttcgttaacttccttattccctctatttcagagactccaacggagactttcatagtttgcctagattttcgcctttctttgtgaaattttctcaatctcaagtgttgtcgggagcaatcgcaggaacaaatcatcagaactaaaggttagttttcaaagttcactgcatttttgttttctgtttgggagaaaacgctattttttgggttttaacatctatgagggggtttaggaatatatgtttgtaagaaatacgtatgaggctatgctttttaggtaagaaactgggtaatttcaaggaaaatgacttaaaatgtgcataaccgtggactttagaaataatgtttgaatagacgccactttatattttgaatacacgcgggtattcggatgaacatctcgaatactcgcatgtctgccttcttaggcttcacagagacttgatcacttctggctgttacttagaactttaggat

SEQ ID NO: 338822 - DNA, 595 bp, Cannabis indica
attcttagggattgaaggcagcaactcttgcggcctgtaaatcatcaagcagtagttccactcaggattgaggcaagacaagactagtataatagtatgctatatgtgattacatgttagcgtgcatgtttatgaatgccagttagataacatattatagtagcgatattagtgtacatagagatgcactgaatatcgacagtatatgttgggctaagtactaattaacgctatcacatcggtacgactagagtaccgagtataggctgatattatggttaatagtactgtcgtacgaacgttctagacttagtacgcgtgtgacgcgagatagggttatgattaggtgtatgggggcctagttataattcaatttaaattatgttatggttatgtttttcttattgagtctgttgacttataattattgtttacatgtgtaggtaagggtaaagctaaggctgagcagcagtgagtgcgagcagatgaaaattgtacatgtcgaggcagttagacctagagcgtacgatctttggaacaacatgctgtattttgattagtcgctaggcgaaaaattttgtaactaatattttgt

SEQ ID NO: 338823 - DNA, 581 bp, Cannabis indica
aaatcacgtatacgcctatgctagttagggtgttacatacaacccctgtttggtcctcgctgccagtagattgggtcaagatcaactgtgacgttaaagttggaagggacaccatgtgaattgtggctattgccagggaccacaatgaatctgttttgtgggtggttacaaacaagctcaacttctttgatcctctcattggagaagctgcgacttgtctgttagctatggaaatggtcgtctctttacaacatctttttgttttggtggagagcgattctgaaatagttatcaagactctgaggggcacttgttccaattgggagattgataactatgtgcatcattgtaaacacgtctttactaaattgtcatgttataatttttcttttattcctagatattgtaacttcgcggcccataacatggctaaaggcccgtttggcacagcttttggaaaagctaaaagctactttttgaaaaaactgttataaaaatgtgtttggtaaacagtcaaaaaacagctttttgaagaatttttggagaagctacagctaaaagctgaagctactccaacccaa

SEQ ID NO: 338824 - DNA, 900 bp, Cannabis indica
aactaacacacccaaatcttgtaatcaccctctgaaataagctgaacaagagtcaagccctatcttgcttcttcacaattcgagagagagaaaaagagaagatcaatatttcttttcttctagcttattctaagtgtttctaagagattcacttccttttctttacattaataaaataaatcatatattcatattatatgctcacaaaagacagagtaatctatcaaatgaccatattgcccttaacctcaattaaatgcctaaaatcaagtaagggtaaattggtcattccaactcccatcaattctcgatatttcgaacaccaaacaatgacgtcccactattaataaattctataccatacaaaatgtgacactataatggcccaacgtcgctttccattgctaccaagtaaaatcacagaaaacgagaaattctcatatagcataatcaatacatgttaaaattaaataaatctccacaattaagaaaattataattaataattaaatcacataattaaatcttaattatttaatcatctaatatactaaacttaggcggtctttacacactgtttaaaactgtggctaatactttgcccgatagttcaaagtcgtcaggtttagtgcattattttttaaaagaaaaatttcctgcacttttacactatttgtaatctatatgagtgttaaaaattgtcacctatagtatggtataggcaacatttttcaacactcacttaattttttagcaacggtccacaaaaaaagtctttttgaaactgtcgcgaatttttcctttcgttgtagtggaatatgcatgttagataagtttgaatatcttaaatattcatccgtagtgttgtaggttctataaatacatgtactgcggtcggat

SEQ ID NO: 338825 - DNA, 834 bp, Cannabis indica
accattgatattgacttagaaagatataatagtaactttatgatatcttatctaagaccaatatcggtcccttccaatgtatactccatacatccgatactggtaaacttcgccaatgccctagaaagaacataacacttatccaaggtataagtataccttatcgctaattatcatgccagtctaaatccagtgaattgacaaatcatgggaattaaatttttgaacatatagtcatgattatattccactatgctgacgacactataatcatgaataaatatatacacatttatatatctttaggacttaatagaatttatacattaaatatattcataaaataaatcatgtgaaccatgcaacataaaactgatttctgatcttttattaataagtaaatctgattatattgaaataggttttatttaggcacaaaacccaacaaacttccacttgcactaatataaaacaaaagtgcatttcaaagttaacgagagtttgataattccttgactggggacactatctccaatgaatccgcataaattcaccatgcaaggttttaactttgcattttgcaatcccattttcttaagtgtatccttgtaacggatattctttgaacttccattctctaccaagaccctttttcttcttttgttggcgagcatacctaatgtgctttgtgtcttccttcaaaaaaacaattggaggttcttcagtcttgactttctttgatgattctggagcaaaaactgaccgattgagtaatacccggaattaagaaaaaggattagcaaaacccttactagataattatgtataattgag

SEQ ID NO: 338826 - DNA, 620 bp, Cannabis indica
aacattttagtgctttcattaagagggtttttaaattccttggggaaaaggagtattcatgatatatggatggtagtacacaacttacgacccatcaggtgaggatcactaccgatctatcaaccgctgggggcgaattgtgggatgacttacagggtcgtctagtgaagaatatcactgagttcaatgagagggctcaggtgtttgttcgaaaggaggaagctcaaaattagatgaacttgttaattactggctcgggaagcaaacccagcaatgtttcaacaaggaccgtctcaactagagttgataactcaggggcctccgtctcaaacagaaaagatgactctaaggggccgtccaaggacaagaagaaacaaaagaagcacgataagtacgtgcctatactatttataccgagcttaatgaaactcaggaaaatatttacctcgcgcatgagcataagtttcccttcagtaaacctgagcccatgaggcggcgaggcataagagagatccgaccaggtatttccagtactataaagacattgggcacacaaaagatgagtgccgtcaattgaaagatgagatagaaagtctcatcgcgcggggccacttcaagca

SEQ ID NO: 338827 - DNA, 1466 bp, Cannabis indica
aaatattatatttcaaatcttataatttaacaaaataaacaaatttgaaaaataggatgttttatggttaagatattataatattatttaataataaataaaataaaatgtcctaaatttaaaaaatttaatggttagaaaactctaaaatatctattcaaacaaaattaaccaacttttcaaaaatttcatgttattttaataaaaatatataaattttaattaaaacaaatatttgatagaatgtcaaaaaactaacatttatctaatcttataattcaaattaataaaatatattttaaaagtaacaaattttgaaaatctaatatttatggttagcaatttgaaacttatctagattatttttaagttttattaatattttaatgtcaaaataagatcatttcaaattttattaataaaacatgtaaatatttgatcttataattaaaattaataaaccaaaataaaataatcaaatttaaaaaataaccataatggcaagtttgttgagaaattaatttcaaatttaaagcctactaatatccaaaactaatttaaattaattaaaaaattatttttaatctgataattcgatttttatttgaaaaataagattctacataaaattctaccaaaatttaaattttatttaattgaaaaatgatttttaaaagttgaaaataagccaaaatggtgcaacacagggaagtatgaatgcatcctcccccgcgcgcggaaggggaaagaatgccgagcaaataggctgcaatgcagtctacttgaccaaggtacctcagtcacgggctccttcagacaacttgtgtttgagaattctcagtcaatcctgtctgaaaccgtgttgttgccgagtaactcccttcatcagcgcgcacgtggtgtcaaccctaggctagatattttcaaacttcaaaacatcataactaatttaatttaaatccaaattgggttttgttaaagcctaaattaattaatttctcatctactttctagaaaaaatacttccagtacgaaaaataaaaatatttttcgtcaaacacattcaaattaacaaacaatcatcaattaagcacataaaccaacatgaacacattcaaatcatcaaaatcatcgttttaaatccatatttcatgaaagtaaatcattaccatggctttgaggccagtttttgaaacttattttattagaatctagatttacttacatgtatgtttgactctaatctataatctaacatcctaaatatgaatttcctaaaataataaaataaacacacaagaaataaaaaaaaccttacattgatggcagcgtaataataatgactctttccaatcagatctctagcccttgattcttgtctgtaacagagcattatcaagatctgaacttggatcttctctccttcagtttggttagacacactcttcctcactatgctaagtatt

SEQ ID NO: 338828 - DNA, 1316 bp, Cannabis indica
ctggaacttttcccatgtctttttgaggttgataatgtaaatcatgtcgcttctgcgattgaagacatgacgctctatctgacaatcgcaatttttggtgacaaggtgaacctcaatagacaacatcatttgaatgtcagcttcttcctaagagagctgatgcgacgtagcagtggaattcattgaaagatgtctggagctaattagtgaaggtaccaggagtatgccttcctatagcgagtagatgtctcgctattcgttacccatgtacttcgagctcttacacttagttatataatgtatattatacgctaagtgttctaactgcctacacgtctcgtcaacacttttctacacattgcgaggttgatggcttgctatgtattatcgatgtcatccttacgattatgtcttctgacgcaaaatattttatcatcaatatgtgaattaatagtttgtacatctttgtctcgcttaagactattcagtcgacgagttatagatatattctattaactctacatttaatgagttattccattaataacttttttagcataattacttttatatttgttgattcgtattctccaaggttgacacatgtcatcctcttaagtaccagccaaattttgggtataacaattgccccttaaaaagtcatttttcaatgaaaagtgttttttaaatgattactgagggtatttttgtctcaatctattttgaaaaaacacatgccctctaattttggcagttttgtagtttcgaggtatatcatgaccattaaataattatcttttccacttattccgtatttctacccgttggatcatttatttcttaatccaacggagatcaacccaatggtataaaacgaaaaaaggaaccacctttcattatctttgtcatttcaaaattttttttgagcttctctgtaaaaaactagggctaagcattcggcctactgggccgaccaaaccggccaacccaacccggaatgggccaaaacatgctcaaatttaatgggccgaaactctcttggtgtcacttatgggttgataatcgggatggagggtttttaacccattgaacccaacccgggccgtaaagcccaataaactttaaaaaaataatttacatttaaataaatataaggaatcagatcagtttttttttaattgaaaccctaaacctaatgcaatataaacctcatttgtcatttcctctcatttgtccaaaccctaacatagcagccacactatttttttttaaaaaaaaaaaccctctcaactcactctcagccgtcccaccaccac

SEQ ID NO: 338829 - DNA, 655 bp, Cannabis indica
ataatatttaattattttttaaatccctatttacttgtttaatattatttaaatagattttagaaattatctaatgcagtgcagatgtctagtattattatacacctagccaatatacaacctgttgatcaataattaacggatacgaaaacgtctctacagtagtgacaaaatgatagttcctactatagtcttatctatatttatatacataagtgactaaagaattgaattatcaaatcaatattggtatatagtacccgttgtaataattccatcatgctggttgttgtacttaaatctttatgagtgaactcactttcatgatacatttaaagatcatgtatattaatataaaccctataaaatgttctgcatgtatgctttgaaaaaaaaatattgaacttgtatgcttacttggttaacatgaaataaggattggttatagtaaaatgacactgagagatgtgattgtgaatttggcaaagcttgagtaaacactacaagaaatgtcatttttaccagcgcagttcgctactgcgctggtaagagtaacttttaccagcgcatttcgcaaactacactgacaaaaaggtcaaagttttaccagcgcacatttgcagtggctaaaatttaacttttactagtgcattta

SEQ ID NO: 338830 - DNA, 521 bp, Cannabis indica
tctattgttaattaaacaataatagtgacattgattgtctcatttggaaatgagaattagcagatactttatgaaatatcgagaatagtttgttctattagaaaaatacttaaaattgttaaagttgtgatatattgaattaatcaatttgaatatatatataggagatatctactgtacgtcctttagttttgatcccatagtataaggtagtaaagtaaaccaatgagaagttaaatagatgaaagtcttctttaattacagtggactgttgtacattataattgaatttatttattattttatataattaaaattactttatataaagaataggcatacttgaatattttataagcgcgtgggaaaatggagatttgaattttttttatgttttttttttttctgttttttttagtttattattactaaaacttaatattttctattttatctcaaatttttatattctaccacattaccagggtcggcccaagtattttgggggccttgtgcaaaat

SEQ ID NO: 338831 - DNA, 662 bp, Cannabis indica
tgataggctcattccttgaaccttctttatgcttgaaaagccatttacatcctaccagcttgtagaactctggtttcttaacaacaatctaggttccattcttcctaagagacagtatctcttcttggatggcctgcagcaatgctacagcatctttacttctcatagcttcttcaaagctagtgggttctgaactgttaacctcttctgcaatcataaatgcatatgtaatgaattcaccataaccaaaatgatcaggggcttttctctgttttctctctctatttctagctaattgatagttgttgagttcctgctgatcttcattatcttccctttctgttgccccagttctatccggaacaacattagttggtgttgtaggagcaacctgctccacctcaatttggacattctcatctaaaccagcttcactgtctttggaagtgctcttggttttcatggccatttcagattccttgaaaaccacatctctactaatcaaacacttcttgaatccaggttctaaacaccacactccatatcccttaaccccttcacgatagcctagaaacatgcatctcaatgctctaggttgcaacttatcttgtctaacatgcacaaatgcagtacatccaaacactttcaagtgatctaagttt

SEQ ID NO: 338832 - DNA, 1281 bp, Cannabis indica
tagattaaataagtattttttttgatttcacgcaattctcatgggttcgacctcgttcttcacaatctccatactacaataaagattcgtgcgcttgcgagttgataaatgtaaaacgtaccatttcggtacacaacaccccactccgagagaatctccccacaccgctgaattttctcttgaatccccaccgaaggatattcctcccaacactcctttacaacttgaaaacaaagtggttcacggagccaacaattttcaaaccgaaatttacgattaagagaaacaaactttttaacagccatatcaagtaaaataggacaatgatcagaagaagagacctcaagattaataagcttagctgaagggaagcgatgaagccaactttctgtcactagagcacgatctaagcgaacctcaatccaattttcagtaccacggctcttctcccaagtaaactgatgaccaacaatatctaaatcaatcaacccacacacccggatagtatcacgaaaaccatcaagaagccagtttggataaggatgtcctcctcgtttgtcttcctgagagagaacattattcagatcaccaatcacacaccaagggagagtattaccagtagctaaagtccgaagttgttcccaagaggaccaccgaagacttctttttgattccccatagaatccagttaggcgccacggcccaatatcactagaaagaatttccacatcaacaaagtttgtagcaaaattcagcaccttgacatcctccttattcctccataagaaagccaccccgccacttctaccacaagcatccaccgcaaacaccccatcaaatttcaatttcattcggactcgttccaacacatctttacgacataaagtttcacataagaaaataaaatcaggcttcttttgggccacagtgtcatataggaattgtatcgcccgtgggttgcccatcccacgacaattccaacttaaagtattcataatgcccggtgggcctggagaccagagcccacctcgaactcgttttttgagagtccattatcaaccatatcagcactatcatcctcatccatatcaacataatcaagcccaacaaccccttcactttgtctccttctttttgtctctagagaaggcccacggcccccttgtccaccacgtggcattaatggaccaggaagaaacagagaatgttgacctggcacatgatctccaaacacaacagacttcccctttcgttggcactgaacttggaaacactatcttt

SEQ ID NO: 338833 - DNA, 1506 bp, Cannabis indica
gggtctatatggtagatagggggccatttagtagtgggtacaattttactgaacctagccctccgccatttagtctaatagcttgggtttattttccaaagtcagacttgggcgtagccactattatgtgacttagcttagaaactagttattagttttagtgacaagattaagcttatatatattgctatttgtctaaatatgtgcatctaagttttaattatatgttttcttttattttatgtgactacgtgacaagcatttccttactgagtttagtagttcacccttatcaaacataccatgcgcagattttaaggctgtaaaacttagaaagccgatggcaagtaagaccttggaggcttgtgtgtgtactcgctgaggaccatataactgagggtggtctagggcacgctccatttattttattaagtgttattaaattaatgttgtagttatttttatttattatttattatgtcttgtaagttcaaactgagcgaaatattttatgtttgtaaagaaaagagacattaaagtttttccaaattttaacgcttgtaactaaattagtaaattatgaaaaagtttgggcgttacaagaagcactttcctttttggtttgaattgggattagcagcctttttcttattagctgtgttaacaactttaagagacttcttattattcttccacttcttctttttgggtttcgaaatagaggcagtgttttcctcagccttagccataccattagcagcgccaaaactaggagctttagttcctcctttctgtggtcctccaatcaaattttcaaatgtttgaaggttgtttattaactcgtggaagtcataagtcaacttgttcatgacataatttgatgtaaagggcagaaaagctggagtcaaactattcaagataaaactcacttgatttgtctgatctataatagctccatgattcttagcttcctggaagtaactagtcatttggagcagatcacacacatactgatgaggttttatccgtgcattgataaaattcttggccgcctcaaaacgagcttgatctgacgccatcccaaacagttcaattaactggttcatgatatatgtagtcgtgagagtattgggaaactttgttttcaaggtgtcgaccatactagacaacataaagtatcgagctttgttgttagcattctgccaacgctcaaacttttccttgactgccttggtcgcatattcacctggctgcttaggagcctcttcagtcaacacaaacagggcttttcacctatgagagcaatattatgttctcattccgtttaacaaagttagctccagagagcttgttgtcattcaacaatgacaccatggggttgttcatagtcatattgggtactacaaatatcaataaatagaaatcaaataatgtttaatacaaaatcatacacattcataaattattagcacttatcaagtaggaataacaagtgaaaatacaaaa

SEQ ID NO: 338834 - DNA, 566 bp, Cannabis indica
ttccctacctcgctagttggggcagcgagcagctatttcaacaaatttacacatcattcaatcacctcttgggaacaattgtctaaggacttcaagaaacagttccaggcagcaagggataggtgacccgaagtgtcttctcttacaaacataaagcagcagccaggcgagacacttaaggcatacttgagttatttcagcatagctactgcgagagtaagaaatttgaacgatagtatccagctcactacccttcaagtagggatcacgaatgatctctcaactgctagaggcgagctatgggatgactttcaaggtcgtctagtgaagaacattagtgagttcaatgaaagagctcaggtgttttttcaaaaagaggaagcaagaaaagagatgaaattgttaaagaatggctcaggaagtaaacctagcactatctcgacaagtaccgtctcgacgaaggctgataatctaagaggctctgaaaggaaagatgacttcaaggaatcggccaaggataagaagaaacaaaagaagcacgaaaagtacgtgccaatatacactat

SEQ ID NO: 338835 - DNA, 502 bp, Cannabis indica
aaaatactagaattgcaaaaaaaatctcagccctagcagccccaagcaaaaccgaaagagagagagagagctcttgagagagaaatgagacttgcttccttttttccaatttttttaataaaatcaattataaaattgatttttctttatttgtttcagccaaaccaaattagaaattcggattacaaacatatttaaatatccataaaagacaaattacaaatgtacaaaaatgactattttgccctcacacactaaaatggcataaaggggtactaagggtattttgggaaaactctaaattcccgacaaatcccgacattcccaatgtctaaatacattgtcccactatactagaaatactaagttgtcattctactgagccaaacaccacgttccatgttgccgggcaccgaaaatgcaaaatcatgaaatttcactatatgacataaaaatgcattcagaattcaaaaataacaacataaataattatttgaatatc

SEQ ID NO: 338836 - DNA, 701 bp, Cannabis indica
ttcttgatttcagcttttttttttgaatggaaaataatattttattaaccaacaaaatctgttaccaaacaatgtaacaattcggtaggaacagactccataccaaaaatacgaccagaaaataatacagaagctcttgcaaagttatgagctaccacattagctgatcgtttaacaaaataaatagaaacatgttttaactcaaaggagagttgtttacattcatcaatgacttgtccaaacaaagatatcatttttgttgagctttgtattgtttggacaaccattaaacaatccgtttcattagtcacgcgttgccattttttccttttaatccaacttagagcctcgcggactccaattgcttcagaaacttctggtgtagcagcccccgagtagaaatccattcagccctcaataaggaagccttggtggtcatgagctaccattcctaagccatagttggttcccccttcgaaaagagcagcgtcaacattaatcttgatactatttttacttggagcggaccattgctcaaccccatcacccgtctgaaaaccagaccatgatgacttaataagagtattttgagcatttgtccattgatcaagataaccttttgccaacaccacaattccttcagtgttcaccacctttttttgccaaacaaactcattcctagcgctccagatcgcccaaca

SEQ ID NO: 338837 - DNA, 663 bp, Cannabis indica
aaaaaatagaaatcccatatttgtaaaacaataataagtttcaccgaaaaagtcaaaggtaccggaaaagttagtgtcatcggaaaagttaccggaaaaattatcgtcaccagtaaagtcaccatcaatcgctgaaaaagtcactagagaagtcaccaaaagtacatgtctcaaatataactaaaaataaaaccggttctataacataatgaataaaaataaataacttaaaccgattataattgaaatataactggtttagtaacgtaatgaataaaaataaataatacattaactcaaaccagttataattaaaatagaaccgattttataacaatattataatgaataaaaataaataacatgaaataactcaaaccggttataactaaaatagaaccaattatataacataatgaatacaaataagtacgtaacacacaataactcaaaccaattacaattaaaaaacaaagaggaaatcagttcctaaaacactgaaatataaattaaaaataaaactagttccgcaataaaatacctcataacacataatacctcataaaatcggttatattttttttaaaaaaaatggggatcaattcaaaaatattaaggcataaatatgaaaagaaccggttccataacaaaataaataaacac

SEQ ID NO: 338838 - DNA, 989 bp, Cannabis indica
tatttgtactgggaccacgggcttgggtcttggggtcctccgctccaatggagctccaatacgaagggcccttccggcggtcgcctgggccttaatgtaagccagctcctgttccctcttgaagaggtacttctggtatttgtcctccgccatggcgatgatttcaccccggagcactttctctgcaactggagctcccacattcgggcatatgactttggaaagattgtagtcatccaccgactggtgccccaggatcagcttggccttccgacagtgctctgtcgtgaccagctccccgacatccagggccttcttgtcgtatgtggcgaaggtcttggcccgttgaagaaataattaagtaggttcggtccgcatgtaaggggggatcctaacccactccgtgagaagctctgggtgatccatggcctggaaactggaggagaagaagaagcggtgacgatattccttcacgtgcttctgataattataagggaccgggcccttattcaaaggatgggcccggagaccgtaaaaaccatccttaagtttatctccctttttagggatggaaacaagttcgtaaaaatacaaaatttctgctggactgggcgagccccagctccgggcagcgtaaaaaatgaacaagcctgaaagcaggcggtaagcttgaggaataagttgatatggcgcaaggccgacaaatacaagaaagttaatgaaataatcttggagagggagcatggccccagccataagatgcgtctggctttagggtccgaagcccttgttgttgtggttgggcgtctcctcgtcccggggcagccggtggtaagtcccagaggtcgaaggcttgatgcctgccaccaccacaatctgctccagctgatgggcgcaggtcagtgtagaatgaagctcagccgcttcccacccattggcacgggacttatgcccctcttgggccacgggagccttcatgacctcctcca

SEQ ID NO: 338839 - DNA, 787 bp, Cannabis indica
aggtgatggtcaggcggcgagtttccttggtgatagcggtgacataaggtgatttcgctggaggggagggcacgagtatgtggtccttggtttgaggggagaattgttggggtatcaacccaagtcccacattggaagaatagacaagagttgtcttggatataagtgttccacattctctattagtatgaggcattttaggaaggtgctcaaaaacaaaccgtcagggcttaggcccaaagcggacaatatatcatactaatgtaggagtcaaggtgagatggcaacccaacaaggaagaagaacgaggcccaacaatgtataattggtttttatattttgttgtaatgggattgctccattttttgtagtatttaatctatttttcatttcaagtttgtcatattatttttttatataattgaaattggtttttcaaattttgttatgattttgtatgagttcagaacttttgttatggtttcacaaattttgttatattttagttatgatttttcatagggtcgaaactagtttcatttggttaaaacttgtttcacaggatttacatgttcgaaactggttttgcatgttcgaaataggtttcacattaaaggttacgtaatgtggttgcttcattttatgatgttattatatattttctattttaaattttttattattattttgtttctaggtttgaaactggttttcacacttatattccgttcttagattattattgttgtgcattgtgtgctgttttgattatatttgtgagtatttt

SEQ ID NO: 338840 - DNA, 843 bp, Cannabis indica
tatgggtctaacagtgttgacttttgtattctattttgccgcttaggtcggctagaaagaaaggacttgtaataaatttgtaaatatttttgggatcccaacggtttaaaagtttgaaagtattacaagttttattttcattccgattaatttaaaagtttaaattctgcgctattttcgattagtaatcccgaattaggggattaggattccataagcattttgggtagcgtgcctaattatttagggcgtttcataaactttgctacgggagcaaaagttttaaggtagtctatcccaaattgttgggagtaccctttagctactaagcaagctttaaatctttcaatttcaccttgggcattatattttattttatatacccatttccagccaatgaaatgatggccagcaggaagagagacaacaatccaagttttgtttgctataagtgcaacagtttatgtatccatagctcttacccatacgggaaatttagaagcttgagaataagaagttggttcagaaaccaaagaagcacttaaaatggcaacacgaaacataggagaaaatttgtcataagagatgaaatttgaaatgggatgttaggtagaatactcacaaatgtagtcttggagatggggtggacgaatgaccgtcggatcagatgttgtggtgacgttggagtcacttgtaggggctggaatagccgctggtggtggcggtaattcagcaggaattgtggcaggagtggccacatgtttgggcggtggtggagggtttataggcccagggactgcagcctttaaaggagcctgtgaaagaccactaggtgaatgttgg

SEQ ID NO: 338841 - DNA, 637 bp, Cannabis indica
ttttttttttttttttttttgctatttttgtgcatttgtgacattaaccctttcaaaatctcattagtgtaattatgctgtaaagagtatacagttctgctatgagaccaactcaaggaatcctaaaggtaaagctagaccatttccaagcccaaatcccaaccgtaatggtgtacgtgttaagcccatactagcttcagcccaatacaacggacaaattgctcttattatttgatacatttacaagattatataagtttgaactttttatttgaaataacccaatttaaaaatattatccaaaaatattggataatattttcaagatacaaatatatatatttgggattattttaaaaaatacgaaaaataataaaaaacaaattacaaaaaattgttgtacagaattttaattattttatggtttttaggattttatttacataaaatacgttcttttgatgttttttatgtcgttcttttgttattttgttattgattttttgttatttgcatattatttttttggattaagatgcaaaatggtcttaaatttgaaaaattaagttagtaaatatttttttttaataaaaaaaagaaaatgaccaaatataataaattaactaataaaaattat

SEQ ID NO: 338842 - DNA, 700 bp, Cannabis indica
acaaaatttcagccgaactgggctaaccccagctccaagcagcatacaaaatgaacaagcctgaaagcgagcggtaagcttgagggattagttggtacggcgcaaggccaacaaaaactaagaagtttacaaaatagtcctgaagagggagcatagcctcggacatcaactgggtctggctccaagcttcgaagcccccgtaattgtgcttgggtgtctcctcatcctgaggcaaccggtggaaggtcccggaggccgatggtttgacgcctgccaccaccacaatcttttaaggctggtgagcacaagtcagtgtggagtggagctcatccgcctcccatccgttagcacgggacttaaagttctcctaggccacgggaccctgcatgacctctctagggtggccagttgaacctctcccttcttggaagacttagaaccagacgcggaagcagacattttggttttgaaaaaatcgagaaaatccagcagttaggccccaaaccaaaccctaatgttcaaaaaagggaatgggggtcccctaatcgttggaaagaggccccctccggacacttgccaaataagaaaaccccaagagattttccttggcaagaatcgggtgcaaaaatcccaaaggcagtgacattgcaaaagaaaaaaaaagggaaaaaagggcaaagccgagaaagcaagatctact

SEQ ID NO: 338843 - DNA, 842 bp, Cannabis indica
gcaaaaaagttcatgaagcttagaataagcaagatgaaaggcgacgcaatgcagttcagaaacaagttttatggctgtaaacccacatgaagacatgataaagaagaatcatagaagtttctaaccctagggtttcctgagcatttttctacagcacagtgaaagttgcattcgaaatgtaaacatgcaaagataagcataaaggagatcagaaacttactcaagattcaagtgtctgggttcgagcaacctctatccaaccagcagttgtatgaaggcgcttcggcaactttgaagccaagaaatttttcttttcggtctggagcttacttagcgaagaaggatgatgaaattaatttatgtgccaatgctgtggttatttataggcaagtcacgaaaaaaggtgattgtctcaaagaaacctcagacgcctcgacttcccgcctaaaaaacgaatatgggaaataaaaagtaatcgagtgcaactgtctgccgtggagagagaaaattggattttgaaatatttattgtcagagcatttattagccaaaaatcgaagggacacccagtcagcttcacattaaatctcgaacagtcacgtttgatacatgtttagagtaagatattcagcgatctgcacagagcaatcaacacttagcgaattcagatttcgcatcaagagtcatcagctcaatccctataactcagggatcaatttaagtggatctaccatacacacgatcccactatcagtgtattcggcctcaatccaacgatcgttgcattcaacattgattccacgatctttctatttatacgcattgtaacgagagaggaaactc

SEQ ID NO: 338844 - DNA, 772 bp, Cannabis indica
tgaccaaattacccttgggttagtagctaattagtaaatagctagaggggtaaagtagtctttttgggtttagccttgttttgtcttattttggtgatatatgctgaatataggtttaatattatttaaaagaaaaagaaagaaggaacctaatggctaaaatagaaaattgaggaaaaacctagacttttcctaagtctttctctccttctcttttgaatcaccaagctttgcaaggaaagggggatttctttgctgtaattctcaaagttctagcaagaatttgatactccaatcaaagtatgcacccctaggtattttattgagttttaactaaagtttaggttgtgtataacataacttttggtgtttaagttgctgtatgttctaaggggggtttgatttggtaatctggagattgtttgagattggttaaattagtttgaactagaattatggattgaattgagagtgagctaagtttgagcttaagaactcaaatatagctctctaatggtggaattggattttgtgtgttttgatgatttctattgcttgggtttggtttagtataatgcatacagggattctggaagttattgtgaagtttggggttgttttgaattaaggggaagaatttttgggttcccagcttagaaccggaattccggttcctggggccctgttgcaaccggtcgaccggttggtcccaggaaccggacttccggttgggaaccggcctgccggttggggctttttcccgagccctagt

SEQ ID NO: 338845 - DNA, 771 bp, Cannabis indica
aggttgttggaggattttgtggtaattcggtcctgaatacggggggaaatattttcaatttaattctcctaaggtcatggagaaaaatatgggatatcatgttggtgttgaccatagtgggaatgagataaatgctaatgacactgatattgatgatccgaatgatgacgtcatattgttggattctaaaataggcgcacaagggatggtgtgcaatcaggtcaacgagttatgggccaacagtctattgggtcgtgtattgatccagtcgagaaggataatagtagtatggatgtgactgtggctgaagttaatcaagaatcgggctccatgaacgggcctttggtgggtgctgggatccaggcccaccgcccattatgagtatcattagctggaattgtcgtgggcttgagaacccatgggtttatcaattcctggtggatcttattatccaaaagaaacccaatcttctgtttttgtgtgaaactctctgtcgtaaggacaagttggaaagattacgggttgcgatggggtttgatggtttgtattctgttgatgcgagaggacatcttggtggggtggccatgctttggccttataatgaagatgtgcagctgcttagctattcttttcatcacattgatgttcagatctcagacgtagcttcttctccttggcgtttaacgggtctttatggagaacctaatagagttgttcagtataaaacatgggatttaatgagatcgttaaagtcagaatcttctcttcctt

SEQ ID NO: 338846 - DNA, 849 bp, Cannabis indica
ttgatttgcagaataataggaaggcatcattaacaagttttaccgagttaacgttgcctttatagaaaatgacaagattatctacaaaacacaagttagttaagcgtaactctttgtaaagaggatggaatccaaacccttttttcgcagcataggaactgagaagcctagttagatattccatgatcaaaacaaaaagaagcggggacataggatcaccttgacagagcccttttttccctctaaaattcccttgaatcctaccattgattagcagattataattggttcctctcaggcaagtcatgatccatttaatgaatcgggtaggaaagaaaagagacttgagcaggtcttccacaaactgccaatcaaccgtgtcataagccttgctcaaatcaattttcataatgcatctagctgaaatattcttcctggagtaccctttgagaaggtcttggaagatcatgatattatgggctagaagactattttttatgaacgcaccttggttgttctgaacaatgttggggagcacttctaaaagtctcgaacataacaatttagagatgcatttgtacactgtattgcaacaagcaatggtccagtaatccttttccgtggaagggtttgccaccttaggaattaaggaaatgagtgtttcattcaagtgtggaggaggcctgccattttcaaagaaacatgtaactgcattagagacctcatctccaattttgttccatagatctttgtaaaatcaagaagatagatactaattctattcaaattcaaattacactaatatcttgaattaaatttaaaaaatattaaattaattcaaaatgataa

SEQ ID NO: 338847 - DNA, 753 bp, Cannabis indica
ggagtgcagtatgcagtggtaggggttcattgctttactaaatggactgaagccgaaccactcgtaaccattacatgaaaaaaagttcaagactttattgtgaagaacataatatgtcagtttggactaccgtacaaaatagtcctagagaatggcaagcagttcgacaaacaatccttcactaatctctgtgcgcaccatggtatcatcaaaagtttctccgcagtgatgcatcctcaagcaaatggtcaacttgaagcagtcaacaaaatcttaaaggatacactgaagaaaaacttgaagatgccaaaagaaactggccaaaagagcttcttgaagttctatggtcatgtcgcacaactaagaaaacgacaaccggacaaacaccattcgcaatggcatacggttatgaagctatgctgcctgtcgaactcgagccaccttcccacagaagattgacgtacgattaaggtaccaatcacatactcctagcagatttacttgattaaatcgaagaaagacgagccactgtaaacttaaagttgatggcccatcaacaaaaagtagctcgatatttcaacaaacaagtgaaagctaaaaaattaatcgtgggagatatggtcctcagaagggtattcctaaacaccaaagatagtacggcaggtgtactcggacctaactcggaaggaccatatgaagtggttgaagttctcaactccggagcatacaaattaggtaagtatgagaaaaaaa

SEQ ID NO: 338848 - DNA, 1362 bp, Cannabis indica
gccttcggacagctatctcggagacgatgctgccagcgttaagattcggaactttgctagggccgaattagagagtcagggtaggactagcttgattgctatatctgagtgtttgttgttttccatggatgttctaacacttgccttttttcttttgttgtagcaggtacttccatggatgccattctggccgaacttgccggggctcacactcctgatgctccccctcctttaacttcctcccagatggccacccctttgaaagcttcttccagtgcccctccagacactattgacttagtggatgaggaggaggtgcttccgggagaaggtcaagaaaagcaatggggcttttctgaggaagttgaagaaggtgaagaagagcaacgggctcttcctgaggaagttgaagaaagtgaagaagagcaagaagttgctctgattcgcaagcgcaagggcaagatggttgcccaggaagagcccaaacggcaacggagagctgatactccggcccatggtcttgatggcgggatctctcccgagatggaggaacacacggcccctcccaacattgtgctgactccggttcctggagatgaggcgagacaggagctccggatagctaaacacaactacgccatggatgaatactcccgggggtatgctgacgtggaggctctgaagagagttttgcgagttgagatgcaaaatactctcaacgacccgaactaccagaatccgtgggatctaaatttggatcccttgtcggattggttcggtcgtttcctcgggcccacactagctcccttcgccgcggagatgaccggcgagtttgcgtcccagcttacccggtgtgcacccaggcggttcgctgcttgtgcatccttgaactccatcttccaagtccaggatctcagccattccctcactgtggtaagtattttgtagtttacttactcttctccttatttttttttcttaaggattcttactcctacttgtatcctttcccagcttgctgctgaggccggccgcctttccaagaacataattaaccatggcttcgtcctgtccgactttggaggcatggacgaagtcaagaagatccttcaggacctgactgctgaaaggcggctttattaggaggatgccgagcgccgggaggcccttgccaaggccagtgaggaagaggccaagcggagggaggcacaagcggaggcaatgatccgggaagaggcccttcggagggataggctggaagccaggcaccaggaggagctgagagcggagggcgaagctgctgccaaggccaggcgagagcttcgggaggctagggaagccttggatgacatggctgccaag

SEQ ID NO: 338849 - DNA, 1256 bp, Cannabis indica
ttccttttatatttgctgaacttcccctctcgatcagctcttcaatctcatcctgcaaaaactaacactccaaagtagtgtgaccgatatctttatgatacttacagaattttttggggtccctcttgtcgcagtttcccctgatcgggggtggcttcttgaagaccccattcttctcttcgatagcgtagatatggtctcgtggtactgcgagctcagtataattcacgaagcgcggtccaccttttcttttcagcgaggattccttctttggaggggacttggccaatttcggacttcgctgtctccgtggactacgtcttcctgggcttcgacctctggaacttttccctcggggactacgggatcgtgaccgcggcaccggtgacttacgcttgtttttgcccttctccaattctgccagagaattctcaatcctcttatgcggttctaccatggtaaagaactcgactagtgattctggtctccgagcctatagctccttccaaaagtcggttctcagcaggacacctgttattagcatacagactagcgaagactcgggagccttctcaacttttgttacttccgcattaaaacgcttaaaatagtcctgcaaagactcaccagtttcttgtttgatgttagccagagtggtattgggcggcctataggtcatcgtggcttggaaatatgtgaggaacaggtcgacaaaggtctcccatgtcgagatagaggcctcaggcaattggctaaaccaatcgtgggcattttcttccaacattgccgcaagaatgcgacattttgcgaggtgaggtacctgatccactttcataatagtattgaatttttctaaataatcaatgggattagaggtacctttgtaccttaaggattcggataaccggaatcccttggggagctgagcttgtcgcacttccgaagtgaaaggagaggtcccatgtagcttgtatatgggctttctctgctgctcgagcattttcaaagcctacaagagcatgctttgatcaatacctctggctaagggagccgggattgctgcggctgcaggagctgtggctactgcggcgaggtttgctgggaaattaaccccggtagtcgcttcttgtgcgttaggcggatttgtgcgagtgtttacgccttgatcgcccatttgaggatcacggggccctttctcgtcacgaggggcgtgggagaatgctctgaaaacaacgttaaggtgatcacgcagatca

SEQ ID NO: 338850 - DNA, 968 bp, Cannabis indica
taggcaatgataatgtgatgataatatggacataatatacaggctcacctgattaagtgatgcatttacctggcaacatactgggcataggtacgggcgttagtgacatatgatgagtatcgaacgtaggtacgagttcacctgagtaggtgatgcgatatttctggcgacgtatcgagcgtaggtatggacgttagtgatatgaaaatgtatggttatgacactgatagaaatcattgttgggtttcttcctgacaacgtatcgggcataggtacgggcgtcagtgacatatgataagtatcgggcataggtacaggctcgtctgattaaatgatgtaatatattagtgccaagttgtggcacggactcacctgattaggtggtccaataatattatatatgatgttgcattatgacatcgacttgcgtgattagacaattcaaatatataagcatatctatttctatgcatataactggttatattacatactgttgaatgttaggtttaaacattatatgataatgaaatgtatcattagctgtttaatgtatccttctttattacttttcttgttgagtctattcactcacaggtgctctgtggtacaggtaagggcaagaaaaagttaaaacagccatgagatgacagtcttctccaacaatgtacatatttgaccccagcagcatatgtgccgagttaccaggatttatttcggactggatgtatctatgcgtaagcaatttttttataattaaccatgtacaacatataggttgctcaagacattgagcaatgcacaaatactttagaatttgcaaagaaattttcaaagttgtaaaatctatttaagtgagtgtgtttcatgcttactagtccatgtatgagcatggttgccacccaagtgactaagtaggttcacctcttgatcacttgttaagtaatcagggctttcacataggaact

SEQ ID NO: 338851 - DNA, 683 bp, Cannabis indica
atatgatatatatatataaaaaaagagataaaaagagaagtgtttaaacagttggagtcccaggctccttgttcggttcttctgggccaactggagcaggaggatctgttgttcgaacaggagaagcatcggcagcctggccaaaggttgaagctgcttggccggaggttgaagcagccgcctcgttcccaccataagcaacttgggtcgcgcagtactcaaggtacatgtctttagcctcgcccaagtagtcaaaattggcccggggattagctttccagaaatcgaagaagagctcgaggccggctatctctaaggcattaaccttctccttcaacctgtctacctcggccaccttggctttcttctcctccttcatctgaagaagaacttgccgcaaagaagtcctctcatccaaaagactgttaacttcagcagataagatctcgatggtctcctcaaagcgatcagcagcttcgagatcctttgtcagcacggagatcttcttctcggcagcaaacagcttcttgttggcttcgcccaactccagccgaacagctccagcttccgccctggcctcctcagcttcctttttggccaagtccgcctccgccctcaaggtgtcggacagagccgcactctgaaagcaaaagcttagcccgggagtaagtgtaagccaactt

SEQ ID NO: 338852 - DNA, 1040 bp, Cannabis indica
aaaagatttggacatccacataattaatactatttataacataaatatcattttaagtgtaaaatgatgtagttaattcaaccaactatgaataatgtagttgttagtatgtaaatttttttttgctaatcaaataagtgaaatttcgctatttatattttatattctaatgtattataatgcatttttataatagtactttttttgagaaacaattgttaatgtattcttccgtatttacagtaataattatataattatattattatatgatagtgtatattgtagctaatgatttttaaattttaaaatttttaaattagagttcaaaatatttttttcactcttgaactaaaatacactttatcgttgacatagcaaataattcaaataaaaaaaaatatatattaaaatgactactataactatataaagactatcatataaaaatatcaaaactataattatctaaatatggtcataaggagtgcaccactaatatctttcatagggagacaaccataaaattttataatattataatgtaattatgatcactttttaaattcatgattcatgaagtgaagaagtattgtttaagacaatagggatttttacaccacatactaaaattttaaatttcttttcttttttactgtggggcaattttttttttcaaaaatactgtgtactattgttcaatggttattttttaattgttccactgttgttttaattgttctattttgttgttttacggttgttttataaaaaggcatatttttataaaaaaaattccatgtggcattaaaattgtaagtttttgtccaaaatctagtatttttgtaaaaactcctataaattacacttatacttgattcatgaagtgaaaagtattgtcactataaaaaatcttacttttagtcacaataaaatttgtgactaaaagtaaaaaaattgtgactaattataaattattattactatgttgtgactaaaaggtctgtggctatatgtaatagtcacaaaaattacaattt

SEQ ID NO: 338853 - DNA, 603 bp, Cannabis indica
tatattttatatagaataatattaaaattttaattttttttgggggattcgatgaatccaatataataaatcctagatttaaaacattggatggatccaatctgatccaaaaaataccaggtctaaaatattagattgattcaaattaaactaatagatatacatgaaatacattcaatggataagacagattcaatccgacatccaatggatgttggatccattagatgactaaaatgaattggatcgaattgcatagtaaaatctaacatctaatatataattgaatcggatctggataggcttaaaaatattaaatatggtacaataaacactcctaaccctaccacatttttataatacatttggtgtgatttcaaagtttatgcaacattgggtctaataaatcgcactacttagggctgtacaaaaaaatttgtaaaccgtccaaatcaaactgaaaaaacccgaaaaaattacaaactgcacaatctgttaattgggcaggttgaaaataagtccaacccgtccaattaaaccgaataacccgaccaacccgacattggctttttttttttttactttttaatttttattatatat

SEQ ID NO: 338854 - DNA, 658 bp, Cannabis indica
ttttagtattattttacagttgtttttccatgctttatttatttgacgttgattttactgttcttgctccatctggctagaattaatggttgttttataattgttctcgtgtttctatgatggttttgtctgtggttgtggaagatagatattataaatacatttcttcttccttctctatggttgtttttgtagactttaaattttgattctcttataaatacatgtaacaacctcagtggccaaataattttgaggtgtgtggttcttttatattttctaagtggttatatctgcttcattattttacatttgtttttgtgttgttttagttttattttagtagtttttttaattctaatttttcaagatcgggcttgcaaatatagccactattgcatctggtgttgaggctgtgcaggagatggttagttttttttaatccttttgtctttttgttttgtttgagtagatttaatgttgttttacaattatttggccttgattatttatttggcgttgatttcactatttttgttcaatcttgccgaaattaatggttgttttctgagtattttcatgttgttgtggtggttctgtgcatgtgtgtggaagatggatgtaacaccctaactaatttaggcgtattacgtgattt

SEQ ID NO: 338855 - DNA, 635 bp, Cannabis indica
aggatagggacctgggaaacagaactaggaatgggacctagtacccgacccagacccgaacttgaacctaggacccagctcgtgacctggcaccagaaatggaaccagactgggatccggatctggacccagggcttggacaaaacctgtagtcggtgtctggattagggacccagccctggacccgaaccctaacaaggacccggccccacacccggacctgaacccagtcccaaacgcaaaagtggacctgaacccgtaccctgtgacccaaaattggaaccaaaatcggaagttgaccgggactggaactaggacttggacgtggaatcaaaactaaaattggacctagatcaagaaccgtaaccggaccaagacccggactccaaatgcgtcctagactcgaattgggagacggacctggatgacaacccataccaagactcgggacctgaacccgaacctgagctcagacccaaacatggaaccagactagggaaacagaactagggtcgggacctagaaccgcaccctagtctcgatcccgaacccaaactcagaaataggacctgggacctaaacaagaactagaccgagacccatgacaatgatctagatcttgactcgggattcag

SEQ ID NO: 338856 - DNA, 535 bp, Cannabis indica
aatccctgtggagacgatactcgatttatcactttattacttgttacgattgcgtatgcttgcgtacacaattttcacaacaagtttttagcgccgttgccggggaagtgaaaatgccttttctcaaaagtttgcttgcaatttagatcaatttatgcaaatatgaattaagcacaaaatctctaaaatgacaaagtctcataggtttgtttttaatctctctctccactaatgtagacaaacacaaaaccaaagatcaaaaggactttttcaagcttgtaatgtaaggcttaggtgaaggtggttaagagaagttatttttggctcaaatcacctaaaagcaccttaatttttctaagaccaaaatgagacttcacacttacttcctcaaataatatcccacaaaaaatttgaatataatattgacattatttattgccccaaaatttcaaattaacgtactcctaggagttatagcaatgccttagcatagcattttttttctgtgttcgtgctccagaatgctgaagtaatg

SEQ ID NO: 338857 - DNA, 718 bp, Cannabis indica
tcctatatcaactatctaatttgttgcatgtgtgagttttatattggtgaataattaaaataagttttataaaacctattattgtttgatctccattgtcatggttaacttgtagacagatccaatgatctgattttaacctatggttcaattgtcaataggtcaaataaataatttgtaacaggtaaattttgcaatcttctttcatctgtgtataaatctagtaacatgataggatccatccaaatcagtgtgcctgtgtgagcctatatgtttgctttgggcttagatgcatatagggagctcattgaatttttgtaattaaaatggacttggttgctaaataaaattatcacacttgatagatattatttaggcccaattagtatttgggcctattcaattaataacagttgtttaaattaaggtcaaattcctctcttttaggccttatgtgagagttagggggccattagtagtgggtacgacatactgaacccagccctccctcacatgaacaaccccaattgtgaaggctcatttgcttgatttgaataactgtactaggttaattaaactagtttaacctaataaaattgattaccaacataattaatttcaaaatatatgaaactaatttttcatttgactatttggaaattaatttagaaaaacacacttagtttaatgaaattcaaattcaagataaactagatgt

SEQ ID NO: 338858 - DNA, 338 bp, Cannabis indica
  modified_base (330)..(330): a, c, t, g, unknown or other
taatcgtatgtatatatcgtataagtttttttcagtgaaaagagatgtgtttctcccgttggttcagatgcattatatagacaatgcactgaaggtaacgagaagaaagacgttacttgaagggaacgttagaacataggatcgtggaaacgatgctaaaaatcagaaagctttcgtttatcgataatcaaacacgttttaaaaaaaactgttttaattaaataaatgaatttctccaaaaaaaaaataaggtgacaccacacctgccagctcagctcggggagcatggtaggtcgaacgtgttggaaattattttaccaagatcttagntctactca

SEQ ID NO: 338859 - DNA, 734 bp, Cannabis indica
gttgttggaggattttgtggcaattcagtcctgaataagggggggaattatcctcaatttaattcttctaatgctatggaaaatatgggatatcatgttggtgttgaccatagttggaatgagatacatgctaatgacactaatattgatgattctaatgatgatatcatgttattacaatctaaaaaaaggcgcacaagtgatggagtgccatcgggccaacgtggtgtgggccaacatgttattgggtcgtgtaaggatctagttgagaaggataataatagtatggatgttcatgtagctgaagttaatcaagaattgggctcaaaaaacgggcctctggtgggtgctgggatccaagcccaccgcccattatgagtatcattagctggaattatcgtggacttgggaacccatgggcttatcaattccttgtggatcttattatctaaaagaaacccaattttctatttttgtgtgagactctttaacggaaggacaggttggaaaggctacgatttgcgatggggtttgatggattgtattcttttgatgcgagaggacatagtggtggggtggccatgctttggcgtaataatgatgatgtgcagctggttggctacacttttcatcacattgatatttagatttcggaagtagcttcttctccttggcgtttaacgggtctttatggagaacctaatagagttgtttggtatgaaacatgggatgta

SEQ ID NO: 338860 - DNA, 775 bp, Cannabis indica
atgaattaactaattcttttctttctttttgttaaaataaatctcagccaacataaatcaaaataaaccaaattataagcttcaatttaaaatcactaaagacaaaacaattcatgctaaaaagaccatttttccccttaacactaaaactcactaaaaatcaccaagggataatttgggaaattctaaaatcccgaccaatcccgacattcccaatgtctaactacataagatgtgattctactaagccatacaccgtgttccaatgttgtcgggtactgaacatgcaaaattacgaaatttctatatatgacgtataaaatgcattttgaattcaaataaatcatcataaattaataatttagaattaatagctaattttcataactaaaccctaattatttgctaattttaaaatttaggctaagcggtctttacatgcagcaagttctagatcatgagtcaggtatcactgttcatattctttcaactgacaagaggcataggcgaaaacccgatcgtcctgcatcagtacacatcccagaccctgtctggatgcatcacaatatactatgaacttttctttatcagaaggtagggctaacactggagttgtgactaatctctgtttcacctcttgaaagcttgcttcacacttgtctgtccacacaaaccgttgattctttttggtaagctcggttaagggtgttgaaatcttagaaaatccctctaccaaccgattgtaataaccagccagacccaagaaacttctaac

SEQ ID NO: 338861 - DNA, 591 bp, Cannabis indica
aagaacatttacttttaagtgaatggcctgctgggcggtctatgctcaagggtttcgaaaaaaatgaaaaagtactcaggtcggatgaccaccatttaaagtacaatttctaatttcagcaatttgttttatttcatgttaagctaaaagatcagattagatcaaatagccctgatgtaagttactacggtaacaaacacattttcgatcaataaatgaataaagatgtttattttaaaattcaaattgaatcaaaattactaacatgttgctaatttaccatccagtgcgtacaaaaggtctggtcgaacccaacacctcgaacagaatagaaagtatacttgtaaaaaaataagtaaccaagagtcataagtctgctcgatcacttgccagagtagattcttcaaaattttcaccactagaggtagaggtgacacctacctcgtcaagattgtgaaaggcggtagttgagattagagcttcattcactagttgtggtggaaaactattaacatgcaaacttaccagatgatcagaaaattttctcaaatcctgcttaatttgtttcagctcagcaagtaagtctttcat

SEQ ID NO: 338862 - DNA, 542 bp, Cannabis indica
agaatgcatgagtactaataatagtatcattttcatagattttcatagttttttacttcttaatatcttatcaatgatccataattttttttatttaaattttatagtacatttgaattttatcattttttcataacatacataaatattaaagctaaaaaaatattaatcacaaccgaatgaacctaacccttatatcattatagtaagtagggttgggttataccatttaaaaaagtgaatggttcatagtttctccaaaatgtagttattgggttggcccactaaaacactttcaacccggccaacccagcccatgtgcacccttatctcgagccatggaaagccagcaagaaattagggtttctcttgctaattcaaccagttgttagcaaaggtaatcaaggttaggggtctccaaggtttggaggtaagttcttcactctttccctttgatttcttaggttttaggtcatgctttgattgggtttttatatgaatttgaattgttggtgatgattgagttcaaagtatatttataa

SEQ ID NO: 338863 - DNA, 369 bp, Cannabis indica
cactcactttgagatccttcccttgagttttattaggattttgaaaactcttaggttcgattaatcactagcttttcaagtagttatatagcttatagcatctaggtcgaatatgacccctcctgttacaaaagtggcacacaaggatgaatctctccatctgagatatatttttggggaaattattcttccttctaacttcacgttggtaggtccagatggaacagggaattcaccagtggggtctgaggactcaggtgtcgagggaagtgatgatttcttgtcagccttttggtccaagttgatcactggtgtagtggactcttctacccccaagttatctctttgtttatacaacatcttatatcc

SEQ ID NO: 338864 - DNA, 579 bp, Cannabis indica
aaaaaaaaccaatttcttggtgatttttcctgtgatttttccggcggcaatgctagttttgacgattttttcggcgtcggcagcaactccggtgacttttccggcaccgacaactactttgacgacttttccggtgccagtggcaaactccagtgacttttccgacacgagtaacaactccgatgatcactatagtttcattgaaaaataaatatgaagggaattttaatattttttatggtaatttaattaaatttttattttttatgaatcttaaattcagattttctttttaatgttttatatggttttattttaaaaaaaaatcatatttttagtttgatgggttaaataataccatttttaatgacatttattttatatattataattatcataaccttaataatttttcccatattttttaaaacagccccttcataaactaccatcaaaataagtcttacctcaaggccggcatgactagcacaagggagtaatgtatataaaatataaagggcattttacaattttgtatacattattttaattaattacaaaatatgtgcaaaaaaactt

SEQ ID NO: 338865 - DNA, 794 bp, Cannabis indica
attgtaagtttatgcaactttgagcttcgagttcaaagctttgagctttaatggcaacttgggttttagtggtttgttctgtgaaatactggctggattatattgtgtatgcccttattaggtactctggaaggtttcatggcatttggtggagaattgagcaacaaatgaagggctttgggaaacctggtgccggtttgcagggccacaaaaaccggctagccggttttggcagggttccccaggcctttcattttctcattttttgcctttgcgatacctgggttgggtgttttcccacttccagagttagaataacctattgagagtataacagaacctaaggttttggttttgggtttcccgggattagggttttaatcatgtaacttacccggtttcaaaatgtgattagggcatccatctagcacgagatttccgttcaggtcggccagcacacttgaattcagaaatcaggtaagaactgaatataatgtgtgatatgattatctgaatgtatgtatatgtgtgtgtatatgcatgcttagattgttgtttgcactaccaacacttgtatggttatgatacagagtgcattgctatagtgagtgttgtctgtgagtacaatacagtgataccaacacgagtacggaaaagtgctaaggtgtgtggtatatcactcagtggtactcagggtacgaaacaaaccctaccaacactcgtacagtgaggtacgttgtgttgtgggtatagtggttgtaccctagtattgaacgttcatgctcatctgttaa

SEQ ID NO: 338866 - DNA, 500 bp, Cannabis indica
aaaatgtaaagcgtcctgatctattctcacataacaaaattcaattttgtataactacaaaagcattagaaaaaagttaagcttaaaatcagacaaagtgttcgataaaatgtgtgatagacaagtaagtaagtaagtagaaacacaacataaatacaaaagctttcacttcagaaactcactcacgtcaagaaaagcttattattaggagctccatatccatgaatgggtaaagtgtagcataaagtagcatcctttgaattgtaatttccattgcgacgattcaagataatagcctcctcctcggaatcttcgttctccaaatgatatggtatcatgttaaatccctgcatggcttttctagaaattctctttatagtgttctgtgattgcccttctgcttccatagctcacaagaatcaaaatcaatcatttatatatatattttaccattcaaaaataataacaatatattttaccttcgtgaagaacattgctag

SEQ ID NO: 338867 - DNA, 816 bp, Cannabis indica
aaaaaatgtagaaaagacttaaaaaaatatagtttaaaaaagaaaattgagtaaaaaaatgagagatcttttgagaaaaaagaataaaaaaagagattttaaaaaaaataataacattaatgatgggtacaaacaaaacaagatactcaactccaaatatgacaaaaaaaacctacaaattactaagaatcttatttagtttgagaatataaagagcacattataggaaaatcttacctaagcggtgcgcaacacgtaaaaaaaaaactaacaaatattgcatttttatttacttttttttcctacttattaaatataattaatctatttttactacattttatttatataattaataaaatttttacatactttcaataacaatttaatatttttgtttattttttcacagatttctatcaagaaaggattaattttaccctaaatgtattgaagcactatgataaaatctgagctaaatataatattgacatattttttttagctcaaattatacaccatacattaaagatgataagaaaaatattaaaggatgtgctaaacaccatatatgggacatactcttattggtgtatttcaatatcgggtcttacaaattttaattaagtatataatatagaatatgctaactaagtattaagtgtcatatttgtatagtattaaacattttaaggtgccaaataataatattttattaacaaataattaaaaaataatttattagaaaaaaaaatattataaaaaaaataatacataaaaaaatggttcataaggaaaaaaaataataagatcatt

SEQ ID NO: 338868 - DNA, 1491 bp, Cannabis indica
catattatgttcttcacaataaagtcttgaactttctttgatgtgatggttgcgagtggttcggcctcagtccacttagtaaagtaatcaatcgctaccactacaataggcactccacctttacctttaggtaattgtctgatcaggtcaaacccccaaatggcaaagggccacggacattgcatctgtgttaactcgttgggtggagctcttggtatctttgaaaatctctggcatttgtcacacttcttaacataggattttgaatcttcaatcattgtcggccagaagtaaccttgccttagaattttcttggataagctttgtctggcggcatgatttccacagaatccgtcgtgtactttggataggagccgtgcagcttctccttgagtgacacatctgagcaatggcatcgagaatcctcttctgtacatgactccttctactatgatgtaccgtgcagctttccttctcatttttcgagcttcatttcggttatctgggagtttttaaaactcgaggtgggccgctattggtgtcatccagtttggggatgtatcaatcatttcgatttcttccgtgctagtgatgctaggctcttcgaggaagtggataggaacctggtttgccttgtcacttacattgttgctttccaatcgagctaatgtgtctgcagttgtattttcttctcttggaatttgtctgagaccgtagcttttgaattctgggagcagatcatgtattttgctcagatatgctatcatcttttctccccgagcttcatattctccggaaccatgatttaccacaagttgtgaatcactacagacttcgatgtgttcggccttcatctactgggctagtcttagcgcagcgattagagcttcatactcagcttcgttgttagatgctttcaatccgaacttgactgcagcgtgtaggcgttgcccccaaggcgtgacaaggacaattcctgcaccagatagttgatctgtagccaacccatccacatgtagtttccaggtcggtttgtcctcattgttacttggctgaggtatttgtaccggctcggggtttctttctggtatgctttcctttttgcctgtgcattctaccacaaagtctgccaagccttagcctttgattgctgttcggggttggaaagtgatttcgtactggcccaactctaccgcccacttgagtagccgtccaaaagcatctggtttttgtagtatttggcgtactggttggtcggtatacacccgaaccagatgagcttggaaataaggcctcaacttttttgttgctagaatgaggcagtaggcgagtttttctattaacggatatcggccctcgacctcaatgagtcttttactgatgtaatagactgggtgctgtatatcattctcttctctgattagcacaacaatcacgacatgttccgtaacagctaagtatattcttggttcctcgccgtccagaggtttt

SEQ ID NO: 338869 - DNA, 1221 bp, Cannabis indica
ctcagtgcctccttaatacccaaagcttccaccatttcgggttgcaacacccctgaccgatagcaggtaaaaacttccaccaatgcaccagtttcatccctaatcacccctgcaaagttataagttgcattacctgaaaaaatggcagcatctacattaatcttcaaggtgttctcagttggtttggcccaagtttcagcaccatcgacatcagtaaggaatgcagccgtaggattaaatgttgaatcttgagcccgagtccaatctgcgagtaaagcttgagctaagtgagcaacactcgcaacagtaggggacttatcagaccatactagctcatttcgatgtttccaaattgcccaacatgtcattgcgatcaacctccttttctcccaatccgcctgctgtagaaccgtagcaaaccagttggcaaaagaaccaactgccgtcaaattaacaccagcagccaactgttgccaacacgctttggcaaaagagcaatccaccaagcaatggtagatggtttcatcagttactttgcacacagggcagatggtatcaataggcacatgtctagaacgaagtctggacttcgtaggcagacagttagtagcagcacgccataacaagtctttcactttcggaggaacacttagcttccaaagagtattccaaaagacggaattatcatcatgtgcacccaactctttgctcaattgtaagaacttataaactgattttactgagaaatggcccgagctctcccaactccaataccaaacatcacataaacgacttgaagacaaggaaatactaagaattaagttagcatccctttcattaaacatatcatgcaccaagtcaacatcccaagccaacgtatcagtttccataagtgctttaacattttgatcaataagagcaggattattcgaagttactcttggattatcttcattcggcagccacggatccaacactatattaattcgagaaccatcacctgttgggttttatgccctaaataaaactcatttcaatataatcagatttacttattaataaagattagaaataacattgtatgttgcatggttcacatgatttatttcttgattatatgtacataatgtatgaattctatttaagtccagaacatatgaatttgttaatgattgtagtgttgtcaacacagtggaatataatcttaattatatgttcgaa

SEQ ID NO: 338870 - DNA, 747 bp, Cannabis indica
gaatatttatatatatattgggtaattttactgttttgtacctcataacatggtataattttttggccaataacattaaattcaaacaaaggttacagggtatggtagtgtgtatgtactacttattgattttttttttttttgaaaaaaaaaaaagcaactgctgtaataaaaaaaaaattgtttaaaaaaaaaacaaaaaaaatgactgctttatatatgtcgtgtgtatgtatacattaatggactttatttttttcagatttaagttaatagactttgttattttatttttattttattttttttttgtttattgataaaaaatgtttcaaaaaaaaatacatatataattttaaaaataaaaaaatatatatattaaaatatatcataaaaaattatattatgttcataagaatgtgttagcaggtgcagtttatgacatttggctaaactgaaatttgtgtataaataagaaaacaacattgctattgggcaccagtagtgccaagtaccttctataggcggcgccccacgattgattattgatattccctaaaaactattttcttaagttatataagacttgatacttaattacaccaataacggtaggacactgaggacggtgctaaacatcagtggtgccttttaacaattctcatatgaaaaagtatatgaatctgagttgtatagatagtagcattaaaaagagcctcaaaaatagatttaatcttgtatagaaaa

SEQ ID NO: 338871 - DNA, 537 bp, Cannabis indica
ttcggcctcattgttagaggcttcgaatccaaatttgaacgttgcatgcaggtgttgccccccaggtgtgacaagggaaattcctgcgccggataattgactcgagattgctttctggtatgctttcagttttgcctgtgcattccaccacaaagttggccaaggcttggcctttgatagctgttcggggttggaagttgatttcgtattgacccaattctaccgcacacttgagtaaccgtccagaggcatctggcttttgcagtatttgtcgtagtggttgctcggtgtacgcccgaacaggatgagcttgaaagtaaggtctcaactttcttgctggtagaatgaggcagtaggcgagcttttctatcaacggatatcggccttcggcctggacgagtctttactgatgtaatagactggatgctgcacaccgtcttcttctctgatcagtacgacactcacagcatgctccgttactgctaggtatatcaccagttcctcaccgtccagaggtttagaaaggacgggaggttt

SEQ ID NO: 338872 - DNA, 1174 bp, Cannabis indica
ttttagaccttaaaaatggagtttttgggtgtttagaacccagtcgtcgcgacgggatttttggccgtcgcgactgggtttggcagtgagaaattctattttcccaatgttttggccataacttttgactcgggactccgtttgggacgttctttatatcgttggaaagctcgttccgagctctatttgattatctgtgttttgaatgccatgtttatattttgtgaaagtgaaattggggattaaccctatttgtgaaatcccggattgtgtgactaggattaccggcacctgatcaggagcacccaggggtttggaatctctgttattgcgggacaacaggtaagacagtagtttgcacgtagagtatgcgcggtggcgcttatgttgaatatgatatatgtgagtaattgtaaccgggattagggttattaccctaatatgagcggtttaatagcctagggttattaccctagtgatatatgttgtgtaaatactatgccatgtcggatatatgtatatattgagattatgaattatgcgcttaaggcataattaaactagactcggtaagctagtaccttgagtttaattttaatgcggtctagggttattaccctagaatattatgaatccagtgaaagcatgagttagggttgacactcttagtaaatgttatctgagtatatagaaatgtattatatgagtgattacatagtatgcaagttagggttattaccctaagattatatatgttgtagtaaatattgaatacacgcatgtatgttaagaattatgtgtataagacataactgggttagacctggtatatatcaccaggataaaccaccgaaagaacgtaatacatggattacgtatatacatgaatagggttatgcgagcaaggcataaccaggttaggctcggtaaccagaaccgaggtaaaccctactgaggccttattgtatatagacgtgtgagagcaacacgtaggtctacgccacgtagacataaataggcatgtgagcgtaacatgcaggtctatagcaaatagacaaatagtgcagtggcaccaataattatgtgttacatattgagattaagggttatgtaatgccctaatgctaaggagcgctatagtgtttttttttcaattattgtgcaatctttgcta

SEQ ID NO: 338873 - DNA, 522 bp, Cannabis indica
tgagaggaaattaggtttggtttgatttgcatggatgaaatgtggaagaggggaagcttaaaatggaggaagagagtttttggagggatgtgggtgtgggacacgtggcagatgagtttgcatgcatgttaaggaatgttggcacgtacattgttatgatatgtgtaagcttttcatatcaattaaatttttgcctcatgtgtatcattattgtcttcttgagtttatctcatctttcattcgatttaattttgagtctcatgtctttttgtgcccttttagattagactaatgttatttggcattttagtgtctaatattaaactatgtggctttagatataagcgagttaagtttgtgtttagagtctatttattttgagagtttaaaattaaaaaaaatattattataatcttttattaaagtaaaattaagtatattgtaaacaacaaatagtcatagcttagttgattgagatgcatgatatattatacaatgtgtcatgggtttgaatcccataac

SEQ ID NO: 338874 - DNA, 1153 bp, Cannabis indica
aacccagccctccgccattaagtctaagagttcgagtttatttgccaaagtcgaactccggcataaccattattgtgtgacttagcttagaaactagtgattagttatttgccaaagtcgaactccggcataaccattattgtgtgctatttgtctaaatatgtgcatctaagttttagttatatgtttttcctttattttatgtgactacgtgacaagcatttccttactgagtttagtagctcacccttatcaaacttaccatgtgcagattaaggttgtaaaacttagaaagccggtggcaagtgagaccttggaggcttgtgtgtgtactcgctgaggaccatataactgagggtggtctagggcacgctccatttattttattaagtgttattaaattaatgtcgcagttatctttatttattaattattatgtctttaagtccaaactgagctcaaatatgaaatattttatgtttataaataaaagcgacattacagtttttccacattttaacgcttgtaactaaattagtaatttatgaaaagtacgggcgttacaaaaatgaactacatattcaatagtatagtccacccctaagtgtatagagattatgatccacccctaagggatatagagatcactgttctctaagtcttatagagatcacgtaaagttatgaatataatccagagttgaatagatataaaagatcgttgaactacatattattcttaactttttccacccgtatcagattaaaagatcattctattaaacaaattcttaataattgtttttagaattaacaattattcataaacacaaaaagaaattctaagtgtttatgtagtattaactctttgaagagtttaagatactatagaatttgtgtcaataataaaaacacatacacatacaatcattaaaacatataaatataattggtattggcatacacaagataaagtaaatgaagctcaattcataaatgcaattcatttccaaaatagaaaactttattataaaattctccaaaattaaaggaattgtctgcaacaatatgaaaaatagggaataaaatcccaaactaataattgaaatccaaattgttctgaaactaaaacaattaattcaaaaataattaaa

SEQ ID NO: 338875 - DNA, 439 bp, Cannabis indica
cacttaatcaaatatcatttaaagcatggcatcacataacacatatatattctagatgctcgtatactgcctaaaatggaaagcagtaaatagatgatcacataagcagtaaagtatttactctcaacacttactgcaccatgagtcgagcttgtctctgacgttgaatatacatgttcggctggtctacaggaagattaaaaaccttggcgctctgataccaaattgtaacgccctaaataattaggtacgccacccaagatacttaagaaaccataatccccgaaacgggattactaataaaaatagcccaaaaattaaactttaataacaaacggaatgaaaataaacttgtaataatttaaactttacaaactaaaagttacaacagtcgggatcctaaaaatatttacaaaacactattacaagtgcttttcta

SEQ ID NO: 338876 - DNA, 2844 bp, Cannabis indica
tttacaagtatacttttttgtctgttcggggttttgggttcggaaccttttgtacgtactggatggtaaattaacaacatgctagtaatttcgactcaatattaaaattttgaaataaacattctttattcatttattgatcgaaaatgtgtttgttacggtagtaacttacatcatagctatttgatcaaatttgatcttttagcttaacaagatataaaacaatttgcagaaataagaaattgtactttaaatgatagtcatccgacctgagtacttctcaattttttccaaacctttgggcatggtctgcccagcaggtcattcacttaaaagtaaatattcttttagtatttagtatggtcatctgacctggtacttttattggtagtattttcttaaatgtgtcacattccaataccgtggtactagaacaacttgcattttctcatcatacataactagtttgtatgctcctgattcgagaactttgaccaccttatatggtccttcccaattaggtccgagtacacctgccgtactgtctttggtatttacatatactcttcttaggaccatatctcccacaaataatttacgagccttcacttgtttgttgaaatacccaactactttttgttgatgggctatcaactttaagtttgttgtggttcgcttctcttcgatttcatcaagtgattcggcaaggagtacatgatttgtttcttggttgtacgtcactcatctgtgggatggtggctcgagcactacgggcagcatagcttcatatccatatgccatggcaaatggagtctgctcgtttacccatttctcagttgtttggtacgacataagaatttcaggaagttcctccggcaagtttcctttagcatcctcgagtcttttctttaatgtatccttcagtgtcttgttgactgcttcaacttgaccattttcttgtggatgcgccactacggagaaacttttgatgataccattgttcgcacaaaaatcagtgaaggactggttgtcaaagtttttgccatcgtccgaaacaatttttacggcaatccgaaccggtggattatgttcttcacaacaaagtcttgaacttttttggatgtaatgggtatcagtggtttggcttccgtccacttaatgaagtaatcaaccgcaaccactgcgtactgcactcctcccttgcctctaggtaattgcccgatcaggtcaattccccaaattgcaaaacacggactttgcatctaaattaactcgttgggaggagctcgatgcatcttagaaaatctctggcatttgtcacaatttttaacataggcctttgaatattcaatcattgtcgcccagaaataaccttgccttagaattttcttagataaactctgcccggtggcatgatttccacaaaatccattgtgcacttcagataaaagtcgtgcatcttcttattgagtaacacatctgtgcaacagcatggagaaccctcttctgtacataattccctctactatggtatatcgttcagccttccttctcatctttcgagcttcatttcgattatcagggagttctccagtattgaggtacactactattggcatcatccagtttggggaattttcaatcatttcaatctcctccatgccaatgatgctaggctcttcgaggaactagctagggagcaagttcgctttatcacttacattactgcttgccaatcaagctaacgcgtctgctgtcgtgttttcttcccttcgaatttgtctgagaccatagcttttgaattgtgcaagcaggtcatgtattttgctcagatatgctatcattttttctcctcgagcctcgtattctccagatacatgatttaccaccagctgtgaataactgcagatttaaatgttttgggctttcatctgccgggctaattttaggccactaatgaaagcttcatattcgacttcgttattggatgccttgaatcaaaacttaactgcagcgtgcaggtgtttcccaccaggtgtgacaagggtgattcctgcaccggatagttgatctgtagtcgacccgtccacatgtggtttccaaatcagcttgtcttcactgtttcttggctgaagtgtttttactggcttagggtttccttccgagatgctttcttctttgcctgtgcattctaccacaaagtctgctagggcttgaccttggattattgttcagggttggaaggtaatttcgtactgacccagctccacttccctcttaagtaaccgtccagatgtgtttgacttttgtaatattttgcataatggttggttagtgtacacccgaataggatgggcttgaaagtagggccttaactttcttgttgccagaatcaagtagcaagcgagtttctctatcaattgttaccggcctttggcctcaatgagtctcttactaatgtaatagaccgggtgttgtatgttgttttcttctctgatcagcacggcactcatagccgctctgtgacagctaagtatatcccatgttcttctctgtccagaggtttcaagagtacgggaggcttttgcgagttgcatttttagctcttctctgtccactcaaattgcttatttcctcgcaggatgttgaaaaatggaacacacttgtctcgttattttgaaacaaatttgctgagagcggcgatccgaccagtcaaacatcgtattcctttgttcttgttggcgattttatatcaaggagggcttgaatcttctttggattggcttcaattcctcgagcattgacaataaagcctagaaactttcctgaactgactccaaagga

SEQ ID NO: 338877 - DNA, 1344 bp, Cannabis indica
ttaattaaaaacataaagtaacatacatataaaattccgagatcctatttacaaaaacctttacaaaagtttaactaaacatatataatagtttatcgcctagtgaccaaacaacaaaagtcgtggtgtcccaaatcgtacgctccaggcctaaccgctccgacatgtacaatcttcatttgctcgctctcacggctgctcagccttagccatgcccttacctacatatggagcaaactgagtagaaaagcataatataaaacataataatatcctggattataattaggcgcctatacacccaatcataaccctatcctcgtgtcccacacggtactgagtctagaatgttcatatgacaatactatcgaccataatatcagcctatactcaatatgctagtcatactccagccatattgatgagatagcatcgatcaatatttcagccaacatacatttatcagtatccagtacaactctatgtatactaatactgctatcaatgtactctaacaggcataaacaacatgtatgctaaacatgtaaatacatatgcataacattatactaatcttaccttattctcaaattcaggtgtgccagccaacaagagtggaacaactgttaggtgaattacaggcccctaaatcacatcgttcacaacatggataagtgacatgctaaatcacaaccggggacttaggttttaaaccaacaattgacctactgaaagttaacatggaaataccctaaacaaacagggaaataaccaaccaaagctctgaacctaacacctaacaagaatcgacaacatgaaaaatttgggagaccaagcactgatccggttaaccagttttatagggcctgtaaaactagttaactggtttacactagaaaaccccaaaaatttgaaaccctaaccaaatcaactccaaagcttaagaaaccttctagacctgcatattataacccaataaacatattccaagcaataaaataactaaccaagctcagaatcaaaaatcaccattaaagagccaagcttgagttctaaagctcaaagcttgctcaaccaacataacatccatcaaaattagcttaattcaacataattaaccataactaaactcataaaaactattccatacaccaacaacaactacaacactcataaacacagatcatgcaaaaatccaatttcttaaagttcaagaaaacaagaggaggagttttaaaagctttacctttgattacaacactaaataatcagctgaaaatcacaagatttaaagacaaaattcaaaccctagatgctctagggaatgagagagagagagagaga

SEQ ID NO: 338878 - DNA, 836 bp, Cannabis indica
ttaaagatagtagaggccttaaaagtcaaaaatcccatctgtcatagtgattcccagctaatcataaaccaggtcctcgaggaataccaggccaaaggattgaaaatggcgaggtatttggagaaagttcggaagaacttggaaagatttgattactttaaaatcaaacaaattctgagagaacacaactccaacgccgatgccttagcaaaactggcctcgtagaatgatctggacgagctaaaactggttccggtagaaatgctgagcgagccaggtatatgtgaaacagaagacgtcgagtgatagatagctctccaacatggatggcgcctattgttaactatttacttgatgggcaactttcgaatgataaaaatgaggcgcaaaaacttttgtattcagtgcctcgttacacaatgatcgaaggcaagctatatagaagagggtattcaatgcccctacttcgatgtgttcttcccgcggaagcgaacgaaatcattagagaaattcatgaaggcttctgcagggatcatgcgggttggcaaagtctgtgtaaaaagatcattagacaaggatattattcgccaacaatcaataaggacacacatgagtttgtcaaaaaaagtgataaatgtcagagattttcacatatacctcgcgtactgccaacttaacttagaatgatgacctcgccctacccatttgttatatgggggatcgacctaattggggcattatccactgggaggaggagcttgttaggttttatgccctaaataaaactccgtttcaatgtaatctattttattcaacatcaataaagaaacagaagt

SEQ ID NO: 338879 - DNA, 623 bp, Cannabis indica
ttcgtactggcccaactctaccgccctgttgcgtagtcgtccaaaagcatcttgcttttgcagtatttgtcatagtggttggtcggtatatacccgaacaggatgagcttggaaataaggcctcaacttccttgttgctagaatgagggagtaggcaagtttttatatcaacggataccggccctcagcctcaatgagcgttttactgatgtaatagactgggtgttgtaagctattctcttctctaatcagcacgacactcacagcatgttccgtgacagctagtattttcccagctcctcgccgtccagaggttttgaaagtacgggagctttagcaagttgtgcctttagctcttggaaagctttttcacattcttctgtccacttgaactgtttgtttgctcgaaggatgttgaagaatgggacacatttgtctgttgattttgacacgaatttgctgagtgcgacaatccgaccagttaagctttgcacttctttggtttttgttggcgagttcatatccaggagggcttgaatattttctggattagctttaattcctcgggcattgacaatgaagcctagaaacttccctgagcttactccgaaggaacactttaa

SEQ ID NO: 338880 - DNA, 852 bp, Cannabis indica
caacacctaggttgacatcccaaactagggtttcatttttcgggtccatcatagtgcaaatggcttaaactttatacttaagcatgaataatgacatatttgaagcaccgaaatcagaattagaacagttacatttttttagcatctgaggcatcaggtgcctagggcacttccaatcacaatattgaagaagtatcttgagcattttatatgtctccatccaaaacgaggaaacaagtgctttcgagaaagaaacaaatcaacttggaggccaaagtagggacctagcaccaaggttgacacttcgtcaacctaggcgatttccaacaacaattcaaaagaagtcttccagatatattcttcgttttcgtcactaattaagatgtgggtactttcggggaacaaatgaagtcatctgggagccagaactgagactcagagcccaggttgacctaggtgctaggccaagtgcccaggttgacatattgtcaacctaggccatttctaatcaacttttttgagaagtctttcaggcatattctctattttgtgaataactaagatatgagtgtttccaagaatcgaacagaaccatctggcggcaaaaagcttgacctagcgcccaagttgacactagtgccaagaaaaattaataaaatatggatacgacttgtgatagtaagagtctcatgatccgtaaggggaaagaccaagtaaattgtgcaattccacatcatatagagaaagtcaagtgtgatgattctaaaattgtgcagatatatgaccacacacttgaaggtgacttaaatgaattgatgaatactacctatatcaacaaaatgactatttttt

SEQ ID NO: 338881 - DNA, 807 bp, Cannabis indica
atggcatcgcttctctcaaacttgacatgagtaaagcttttgatagggtggaatggaaattcattgaagaagtaatgaagaaaatgggttttgctaatggttgggtctcgcttataatgagctgtctcactaccaatcgattctctttccttattaatggtgaagttaagggctctttgactccaacacgaggattgcgacaaggttgtccgctatccccctatcttttcttgatatgtgctgaaggcttatcaagattgctacaacgtgagcaagatttggggaacttgcatggttttaaactcactaggcgggctccaatgatctctcacttgctcttcgctgatgatagtctccttttctgtcaagctgatgagagctcttgcctatccatcaaaagggttttggatatttatcatcgagcgtcaggccaattaatcaatcgagataaatcagtgatgtccttctccccaaataccaccttggctgcccaaatgttctttcaccggcacctttccatgccaatcagcgagtgccatgaacgatacctaggcctaccatctcattcaggtagggacaaaaaggagctttttagtaacataaaggagaggatttggaaactcatgcaatcttggaatgaaaaactcttctccgctgggggtcgggaagtcctccttaaagcggtagtccaatcgatcccaacctatgccatgagttgtttccgcttgccagtttatttttgcacccaacttgagagtatgatgtcaaacttctggtgggcatgaatgaaaatggttctaagattca

SEQ ID NO: 338882 - DNA, 573 bp, Cannabis indica
tcccaacatccaatgcaaaccagatctaagtctggaattcacaagccaaaaatacttgctgcaatactctcgagttccaatcatcactatcttgagcctaggtctgtcaaaaaggccttagctgatccaaaatggaactcagcaatgaacaatgaattttatgctctaatccgaaacaaaacttggatcctagtaccatatattgatggcatgcaggttgttcaaaacaaatggctatttcgaaccaagttaaacagtgatggatcggtggaaagacttaaagcaaggctagtagccaaggggtttcaacaaactgaaggagttgattattttgatacattcagtccagtagtcaagccatctactcttcgcattatgttcactcttgctgtcactaataattgggacatacaacaagtggatgtcaacaatgcattcttaaatggggaactcaaagaaacagtttatatgcaacaacctaagggttttgaagacaaggaacatccaactcatgtatgcaaacttcaaaaagccatatatggcctcaaacaagccccaagggcttggtatgaa

SEQ ID NO: 338883 - DNA, 1559 bp, Cannabis indica
aacacacaaaaaagttcaaaattatacatatagtcatatataaaatatatacaaatcaattatttattataaacggtccgatccggtttaaccgtcaactatttaatacgaaccgcaatcgaaccattatgtcgtaaatggtctagattaaccaaaccgccaaaaacggtttccctgattacggtctatagtggttcaaattatcgtggtccgaatttaaactgcgacttttcgatttatatgaacagccccagcgattctttgattctcctttgcgatttctttaattctcctcaaatttctttgattctcctcagatttctttgcttctcctctgatcatcattcttcatcttattcttcatgttcctaatgctgatgaagaaaattaataaaatctgaagtcaaatagacaaagataagaaactattgattttgattacattcttgacttagttaacatgttatttgagaaaactgataaggaattttgattttaggtctttattttggttctcatagtaatgtgttgtgttgtgattgtaatttttaacaaaaaactctcatatcttgaaaaagttcatcttgtagttcgatcttagggttttattttgcttctgaaagtaacttgataccttacatttgaatatggcttgataccttacatttaaatatggctgagtttgttatgttgtgactgtaatttataaccaaaaaaaaaaacatgtcttgaaaaaagtcacttgctagttcaatcttaagggtttatattacttttgaaagtaacctggtaccttacttttgaatatggttgagtttgttgtgctgtgactgcaatttttaaccaaaaaaaaaaactaatgtctaaaaaaagtcatctgctagtttaattttaggcttttgtattgcttctgaaagtaatctggtaccttacttttgaatatggctgagtttgttgtgttgtgactgaaatttataacaaaaaaatactgtcttgaaaaaagtcacctgctggttcaattttagggttttgtattgcttctaaaagtaacctggtaccttacttttgaatatggttgagtttgttgtgttgtgcctgcaatttataacaaaaaaatactatgtcttgaaaaaagtcatctgctagttcaattttggtaccttacttttgaatatggctgaatttgttgtgttgagtgtaatttataacaaaaaaatactatgtcttgaaaaaagtcacctgctagttcaattttaaggttttttcttggacttgaaattggccgaacaaagaatggaattttcatatctcaacgaccattcactctccaattactcactgatacgggctatcttagagctaagcatgcatcaacacctatggaaactaacctcaagcttagcaaagataaaggcaagccattgcccgatcctacggtctatagaagccttataggcaaattgatttatctaaccataacacgacctaatattacctacgccgtgaatcacctaagccaatttctatcctgtcctcgagcacctcatctccaagctgct

SEQ ID NO: 338884 - DNA, 533 bp, Cannabis indica
ttattattattattatatatctccacgtgcatgagccacacgttggttgacttctttgatttatactaattaacagcataaatagtgggatttatgcatggtaggaactaggaatacgatcttcattattattaataataatacatttatttttgcatcgacaacaaaatactagttttatttttttcccaataaaatgccttattatcttcattgaggcatttaattttgacacgtgtgtatacggattaattgtgtgccacgtggatgatgattgggtcccatcaaagctgtctccaagcccatcatatataggaccttccgtaatcttctcaatcaacgtacatgaatgcattcccatgcatattattcataataataataataataataataagaataataataataataataatacctttattacaataaataccattttggaccctctgttttacaaaagttactaattggaccatgtgttttgttaaatgacaaaatagaccctgtattttctaaaatagtacaaa

SEQ ID NO: 338885 - DNA, 1238 bp, Cannabis indica
ccgtcatcttaggattactatttgtttaccgagtttttcggtaactaaatatttttaaagcataagaaagtattaatggagtaaatagcaaaataacatgtaagagatttttacatggttcagacgttaactatccttagtccacgactccattttattaggctctttggctggtaactgtttatacaaataaagatacaatggactagaactcctttccaccgtgttcctattgaagaagaggaatcttagtaggaatattctggagttgatagtagggttacaaaagtgtgttttctcaagatgatcaagaatgggtcttcgatcccaaagagaaggtcctcctcttgtgctttttctagggtatttataggccatcttctttgcatgtgctaccttatatggatcattgttggggcaaaatcccaccgtcagattggtaggtggcgtatttcctatatcgcatttaaggttgtcagattgtacaagttgggcctcggatgtgtgttgcctcagggcttctcccttttgaattttcctttatccctagccgttggatcatttggcctaatacacaaggatatgcatgctttgtacgatggcgtgtcgtgggtgacaacctctaatgtcgtacccgataaagccttgtccctaggtccgtagtctgacacgtatgggtgaagcttctgtgggtcaaaagcgtaactcggttcaccgtgtttcagaatgccttggcccctctgggcaatccatgctcctcgcgaaggttgacagtctttgctcctggaatttgaaatattttaatatataattaggataattattatttgtgttatcccaatttttgcactctgacgtggcatcacatgatggtgacacgtggaatcgactctaagtatctgttcacaagatataatccgaacaagatacctcatatgcatgctcgaggcaaagcaatcaacattccgtgcagaacgaccaacacttagcgaattcagctttcgcatcgtgagtcatcaaggaaatccctataacttggggaccagattacagagatatggcaagctgtccaaatccaataatttgtgtattctgtatttactatgtaatctttgtgcttatatccattgtaacgagaagggaaatacttcccctccaagctcatagccctataaatagtgatacatattcactgggcaaagggtcgaaggattttacttgagagatattgtctaaga

SEQ ID NO: 338886 - DNA, 1265 bp, Cannabis indica
tgcgtcggtttctatctctcacagttatatttcacgccattttttactttgcaagcacaatagtcgactattaccaactgacgcaaaatgaaaaacaagttttaaatttttactttatttcgtcggtttcttttttatcatcatttaatcaaacgacgcaaatagtatattattagtgacgtttataaacagacgggtccaattatttggacactattcatgtcggtcaacactatgaatagtagcgttgaccgacgtgaatagtgtaatttgtagtagtgcttggtcccagacccgaactcgaacacacacacgaacatagacacggactgggacccaagatctaaattagaacgagactgggacccaagattgggatccagatcttgaccaacgacccacgatttggacctaacacgtagtcggtgtttggattttcgaatcgtatcaagaccccaacctggaaccatttctagactaggatccaaaaccaaactcggactcgggacccgaaatcagaacaagaaccgaaatcaggaccttggaacaagaattggacctcaacccagaacaagatctagacgcaaaaccaaacatggacccaggcctagactaaggatcgatacccggacccaaacccgaacccagacccagacttgcgccaggacctgcaacccagaacctggaacccaggcctcgtgaccgaggacctggaccaaaacctagacccgtaccagaacccaaacccagacacacacccagaaccagacccaaaccaagactcggacctagacccagacccggaccgaaaccccaacccagaccaagactcggactcaaactcggacctagagccggactcgtaccagaaatcagacttgaacccaagactcggactcaaacctgggaatcaaacccagactgtaaagaccgcttagtttaaatttggaaattagcagataattagagtttaattatgaaaattatttattgctaattaaataattacttatgatgttttatttgaattcagaatgcattttatatgtcatatagtgaaatttgataattttgcattttcggtgcccggcaacatggaacgcggtgtatggctcagtagaatcacaatctgatattttagtatagcgggatggtttggttagacattgagaatgtctggaatttagaatttctcaaaataccctttagtgctttttaatccttttagtatgggaggggcaaaatggtcattttgccccataagc

SEQ ID NO: 338887 - DNA, 856 bp, Cannabis indica
aaaaaaataaaaaaataaagttttgagttgtgtcttgaatgaatatttaattgtaaaataggagtacggtacataaagttttgagttgtgtcctaatattatacactccactgcataacatgtacccatgggccaaggcatatcccttctcttttttgattctcatgccttatctcccctttcgtattgtaaaaattacggtatatatgggaaaattttaaaagttgcataattaaataatgttaaagggttatggattttttttgctttttttatatttatataggttttttttatgtcatatttaaaaaaaaaatggaaatcttatatttataaacaataataaattttgctggaaaaactattagcgctggaaaaattactgtcaccggaaaagtcatcgtcgtcagaaaagtcaccgtccccggaaaaagttactgaaaaagtcaccagaagtagatgtctcaaatataaacaaaaatagaaccggttataattgaaatataaccggttctgtaacacaaagaataaaaacaaataaaacaaaataactcaaactaattataattaaattataaccggttataactaaaatagaaccagttatataacataatgaatacaaacaagtaacacacaataattcaaaccgattacaattaaaaaataaaggggaaatcagttcctaaaacactgaaacataaattaaaaacaaaactagttctacaataaaaaatctcataacacataatacctcataaaaccgattataattttttttttaaaaaaatggagatcaatttcaaaaaatattgaggcataaatatgaaaactccgtaaagcaactaagataaaa

SEQ ID NO: 338888 - DNA, 641 bp, Cannabis indica
tatagatttagggaaataattttagagatttttaaggatagtttttcaaatttccttattgcattagtttctacaataaagacaactatacaaatattacagtgtcaatttctacaatgatatatatatcaagcttaaccttataatttttgaaaaatattctaatttttcataatacaactattgactcgttaaagctaaattctcataatatgtttgaagtatttttaatacatatatataatttgaagtgtttaaaattaaaatatacatatatgggtatactcttaatggatattacccatgtatgagtattttattcttgaccattggatcaaatatctaatggttgatatttataatcattaattaaatattaaaaaattaatatttcctattttgttattctctatattcctaaaatagataaaactattaatagaaataaaaaatttataaatggaattgttatttaaaaaataaaacacactaaaaaaactaacaaattattttttttaataaaaatcattttaaagattaaaaagaaaaaaagtgtatatttatctttttataaaatttcttcaaactagaattctaaattgcattactgaaaaaaaaaaaataataattttaagctttaa

SEQ ID NO: 338889 - DNA, 2731 bp, Cannabis indica
tgatggctcgtatgaagaaaacctcgcgtttggtcgatgcttctgatcctcaagtggctcagctcgccactctgcccgacgtcgaacaggatttggcgatctcgatggaagcggaccgtgagggggacgctgaggtccaggaggttgagaagctagacgaggtgcgttcgggcaatcctcccactacggagggagaggaagagtttggaccccctgacttcggagagtacaatgaggctgggcagccagtcaatgctgacggagacgtcctggttgagggcgtggactacgtcactgaggagctaaccatggcgatcctcataggaggcagggtgccttgggcgccaggtgggtaagtcctccgtccaagatttcggaggcacgcctccaaactctcgaccaggatgggtacctgggcgagctggactgctatattcctgcccacgacaaccgcgccacaaatcctgataagggaatgtgcgcctggtcgggggctcatggtcagcaaggggcgctgatgcccttgcacaagtacttcagggatgtggcagacttctttggcctctgcccgacccagattactccaaagggctttaagtacctgtctgccctcttcgtcctctacgcttcccaaggatgggatgctccttccccccacgaggtcgcctggtttttcgacctgaagtctacccccaagcaaggcaggtcggggtatttctacttctctcagccaggcttcaagtggttgagcggcacggaccacaaggccatcagcaaaatagggcattttgttgatgagtacttcatggtgaaggatccgaacatcacccggactcggtttcagcagattccgacatatcaccgtcctcccctcacccttgctcttagggatagagctcagaaacttgcccggttgccggaggaagacaggaatatcatccagttgacctccgatgataatctggtgaagtatgggctttacccagaggacttttctcctaagtccgtggcggggaagaaggggaagtctgatgctggccggcctgaacgagctcataaggaggatgagctcattcaacttaagcgagaggctaagttgaaggaaggtgtcagggccaaacaatatgctcaggagcccttgaatgctaaagatgaagtcgaggctaaggctgaggctgagcaggtgaccccattgaagaggaagaagaaactcccggccacgcccaggctgttgaacatacaattcgcatacgggagcccatttcacctgtttggccatcttatccctttgctggaaaagggaaggctgtcatgtctgagataaactcgatgtcaggtgatgatggacttctgattttctgggcgggcagtcactctgcattttacttcttttttgagcttcttgactttcatgccttgtattttctgatggctattttctaaccacgctgttttgttttgtgtaaacatgtctcggcagatgcttgatgctctaagcaagaggatgggcggatgttctagcgcctccctcccgccaagaagcttaagggcgaagaggggtcctcggagaagagaccttctggagaggttattgacctttccgaggagttgactgctgcaaacccttctacccccaaatctgccaagtccaaggaatctggaccaccaacgactgggtttgaactagtcaggagtgttcctgagcgggtgcaggcaccaactccacctttacccgtgctgctagaggccaagatgggcaaggagatgctggcccactatatgaaccggctggttcctgaggtcagtgagcaactggctgatgctgatagtgactcagctctggatgtgttggtgggcggagtcctgaaggagctcaccagggtaagtcttttttgatacttcccttttaacttttcacacttagctccatatgctgactttttattttttgcaggccggtttgaagttggcttacacttactcccgggctaaatctgctacttccaagagtgcggctttatccgacaccttgagggcggaggcggacttggccaataaggaagctgaggtggccacggcagaaactggagttgttcggctggagctgggcgaagccaacaagaagctatttgctgccgagaagaagatctccgtgctaataaaggacctcgaagctgctgatagctttgaggagaccatcgagatcttatctgctgaagtgaacagtcttcaggatgagaggagttctctgtggctgaaggaggagagggacgccaaaggtgaccgaggcagaccaaattgaaggagaaggtcaatgctttggagactgccggcctcgagctcctcttcgatttctggaaggctaatcccgaggccaatttcgactacttgggcgatgctaaagacatgtaccttgagtactgcgcggcccaagttgcttatggtgggaaagaggcggctgcttcaacttccggcaagcttctgaccaggctgttgatgcttctcctgctcgaacaacagatcctcctgctccaattgactcagaagaaccgaaccaagagcctaggactccagctctttaaacacttctctttttatctcatgtttatatatatatattatatgcggcctcaaggcctttaagacatcgtgaccgaccaagcggtctttaaacttggaattatttttcattttttggacaacgggctgaccgggcagcttttaatcctgg

SEQ ID NO: 338890 - DNA, 612 bp, Cannabis indica
tttgcgaatggacgagttggagaacaagttcagagggcatcaagtcaggaaacccgaaaaacaatcggggcatgattttgttgaagaatttgaatcggaggcctcaggatcaaagaggaagggcaattccaaaaggctacccaaggataagaagtacaacaaatatatacccctttatgctgaatatactgagctcaataaaactcggaaaaatatctacctcacacatgcacaggaagtcgtttttagcgagcaaggattggtataaatgagcaagaagaaaacaatcacttacgaagtttacgaaaggtggttgtgccaatggggaaagaccagatgcccagaagaagttgtccttgaaggatactttatttgggaagttcacaataattttaggctcgctagaatgagtaccgaggtagtagaagcccaccgcggcgttcttcctcgacgaaatggccttaaccgagtaaagatactcaatctctactagtgtggtacacccccagttcaaaattttgtacaagactttcaaactactgagaatcttgtaggagtcgggagtcagctggaatggggcaactccaaggtgatttatgtagtccttgaagt

SEQ ID NO: 338891 - DNA, 642 bp, Cannabis indica
agtttttctttgatcacgatctgaccagactagctcttggttacgcagactatttagattagtatggacgctaggcgaaagggaaattcggtttgatcgagtggtggtcaaggagctcagattccccttaatatattcgtggctgaggtagaggtcccgatgttatgaaagccgagcagtggctaattgtgatcacaaggatcttgaactttatgggcgtcactagtaatgatagggttgcctatgccactttccaatttcaagaagacgctctggtttggtgggacatggtgtctatgattcatgacgttattacaatgacctgggagaaattccatgagttgttcaatgccaagtactataacgaggcagtcagaagttccaaaagaaaagaatttacgcagttgactcagaaagaaattatgagtgtgactgaatacacgactcagtatgatcgcttggcaaggtcggcctcgggaattgtgccaaccgatttcagtaagaaaaggaagtacttggatggattaaatgcaaaaatcagacacgacctaatgattactatcgatgacaacaccagctatgctgatatggtggagaaggcattgcgagctgagggtgcagtgaagtgcaccttagaatctc

SEQ ID NO: 338892 - DNA, 589 bp, Cannabis indica
ccaattatgtcttcaaacaaatcaattgattgaacaatcttcacttggtgttaccctttccctaagagttaacaaaataaaaccaaaacaacaacaagacacagagtcaaacaaacaaaaaactataaaataggactaacaaaaaagaaatgggaaatatcatcaacttgaaaaaacccctaaaacaacacaagatcaataggaaaaaatcttatcagatttgggagactttggaactttggctcaaactcaaaatcagagtcggagttctccaacatagattgatggtatttttgatttagtgttctttgaagtaccagaacctatatttgcaagaacagatctagaaaataaaaataaaaaaaccactcttttatttcccccccaaaagtgtgactaaaaattagaaaaactaaaaatatgagaagaagaagaagaattgaacaagaaataaaataaaaaatttatatgttaatggagagagtaagagaacataaggagaaagatagtgagaaaaaagatgataagtgtaaggattttgaaaaaaaaaagaaaaacaaaagaacgagacccatgaagaagaagaaga

SEQ ID NO: 338893 - DNA, 718 bp, Cannabis indica
attggtcacactaactgaaaagttgatacatccatcccataataatcccttcagccttaaacgccgggatcaatggatttcgggacctttgaaccttgcctaagaacacaaatgtgtcctcactttttgattcaagagttgccacctttcttttcaatcgatagttgcattataccttgcaaattagttcaaccctagtataatattagatttctctaaattcagcacaactaaaacaacgaactgtttccttaccctcacaatcttggaagggtttagaccacatactggaaaataactagttttccagtaaacaaaaaagtaccagaactactcagtaacacaccattaaatttacacaaactcttaatcattcttccattcccgctactgtaaccatgggcagtttcttttgaaatggcctactgccccacactgaatgcaagctctcatgtagcgttcattttactggtgtctcttgcatctcgaccctctgaatgggtttacaaatcttttgttcccaccatgtcggaaactttggttagcttaaattctcccactaggacccataacttgtgggttggtaacctttttattttttaagatcgttaaggttaacaacttttacccgatccaacactagacactagacactagacatttactttcatgaatctcctttcatattgtgtctttcgtgatctagtccttgcacccc

SEQ ID NO: 338894 - DNA, 673 bp, Cannabis indica
attatgtctttcgtgatctagtccttgcacccccagcagtaagggttagctcaaccatttgagcataaaaccaggcaacttctagttgcttagccattatatctacattctgagtgatatactctttccaccttcaattagatttaaccctcctagcagcctttgaagctactccatcaaaacaaaactttgccaatcggtccagcttagtgtccatttccatcaccccgctgcccgggaccaactatgtaaattctactacttggccactcaggtaatctcttacttcatagcattcatttgctctcagccctgtggtagtggaagattaatacccaaaccacctaccccgagcctaacaggctcacaatcattcttactagattgcctcaagtacaccttctagtatactcacgaccattccttgctcatagttagaatctttctaacaaaaactaatgctaataagcattaccgcacatgcatagacatacttagcaactttatatcaaaaacttatcatgcttctctaacaacttacacatttcaaataagcagacaattcacataatcaataaataattcactaatcaactaataattagcacttactagaccatgaatcgaacgagtcttcgcagccaatgtacatatcaaaccagtcttcaggatc

SEQ ID NO: 338895 - DNA, 578 bp, Cannabis indica
caggggcccaaaaaaaaatttgtccttttaaaattacacaatttttttgctgattttgaaaaataccattttttttctaaataagggcccaaaaaataatttttaccttatagcccactacatttcaaggccggccctgggtttgaggtttaatttttttttacttttattttgtggcgcggattttttttttcaaaactacggtgttttttttttcaaaaatactgtctaagttttatactgtgtactgtgttaaattttcattattgttctactgttgttttttaattgttacactgttgtttttagttgttctattttgtgttctaccattgttttataaaaatacaatatttttgaaaaaatttctgtgtcacaatatttttgtaaaagttaacataaatttcaataattttgtaattttcccttaaaaaaatattcaaaaaaatcttcatgaaaagagagggccactttcgtaaggggtaagttgaaaaataccacttttattaatcaattactcttatttatctcttttttacctctaattttatatttaattgaaacatacctctttttat

SEQ ID NO: 338896 - DNA, 664 bp, Cannabis indica
caacactaagatcatcaaatttggtctaaagcataaacctagaacgcttaacatcagatgttccttcaaactgagtttgaaggatctgccaaacatccttagtagattcacacaaagatataagcttaatataaccttcacctactccattaaatatagcatgcaatgctttgctattgtaagcaaataatttatcatcttcagtagaccattctagttcagattttaatttagaattacctttggaatctaccataataggaggagaccatcctgaaagaaccatcctccatgctttctcatcttgagacttgataaaagctctcattctaattttctaataaggaaaattagaatcattgagcaacggtggatgagaaatagaacttccttctgcaaaaaatgacatattgcacaaaaaacacaaaaatgtttaaggaccacactaagattttagtatcctgctttgataccaattgaaaaactatatttttccaaatgctaataatttttacaaaataacagtaaaaatataaccgtcacagtctgcagcagcagaatgtaattctgtcactgcagaacatagtttaacataaacaaaccataaccagaactataaattcagcagaaaataaaatcacttcacacaagagaattatacgtg

SEQ ID NO: 338897 - DNA, 598 bp, Cannabis indica
attgtacaaaaacaagaacaagatagattagacaatgcaaactcccaaagattttctgaggaagtcaaagtgacttgagtctagggccttggtgaaaatgttagctaattgtttttcaatatcaacatattctaattgcaacgatttattttcaacaagttccttgataaagtgatgccttatatcaatgtattttgttctagaatgttgaacgtgatttttggaaatatttatggcactggtgttatccaaaatatagttaaaacacccaattcaaatccatagtcaatcaacatttgttttaaccatagtaactgagtacaacaactaccggcagcaatatactcagcctcggctgtggacaaggaaattgaattctgtttcttactgtgccaagaaaccaaattatttccaagaaagaaacaacctccacttgtactttttcgatcattagcattgcctgcccaatctgcatcactaaaacaagccaggttagaattaatatcttttgaataccaataaattccaaaattgagagtactattaacatatcgaataatccgttttacaacagatacatgagattccataggattac

SEQ ID NO: 338898 - DNA, 591 bp, Cannabis indica
tcttgctgacatcttttttcatgggtgaaggcttcttgtatggggctagtgactgagtggccatgtaaacactttctttgtcctctttcaagattgtaaatgcagtatacttagtaggattctctcggggagcttgttcggttgtgcaggtgaattttcactttttcccattgccttgcctattattgttgctggaacatttaccatttgagcttggattgcttggctaatgggggagctggacgaatgtcccaatggaaggagcttttaacttgccaggtttttgctcaccttctgttccctgaatagcctcttcaagtttgataaagcctttagtacagtcaagaaaatcactcatcgagtctaccggacctttgttccttatgtccttccaaagctcaccaaggacttcaatgccccatagtattgcagacaactttccgtcttcggttactcgtgaaaccttggtcgcctccatcatgaatctactgatgtaggctcgaagaggctcgccttgtttttgtcttacttcgaccaggtctactaggtgcaacagaagttggcgagaggaggaaaattgtgcatggaatt

SEQ ID NO: 338899 - DNA, 603 bp, Cannabis indica
ttagtgttttgtcttttgtgactttttgagatggaaagtaaatgtttattttaattaaatgttggctgaaatgaattgagattatgtggctttatttctccatttgacttttcaaaacaaacacttagaaaaatttagaaatttcactcaaactctctctcttttcctctccactttcggctgggtatttggggtgtaaagctgggtttttcttcaattttcaaagcttgattcaaccttaatttgtgagctcttgattgtggtaggtgattctaactctttctctttattttcttgaataaatatgatgaaaaatgatgatgcatgcatgagttttgagttgttattgctgctgtgattcttgttgtttttctaaggttcaaagcatgttaaattgataggaattaagctatgttgaaagcatgtaggttagattgttaagctttgagttttctttgcaaaaaaatatgatttttgaaggaaaatgttgtgattatgttctgtgatgttgctgttgtttctgttagtttgcagaggtgatattatgcttagttatgtagaattaagttggtttgcatgcttgtttaggtggtttgctcaagc

SEQ ID NO: 338900 - DNA, 779 bp, Cannabis indica
ttcacaaaatagatgataataatgttcacatcaatagtaacaaataacattattattatattactatcaatattattatcatactatataactcatatatcaatataaaaattaatatataacttccatacataaaattataactctcaaataataattctacgccaactaatataatatgtatgttaataatcaacatctcatatgtaacatacacataatatacatattaaattcacaaatacatatgttacatatctcatatatataacatatatactataatatatatatatatatggatgatttcaaaatgggtaatacccattaatgggtactaaaaaaactaatgaggtgacctactagagcaggttaccaacaatttttttacaaaaaatatatttattttttattataaagaatgatgattccaaaatttataatttatttttaaaaattattttttttgtaaggattttaaaaattaatttactttacttaaatttttatattactcttacactaaatacaatattaatttatgttgctttttgtttcatcaccgttgatggcacctgcaatggggctcgaagctcagtgataccgaccatggtccccgaccatcctctgattgtcactgctctctctccggcgaaggccacatctccattaacgaggtgaggatcaacgagaaagtcattttctgtgatgggttcgtagctctgtacggtatagacgagttcattgtgtggagagaccttacgttcccaggtgctagc

SEQ ID NO: 338901 - DNA, 1339 bp, Cannabis indica
tcgaccctttagtgatcacaattcagctcgccaacaaaaagataaaaagggtgttggtggataacggaagctcagtgaatatcctttatatggatacactgaagaaaatgggactagaaagagtaaagttaaaaccttgcatggtaaatctgtgtggatttacaggtgatagtgtcgccagtcaaggaataattgaactcccattaactgtgggcgaggcacttttatccactacaacaatgcaagattttttagttgtccacttgccatcagcctacaacatactgttgggtcgaccaacactaattggactagggacagttagttcaattaagcaactgtccttgaagtttcagacaccgacaggtgtaggagtggtacgaggtgaccgactactggctcgtaattgctaccgcatagagctacagaatagaaaagccagtcatcagctaatggcagtcacaaccgaaaaaggcgagaaataggataaggatcttgatcctcagattcaagatgatcaaaaccaactgaaaccaattgaggaattggaagaagttattttagatccagaaaatcccacaaagtgtttattcattgggaaaaacctagatgaaaaactaacatagcaagtaataagtttttttagggtgaactaggatcagttcgcctggagtcactcagatatgatagggattgaccctaagattatctatcaccactagaatatctacccaaattacccagccaagagacaaaagaggcgacccttggattctgagagacaagggacactcaaacaggaggtggataagttgttaattaacgaatttatacgcgaggtattttatccgtcgtggatatccaacccttttcttgtcccaaaaccaaatggaacttagagaacttacatcgacttcttagatttaaacaaggcgtgtccaaaggattgttttccactaccaaggatcgaccagttagtggatgcaactgttggacacaagctcatgtcattcatggatgcatattctggatataaccggattaaaatgcatgtccctgatcaagagcatacaagctttgtcaccaacatgggactttattgttataaagtcatgcaatttggtttgaaaaatgctggggcaacatatcagtgactagtgaatgaaatgtttgcgagacagataggaacaaacatggaggtctacgtcgatgatatgttggtaaagtcaataaaaagtggagatcacacaaaagacctcgcgaagtgctttgaaatactgagaaagtacaatatgaaacttacccaaaaaatgtcctttggagtttcctcaggaaaatt

SEQ ID NO: 338902 - DNA, 963 bp, Cannabis indica
ggacccgatccaaaacaaagacttggaccaagatagggatcaagatacgaacctggacttggaccaagacccagactaggatcgaaatgctggacgtagatcttgacagagatcctgaccctgacccaaacttggaacggcactcgggacccgaacttggacctagactcgaacctagacctagatcggggtccagacctggacataaactcgtacacagactcgcacccgaagtgaaacacccacacctagaatcagaccaaaagctagacccggacccagaccaaactcgaatccagaccagatcgggattggaacttgggactcagacccaacctaggccaagacccaggacgtgaacccacacctggagccttatttggacctagactgaaataaggacctgaacccaaacttagattaggactcgaactccgacacgaactcaaacccaaactcaaactcaaaatcgcaaatggaactagaaacgaaataggactaggactaggacctaaacccaaacccgaacacagatcaaaacacagacagagacctaaacccgaactgagactaggactcgaacccgaacttagaccaggacccaaacccacacaataactgggacctggacccataattaggataggaacctgggaaagagaactaggatcgggacctagtaccagacccagaccttaacttgaacctattacccagcttgtcacctggcaccaaaaatcgaaccagaatgggacccgagatcgggatccggatctggacccacggcttggacaaaacctgtagtcggattctggatttgggacccacccctagacgcgaacccacactcagacctaaacccagtcccaaacccaaaagtggacacgaacccgtaccctgtgacccaaaattggaaccaaaaccggaagttgaccaggactggaactaggacttggacttgga

SEQ ID NO: 338903 - DNA, 1197 bp, Cannabis indica
agagaaagagatccaggttcagatcttgataatactctgcgacagaaaggatacaagggttagagatctgaacagaaggagacaattttatttcgctgcacccaatgtaaggtttctcatactttatatgtgtttaatttataatcgttttagaagttcttatttagggtgttaatcaacatacttgtgagtagatctaagatcctggtaaaataatttcccacattgtgttgatgtctttcacacttggaggaatgttcattttatgagatgaagtggcatcatagtcgggaacagattcatgctcctcagaagggtgttgagatgatcttgtacagggcagtaaagaatgtgagaataattgatctattgaattaggagagttagtgtcagatagtggaaaaatatcttcataaaaataaacatctctagagttaacgatctcttgagtgtcaatgtttaagagagtgtaagctttcataccaggtggataaccaataaagacacaaggacgagatcttggatcaagtttatgtcgttcggtttccaaggtggaggcaaaagcaagacacccaaaaactttaaggtgttcataagcaagatctttcttaaagagaacttcaaatgaagtctttttgttaagtaatatagatggagttcgatttatgagataaataatagcatttatgacattaactccaataaggtaaggataaatgagattgaaaaagtaaagctctattgacatgtaatatgtggtgatgtttgcgctcagcaatagaattttattgagggcgaccaatgcaagagatgtacttcacggtgccttcgctattctaaaagcttgtcatattaagttctttagcattgtcacaacgcactgctttgatggaaactaaaaattttgttgcaataagcgataaaaattgcagaataatgaaagagacgtcagatttagagtttagcatgtaaacctaagtgtaacgagcaaaatcatcagcaatggttaaaaaatatcgataaccttcaatgctaataatatgaaaaggtccctatatatcaagctgtattaaatcgaaagcagcattagcaaaattatgttagaataaaaggaggcccttttttttagcaaaatgacatatagagcaaatataatccaaaggtttttcacagaattgtaaacttttatttagtata

SEQ ID NO: 338904 - DNA, 661 bp, Cannabis indica
tggagaagggaatgaaactaaagactcacccaataacatgcctgccaccatcatgaaccgcttgtgaaaccaagcccatcagaccaatgctaccgcctccataaaccaaatcaatattccttgaaaccttcaatagacaaaaataaaattaactaaacaactgtaaatgagaagagtgtgagtttttgtgaagtgggtttgattcaaacatatagttgaggtaaaaatccatatgggaaaaacaaggaaggaaaggactttgcagtagttattttacaacatagtacgtcatagtaaagctagctctttctttttggattcataatagaaaaaacttgaggttacaataaaaccgattaaattccgtaatgtgcataaaaacagtcttcaaatttgaaagttacataagaaaacagagagacagagagaggttctgtgagaagtttcaaataatagccatgaaacaaagttacaaacaagtggcaaacacaatgccaaagaaaatacataagaaattgttaagaaaaccccatttcatatgtataagaacacaagaaaaggaggttaaaacaacgatcaaaatcgattttgaagaaaaccaacacagaaagatgaaaactttataagtaccacgagcgaaaaatggctcaactaccatagt

SEQ ID NO: 338905 - DNA, 983 bp, Cannabis indica
gccgacctgaatggaaagtctcgcgctggatgcatgccctaatcacatattaaaactgggtaaatcacatgttcgaaacccgaatccggaaaacccgaacctataactctaggctctgttataatcacaagggattacactaacttaggaaatagggaaacacccaaataaggcactaaaatggacgataattgagaaaatgggacattcggggaaccctgccaaaaccgatttaccggttttacaggtattggtaaactggtttataccagtcctccccaaatatctcatttcttgctcataactccaccaaatacaaccaaactttccagagtatctaaacaatgtatacacaacataatccaacaaaaaaatccaaaaaaaagccgctatattcaaatatgccattaatgatcaaagtttaggtttctaagctcaaacttgcacataaccaatcccatacaccaaaactagcagctagaagctaaatttaactcaaattaagcttagaattcgaattacaacataacctaatcctaacagaccctataactcaaaatcactacttgaaatcaaagtaaaagcttcaaaatacaaaaccataggttctagggttaccttagctccaagaacacctgaattcctagctgaattctagaaaaatgaagatgaaaagcttggtttccttctagttttgtcttgttatagtggttttgacaagatccactctctgtaagagtcaatatgcctgtatccacttgaaagtaagatcatctatatttgaatatggatgtacattcaggggtggatatgagtttttcgtttattcataaaatgatcactctagattttaccttatgtaaaaaaaattgaaatgtttgaaaaattttatgaatttttaacaatgttaaaaaaattaaggtaagtggttaaagatcttacgaactgataggggtggagaaatatttagtggatatgcagtt

SEQ ID NO: 338906 - DNA, 778 bp, Cannabis indica
acctaagaatgatctaattctttcactaatttaggtgtggaagttttgaaatagatcaactttagctttgtcaacttctattccctcagatgaaatcacatgtcctaagacaattccacgttttactataaaatgacatttttcccaatttagcactaaattcttttatttacaacgaatcaagacaagagacatatggtgtaaacattcatcaaaagatgatctataaatagaaaaatcatccataaagatttccaaaaaatgttcaaccatataagaaaaaattgcaatcatacacctttgaaacgtcgcaggtgcattgcataagccaaaagacatgcgtcgataagcaaatgttccataaggacatgtaaaggtggtcttttcttgatcctcgggtgctattgggatttggttgtatcccgagtaaccatcgagaaaaaagtagtactcgtgactagctaatctttcaagcatttggtcaatgaagggtaatgggaaatggtcttttctggtgaggctattcagtttactagtagtcaatgcacactctccatcaagtttggattttagtggggattgttgcccctgaattcgcccaaaatacgtggaccagtcgaaaagggacacgtggatcagataacttgtaaatatttgataagtctttgtgcgccacaaggaagcaccctgggtatgggtcccggaggaggcacccggagtacaaggtactcccggaagctcgcgtagcatgaagcctctccgggatgtgtcaggcctc

SEQ ID NO: 338907 - DNA, 528 bp, Cannabis indica
atatacttgaaatgatttttatgtgagaaaagtagaagttggtaaataataaaagaaatccacgatgttaggttttcgatgctcaataaaagaaatagatttgttgtgtcaaatatgttaaagctatgttgtcgaacttctaggtattaaaaattctagaataattttatcgcacatttataattataccatttttttttccctaaaaaatattattatgcttaacatttgagatgaatttctctggcttttggtttctgtacatttctgtattcttttttttcctatagaattgctttaggctatgtttgaaagttgggttttggcggtgaaagataaaggtaaggaaaatgtagtgaaaaaaacaattctcatgtttggtatggaaagaaaaattgtatggaaaaaaacttgatttaacaatattttccacaccaaacataaaaagttgatattttttttattctccacacttttcttctcctacattttccttaactttttctttcctcactaaaatccaacttc

SEQ ID NO: 338908 - DNA, 941 bp, Cannabis indica
ggagtaatccaacatgaataaattggacaaaaatctttgtaatagtggactaatactacaagaaatctaatctttacctactaatagtttatttgtaggtattaggttttacttacccaaaaataatggtaagagtttattggtatctaaatattaataatcatataatatgtcaaagttatctagaaaggtagtggctgagattggttcttggctgggagttttgtagtggccgagagacatagcaaagttgaaaacttggtgcatgtttggcatcataactaaaaactgtttttgttcttaaaaacagaaaattgttttaaaaataatttggcttgtttggccttattttttaaaaacagttttcagaaaaaaaaagttacaaaaaacaagaattttgaaaacaacaaaatgtcattttctgttttaaaaaccacacttttggtcaatattgtttttaaaaatcactaaccaaacgtgacttgtgttttaaaaacttcaaaaattattttttgttctcatttctaaaaacaattttttaaaacaaaaaacagaaaacaataccaaacatgctcttggtgttcaagacctcttactgatctgagaagcgaagttattaactctgtgactgcagcgactgtttacatgctacggaaaaatagaaataggtttgtttgtattttgcttagttttgaataaagatgtttcttttgttcaaaaaaaaagtttatgaaatttatgaatgtactttttcattcatttatttgtgtttatatatcatgctttaatttatttgtcttatatatcgtgcctaatacttatagtgtcatatcttgtctaaacttatgttcatattctcgtgaaaagtcctcccatatttaaagcactagttcttagagcactcatatgagtgtagctaaaataattcatctttaattttt

SEQ ID NO: 338909 - DNA, 842 bp, Cannabis indica
aaggtatatgttggctgaagtgaataagtggaggtctttatttttaatttttacaagttagaataagctagaaaattagaaaattcaaaggaaactctctctcttttcctctctctattcggccccctttgagcagcaagaaaagaggattttcctcttggatttcaagccctccttagcaagattaagtgttcataagttgttggtatgttttctacatctttcttttatgttttcttgaatttttgaagagaaatggtaggttgcatgcttagttttaagttgttcttgctgctggattttgatgattatttctgaagttaaagcatgataatttgaggttaattaagctacttgtggtgcttgatagttagattgattatagttatggtttttctatgcaaaagtttggtttttcaaagtgaaattgagattttggtggctgtgattattgcatgagtttgttttggttttctgcagctttagtatgcatgtttaggtagttttaatctaggtttgatgcttgttatgttgtttagtcaagttttgagtttagaactcaatctttgacctttaatggtgaaatgagtttctgtgtgtgaagctcggttttgttgctttagaaatgttctttgggatatatagaacaggtctggaaggtttgaggttatttggatttgatttggttgagttatgaatttttgaatttctgcctgcgaggaaccggaattccggttgtgcatccggaattccggatggggttttgaaaattcccagaaccggaattccggttgggcaaccggtctaccggttggggaaatttcaggaaccctagatttcct

SEQ ID NO: 338910 - DNA, 607 bp, Cannabis indica
aatgtgaagaaagagtttctagggttaatttgttaattgagagactttgataagtctaattaataaatatattaaatgacaatataatttaataattaatttttagttattaaataattagaattggcattgaaatggttaaattagaaaattggcatttctgagaaaataaaatggtataattgcaaagtgaggcccaatatccatacatggccggcctctatatagcatatttaccatttattttttcattattttaatgccaaataaatctaatttaaccctaggttgtttcttaaatctaacttaactgtggagttctttcgtgatgggctaccaaaaaacaaggtgcaccttggttatataggtagttctaatcaatccatttaagctctcttcaactgtgtagtcccatacctacatagtttgagaatcatcccacttgacattcccaagcaatgtgagattgcacaacttactcagtatttctccttatatatattaaaataggatatataaatattgtactattaactaaaataataagaccaaattctcaatgatcagtcttgattgaagttgtcattaataaaattcaattgatgat

SEQ ID NO: 338911 - DNA, 504 bp, Cannabis indica
tggtataatgcaaacccgccatttcaatttttttttaaaattcaaaggttctcgattaaacctctttgacgaaagtggactcgaactgttataactccctgaccaaacctttttgacgagagaggggatgaatcgttataacaccttgatcaaacctttttgacgaagaagggatcaaacaactataatttttgatttaaaacctatccgaagggaaagaaaaatcaaaagttataactaacgtataaaactgaataataatggttctcacgagctaggaaagtacaaaacgaggcatcacgggccttgataaaagtacttgaacctagaaaatggatagataatataactattcatacgagcaaattaaaaaatatacaatgtgataaaaccattaaagtatattgaagtttgcttaaggcagattgtaactgttatagcgaggcaaaattaacaactgctcgaaaataaaaaagttggtagattactaactacttaaacagg

SEQ ID NO: 338912 - DNA, 709 bp, Cannabis indica
agaccaatgtctctgcaaatccgtggaatcgaactcgagaaacagagcaaacacgaagccctgtgtatttcagtcatacactttcagtgaagttgaatgatcataattttcttctctggaaacagcaagttcttgctgcgattcgaggacaccagcttcaacgattcattcaagatgttcctcctccttcgaaattcctctctgatgcagatcaaacagctcaacgatacaatcccgagttcttgaattgggagattcaagatcaattactagtctcctggcttttatcttctatgaatgagagcctcctcattcgtatggtcggatgcaacactgccaggcagatctggtatgccttggaaaagcattacacgctgcaagtctcctctaaggttctggagtttagaactaaactccaaaatctcaagaaaggcacactgtcattagatgaatatctcttgaaagttaagcaacatgtggatttacttgcttctgttggagaaacactatctgctcgagatcatattgcagccattttcaaaggactgccgagtgattatgacaccttcataatctcttctaatactcgaatcgaagagtattctgttgccgaaatagaagctttactcttagcatcagaatccagaatcgaaaaatcagataaagactttgatctgaatgttaatcttgctgagtcaacaccaagatc

SEQ ID NO: 338913 - DNA, 778 bp, Cannabis indica
atactccatacatccgatacttggaaactttgccaatgccctggaaaggacataacacttgtccaaggtgtaagaatacctatcgctgattatcatgccagtctaaatccagtgaactgacaaatcacagaattaaactttcgaacatatcattatgattatattccactgtgttgacaacactataataatgaactaatacatatgttctggacttaatagaattcatacattaaacataaacatgaaataaatcatgtgaaccatgcaacataaaatgtgatttctgatcttcattagtagatttgattatattgaaatgggttttatttagggcacaaaacccaacagcctctccatgggtgcacgtgcagctttgttggcagcacacccgaaattcgattttcatgggatttttttccaaatttcgaatttttcaattttcaaaccctaatatctaattaaaatattattttgatcatttaaacataaatatcagtattctaaattaataatgtttagttatttaatagattattattattttttgatattttgatgtttaaatttaaaaattaataattttaatttttttaaattatggtcagatttaaaaatttgttaatttctttaatatttatatattatttatttttaaggttagattttttaatattgggtatattttaaattaaagataacattatccttttaatttaaaatattatattaaaaattaccttatatgataaattaaataattaataaatttgaaatt

SEQ ID NO: 338914 - DNA, 837 bp, Cannabis indica
tttaatacataataattaaaaaactatatatttgagtcaaatatggggtgggtagtattaccccaaccccatcccgaactcactttggatatatgaaattgcacctcagtcaaatttccttcactagtcgttttggtagactttgatattcaattttttttttaatttaatttgttattatgattgcatatattgtaattatttaagaccacttaaattttatttatatataaagagagcttcaggtattattcttcatcctaacgttttttatttttatttttgatacttagatatactgagttttaattttttaatcagtttatattataattaaagtagtcatcatgtccatttttgacaaattttaaataatttatgatactaaatataaaatttaaaataaagctacacgtattatttactatttaaattttatttttagtactattaattatttttttaatgaaaataatctttattagacaaaaatatccgctaaaataatggactgaagagcaagaagaacatcactctcagtaaaacgacgacctgaccaataacaagcaccacgtgccatacagtgcgcgactttgttagcagaccatttaacatgaccaataaaaacattatttaaagaagataaaatacgttgataatcttgaacaaataaaccaaaaatagaaggcatagatactgaactaagaatagcttgaacaactaaaatgcaatccgtctctaaaatgacatttgactcgttattcttctttattcaactaagtgcctctttgacacttagaatctctgcaatttcggatcggcaactgacagaagaaa

SEQ ID NO: 338915 - DNA, 889 bp, Cannabis indica
acgtgctcggtccaactcgagatcgttgttactctgaccgaccaggccttaaacatattttttagttcgtccaattgtgcttgcatggcttaactaacctgttcggcctcttcgccgacctgagtcacatcaacatctctttgagcgagattttgagcgcgggttccgggttgcacgattggcgcatcaagctggtcgtccacccctctcatcctgttcaaattgtttctgagatcatgagtcgtccccaatctatcaaatacagaaacacatggctgcctcagtgactgattggtttggccaagtgctgaccggcaccattaacttggttagaattattgggtatgacttctcttgatgaattactagacaaggtctgcccgcctaccacttggcccataagtggaacctgtgaccggggatttgacggctgaccatttatagtgtgagaggtattcatcgctggatcttcgtctgttttgcccaaagggatgacagttacaagttgttgtccggtagtttgataggcttttcgtattagcacagtggcctgccgagtcgttaatgactgcttgctgagcccttaacgtttccatctccttatctcaccattcagcaaccatgtgtctctgctcttcaaacgcgaaattcaccgcagcatggagttcctcctgatcatgatgcaggttgtttgtatgaccctgcataattccaagagcagcacgaaggttctagatttcagtgtcatctccaatggctgtttgaacattggtagcaagcataacggctatgttatgaatgccctagttggatgctgaactggtattcctagtctcttgcacactaggcacgatttctgttggaatatatttcaccaggatcttagatc

SEQ ID NO: 338916 - DNA, 608 bp, Cannabis indica
cttaaaaatatagtacaaggcttcaccggcccaaaactcactgatcttgaactcgaccgggcacatagatctcttttttcccctaaaaaagttcttgagttaccccttagttcaaaatgcctacttggaaaatgtatacaggaaaagaagatcctttatcacacctgaagtattttgagatgcaaatgggcttgcagggggtaagacgtgatgtacggtgcagaattttccttgctacagttgaagaggccgcccagcaatggtacttcaaactgcctctggaaaggtttaactcatggaatgccttctcatcagagttccatgcacagttttcctcctctcatcaacatccctcgcacattgaagacctggtcgagtaaaagcaaatgccaagggaatccctccgagcttatattagcaagtttatgaccgaggctaaaaacattaaggggctgactgaagaaggaagactggctgcaatactcgggggcattgagcctcccagagttgtggaaggatatgaataggctaactgttagatccaagaccgagttcctagatcgggcagatgggttcattaagctcgaagaagctgttcagcgtctgga

SEQ ID NO: 338917 - DNA, 966 bp, Cannabis indica
ttgttagatttaaagacttttgtatccttgtaccaaattgtattcccaaactttgacatacatgtaacaaatcgtgtccctgaattttaacatgtactaaattgtattctctgaacttgcattaatgttagacttccgttagtaaaattagacagaagtccttgaatacaacaatttcaatagttcaaacaacttagaaaattcatgagacataatttagtgcatgtgaaagttcgggaagcaaaaattctaattaacatgttttctctctacgtttcttggtcttcatgttgatcacttatttgaattcttttgtttattttatacaaaaaaaaaaaaagtttttgatcgtatttattggcccaactctttctacaagtttttattacaatttttcgtaatatttaacaatacactcacacaaaacgagtgcattgattttttttgtttttgttttgatatttagaatttttttaaattcttttttttttttggtaattgtatatattatattcaagatactatgtatgtaacgtccatgctttaagcctctattgggtcttcacacctacggaatgatggttcttatatacgagtacgtcattttggctgcttcatggactgacgactggcctacagaccaacacgagtgttttcagcatgctttgtcctcactcgcacacttcctcgaaaaatttcccaggaggtcacccatcctgaaattaccccaagtcaagcacgttttactgtggagttcttttgtgataggctaccgaaaaacatgatgcacattgttgatatagctagtaccattcaatccattaaagctctcttcaactatgtagcctcataccttcacaatctcaaaatcatcccacttgatcttctccaagcggtgtgagattgcacaacttacctagtatttttccttacggatcacaggactactgactgtcacaatcaccc

SEQ ID NO: 338918 - DNA, 1257 bp, Cannabis indica
agtttagaggacacaattcaatatatgtcaaaatttagggccacgcttggaagcacgatttaatacctgaacaatcgttatattagtaaaattaaacagaatcggtatacgtttttaatccaataattttaatagttcggaaaaaattttaacactaacaatttgaaagagtgataaaaattttaggctaattaagatttttgcctcctgaactttgacatgtgccaaatcatgccctctgaacttttaagatcgttaaaaatgcctctaaactattgagattgttggatttaaggatttttcgtctaatttcattcaattttactaggggtgttcataaaaaccgataaaccgaaaccgaccatcaaaccgaccagaccgtaaccgaatttttggttccacgtcatcaccgaatttggcggtcggtttcggtttttgaaaaaaaaatggttaaaccaaaaaacagccaaaaccgctaaaaaccgcaataaaccatccaaaaccaccaaaaaccgtccaaaactgccaaaccgaaaaccgccaaccttacggtcagttttatacagttataatttctaaatagacagttacggtttttgtaaaataaaaaccgtaaccgaccgatcggttataaaattgtaaaaaccgatcataacttaccgattttcatcttaaattttactatttcagtgattgtttatgtactaaaccatgcttctcagactttgatatctacccaattatgcccctcgaattttgacatgtactaaatcatgcttccagaacttttattcatgttagacttttttactaaaattggacaaaatttcttaaatctaaccatgtcaataatttaaaggcatttttaacaaccttacaaatacattcagaaaacaaaaatacaaattagcaaaaattttaattagcctaataatttcgacaaaagacacactattacgtagcaaatgattcgttggatctaattccctcgaaaatttctggacacttcgaattcgaattcgaaaagaggtaaaagactaatccaaaggagtgagagtagattggtttacaattacaagcgaagcgattaatatggattctgtgaaattggcagaattggagcaattcatcactcgctgcaaatcaaacccttcactactccataacccttctctcgctttcttcaaatcctatcttcagaggtataaagtttacttttttcttctttttttaactcattattgcatacccatttcg

SEQ ID NO: 338919 - DNA, 657 bp, Cannabis indica
ctggaagaaaattacagttttatgaacattgagtacttatgccgctaaaaaaattattgggtttatgccgcttacaaacccaaaactttggttacttataccactttttaccttatatataaacacataactggtcttctatctgttgctggaattttcctcaataattctggggactgtggattgtaattgtgcagtggttttgtcttttaggtgaatagtgaatacaagttgaaggtggtaggtattaaatattaattgcatttattttcctttttgtaaattttatttattttatcataagttatcatgatatatatatgagtgcactcttaataagtattacccatgaatgggtaaaattagaaaaaactgagtttttatgcttaatttttctatataattagaaaaatctcttacttttacatcatatgggctgagattgttccatcgattgaaaaaagaaaatttaggaaaaaaaaaaagataagtaaaagttgagtttcacttaagtatttttatatgaacatatttttgatataatataaaaagagatattttttgatattttttaattaaatagttaaactaagcatagaaattcaaatttctcttttattattcgttattagatcaaaatttgatgatttaatattt

SEQ ID NO: 338920 - DNA, 1144 bp, Cannabis indica
accagtgttgccttcacaatcctgtgaggagacaataataagactctttgatcggagtgcatgatcgactttgaagactaagagacctacgtgacctcttgacctagaataggacgacgaaagtaggaacttttagagaagacactacctaagtaacagaagctctaattgggatgcaaaccaccactcatggggtcaaccaagcagaatttgacagcttggcagctttagtgaaaaggatcacgactcctaagttgtctgaattcaaacttgatagagagcggggttcattgctctccaaacgaataaaagtccttcctatccctctgaagttcaagaacccttcttggcatcaatacactggaaatgaagatctattatttcacatccactacttcaaagtgtagaccaaactatagggtgtgtgagatgacattaggttcaaattcttccctgccacattgataggacttaggctcaacgatggtaccttaagctctcccctagatcaatcgactcatggaaagatctagtgatgcttttggcaaccaattctctccttcccaacaatgtcagatcaaaccaatgatttggtggatgtcaagaagtagaaagatgagctgctcaaggactacatccaagatttcttagaggcaaccgctaagaccaaaagtctttgcgagaacgcaagggtaatggcacttacagccacactcaaggagatgagtcctctgtggtctgaccttcgtcttaaggcagtatgccccatgaatgacttcttagatagagtggatgactttatcaaactagaagaagccgtcacccgagccaagggctcaaagggtggcaagaaaaagtcaccagactcttaaacccctgctactgagacgtaaggaaatgggaagaaaagaaggtcaaacagagagaagaaagctaacaataatggcaagccaggaaactcccccggtggaaagaagccaaagattggggcaagcccttacgagagtatgagcctcacttcaccaccaagtcaatcttcttggccccaagagagagatctatacggctacacaatcaacaatgtcgtatcataaacctctttccttcaaagagtcagggaagagggacatgaaaaaattctcac

SEQ ID NO: 338921 - DNA, 877 bp, Cannabis indica
tgaaaatatttttattccacatatagctcatattaccatgatatataaatctccgttatttataaattgcgcttatttactcacttatagcaaaaattaaattttatgctgaaatagattagtaggatcataatcccacttattacctaattaacccataatataatataaactctaattatttaccattaggcttatcgggatattacacttagactacaccaaatcaggtttctagacttgccttagtgctagaaagtctgctgatgagatggtgattactctgaggtggagtagtgattttggagaagtgtaaaaacctatttcaagtctctaagtctaccagagagactgaataataaagttgcaagaaagatacttattcagtctaaggaaagttctatacagtttttggcattgtaccaacaatttattaactactagtgttacttcctcactaacgcagaagtagttgccaaaaagtaatgaatccagtatccctagaggagtagacatatacagagaaatttcacagtatcaaggattttgtgattaaagaaatgtaatggtggaggaaaggttgtgttggttacaatctgtcagatcctatgacagagagaatactacatactacagttgatctggatatcaaggtgttgagattaattgaaatacacttttttgtttcatataagtgcaagtaggagtttgttgggcttagtgccctaaataaaattcatttcaatataatcagatttactaattaataaagattagaaatcgcattttatgttgcatggttcagatgatttatttcagtattatgtttaatgtataaattttattaagtccagaacatatgtatttgttcattatt

SEQ ID NO: 338922 - DNA, 878 bp, Cannabis indica
cctttagtaaaatgggcataacactctcaaattttatccagatgacttggttggacttgcattgaaaatatcttttcaagacggatctatgtctttctcatagtcatagctcagttctaaagttattaggctcaaaattggctcacaagacaggctagtacacttcactcgggaattaagtagtgtaattaagtgtgggatgttggagagctatctcacagcccatgtggcatcatatgcgaggaatgacaccctaaaacacctatttccaacatttctcaccaattttatgaattccaagccgagatgtggcatccattgtcactgttctctaatttggtgtatttctagctgagaataactattttcccaatgtttgtgggattttggcctagaaataagtgagatttttatagatatttatttatttgtacttttttattcattattgggaataagattatgttggaattttatgccctaataaaactcatttcaatataaatcttatttactatcaatagaagattagaaatcatttaagtttacgtgtagttttcatgattatagttttaatatagaatttctattaaatccagaacatatagttactcacaattacagtgatgtcattacagtggaaggtaattgtgattatatatttcaaactatttagtctcatgatttacactaacatgataattaacaataaagtttacttatacaatgatatgtgaaatgtcttttctagggcattagcaaagtatactagtatccgatgtattggctatatattggactgaacagatattaatagtggaaaagatattacaaacttaccattatatcttttctaagtcaatgtcacttagttgatc

SEQ ID NO: 338923 - DNA, 1407 bp, Cannabis indica
cccaaataccaagaagtcatccaggaagatcttaagaatgttttctgccatgtctgaaaaaattgccatcatacacctttggaaaatggcgagagcattgcataaaccaaatggcattcttcgaaaggaaaaggtgccatagggactagtgaatgttgttttctcttggtcttccaaagctatggcaatttgattatagctagaatacccatcaaggaacaatagaattcttttcccgccaaatgatcaagcatttgatcaatgaatggcagcgggaaatgatctttccgcgtggccttgttcaactttcaatagtccatccaaacacgccaacccgtcactgttcttgtggggatcaactcattattttcattagctaccactgtgactctgcctttttttggaacacaatgaattgggcttacccaagaactgtctgaaatggggtagacaatgccaaagtccagccacttgattacctcctttctaaccactttcttcatgatggggtttagccgtcattgctactccatagaatggttgcacaaatcttccaacagaatcttatgcatgcaaatcgaaggacttatacccttgatgtccgccatggtccaaccaatggctcttttgtatttcttcaagacatcaactaacaagcattctctttgggcacccaacatagcagaaataattaccggcaaggtctctccatctcccaaataaacatacttcaagtgactaggcaacggcttcaactccaactcgggtggttcttgaatggaaggcttaggaggcttgaaattgttctctgacaactccaaagattcaaatggcctcctaaacttagtgaaaggctgctttgactctacccaagtaactttggtttcttcatcttcacttaaagcttcaagctcttcaagagaacttatcatcttttcctctttcgaagcttccttgtgaatttttcagcaacaatagaatcaatcacacttatgcgagagcattcctcaatctcatccggaaacctcatggcattgaacacattaaaagtcacttgttgatcattcacccgcatagtaagttcccctttttgcacatcaatcaaggtcctcccggtagcaaggaatggccttcccaaaataataggaacttctctatccgcctcataatcaagaatgatgaaatcggccggaaaaatgagcttattcttgtatcaagaaatctttggaattgaccatcctcttgctactttttgaatctttgaggaaaagttggggttggcttgctaagtaacttttctgctgcattttgatgaggaattggtgcagcattttcttcaggttgctcctttggcatattagaacgttcaacatttttttctttttctactcgactttggattgaagt

SEQ ID NO: 338924 - DNA, 765 bp, Cannabis indica
ctgtggagttctttcgtgatgggctactgaaaaatagatgcactttgttgatatagttagtaccaatcaatctatttaagctctcttcagctatgtagttccatacctacacagcctcagaatcatcacacttgaccttccccaggaaatgtggcattacatatatagcttacccagtatttcccttacggatcacgagactactgactgtcacagaaatactgttctaatttttaatgtttcataatagttgcattacaattgcataaatatttgctaacagttatttcatctaattgaaaccttcatttgatgcaactttcggccaagcacccaacaacttttgtttgatgcaaacttcggccaaccacccaataactttcgtctgatgcaaccttcgaccaaccatacaacaactattatctgattgtgtaagtgatagtgtaagaggtattttggtaattaaaagcacataaaagaaaaagtataaatactttccaccttatgaatatatttttataaataaagtgtcaattcgtattttccatgtaataattctaatttataatataaataaataaaaattaaatataaaatgtttgtaatttaatgcaataattaaatttgataatgtaataaaattaaatataaaaataacatatttattgtaatgtaaattttgcaattgtgatttaaatttggatcaacttttgacacataattaaagtaaattttttcaaaataaattatatctattctatataa

SEQ ID NO: 338925 - DNA, 862 bp, Cannabis indica
ctctacaaagcaggcccggccctagacgtaggcaggctatcctgatctacacatgtataaataacataaatttgtaaaccacttgactactttttagtcagaatgaaatttgtgaataactgtatagatttcaataaaatataagtggttcatatataagtcacatgtatgtttttttttttttctgaatggaggtcacatgtgtgttaatttgtttagtacatttcgtttgtttgttcgggttgtcctattaattgaattttcattgagaaattctggtttacatgcttaatagatatgtatggacccaaaataaacaccatataattataaacccttctatctcaaaattatgctactattcctaattgttcccaaattaccccctagcatttaaaacccacatacacccacacatactcatctccctctctctctcttaaacagaccaccccaatgacttttcaacttatgtcgacactataaaattgtttacttttagttacttaacaaaacttgtgactaaaataaaaaaattgtgactataattatatataaatcaacattcttatatgttatgactaaaaagttcgtggataaaagtattagtcataaaaatcacaatttgttgtgactaattgtgattttagtcacaatatacttgttgtggcttaaagtaaattagttacaacttatatctaaataatactatgttttagtcacaaatagttttgttgtaactaaaagtcatatttaatcacaaaaaatttatattataactaaaaggttgtcactaaaggtatctattttttgtaatatgagccaccataattggttttccacaagcctggacacctcaaag

SEQ ID NO: 338926 - DNA, 763 bp, Cannabis indica
tcttctctagattagcacgacactaacagcatgctccgtgacagccaagtatattccaagttcctcttcgtccagaggttttgagagtacggggagttttgcgagttgtgcttttagctcttagaaagctttttcacattcctccgttcactcgaattgcttgtttcctcgcaggatattgaagaatgggacacacttgtctgttgattttgaaacaaatctaatgagtgcggcgattcgaccagccaaactttgcacttctttggttttagttggcgacttcatatccaggagggcttgaatcttctctggattggcttcaattcctcaggcattgacaatgaagcccagaaactttcccgagctgactccaaaggagcactttaagggatttagtttcatgttgtactttttgaggactttgaagcattcgtccaggtcatctatgtgcccccaaccttcctggattcgacgagcatgtcatccacatacacttccatattttgctcgatctggtctttaaacattttgtttaccaatctttggtatgttgctcaagcattttttagaccaaacgacattactttgtagcaatatagaccccaatctgttcgaaaacttgtatgttcttggtctggtggatgctattttgatctgattgtaccctgaataagcatccatgaagcttgccatgttgttgaatccacgagctgatcgattcttggaagtggaaaacaatctttggggcatgctttgtttaggt

SEQ ID NO: 338927 - DNA, 514 bp, Cannabis indica
gagttgataaccctcactcaggattcgttatgacctgggaagaattcagggagttgtttaactctaaattttataatgaagccgtccgcagtgcttagcggaaagatttcactgagttggtgcaaatcgaggggatgtcggttactgagtatactacaaagtttgaccgtttggccaagctcgtcgtgggtatcgtgccaactgactttagtaagaaagagaagtacttggttggtttgaatgtgaagattaggcatgatctagtgatcaccaccaatgaagcaaccatttatgctaagatggttgaaaaagctctgagagccgaaggtgctgtgaaattccttcaggagccctgagtgactccgaatgttagtggaaccacaacttttcctactcctacctatggtagggatggtggtgattccatcacagatcagaagaggaaagttaccccagcatctggtggttcgggcaaagtaagcagttctgttggaaccagggcagaggtggacgc

SEQ ID NO: 338928 - DNA, 673 bp, Cannabis indica
tgagttgggaaccacttggtgaaagatctcggtccgttaggcctattgtagtgaaggcctctttgaataataaattcacagaactcccgttgtcgatcaagactctggccacgatcttattggcaatgggagtttctatgaccaaggggtcatggtgaggaaaacgcgctgtcttagcatcttcttctgtgaatgtaatgggctgatccattagccagggcctttgagctgggagttgagtaacctccaaaacctcatcatgttttacggcccctgcgtatcgtttgagctccttacgggtagttcctctgatgtggagtcctcccgagatcatggccactctcccgttgggtcttggtggcaggctgggaagatgctgggcatctctggggagagcaactggggccaatgctcctgctacaccccctggcgctccttgaggcaaagctccacccgcctgaaccggattgagatggggcaatcggttcttgatccactcgtagagatgtcccaatcggatcaagttttcgatctcgtccttgagatttttgcattcattggtgctgtgcccaatgtcattgtggtactcgcatctcttattggggtccctccgggagctgtccttgtacagaggaggcggtctccggtagtgcgtattttacctagtagcaaa

SEQ ID NO: 338929 - DNA, 576 bp, Cannabis indica
ttccgttcaagatctctagcccttgattcctttctgtcgcagagcattatcaagatctgaacttggatctctttcactccttcgggtttgattaccactgtcttactcactatgattgagtacttgacttgctatgtgtgtgcatgtcactcattcactaaagatttgaatatggaagaacaatgaaagaggtgaaatctctatagaaggaactctctcatctaggtttggttgaatagtcaagttgacaaaggttggatgagtgagagtatcatgttccttttatagtattttaactagggcatagggttgaattatatggatttaaaataaataaaatattgggctaaataaacttaagtgtcgtacacataagtggaccactttctagttacaattttgtcactttatttcaaccacttattcttcttttgaataataccatattttccaattcaatcctataaatgccaaaattatttatttaataattataattaattactaaatattattttcatttatgtaatttattaattagaccatgcaaagtctcttaattaacaaattgacccc

SEQ ID NO: 338930 - DNA, 532 bp, Cannabis indica
attggtgatgtgcccaatgtcattgtggtactcgcatctcttattggggtccctccgggagctgtccttgtacagaggaggcggtctccggtagtgcgtattttgcctggtagcaaaatatacacgttcttggcagtccattaactccgtgtattgggtatattgggcagtatacccccttttctgccgcttatccttcgtccgattgctacctttagaggaccttttgctccgagagccttgagaaggaccgacgagacttgcggccggagcggagtgcgacggggcctgtccattcatccccgagggatttccaaagtgggaagatgcgggggccaaggcctggccttgactatatccgagagtagcagaaaattgtatgccgctcatcggtggagctactgctggcagagtgcctgggagatgagctccgggtacatatcctgctatctcggtgggatagtatccccatagtccactatttgggcctcttccaggttgatatatttttggactctcttctggaaatctt

SEQ ID NO: 338931 - DNA, 507 bp, Cannabis indica
gttgttgggctcaggacagcttaatcattaagtcgctatagcatcgcttatttatatgttatgcatatccaactgagtccattgactcatcagtttgctaccttgtgtaggtaagggaaaggctaagcaggaggagcagtgagttagagcttggcaaggattgtacatatcgcaacagtgcaacctggagggtttcggtcttatggcagtttgaactgccttgtattttgtaaaaaaatatattacataactatatatagtaaatgaaatttgcaactgtgttttaaaacttgggatcccgacctataaggtcatataattataatataataagattaaatttggtttagcaagttttcagatacgggggttacagtttggtatcagagccaccaggttattcactgaagaccgtcaagagatgtacaatcaaggccaatgtcgagctcaactcgcggctccgtaagttttacttttagcaaactatttaagatgtattgcatatat

SEQ ID NO: 338932 - DNA, 1439 bp, Cannabis indica
taattcactctccaacaacaccaaaaacaagcaacataaaaatcagcattttacaatgaatttcagccccctaaactcatccatttcaacccaaacatgcttcaatccaacataacctcttatacaattaaacaaccacaaaaggaagttaaaccacaaattattaagcttaaaatttcagtccacatgcatagaaattcagattcaacaacatgaaatcaaaactccaaacctagagcaaaattcatcataagttcctaatcaagaacttgaaccttcaagcaactttcaagcaagcatcaaacttatttttccagcaacaacacatcaaacaaaaacttgaatttaaacatgaaaattaccctaaaagttcatctagaacccaaccaacataatccattacaaaaccaagcaattcacacccaaatttctcaagattaatattgattctccccacatgcaaaccaagaacatcatacactttttttcatgattttgaacaataaatttcagcaagaaaaatcaacaaataaaaggggttaagaactacctcaagctccaaacaaagctaagcacaaaacccaccaagaatccaagctttcaagatgaattttccaacacttagcaaaataaaaatatgaagaaaagagggagagggggttcagctagggcagaggaaaaagcccaaaaattttcctttttaagatgcaaaaataactcttttcaatctcaatcacaaaagccacaaaccccaagcttgaatccaagcaagcacaacccaaaatcaagagttagaatgagttttgagaggaaagggggttcagccaaagggctgggaaaaaatgcagaaaaataaatctttattttgcttaaaatcccttttatgaaccttactccaaaatggcaaaattactcaattgcccttaaggccataaaacacccacataagcacttcaagggtaaaatagccacttgcacacacaaataaactcaataattttcagattattcccacataaataaaataccaataattaaacccaaaattgtatttcggccccgaacccggttcggcccgaaatacccggttgtgactataccgcgccaacttgtcagaacacacctgcaaaaaggacaacacaagcatactatataataatatagtccataagcacgtaaataaattaatttcactattttacccttcttgggtcaaaattactaaaatgcccccggctcacctacggggtcttaagatatcatatctcatattaattaacatataataaattatataataatactcaattaaccagttagggttttgctaatccattttctcaattccagggtattacagttaccccctccttatagaaatttcgtcccgaaatttacctaaacaactctggatatttctgctgcatatccgtctcgag

SEQ ID NO: 338933 - DNA, 1077 bp, Cannabis indica
tcaattgataagtgcctcccattttttaatgttttgagaggcaataagaaattcgaatggactgaagcgaggaagcatttaaagggataaagaagcatatatcaacaccctcaatttcggctaaaccaataactggagaaactttatatctttatcttgttgtctcggaacatgccattagtgaagctttagtgcgagaagaaggtaaaaaccagcaacctgtttactatgttagtaaaaggttactagggcagaatcgaggtacccacctctggaaaaacttgcactatccttaattcatgcatctcgcaagttgcggctgtatttttaggcacatccaattaaagtcctaacaaattaacccttaagacaagtcttatcaaaacccgatgcttcaggaagattgataaaatggtcgattgaattaggacaatttgacataacttatcacctgagagtgtcaatcaaaggacaagctttggctgactttttaatagaaggaataaactcagaagaagaccctgatgtagagcgtgaagtagaaacttggaaactatatgttgatggggcttcaaatgagaatggcttgggggcaggagttatagcgatgtcaccaaataacttcaaattccactacgcactgagattttagtttgacacttagaacaataaggcagaatacgaggctttgttagcaggtttgagaatagtcaaggcaataaaagttaaaaacattacatgttatagtgactcgcaactaattgtgaaccaagtcttggctgaatatcaagcgaaaggcctaaaagtggctaaatatttagagaaagttcagaagaacttagaaaagtttgatcattttaaaattgaacaaattccaagagagcaaaactctaatgcaaatgcactagcaaaactagcatctcaatttgatctcgataagttgaatttggtatcggtgaaagtcttagatgatccaagcatatgtgaagaggaagaaatcgagatgatagatactttgccaacatggatgacaccaattgtcaagtatctagtaagtggagaacttcctatagacaa

SEQ ID NO: 338934 - DNA, 1439 bp, Cannabis indica
ctttcttagattttttcaatctactttgaaaaggtggaggagtgacataagttagtacaatgggtttgtatggattttttcagtgatagtggaccaactaaagtaggagattcaactgttggtggagatgatccttcaatggatgaattgttgattcctttaaactacaagaaaatcatcttttgccggcgagtaaactcacttgcaaaataatgaggatctcactggcacagctgccggcgacctttttcgctgacaaagtgtaatgatcgcatttcataatatggattagtcaagacaattaacactaattattgatatttttatagtatttgtggatttaagttatttttgggtctcattgttagaaatgggcattagagttataatttctcaattccgtagattttattaaactctaggtatattatttgtattatatttgaattatgcaatttttataatttttgctcaatgataatggaaaatgtgatgaatggctagtttaatcacatgggtaggtgtaaaaccttatttcttagagggatgtaaattggagaaaataaaataccaagtttatgcagggttacggtttttgaccattttacccctaagcattaagttagcctaagtttaggctaaaagaggattttggtaatttggcaagtgggaattgggtggcagccttgggtgttgacacctagcttctattctcagtaaggattaatttggataatccttattcatttaggaaaaatggaaagaaaagtcaaaaataaggaaactcatcctttttctctctcttccttgttcggccaccacaaaaccagaaggaaccagcatcttttgatattttcttttgggatttcaatcaaggattcaaataactttgaagctaaggtaaccctagaactcatagatttgtgttaatgaagttttattttagcttgaatgttcaattttggattttaggggctgttagggtttggattatgtgtggtttgaattttaagtttaatttgagttggaaatggtttgattatttttggtgatagatgcacaagcttgagttgaaaactcacgcttggttcatccatggcacattttgattctgggtgtttttctaagttttattggttggaatatgttgtgtatgctctgtttaggtgctctggaaggtttggtggcatttggataagttttgagtggtttggggaaacctggtgcaaactagttaacgggtttgccaggtcctgtaaaactggttaaccggtattggcagattccctgaataacttgttgtctcaattcttgcccatttcagtgccttagttgggtgtttccctgtttcctaggatattgtagttcctagtagtaataatagaaccttaatgtaacaccctaactaccttaggagtattacgtgatttttaaacgta

SEQ ID NO: 338935 - DNA, 730 bp, Cannabis indica
agaagaacagcaaactcgagaacacgaagaggaaggcgaaggactctccggtagccttagaagctctaaggagcgaagaggatgagaatgattcagaacagatgcacacattcatacacaaaacaacaagaacagattcagaatcaccaaaccagagagagagagaatcacctctggcaacgctaccaccaatcaaggaacccggcacttgcagagataatcgaagaagacagtcacaacaatggctggcggcagattaatcttcagtttgctagggttagggtttgttgggcttggcccatggctggaggagaagagagataatttgttgatatgccaaagtagtggaatggaattataattccaccaaatgaaaaatggaaaagcaattccattagtttgggggaatagcattactatggaattcttttccaaaattgttattttccaaccaaacaaaagcatcaggtccattagtattccattccattcctttctggcccattaccaccaaccaaacgggcccttagtgaagagaacggctgtaggagatgagaaagtggaaggattatatttaggtttagaaattagaagctgttaaaaactaaaaatagaagacactttttaaaaggtaatagaagttgtttggcaaaaaatttttaaaatactttttaaaaaattaaagaagcatgtttggtattgttttcaatttttgttttctaaaaattgt

SEQ ID NO: 338936 - DNA, 586 bp, Cannabis indica
cgatgaatgtcgatgtatgtcgattttgaaatcgaaaattagaaaaaaaaactataaaacaataacataaaagttcattcaaacataaaataacataaaacataaagcataaaataacattaaaataaaatataaaagttcattaaaaaacaaacattaaataaaactcaccacaagccataaaataacaaatgattaaaattctttggcttttgggtgagacttgcaatacttacataaagttccaggcttcaccgatttaccattaaagatgcctaatttgcaacgacgacatccttcggggaaccctggtggtggagccggccatacaccagttttgctaaattgtgcttcaagttgtatcaaccttaactcgttccgatttcgttctttttcaaaagctctatcagcgtctaaaactgtctgcatttgaggagtaattatgccatcatcctcctgcttcagctcttcaggagttagaattgggaattttcccttgttctttctaggcaccatatttagaacttaagaataagagaaatttgcctttaatttttaagtgtaagagagaagtagaagacaagag

SEQ ID NO: 338937 - DNA, 596 bp, Cannabis indica
ttttgtttggttttcataatgttcattgttgttgtaagatgaaactggtttctaataatttttaattttttgttcagatagaatttgattcctccaataaggatgcaacgaaagatgttgctaaagattcaagtgctgactttgagaaaaaacttcctctaattaaacttaaaattctaaagaaggttattcacaagaagaaaaaaaataaatctcatccaaattttaaggatttatcttcggtatatgtattttttcttaggtatatatatatttttttatttatcttgttatgtatatgttcaattttttagttggttatactagataattagttttcgtatttaattgttgttttacgtaattaagatttaaattttattctttcttttgttattttaagaaactagttttactgtgtcagatctatgtaatttggttgctttatgtaactcgtatttctgtgccaacttttaattggttgtttaacataacttggttttagtaatttaaatttatttatatgttaagaattctcttgtgatatgctttaatttttttttttaattaactagctatttcgtgtttcaatatat

SEQ ID NO: 338938 - DNA, 585 bp, Cannabis indica
tccttacgcatgtgtattgactattgagagttaaataaactgaccatcaagaacaaatatccgttacctaggatcgatgacttattcgatcagcttgtggggaaaacggtcttttcaacgattgatctccaatcgagctatcatcagttgagaatccgagaagaggacattgcaaagactgattttcgcgctaggtatgggcattatgaatttttggttatgtcttttggactaaccaacgcttccacatcttttatggatatgataaatagggtatttaaggagttctacaatatttgtgttattatttttatcgatcatatccttgtgtactctcaatcggaagaggagcacgagcagcatcttcggatggttttgcaacggctatgagaacataaactgtatgccaaattcaagaagtgcgagttttagctatctcaggtgtcttttcttggacacattgtcagtaaagagggaatcaaagtggatcaagggaagattgaatctgtcacggattggccgagaccgaagacagttacagaagttagaagtttcttgggtctggctggttattaccgtcgattt

SEQ ID NO: 338939 - DNA, 782 bp, Cannabis indica
acctcaccaaatttcaaagaggtcattaacgtcacaaaaatctcagaaaatggtaattttacctaaaaaactaaatagtgcactaaaattcaaagccatagcaaattaaatggccttccaaaaaagagaggtcattcacctctcaaaaaattaaaattatgaactacgttcgatttgattcctttcaaaaggatacgtaggcaacctaattgccaagattaggtacaatcgcaatttctaaaattcttaaagaggtcattcacctcggcaaaattcaaatgaggtcatacacctttaaaatcctaagtgaggtcatttacctcaaaatatcaaagtgagctaattctccacaaagttatggaagattcaaaatcttttaacactcttggaactacgtttgacttgattcctataaaaggatacgtatgtaacttagttgctaagactaagtgcagtccccgataccacaaaatggtataaaaatacaaatcctaaaattccattaaaggtcatccacctaggaattttttctaaatttttaaatagcaaaggattcctgaaaatggtcatctaccggaatccttatatctaaattctaaattgccttattctgaactacaagtggcttgatccttcacaaagaaggtatgtagacaactcggttaattaaatggactgagttcagctgcaattccaaattcactccaaattttccctaatattttaattatttaatatcattgtaattggaatcaaagggtatttcctttaaataaaaggat

SEQ ID NO: 338940 - DNA, 674 bp, Cannabis indica
atgaaggaggttgtcagaaaagaaattttaaagtggttagatgttggggtagcttatcctattttagacagtcaatgggtaagccctacaagttgttccaaagaaaggaggaatgacggtagtaaagaatgagaaggatgaactaattccaaccagaactgtcacaagatggagaatttgtatagattaccgaaaactcaacaaagccactagaaaagatcacttttctctcccattcattgaccagatgttagacaagttggcaggacaagagtattactttcttgatgggtattcaggttatcaccaaatagtcattccactagaagaccaagagaagacgacattcacatgtccatatggtacttttactttttgaagaatgacacacggtttgtgtaatgctccagcaacatttcagaggtgtatgatggcgatattcttagattaaattgagaagtgaatcgaggtgttcatggatgacttttcagtattcggcccatcttttgatcaatgtctaagcaacttagaactggtactaatgagatgtgaagactccaatttggtgctcaactgggaaaatgtcaattcatggtaagagaggggatagtttttgggtcacaaatttcaaaaagtggtattgaggttgatagagccaaggtatctacaattga

SEQ ID NO: 338941 - DNA, 665 bp, Cannabis indica
ctttcttcttagagagaaacaaatgaatacgtagattaccattgtaaacacttgtaatactcaaacattttccaaaaacggctaatactactgactcgtggactaaggatcattaacacttgaaccacgtaaaaaatttatttctttattattttatatttttcatttccttaagctctttctaatcagttttcgaaaatctcgataaatattttggtgcttatattgagagcatgaggaaaccttgttagttgttacctcactttgactatagtgaatacgcgaaagaacaccagtaagagaactccgctagacacagtcatggaggaagctgattgccatgcctctgacctccagacttggggcgtcaaggaagaaggcacaaacaatgtcgagaactgagaggaagatacagagaatttgcttgatgacctcgatgataacaagaatcttgaaggtgagattgaagaagatgatagaaacgactacgtaaaagatgtgtattataagaatggttattattatgacgatgacccaaacttgctgcaagtaactaaggagttggaggcaactcaggtaaagttggccgaacaaaggcagtaatgaagaagatgatgtagcgtttgcacaatattatcctaatttttgcactctgacgtggcatc

SEQ ID NO: 338942 - DNA, 672 bp, Cannabis indica
attgttacccaagagtacctagttaccaaaaatataagtagatggttacccaagttaatatttgattacctgaaatatagcagttacccaaaatataagtacctagttacctaaaatatatgtaattggttatccaaaatataagtacctggttatttaaaatgacggtaactttattaagacagcaattttttagtacaaatgtaaggcacaattcataatcgtaattggttattgatgataatatatgattttgtgtgatgagaatatcaccaaaaatatatatttactttactttaaaaatctcacaaaaaatcgatgtaatgtaatttgtaattgtaacgtaacttggaatacatctactagaaaaattataaaaagatatatatatatttatatttatatatatatatatataactgattactcacaaactcatagtgagtgttaagatactaaaaaattatatatgaaaattacaaaatatatagttaaaaaaaaacaactcattcagtcaaattaaaaataagaatttttacatacattagaaaattcaatggaaaaattaataaattaataaagaatataaggatgttggcagcaaaactacttaagctctatgattagtgacacaataactactataaattctaattttttttttttttagtt

SEQ ID NO: 338943 - DNA, 568 bp, Cannabis indica
aatgacaaatgccaaaggggcacagatgccttctagatttggtatccgcctatctaaggaacaatctcttactgatcctcaagagatagaggacatgagaagggttccttacgcttcagcagttgggagtctaatgtatgcaatgttatgcactagacttgacatatgctatgcagtaggaattgtgagcaggtatcaggcaaacccacgacaggaatattggactgaaattaagcttattctaaaatatttgaaaaataccaggacttatgtgttggtctacaagggtggtgctttaaatcccgtaggctataccgactcagatttccaagcttgtcttgatgatagaaagtctacatctaggatgatttttactattgggagtggagcagttgtttggagaagtgctaagcaaatcgcaatatcagactctaccatggaggtcgagtacatagctgtcaccgaggttgctaaggaacttgtttggataagaaagtttttctcaggttttggtgttgttcctggaatggaaaaaccactagttttactttctgacaacactggtgct

SEQ ID NO: 338944 - DNA, 1212 bp, Cannabis indica
tcaaatgtgcttcggttgctgcaattgtttgagaatgcttcgggtcagaagattaatttcgataagtcttctatatattttagctctaatactgaagagtatatgagggactacatctgtggcttgatgggcatctttgaagctgatgatcacactacgtatttgggtttgccgaataccatgggaagaaagaagactactattctgggttttttaaaagataagttgaggaaaaggattcagagttgggaggggcgtcttctctctcaagcagggaaagaagttcttcttaaaacagttgctcaatcacttcctaattatgctatgagtgtgtttttgctgcccattgaaacttgtaaagagttggaaactcttatggctaagttttggtggaattcaaataagccacaaaataagggagtgagttggatgagctggagaagattgtgtaagcataagaatgtaggaggtcttggattccgaagcctccgtgatttcaatttggcactccttggtaaacaaggttggcggttattaactcatccttcgtctttggctacacgaatcctgaaggctcgttactttcctactggttcttttcttacagcggagattggttcgaatccgagttttgtctggcgtagtatttttgaagctagagacttggtggtggcaggggtgcgaaagagtgttggtgctggtctctcatttagcattctgacagatacttggcttgctgagatggatcgtccttatattttgtctacacacccggggttaatcggtaaaactgtttctagtcttatgaggactgatgagcgtgcttgggatgttgagattctcgaagatctatttgagactcgtgataggatggctattctttctattcctctcagctcctctgttcatgaggactcttgaactggagtttagaaaagtcggggctgtacactgtgaagagtgcctatcggtacttggacgatttaaagaatggcttttctacagataattctgctggtttttggaagaaaatctgggctctaaacatacctccaaaggagagaaattttatttggagggctgcttctaatgtgttgcctacgtgtgctcagttggttacaaaacatgtcccaattagtagcatctgtctactgtgcaacagcaacgatgaaactatttttcatgctctgttggctgctcttttgctcgctc

SEQ ID NO: 338945 - DNA, 846 bp, Cannabis indica
aatctgattatattgaaatgattttatttagggcacaaaaccgaacaccatgtgccaggcatatccttgaggcggagctccccaaaaactttaagatgccccaaatggcagcttataccgggaacttggaccctagcgatcacctgtcacggttcaactgggtaatgacggtcatgagggttagcaatgacgccaagtttttgtgcttcccgctaacattaagcgggtctgcagaagaatggttccagaaactggaagaaccatgatccgtggattgctggaataagctacaaactagcttccggagtagtttgtcaccgcaaggaaagttaatctggaggtcagggccttgactaacatcaagcagctacctacggaaacattgaagaatttcataaagaggtttaaggaagaagcctcaaaaacaaagaaagttgatgacggacagcagctagctctgcttcaagcggggattcgtaccgggacttcgttctggaacgagttacagcaagaaggggcctccaaccttcaagatttccagaaaaaagtccaaaaatacatcaacctagaagaggcccaaatagtggcgtatgggggatactaccctaccgagatagcgggggatgtacctggagctcaacttttgggaaatctaccagcagctgctccaccgataagcggcatacagtttttcgttaccccagtatataatcagggtcaggccttagcctctgcatcttctcattatgggaatgtaaagcccgcttagtttaatttggaaattagcagttaatctggattatttatgaaaattatttatagatatttaaataatttattactgtt

SEQ ID NO: 338946 - DNA, 604 bp, Cannabis indica
aagaattaaattatttgataaatcaaaaaacaaaaaattaattattctggccaaattaacaaattgaattttttttaaaaaaaataataaaaattaattatttatataaaaattttaattaaaacaattaaatattattttttttagaaaaatatttaatgttgtggcattctttgtgtgtcactatatctccaaatatattaataaaaaattaaataaaagaaagaaaaggatatagtgacactttatttgtgttgttgctatctttttagtctgataaaacttgactttatacgcctatagtgacgtgcagaaaatgaatgtaaaagggttcagtgacacatgtgaaatgtcactaaaaactgtctttccagtcactttcattagtgacgcacgttgaagtgtcactataaagttttagagttactgattagtgtcactaaaacctatttttctagtagtggttatgatttatccattgtttgattctaaataattaaagatcatctatagatgatttacatcgattagggacaaatttaccattctacccctcaatatattttatccttaaaacacttagcttcctataaatgatatttca

SEQ ID NO: 338947 - DNA, 396 bp, Cannabis indica
ccgcaggaacatcttttccatggatgaagaactcagcaaatgcagccacaaatgctccacaatcactaataaccagaaaatgaaaaaatgttaagcaattaaaaaacaacataaaataaacttaaaagaaacaactcactttttctgctaagacggaagaccaccaatctccacaactcttagaggagctttagggtcagaacctaaatcaggagcatgtgacctattcttccaaaatccaaggagatcaaaaaacaaagggagcaacacagaataagccttcattgcattcctagctgcagcattcattttggcagtcctcaaggaattataaagaaacaaaatcccctcattcaagtcaagacgaccaaaaacccaatgactttccttcctaag

SEQ ID NO: 338948 - DNA, 692 bp, Cannabis indica
aggagctaaaacaaagattgatttttgctctagtattagccgtaccatctgataaagaaaagtttgtaatttactgtgatgcatccagacaggatttggggtgtgtactgatgcaggctgatcgggtcatcacttatgcctcccgtcagctaaaggaatatgaacagcgatacctaactcacaatttagaacttgctgcggtagtgtttgctttgaagatttggcagcattatatctatagagagaaatgcgagatttataccgaccataagagcctcaaatacttctttacccagaaagatttgaatatgagacagagtcgttcattggagttggttaaggattatgactgtgaaatcctttaccatcccgtgaaggccaatgtggtggctgatgcctaagcaggaaggctcctgggcaggtaactaatatggttaagatttcacctcagttagcagatgatatggtcagatcatgcattgagtttgttgtaggcaaacttcataatttgacaatgcaatatgatttgttggaacaaattaaagttgctcaattaattgatccagaattagtgaagatccgagaaaggttttagctagtcaagctaaagattctacggtgtcagataatagaatgatgttgtataagactagggtttgtgttccaagtagtgcagaacttagaagtgagat

SEQ ID NO: 338949 - DNA, 572 bp, Cannabis indica
gcaccactgtcaactacccaagtgaaagatcgggtattacctgcaaaatttgatgcagctggtgtgatgatagcaggttcaggattggtattattgctgagttgttggctgagcaatgaaatcaattgttggcatctggtggagagatcattgttgagtgaggaagtctctgcatcagatttttcattggtgcaggaagcaagattggctttgcctttgttcttttcttgcttctttttgtcaccataaccggggggaaacccatgtagaaaataacatttgtcgaccaagtgcccaggtttgccacaattcgagcaagaagggcgtggtttcttgtttcttggtggattattagagctggaagcagcagctaaagggacttccacagaaccaagagacctttggcgttcttcttggattatcatggcaaagactcgagacaaattggggagtggttcattgagcaaaatttgagctcgaactgaagcgaaagactcatttaaaccagttaaaaactgaagaacttggttttggttatagcaatccaaaaaaaatttcatggctccacaagt

SEQ ID NO: 338950 - DNA, 1431 bp, Cannabis indica
aatcataccttgagtagagatccaaaaaccttgctgaatttcttggattgaatcaaaaataaccccaaattcctactgcttctaggtggctcgaaagagagagggaattgaagagagagaaaagagattctaagtttctctagcttttcccttaataaaataatccaacctaattaaatctaactcaaaaaatgaaaaaggaatcagatcctattgtccacaaaatgccaaaataataaataaaaggaaaagtcctttttacccctttgaccaaaccaaaagataattaatattcaagggtatttggtcatttccaaacccataagctccgataactccaaagcctaacaatgacaccccactattaaaataattctataccatacagaacgtgactctctaatggcccaacgtcgctttccactgctaccgaacacaatcacagaaaatgagaaattcaattatagcataattattacatattgaatttaaataattttcaaaacatataaatcataattcataacacaatattgtaattaaccctaattatttaataatccaaaatattgatcttaagctgtcaattatccccccgttaaaaagatttcttcccaagtggcttctttcactttactatttctccagagtactttaaccaatgctatgtttttgcatcgaatgaccttctcttttctatctagaatttgtactggttgttcgtcataagacaagtccggttgtaactccaatgcttcataactcaggatatccattggatcagatacgtacttcttcaatatcgaaacatggaatacattatggaaagctgacaatgatggaggtaaggctaaccgataagccacatgtctaaccttctcaagtatttcaaaaggtcctataaacctaggacttagtttacttttcttttcaaagcgtctgattcctttcattggtcaaatacgcaggaaaacatgatctcctggttgaaatgtaatgtcccgacacttggggtcagcataacttttctccttgctctgcgaggcaagcatctgagctttaattttgtttattgcctcatttgttttctgaactaatttagggcctaaatatttccgttctcctatttcgtcccaatgaattggggaacgaaattttctgccatagagcagctcatatggagccattcctatggtactttgataactattattgtaggagaactcaatcaaaggcaaatacttgctacacgaccctccaaaatccatgacacaagctcgtaataagtctttaagtattttgatagtttactcagactgtccgcctgtttgaggatgaaaggtcgtgctgaacttcagactagttctgtaataccctggaattaggaaatggattagcaaaaccctaactagataattatgtataattgag

SEQ ID NO: 338951 - DNA, 1191 bp, Cannabis indica
caaacagcatgaccttgtagcaatctcatgttggttacgaagctcgtatgttcctgatctgggacatgcatttttatctggttatatccagaatatgcatccataaatgacataagcttgtgcccaacagttgcatccactgactggtcaatcctgggtagtgggaaatagtcttttgggcacgccttattcagatcagaaaaatcaatacaagttcttcaagttctgttaggttttgggatgagaataagattggctatccacgagggataaaacaccacgcgtataaattcattgaataataacttgtccacttcctattttagcgccccttgcctctcagagtcaaagggtctccttttctgcctttttgttgggtagtttggatcgatatttaaatgatggcagataatactagggtcaatccctatcatatctccatggctctaggcgaactgatcctgattttcccctaagaaacttattagctgctattttaactgctcgtctaggttcttcccaatgtaaacacactttgcaagatttcctaggttgagaacaacttcttccaattcttcaatcggttttaataagtttctttcatcttgaacccaggggtcaagatcctcgtccttcttttcactttcttctgctaagatcgccattaattgatgactgacttttctatgttgtagctctatgcgatagcaatcacgagctagcatctcattgcctcgtaccactcccacaccttctggtgtttgaaacttcaaggataggtgcttgattgaactaattgcccctagtctaatcaatgtcggacgacccaataatatactgtaagccgatggtagatcgacaactagaaagtcttacataattgtggcggataggggtgcatcgcccaaggttaatgcaagctcaattatgccctaattggcaatgttgttgccagtgaagacgcaaagatttaccatgctaggcctcaatttggccttttcgagccccatcttcttcaatgtttccttattaaaggatgttcactgagctccagttatctatcaacaccctctttatccttttattggcgagctgaatagtaatcaccaatggattgacgtgaggatatctcacgttcttctcattttccttcgagaatatgaccagaggttctttagtttttaccttctt

SEQ ID NO: 338952 - DNA, 554 bp, Cannabis indica
attactagacaatctttcttccttatttgacctctaatttaagttttaccttagtattaccttcatcatcttcttttactggtggtgaccaaccagttaaaatatatttctaggccttttcattttgagatttgatgaaggtcttcatcctaactttccaataagggtagttagaatcatttagtaacggtagaccacctatagatcttccttctataggaaaacatcacacaaaattaaataataatgatggaagagaaataaaagatctcactaagagtttagtgacccgctctgataccaattcaaattctgtattttaatattaccagtttattattaaattgaattcttaattaaatgcataataataaaattggtaccgaaacagtttttctgtagctacaaaagataactctgtaactccaaaataaactagaaaaacaaatagtgcaaaaaagtaaaaacacacaaggtttttgtacgtggtttctgttagaaatattttaccaggatctagatttactaacaagtgtgtttcattaacatcctaa

SEQ ID NO: 338953 - DNA, 849 bp, Cannabis indica
aaaatttttgtacacccctacctgagatgatgagctgtttccaatttgttaaatactgaaacatcgggttgtctcagtgactggttggtttggccaatcagttggacagaactggtagtctgggcggagttattgggtataaccccacctgatgaattgccagataaggtttggtcgcctaccacttggtccacaagtggaacctgtgaccggggattggacggctgaccgttcagagtttgggcagtatgctcagcaagaatttcttccgagctacccagtgggatgctggacgcaggttgctggttagcaacttggtaggctcttcgtattagtacggtggcttgcttgttttgtcatccatggctgcctgttgagccttcagcgtttccatctttctgtccctccattcggcgatctgacgcctttgctcttcaaacgcaaggttcataacagcacggagctcttcttgatcatgatgcaaggtattagtatgaccttgcatgatcccaagagcattacggagattctggatctcagtgtcatatccaatggttgtctgaacatttgttgctgaagggattctagtgctgggagtacccagttcggctgctaaattggtgtttccagtctcttgcacaccgggtgtgatcccaggcagaggagacgtcacaccttgacccacagtaggtggttgcgtgtttggttgctcatgattagtgactggtgggacccttgcattctctgggatctacagtgtaggatccgccactagtggatccacctgatcgaccacgcctctgcgagtttgcaccaccatcttaagtgtctgattaaacttaaagaaaa

SEQ ID NO: 338954 - DNA, 1153 bp, Cannabis indica
tgtgaacttcggatccctatcatgaaataatggatttggggacaccgtgaagatgaactatttctctaacatacaattcagcatactgatcaatggaaaaattcttctgaaaaggtaaaagtgcgctgactttgtaaacctgttaactatgacccacacagagtcgtactgtcccgtggtcctaggaaatccaaccacgaagtccatggcaatgtctttccatttccattccgaaatattcagtggctgtagtaaccctgcagacctttggtgttcagcgttaacttactgacaagttaaacaccatacgacatattcagtaatatcattcttcatgtctggccaccaaaacatggccttaagatcttggtacatttttgttgttcccggatgaattgactaaggagtcatatgagactcatttaagatttctcttttaatgtcatcattcataggcacacaaacacgattcataaactatagcatttctgtgtcatccactgtaaagtcactagtctttccagctgaaaccctatcttgggatttcaataactctggatcttgcaattgtacttctttgattcgctctagaagagtagattgcagggtaatattaaacaactgcctccaaacgaactcaatcttagctcgtgtcatttcatctgctaactgcttcgaaatttgcttcacggtattcatctgactctggccttttctactcagggcatcagctacatcgttggccttcccagggtgataaagaatctcactgtcgtaatccttcaccaattctagccaacgcctctgtctcatgtttaggtctttctgggtgaagaagtatttcagacttttatgatcagtgtatatctcacatttctcaccatataagtaatgtcgccaaatctttagcacaaatactactactgcgagttctaagtcgtgagtagagtacctctactcctactcctttaactgtcaagaagcatagactattacctttccagcttgtataagaatacagcccagaccctgtctcaaggcatcacaataaacaacaaatttttccttatctgaaggaagagttaacactagagcggtaatcaagcactgcttttgttgctaaaattattaattactacgcaagtgcacgcaa

SEQ ID NO: 338955 - DNA, 552 bp, Cannabis indica
cttcttttgagacaaaatgaccgaccaagcagtttttaaacttggaatatgctttcatttttaagacaattggctgaccgggtagcctatatttccaggtttaccgtgctttgttatctttttctaatgaatattgttccttgttatgataattgtttgcacaactatgtttgttttgttttttttttcgtgcttgttatttatttttaccaatgctctatacgggtatagttgcccccaagtgactgagcaaacttttgactcttggtcacttgcatttcaaaagtatgatttttgtctgttcagttctttgggtttgagcagacctttgtacgcacttaatggtaaatttataacttgctaatagaattgacacaatttgagtttaaatagacatctttattcatttattggtcggaacatttttgttaccgtagtaacttacataaaagttattatattgatctaaatcgatctttagcttaatttaaacaaaacaaattacaataaaaagaaattgtacttttagaggtggtcatccgacctgagtac

SEQ ID NO: 338956 - DNA, 709 bp, Cannabis indica
ggatgatgacacgtggatggaaatggtttagcatttgaataaaacagctaagtctccttaaagtgcaggattaccttagacatgccttcccaagaaggcatgtaagtctcgtatgctcctagagagcaagattgcaacaaagcatctccgggtggtgtcagatcctatctgaacagccatctcgcatttaatgccgcatgggaggaggcgtattgaaactgacatacgtaataaagtctgacggcacaatccccatctgcacctactaggctatgatcaataaagtctagtgacggctactctgtgaggaatcacatcagtcaaaaaggataaaggactgcactcataaaatccctacagaacctagggattagaccatccattacctatgatatattcattaagaatgtgtggctttactgatagttacagaaacacatgtaccttaattctagggatcagcccacaaaaacactataaatacccctaaactcattaaagaagggtcaagaataagaactagaagaggaaaaatccaccaagaacattctctgtaataaagactcgtggactaaggctcattaacgccccaaccacgtaaaaatcactctcttaattccttatagctctctaaattattattattattattatattggttgccgaaaacctcggtcaacactaggtttacacagatgaaagaagtaca

SEQ ID NO: 338957 - DNA, 802 bp, Cannabis indica
ttgattttgccattattgattcataccttttattcctaaggatgctatagcaaatcccacctatagtgatctaaattgttttaactctcggtataaatataactaaaaagaaagtaggtcattacccgttatcacaagggggtcgtacctctataacaaacctgttgtttattttatttcattcttttttacgcaaacacgtggcaaacatcagattcatatgacctcactattggttgatcactttttgaggtcatcagcttccatgaaattaatttaggtatattagctagtcatgaaattaattaaaataatatttaatttagcattcaaaaaataaatatttaatttaatttaaataatttttattttaaattaattattatataattttaataaattaaatttctaaatttataataggttttaaactggaaaatgaattaatttttaatactatggtgttgcccctgattttgaccaatatacgtggaccaaccagacaaggacatgtggatcaatcaacttatgattcaaaatatttgctaagtctttatgccataaggcagcgtccgggacatagctcccggagaaggcatatggaacccccgatgctcccggaagctcgagtaacgctaaggcatctccgcggggtgtcaggtttctcctgagcaatcaagtcgcatttaatgtcgcatgggaggaagcgtgctgggactgctacacgcaataaagtctgacggcacaacctccaaccagcagctacaaagtaatgatcatttaagtctagcgacggctacac

SEQ ID NO: 338958 - DNA, 801 bp, Cannabis indica
acttgggagaaggggaggggtacagagccatggaccgaagttcggttggatagagctctaatcactcacagttggaatggtctttttcccgacgcaaggttagaaaacttggaaatatctgcttctgatcattgtcctatttggttgattcttaacttgttcaagaagatggtgactataaagaaattttggtttgaaaatgcttgggtgcgtgagcctatgtgtcgccagattgtgcatgataattgggaggttcatgagtcggatcccttaagctcaaaaatcaaatgttgtagtactgctttggccgaatgggggaaggatataacaggcattttaagcagcgaataagcaactatagtaaaataatgaagctgatgagaaatagaagggatgttgattcagttaatagatacaaggaggctcaaaactgtttatttgaagtcctggctcagaaggaggtttttttaaaacagcgatccaagcaattgtggttgaaattgggttaccaaaacactaagaatttccatgcttgtgcaagtacccggcggaaaaataatcatattttgtcactgaaaaatagaagtggagtttgggtggattgggaaaatggtttacctggtgtcgttgaagattattttagagagttgttcaccgcttcagaaattgattgggaaagggtcacgacttgtgtgcatagtcgggtgtcgactgctatgaatgagactcttgttattccggttgaagctaaggaggttcgaaaagctcttttccagatgcatccagataaatcacctggtc

SEQ ID NO: 338959 - DNA, 728 bp, Cannabis indica
acaacaatattactaaaatgaaaaaaacccaaaaaataatttacaaaaaccaaaaataaaacaatgtacattataaaaatgaattgaaactatatttataccttaaaggaggttgagattcaatgttttctcaaaaaataatggtggccggagttatacccactatttttgtatgggttcagatgacacttaaatagggaaaaaaattaaaactttttgggtttatgggattaagtatcgaaaatagaaaattttaaaacaaaaatgggctcaaatggttgacaaatgggctggtggaggtggtggttggcgagggttttctcttttctggtggtggttgtgctctctgtttttggttcgtgaggagaatgaagaagatgacatagggtttgtttatataaccctatgctgtcggttattctataacaaccggtgacatagggttacgtaaacaaaccctccgtcgtttcattccacaccgactctaaatggtataatccaattttatacctacggtttttataagaaaatcgcctctaaaggtaaatcttcaataggcagatatttttagaccctttagctttcctttttataaatgtgcgaagtatcctgttcgggctgtgtcttgcgagcagatacttggagtcgattccacgtgtcaccatcgagtgatgccacgccaaagtgcagaaattggaataacatttgccccccaagtctgtacggga

SEQ ID NO: 338960 - DNA, 705 bp, Cannabis indica
tattgctacattctttacatttcataataatcttgataatttaatctattttataaaagagtataatatctattgtcacctctaacccttacaaaatttgatcaatataaaaattaatttgattaataattatgaatctcaaccatgaatggtcgagctctactggttacagtcgagtcatataattataatttttactaatctcaactaaatatagtcgagctcaactactctcagttgagctattttttgaaaatttgattagaaattataaatttgattggctccaatcttcttatataatttatccaataacatctcaaatgtagtgctcgaatcatcgacaattatagatataactttcttatttttagcgaccacttatatgacccatgttcatccttccactttccatcgttggaacatagattactattcaagtcattcttatataaaaaatagatggttgatattaaaaatagttaaattacattgatgttaaagttataattaacaagttcaattttcaactaaattcaattaagttttatcaatgtgcccatcaaagagtttaataacaattgagtattaacaatatcttgaccatgtttggtcgagctagttgagctctattaaaattaccatatctattgaatgtcactcttttagcaaacatcgatgaaaaagtttaacaattaaaaatat

SEQ ID NO: 338961 - DNA, 797 bp, Cannabis indica
gtcctagtctgagtcccagatctagacatcaactattggtctgttccaggccccgttacccgaatctcgagtcaagatctggatcactgtcgccggtctcggtctggttctcgttcaggtcacaggtcccatttcagagtttgggttcctgatcgagattggggtgcggttctatgtcccgaccctggtgtcgtgtccctagtcgggttccatgttttggtctggttcatgttcgggttcgggtcccgagtccaggtttttgttgggatccgggtccagctcctaattagggtctaggtctgatttggagtccgggcttttgtccagttacagttctagatctaggtccaattttggttatgattccaagtacaagtcctcgttccagtcccgctcaacttgggcttttggttcaaatttttggtcatagggtacgggttcgggtccacatttgggtttgggactgtgttcaggtccgggtgtgggttggggtcattgtcagtgttcgggttcagggctgggccccaaatccaaacaccgactatggtgttttgtccaagccctgggtccagatgcggatcccaatctcgggtcccagtctggtgccatttttggtgtcgggtcacgagctgggtcctaggttcaagttcgtgtctaggttgggtactaggtcccggtcatagttctgtttcccaagttcctatccagattctgggtccaggtcccggttatcaggtgggtttgggtcccgctctaggttccggttcaagtcctagtctcggttcgggtttaggtct

SEQ ID NO: 338962 - DNA, 878 bp, Cannabis indica
atgttaattttgggaagtcttctgtcttttttagcactaatacttcatctcatttgcggcaggccatctgtgctactctgggcatccatgaagcgactgagcacagtatgtatttggggctcccgagtactgttggcaggaataaaaatgtcatcttcggttatttgcgggacaaagttcagaagcggatccagtcttgggacaataaatttctatctcgtgcaggaaaggaagttcttattaaatcagttgttcaatctcttccggcctatacaatgaatgtgtttctcattcctgttggaatttgtcaggacattgagcgagctattaccaagttctggtggaggtcaaacaagaataaaggcatacactggctaagctgggacaagctcacgaaacacaagagcaatggtggtatgggatttcgagatttaagggacttcaacttagctctactagctaagcaagggtggagacttttgacttgtgggaatagcttgatggggcaaatttacaaggctagatacttttcgtcagggtcttttctcacatcgactttggggtgtaatccgagttatatttggagaagtgtgtttgaggccaaggagttagttcgggctggggttcggcgattggtgggtgatggttctaccgttaatatcttgtctgagccttggcttcctgatgagatgaacccttacattgaatctgtccatccggggcttgtgggaaagtcggtcgactctttaatgaaagtcgggctggttgaatgggatggggaagtattagctgatgtgctcactgctagagatcaagctttggtgtggaaaattccgctaagtagtcatatgaattctgatttgtggtactggttacat

SEQ ID NO: 338963 - DNA, 1004 bp, Cannabis indica
ttccatgtttatgttagcgctccgactccattgcactaccgtgttcccaaaatgtacgtatcaccctaacccaaaagtaggcttaactactaatacaaagttaaatataaccaagcaagtgaagtagtaaggtttaaagctcgccttgttgctaaaggctatagtaaaaaaccaggtgttgatttctcacaaaccgatgcactggttgcaaaattgaacactctaaaagtttttttggctttagccgccatcaataattgggtaatccatcatattgatggtaataatgcatttctccataaggatcttcataaggaagtttacatgaaaattccccctggttataatgctccacccaatacagtttgtaaattaaataaaagcatttatggcttaaaacaagcatctcgtcaatggtatgccaaactaagctcaacattgctagaggatgggtttactcagtccttgttatagccaccaacaacactgttgctatctcacaatttactcaaaaacttgatgccaagttcaagttaagagacttaggcaaacttcgttttttccttggacttgaagttggtagaacttccaaaggtatttcggtttcacaaaggccctttactcttcgacttctcaaagatacagactatctaggagttaaactggcctccacacctatggaactcaatcttaaactgagcaaagacaaaggcgaactcctccccgatccctcagtttatcaaagcttaataggcaaactactctatcttaccatcactcgaccggaaatcacatatgttgttagtcatctcagccaattcctttcatgtcctcgggttccccatatgcaggccacaaatagaatcctccaatacctcaaacaaacccctggtcaagggctttttttttccttctgatacagcaccccatctgcaggcttacactaaaaccagcttatcacgcgacaaagtttccttctttgccgatgcagattggggcagctg

SEQ ID NO: 338964 - DNA, 710 bp, Cannabis indica
gactcaattaaagcgattgggttactattcgcctaatatggttcaagatgcaattaatttcgctaaatgttgtaagtcatgccaattacatggagatttcatccaccaaccccctcaaccactccatccttctatattgtcatggcctttcgaaacatggggaatggacgtcgttagtccttttacgccaccctcttccaaagcccataaatatattctggccatcacatattacttctccaaatgggttgaagtcgtaccactaaaagaagtatggacagaagatgtcgctgattttataaggactcacgtaatttatggatacggggttccttcaaaaattatctctgacaatgccttttatttcaaatgtaaggcaatggtcaagttgatgaacaagtacaaattcaagcacagtttctcagctagttacaacccgtcctcaaatggtcaagcagaagcatttaacaaagtgttatgcaaaatatgaagaagacagcgacaaagaataaagggattggcatgaacgcctcctagaagctttatgggcttatagaaccacggtaaggaccgcgactggttgcacaccttataacttggtgtttgggtctgaagcagttttacctttagaggttcaaataccttcattaagaattgctactcaattaacagacccagatgaaaatatgcaactccgtctagctgagctt

SEQ ID NO: 338965 - DNA, 854 bp, Cannabis indica
gggtgagggtgttcgggttggggttatcgtggtgagggttttcgtgggtgagggtggttcgggttggggttgatggtgggtgagagttgagcatttacaaatgggaggggtagttttggaaaattagtaaaatagtcatacattgcaaattttaataagtatgcatttaaaaaaaaaaaattataatgttatgtaggtatgggaattcaaatttcccagacctttctacttggccgatgtttaaatgtttaacatcactacctttcaaggaagctaagttataaaattggacacttgattttgatttttggtcctttccaattcgaattcatcatattaacgtacattttgttacatttcagatggattaagatttaggattatcatatctttataattatgatacatgtcaatcttttatggtttgcttgcattatcatcttaattaaaataattttgactgttgtataattgatactatacaaatatataatttcgtactgaaacaaattaaaagttcatatgataaaattgatcccaaaaagtgatgaaaggtcttgtggccttaattgtcaagaaggcccaacttattgcgagtgagcattttcttttagaagtagaagagtatatcattaaaggtagggctcttcagggctgttcatccgatccaatctgcatttttttggtcaaacaacatttaatccgcacttagtgcggattttattttttggatccaatccaatccgcacaatagctcaaatccaatccaatccaatccgcaaaagtacggattggatcggttattttagattggttactttttaatattacattatttaatatttatgaaaaaa

SEQ ID NO: 338966 - DNA, 664 bp, Cannabis indica
attttcttgaaaaatcacatctccactaatgagttttttgaaacctccttttccttttacccacaatctatagccctttacaccctcggggtaatccagaaacacacattttagagccctaggctctaacttgcctacactttgatgtataagctgcacatccaaaaaactctcaaattagacaagtcaggtggtttaccagtcgacctttcgtcaaaccttcaattacactagaggaacttctactgattaggtatgtagtagtgacaactgcttctccctaaaatccatttgcgagcccagcattgaaaagcatgcatctttctttgttcaatatggttctgttcattctctcagcaacaccattttgcatagcgattttcctcactgtcctgtgcctttggattctattgtcttgatagtaacttgtaaactcatcattacaaaattctaggtcgttatctgtccttagggttttcaattttctattagttaggttttcaacaagtaattatcaatgtaccaatttttgaaaagcctcatttttatgctttaatagataaacccaaactttcctagaataatcatcaacaatagataagaaataggcactacccccaaaagttagggttttctcaggaccccacaaatctgagtgaacata

SEQ ID NO: 338967 - DNA, 567 bp, Cannabis indica
gaggtgaatcaaaccttaagagggagagcagaacgagaagaggcgagggataccgcgaggcgtacagtatctcataagagatcaatgcgaggaggagataacactcgttgcagcgatgatcaagaaggcataatgcatataggaagagcaaggtctgacagctatcacgaccagtgtgacctactagaacatttgaacttgagaaaacctaatcttcgtcaacgacttggtccaaaacaaagggatttactccatttgcgaatggccgagttggagaataagttcagaaggcatcaagtcagggaactcagaaggcaaaaggggtatgattctgttgaagaatttgagttggaagccttaggatcaaagaggaaagacgattccaaaaggatgtccaaggataagaaatagaagaaatacaacaaatatatacccctttatgctgaatataccgagcttaatgaaactcgggaaaatatctacctcgcacatgtacaggaagtaatttttaacgagccaaaacctatgagacacgcgagatgcaaaagggtgttggaattattttac

SEQ ID NO: 338968 - DNA, 500 bp, Cannabis indica
agcttgtaagcacctgtgggaggaggtttccatggaacgttgttacaatttgaagcagagggaatggaattctgcattggtgctgctgcaggagcttgacaaggttgctgatatttggatatagctgatctgtaattcagcaggtagtttccagcaaaggaagacaactccatggcctttttggctttgtgtccatgtataactctgtttcgttcagaccagatagcccacaaaatacaaacaatttgttccatttcagccttagagtgaatacttgtaaggtgaaccaagtaatcccctttatgcattgaagaggctttataccaatcaaagttaaaaccagaaattctccacacagctttggcatacttacaaccaaaaagagcatgtcccacagtctcccacgcttgtttacataatgagcaagtggaatccgtaataactttccgtttgacaaggccagttgcaacaggaagggcgtcgtggaagactcgccaagc

SEQ ID NO: 338969 - DNA, 660 bp, Cannabis indica
atgatgaagaggcaagcaacaaaagagagagactttagggtttttttctctttaggttttcattaattaaagagagagagagagacaaagacgtgagaaagagagagaccatgtcttttaattatatgttttctttcttaaaaaaattaatatgttttatttttttttaacgaatatattttagttttatttaggaacaaattatatatatatattttttttgtgagataaggaataatttatatatatatacacgtaaacagttagacctttaatattatacttttaataatttttttttatttactttttctttacagctgtatttctttatttttttaaaagttaaaattttgatatagtgacgcgcaaagtatgttaggaaatatttatccagtcgcacttggcgcgtcactatagatcagtattttttaaattaataaaattaaaaaaaaataagttttactctttagtggaccctcaatatttttagtgacacacattacctgtgactaacaccatatatttggagtctaattgtgcatgtcactaaaaattactcccaactctttagtgacacgcacttttgtgtgtgtcactaaatagagtcactaaaaggccaaattgtagtagtgtgttttttgaaatgaatgaaatctt

SEQ ID NO: 338970 - DNA, 674 bp, Cannabis indica
atggggcccaccggagatcatggccactctcccatttggtcttggtggcaatccaggtttttgctgagggagtgctcctccgggcagtgcaccgggtgcttattctctgggcataccccctggtgctccctgagtaaagggcctcccactggagtcgggttaagatgcagcagtcaattcttaatccattcatacatatgacctagtcagattaggttctcaatttcgtcttttaggttcttgcattcattggtaatgtgtattttgccttgtggcaaagtattcccgctcctgcgtgtctgtaagctccatgtattgagtgtattgaggggtgtatcccctccattgtcgtttgtcctcagtttgggtgctgccctttgaggacctcttgcttcgagagctctaaggaggtcctgtcaggctggtggcaggcgcggattgagatgggacttggacattcatccccgagggattgcccatggggtcccaaagtgtgatgatgcgagatccagggcgaggctttgattatattctggggtagcggagaattgtatgtcgctcatttgaggtgtgaccggaggcagtgctcctgagagttgagctccgagtgcatatcttgatactccgatcgggtagtatcctccgtaagccactatttgggcttcttccaagtt

SEQ ID NO: 338971 - DNA, 621 bp, Cannabis indica
aattcttcaataaaaattggattgggagtcttagaatcaatacctcaatgagaatcctcctttaatcatcctccattgttgaaaacttgaagttcttgagaaagaagaagatgaataagggttttgaaatttttgggtgaggttttagggatttggggttggttttgagtgggaatgagtatttgatgagagaaataagggtttatgatgatttaggatgaaagtttatggttagatttgatagaatggggttttgaatgggatttgaagaagaaaaatagtgtagaagataggtgttcggcgtggagaggttagggattttgaatggggtttgattttgaaatgttagggatttggcctttttaaagaattctgaccattctcgccgcggcgagatatagcctcgccgcggccaaaatacgtgaaaaaaggaaccgttctgtaagccttaaatggccgcggccatatgtcccctcgccgcggccagaattcgtgaaaataaaaggggttctgtaagccttaaatggccgcggccagacgacccctcgccgcggccactgggcaattcctttttttttttcacaaaactggacgaaaacgaaaaagaaaaataacagtaaa

SEQ ID NO: 338972 - DNA, 2288 bp, Cannabis indica
aagagaaggagattcagactcagatccatgtgatactctgctacagacaagatacaagggttagagatctgagtcgaaagagccattataattccgctgcacccactgtaaggtttctgaaaatttatgtatttacattgttttagagattcatatttaggatgttaaatagcatacatagttgtaaatctagatcatggtaaaacatattcctacataaccgtcatccccttgggcaaaacagatgaagatccagcgatgaatacctctcctattataaatggtcagccgtcaaacccccggtcacagattccacctgtgggccaagtagtaggtgggcagaccttgtctagtaattcatcaggagaagttatacccaataattccaaccaagttaatggtttcgctcaacaaattggccaaatcaatcagtcgctgaggcagccaggtgttttcgtatttgatagattggggatgactcatgatctaaggaatgatctgaacaggaggagatgagtggacgatcagcttgatgcgccaatcgtgcaactagaaacctatgctctaaatcccgctccaaaagatgctgatgtgactcaggtcggccaagaggccgaacaagttagtccagtcgtgcaggcatagctggacgaactaaaaaatatattccaaggcctggccggtcagaggaacaacgatctcgagttggaccaagcgcgtggaacccctttctcccccgagattatcctggaattaccccagaagtttaagatgccaacctggaagatgtatactacgaaggaagatcccttatcccaccttaagtatttcgagatgcaaatggacctgcaaggagtacgaggtgatgcatgttgcagagtttttcctaccaccctctcagaagccgcccaacaatagtatttcaagttggcgcccggaaagttcaactcatggaaggccttctccttggagttccatgcacaattctcctcctctcgccaactttcattacatctaggagatgtggtcgaagtaaagcaaagatcaggagagcctctccgagcctacatcagcagattcatgatggaggcgactaaggttgcacgggtaactgaggacaaaaaggtgtctgcgatattggggggtattgaagtccttggcgaactttggaacgacataaggaagaacggacgagtagactcgatgagtgattctcttgaccgcgtagaaggttttatcaagcttgaagaggccattcagcgagcaaaaggtgaacaaaagcctagccagtcaaaagctccttctactgggacatccgtccaactcccccattttttgagcaatacaagctcaagtggtaaacggtccaacaacaataataggcaagggaatgggaaaagggaaagtttgctggcaagaccaaacaagctcccgaggagaattctgtgaagtatactgcatttaccgtcctaatggaggacatagaaagtaattatatggctactcagtcattagccccgtacaagaagcctgcacccatgatgaaaaatgtcagcaagagagatatgaccaagttttttcgttttcatggggattacgaccatgatactaatgaatgcaacaatctgaagtggtaaatcgaattcctgataaggaaaaataatctgcacgtacagaagtatgtaaaggccgatcagaaccagagaggggataacacccaagacttgctaccaccaccagtagatggacatctacaagtcatcattggaggaccgcacataacaggagatttaggcaaagcccgggagaggtatgcccaaacagtacagcacgagcaagtttaagtagtcctgactgtagaagagaggaagctgaagatcccacgggaagaggaacccaccataacatttaatgatgaagatgttaacaacattagattcccacacaacgaaccgttggtcgtggaagtccagatagccagcaagatggtggcacgaaccatgatagataatggagcttcttctaacatctcattcaagacaacatacgaaaagatgggactctaactcaaagatttaaccccctgtcttcagcccgtgtatggcttctgcggcgaaggagtcgcaccactagggcaaattcgcctacccctcactgttgggaaagctccaacaagcataactataatggcacaatttttggtattggacgttgcatcaacattcaacgtcatattaggccgaccagctttgtatgacttaaaggctgttacatcgatattccattca

SEQ ID NO: 338973 - DNA, 593 bp, Cannabis indica
aagtggaaaacaatctttggggcacgccttgttgaggtcggtgaagatacatactcgtcattttttgttagccttgggtaccaatacaaggttagctacccccacgttgagtagaaagcctcgatgatgaagttgttgttgcgcagcttttctacctcttcttttcgtgcttgagcccgttccttgtccaacagtcttcttttttgttgaacagaccagaagtttggatcgatatttaaggcgtgtgaaattatacaaggatcgataccgaccaagtcctcatgtgaccaggcaaaaatgtctagattttctcttagaaattttatcagggatgattttacttcaagcaacaaaccttttccaattttaagtttcctggtcggaacacttggatcaatttctatttcttctaattcttccacctgcccaatgtttgtgtttggcttcccaagtcagggatgtacatcttcgtcctcgccttgggcggtttcctatttggcaatgctcttcaccttgtccgaactctgaccagaggattctccttttttggccttggttagggcaaggttgtaacattcccgtacaacttgttg

SEQ ID NO: 338974 - DNA, 1215 bp, Cannabis indica
cgtaccgccaacataacttagaatgatgacctcgccctactcatttgctatatgggggatcgacctaattggggcattgcccactgagtgaggaggagctaagtatgcagtggtagcaatcgacttcttcactaaatggacggaggccgagcctctcgtctccataacctgcaagaaagtccttgactctgtcctcaagaacattatatgtaggtttagaattcccatgaagatagtatccgataatggaacccaatttgatggtgacttgttcaccgaattctgcgagatgaataaaattatcaaaagcttctcgtcagtatccaggcctcaggaaaatgaacaagtgtaagccattaataaaaccctaaaggatactatcaagaagaagttagacgttgccaaaggcagatgggttgacgagctatctcaggtggtctgggcccacagaactaccgagaaaaatagccacgggggacactccttcctcgcttgcatttggctcgaaagaaatgatgcctattgaagtgaatatattgactcatagaagagagttttatactcaagaagaaaaccaagaacttttaaaattctccttggatctacttgagaaaaaaacgaactgagtcgtaaatcaccaacgccgcataccaacaccaagttacaagatacttcaacaaaaaagtcaagaaaagactattcaatgttggagacttggtgctaagacaagtctttccaaatacgagagacgcatcaacaagagtgtttaacccgaactaagagggtccatatgttatcaaagcagtagttggagtcgaagtctatgaattggctcgacttgatggcttgctaataaagaactactggaacatagaacatttgtgaccctactatcaataaataaatgatgtaactcgaattactgatgtaaactttaaacttcaattatgaataaagataatcatttatattaagtaattacaaagtttcattctttaaaaattacttaaggggcatttacgtatgactaaccgaaattcatctggaaatatattgtataatgaaaacccgtcatttcaattttttttttttactattcaaaggttcttgactaaacccccttaaacgaaagtggagttgaactgttataactgcctgaccaaacctttttgtaggagaaaagggtcggaatcgttataacaccttgatcaaacc

SEQ ID NO: 338975 - DNA, 774 bp, Cannabis indica
ggtccccaagtcgaggatccacatcttcattcccgccttgggaagttccctacatagaaacgttttttcccttgtcgtgctctggttggaggatacttccttcttagccttggccactacaacgttataacattcccaatcaatctgctggtttcctcttagacaccctaccccattctacgttggaaacttcatgcatgagtggaatatagatgtgacagcctttaagtcatacaaggccggccatcctagcattacgttaaaagttgaaggaacatctaataacaggaactgtggcatgatagtcatgctcgtcggagcttgtcccatagtgaggggtagacaaatttgtcctagaggtgcgactccatgaccagaccagagaaaccatagacaggcaggagacatggggttacatccttgagctggagtcccatcttttcataagaagttttgaacaagaatattggaagaggctccattatcaatcatggttctggccaccattttattggctatctagacttccacgaccagcgggtcattgtgcggaaatttaattttaacagcgtcttcatcgttgaaggttatggtaggccgtcctgctcgtggaattttgtgttgggattttatgccctaaataaaacccattacaatctaatctggctttttatcagtaaaagattagaagtcatttatgtttacatgtttattgtaacgtccccgcttcaagcctccattgggcccttacacccacggaatgaatggctctta

SEQ ID NO: 338976 - DNA, 676 bp, Cannabis indica
agatcctggtaaaataaattccaacaccttcatcccacacaagattgacttatgatcaagaagctaatcatgctcccctagcagaatcacttgatgaaattgaagaaaaatgagcctcaacaaacctaaagttagtaacccatcaacaaaaggtggctcggtacttcaacaagcaagtgagggcaaggaaatcttttgtgggagatatggtcctcagaagactattcctgaacacgaaagacaacacggctggtgtgcttaaaccaaactggcaaggaccgtatcagatatttgaagttttaaaatcaggggcatacaaacttgggtgatatgacgaaaatatgaatctcgttctaatactaaggtattgatatggggaacatttgagaaagtattatcagtaaatgtaccaggtcggatgaccactttaagtacaccaagaaagaacatttacttttaagtagatggccttctagacggatcccgcccaagggttttgatgaaataattaagtactcaggtcggatgaccacctttaaaagtataatttctttttataagtgcaatttttttatgtttaaatttagataatgatcatattagatcatataatagcttttatgaatgtaagttactacggtaataaaactattctgaccaatgaatgaataaagat

SEQ ID NO: 338977 - DNA, 890 bp, Cannabis indica
aaaagagctttttaataattacatagggtattttcgtcaaaatattttcttggaaaaaacgcatcctttgaatctggcggttgtacggtttcgagagtcattatgaattgtctcttcatattctgcccttcttccaactgtttgatttctcaatctttagttttcttgtcattggactttgtgtataaagggcagctcaagcttgtcatttttcacaaacctctggctttttggtgagatccattttcataatggatcatttctttcctgctagaatgtcccttctgagttcagaagtccatcctccgaaactcatcttacccagacgcaccaaccaatttccattcgttcctaaagacttcaagcctcaactggagtcgaaaacgatggattccaaggctgaggagcttccgagcaatccaaaccaggggaaccttgtagcctgccatggtcaatcctcacaagtgatccctgacggtatagatcttgtgagtgatcttaaaggtcctcctcagactgataaagaattccggaggaaggttggaatggttgcagatgaacttctattagagaatccagcaacccaggacccaaacctacaccagaagatctttgcaccatcctctttctggtatcgaggaatttcctgagggtgggaaagagatctcggcttcaagaaatgggatctgatgatgaggagaataaggtctgtgtggagatcaaggctctctacgtacagatggtctttctcgacctacgtgtagccggtctttctccaagctatgtgtagacggtctttctctcttatccttggttttggaagatgacttaatggtttgcccctagtggcatttttgcaaagacaagtttataacccaacttgggttttt

SEQ ID NO: 338978 - DNA, 751 bp, Cannabis indica
aatatcctctgcctagaattgacgatttgtttgatcaacttcagggcaagacggtaatctctaagattgacctgaggtcaggatatcatcagttgagaatccgagaagaggatattctgaagacagccttccgaaccaggtatggtcattatgagttcctgatcatgtcattcgggttaatgaatgcaccgacagcatttatggatctcatgaatagagtattcaaggatttcctcgataattttgtaattgtatttatcgatgatatccttgtgtactctcggtcagaagcagaacacgaacagcatcttcgaatggttctgcaacgactcagagatcataaactttatgcgacgttcaaaaaaaaatttgagttttggctatcacaagtgtctttcctgaggcatattgttggaagagacggaattatggtggatccagggaagattgaagcagtgaaaaattggcctacacctaaaacagtcactaaagttcaaagttttctcggtttagcgggttattatcggcattttgtggaaggtttttccaagattgcagtgccatggaccgagttaacttggaagaaccagcggtttatatggtcagataagtgtgagaaaggttttcaagagctgaagcaacgattgattacaactcctgtattagccttgccatcggatcaagaaaagtttgtggtgtattgcgatgcatcaaggtagggtttgggctgtgtgttaatgcaggcagataa

SEQ ID NO: 338979 - DNA, 752 bp, Cannabis indica
tttgttatttttctattgctttaagtcaattaagtcaaggagaacaatctacactaagccatttcgcccagcccactaattttatcggtgacacttttgtagcaccgccccttttcagtgacttttcggtgatattgtgcattgttttaacaaatggttagcatgggtgtgatctactcgtcgaggtgttttggtgactttctagcaatatcgtgcactgcttcgaaaaatggttggtatgggtgtgatctacttgttgaggtgatcgttttgatatatactacccttattttcagcgacgtttctagtacactgatttctactaccaccaatagttaatgtgcaccgcttaagtgaggttttaaaactctaaaatttaaatatagtcatattatatgtcgttagactcggttatagatgtagaatgcaatgatgataattatttatctatttgatgggagtgatatctatgattagactaaagaattggagttcaggacttgagagcttaggatcatctttttgaaaaaagttcaacgactcgggagaggtagggactcaagttgattttagaattgattttatatgtgttgaatattattagacatattccaatttttatgatttttaatttgtttgaaaaattgaaaacttaatccccatatttttctagactgttctggggcagtgagtgccaaatagatttttgtacaaatatttatataggttatgatttttaagtttattcaaaa

SEQ ID NO: 338980 - DNA, 541 bp, Cannabis indica
atacattatttaatattttgttaatttgtataaatctattgattttgtttggaaataaattttctattgagtgatatcacaattttgtctttgtattaggtactaaatgatgataatgctgttaatgaggcacaatctcctcttgatgaaaatcctatagataatagtacggataagggtaagggtaagggtgctaaaaaaaggggtagacctcctactgtgcctattcctaatcctaagaagaagggaaagtctcatgtttgacttcatttcactaaggaagacattccttcccgagctacagaggatgatgatgaagaacctcaacaacctcgtgttcctaagtctatatgcaactattgtgggagtgattttcattgtgacactaaaaaacatgggactagtgatctatggagtcatttgagaaaagtgtgtgagcttagtccactcaaaaattaagaggaaaaatagaagattttaagtttcgagcctcttaagggtggcaaggagggggatggccagttagtagttgtggcctata

SEQ ID NO: 338981 - DNA, 766 bp, Cannabis indica
aaagagttatttaaatatgccataaaaaactaaacacttgaaaaaatcccataattcatgtaatttcttctatttgtaattattttgaactttttgccctttttattaagctttttttctttacatccttttaaattgcactctgttggtccagagaaatgaatcttcaccttaatcacatgattgataatatttgatatattttattatttgtgctttctcttctaataggctgcctaagcctatttgctcgttttcttgtcaagatgtgttaatcttcacatattttacaatttataatgtaaaataattatataatatccacatttcattaagaaaaaatacaatagagaatgtaattttaagagtaatattaaaagattccaacaagtacatcaaatttagtgtcacactattactaaatttagtgtcaaaaataattttcactctaactacaatactaaaaaaaaaaattcttattattattttaattcttaataaaataaaaaaaaataatattatattaattaactaaaatcaccacaattaatatatctaaataaaagagtcacaagtgcaatagacaatttgaattttatttttggcttgttaaatttttttaaaatttttcaaaattttacaagatgttttacataattataatgtacacgaccatgcaaaaaatatactaaagaagtctctcgaatgtcgaaacaggtaagagtatatgagtgtattacttttaaagaggtacattattttcggc

SEQ ID NO: 338982 - DNA, 593 bp, Cannabis indica
actaaatggtaggctttaactaaaaactctaagaacacaaataacattttgagatcgaacctaaccatatcaggattaagatcttttgatctaagatcaaccagtgacattaacttagaaagatacaacggtaagattataatatcattaccaagatcaatatcagtcccagtccaatgtatactccacacatttgatactagcatactttgccaatgtcctggaaaaaacataacacttatccaaggtgtacgtaagctttatcgctaactatcacatcagtgtaaatccaatacactgatgaatcatgggacattatcttttaaagtatataatgacaattaccttccactgtgttgacgttgtaattgtgaataactatatgttctagatttaagagaaattgtatattaaaccataaacatgaaaaatacatgtaaacataaatgacttctaatcttctattgatgacaaataagattacattgaaatgaattttatctagggcataaaatcccaacgcaatattggtccaatccgtacatccgatactggtaaactttgccaatgacctagaaaggacataacactta

SEQ ID NO: 338983 - DNA, 691 bp, Cannabis indica
ctcctattaaaaagacacgtgtattcactttcctcgaggagagctgagatgtcgatgagagacccctcgaatgtgaacctcgcctgaactgaattgagcgagatgatgcgaacatgaccgagtctaatcgcattcgtatggctcgcataatctaggaccaaggaacggtttcaaactcgtatgtaccagggtatatgcaagtatccccaagttcctcctgcgaaaacatagaaatcgattctctgctctgcgagctggtccagttgacccaacagccttgataaactgatacagactcgcatgtcttattttatcagctcattacgagatgtctgtataagcgacttcaagaggacacgaagatcctagactcgactagtctcgaatgcatttcaagcatgcgagcttatgtaagaatgtgaacatccaactcgcactatagaagtcacatacgttgctgtatttagtgaattaaactggagactgttcttcatttattatgtttactttttttagtttagttattgtaattcaatgtacgaacggattgataatgaattcaatctttgtgtaaatgaatggacacttgctttgcatataaaggggtgatccaccacggaatagacaaggcagaaatccttgcagcagtggactaagcagaccgtgatctgactgaaccactatattctct

SEQ ID NO: 338984 - DNA, 741 bp, Cannabis indica
agcctaacaaactcccacttgcactaatataaaactaaaagtgcatttcaaataatctcaacatcttgatatccagatcaagtgtagtatgtagtattctctttgtaataggatttgacaagttgtattcaatacaaactctctccaccgttacatatccttaatcacaaaatccttgatattgtgtgttatatccaaaattcggctgtacttcaaagagtgacatgtgtcgaacaaatggaatatgaaccaccagatataataacaattatgtcattaaatgcaaaatggaataactcattaaatatagaattaatagagtacattcataactcgccgattgtatagtcttaggcgagacaaggatacacaaactatcaattcatatattgacaagaaactatcttgcctcgtaaggcctaatctcgagggaactatggacaatgcatagtgagacatctaccttgctacatgtaaggaagtcttgacaaggcgagtcagctgttgaaacactcaccgtataatcgacattataataactaactgtaccaacttgggagcatgtaggacatgattgtccagtctgcgaggccttatggtcaaagagcagttcttaagttttctcggtacattggtgctcatgccattgctggaaggcatatgaataaaccaagtcaatattgtgttaggaaaattttaccaggatctagatttactaacaagtatgttgaattaacatcc

SEQ ID NO: 338985 - DNA, 549 bp, Cannabis indica
cttgtcatagaatatttgattgttaggggatagactttatgggaccatttctgttttcttttggttacctttacatccttctcactgtggattatgtttcaaaatgggtcgaggcggtaccatgtcaaaataatgataacgctacagctgtgaaatttttaaatgaaaatgtgttatctaggtttggtacccctcgcgccatcattagtgatcaaggcactcatttctgcagccgatcttttgaggctcttatgcgaaagtacggtgtacttcacaaagttgcaaatgcctatcatccaaaaaccaatggtcaagcagagctagctaatagggagataaaaaacaattcttgaaaagacggtaaatccagaccgaaaagattggtcaacacgtcttcaagacgcactttgggcataccacacagcttaaaaatcccctccttgggatgtctccctatcggcttgtctatggaaaagcatgtcatttacctatcgaacttaagcacaaagcttattgggttatcaaggccctgaacttcgatttaagtga

SEQ ID NO: 338986 - DNA, 978 bp, Cannabis indica
ataattaatcataattaactgataatttccaaattaactaaacgggctttacaatacaagggttagagatctgaggggaatgagtcatttaattccgctgcacccaatgtaaggtatcttgaactttatatgtgtttaaattccattgttttagaaattcatatttaggatgttaaataacatacatggtagtaaatctaaatattggtaaaataatccccaacacttaagacttaccattttcagaactaggttagacttttaataatttagattaaatatgtattttctttgatctcacgcaattctcatggttcaatattgttcttcataatcttcacaccacaataaagattcgtgcatttacgaattgataaatgtaaaacatccctaacatctggtatacgtccctaacatatctgcactcttcaattgggactgggatttcagcgtcctcttgcaggatttccgaaaccataatccgggcatgtgaatcatcgtagtcctggcagtgaactttgattataccaacatgctcgtacaaataccctcgggccacaatgttgtcgatgttgtcagagcagagatgtacttgctgattaagggccgcatggtcatcgaaattgtacaggataccttggtcgttgagggaaataaactcctcagcataagtttgtggttgtacctcatcctgaggagcgtatggttgtggaacatacgcctcaccagccacctctccttcttcctcttgttcggcagcgtttctctgctgcttaagggattggacttcggcttttaatttttcaatctccttcgcttgccgagccacaacatcagacacttcccttttcttcctgccgaacagttgagatgccctggtcaggaacctacaaatcataaaatgcaaattagctacgattttatttgtgtaactaaataaataacatttcaagtaatagcatacccagcagccctgac

SEQ ID NO: 338987 - DNA, 549 bp, Cannabis indica
agacaattggtcaagttgttggggcatctattgcatggccaacggctatttctggttatttgtttttttttttttttttattatatatatatagcttaagaataattgttttctattaatttaatatcattttatgcgtagaaatatttacatgttcaatatttttttacagattccattggcatcagacaaaccattttatgattcgatggtgtgactaattaattgttatataagtattctaaactcttgtaaatattttttttcgttaatgtttatttcaatgtctttgtaactgaagtttcataatactggtgttgtttgtgttgtatttgtttatttttatgtttatcaaagaatactattgcattgttggttgtttaaaaaatgcattgacattttattttgggacatatgtaatatttataatttacaatatatatttttgttttgataatagaataaatttgtttatatataataaggtaaaagttgtgtaaatatattttaaataatttatatctataaaattgaaaatggaaatagttt

SEQ ID NO: 338988 - DNA, 898 bp, Cannabis indica
gcttacgataattctaggatctacaaagcaaagctgaaagttgctcacgataaacagatcctaagaaaacattttgagccgaatcaaaaagtacatttgtacgattctcgtttgcatctccaccccggtaagttgagatcgaggtggactggtccatatgtggtgaaacaagtattccccaacggttctgttgaagtcaaggacccaaccgatgggagaatttttcgagtcaatggccagagactgaaacattacattgagagtgtgagccttgttgaagaggtccttcttgaggacccagattatacactctgaatgtttatttttcctatctatatgctatagtattttattttatctttatgtgtttattttattttccattttttatgttgttttgagttgccattttcaggttatctccgctctcgccccatgcatatcgtcaatcaggtgtactcttttccatatctttttcatttcatattttgtgacattgaggacattgtctaattttgagttgggggtagtgagctctgttgagcattcatttggaaaattttaattgtcttgttgaatttttaagtcaatttttttcaaaattttctgagcatgattgtaaaatacggtttgagtcaaatttttgctatgttttgttaccaagttgtgattttcagagttattttatgcactttccaaacttgtgaaaaaattgttgttaacacatatagttgagaaaaattttgagtgtaaagtttttcattttttggtgagttatgagagttgagaaaacaacttttagaacttttattggtcatttgagttggcaaaattgaacttttagaattaaggccaagtctaccaccctcttatacagagtgtcatgggatgtggtaat

SEQ ID NO: 338989 - DNA, 506 bp, Cannabis indica
aaaattgaaaatggaaatagtttccaaaaaaaaaaaaaaaaaatgaatttttttttgaacaatgccaaatgacacttttatatcaattattaatacattttttttttatcaaattagccaaattatcgtttcaaatatatatatacaaatttataatttagtaacatttttgttaaatgtcactaatattttagtaacaattttaaaatgtcattaaaattattttaaatataaaaaataaatatataaattcattattagtgacatttgcaaatgtaattaattattattttagtcacatttgaaatgttattaaagtaaactatttagtaacactttatctatcctcacattgctatatcttacatttcttataaatgttacaaaagctataaatgttactaaaattatataattgtgacattttgaagtgttattatacatcatttttggtgtagtatagacccatggtccccatactagttgaggccatactgcttgtaaga

SEQ ID NO: 338990 - DNA, 973 bp, Cannabis indica
tgggtgtaacttgaatgcctagacagtaattgatgtcaccaaggtccttgagggaaaactgattattcagttgagtaataagcaaggatatttcatttgaatgtcgtcaacatagacgagtatgtaggtggtgtgattggttgtaaacctgataaagagtgaggcatctgctttggaactgtgaaacccgtagtgtaggagagaggttttcaatttgtcaaaccaggcacggggagcttattttaacccgtaaatggccttgtgaagtttacataccaagttgggaccttgctcttcgaacccaggcggttgttgcatgtagacttcttcaatcaagtcgccattcaagaatgcgttattcacatctagttgtttgatgtcccaatgattatagagagcaatggtgatgataattcttatagttggagattttacgacagggctaaatgtttcaaaaaaatcaaaaccatactcttgatgaaatccttttgctaccaagcgtgctttgagtttggaaacactaccatcagcattttcttttattttgtatacccatttgcaccctatagctcttttcccaggtggcagaggaacaactgtgtaggtaccatttttcttgagcgccactatttccacattcatggctccattccatttcgggtctttcatggcttcttgcagtgtcaatggtgttttagaactgatgtaaactttcggtttgtacacctgcttttgcacgtgtgaccatagggtgagtgttgcttgaaagttgagatgttgctggtggattcactgggggtgctgctggttctgtatgtgaagaattggtgccaggatgagtaataggtgatggattagaaacggggctggtggtattggctggctgtggttggttattagttgtgtgatggggttgaacaacaggtacaggtacatatggggaattgtattgggaggaagctggtgtggagtt

SEQ ID NO: 338991 - DNA, 494 bp, Cannabis indica
gtatatgctatattacatacactacattatagtctaacatatataactcccacatcaagatttgttgtgaaaattatcagtaactcaaaaaattgatacctataaaaagaaaagctttgttgttgatcctcaagtaaatcccgcagtctactctatgttgttgtcggcccacaccaatacagcgatacctttttgttcactacaatacatattcaagtatgaagtaatatgaatgagtaaattagaataagatgatcaaaattagaaactgatatacaaatatttgaaaagaattaaatagaaataatatgaggggaactatatttttttaattttccttctcgaatagaataatattgaactctatataaagatattgaaaaataaactaatggtagttatagatattattttctaaaatacatatttgtatatatatatatatttatattataataatcaattttttttatatatatatattaattgtatta

SEQ ID NO: 338992 - DNA, 378 bp, Cannabis indica
aagtaatatgaatgaataaattagaataagacgatcaaaattagaaaatacaaatatttgaaaagaattgaaaagaaataatatgaagggagctatatttttgtattttttcttctcgaatagaataatattgaactttatataaagactagcaaaaaattacgtgcgaggcacatatactaaattttatgttagtttttttctacattattaaaaagtgatacaattaaaaataaaatatatatattattagttattaggttcaacatcattaccctgtgttcatttttaagaaaaaaatatatatttatgaaataataatttgttgcaacgggtgtacaggaaaaattcggaaaatatagcatttattagtagagt

SEQ ID NO: 338993 - DNA, 583 bp, Cannabis indica
aaaaattaagataaaacttaaaattttctaattttaaccattcatgagtaatacccattaaaagtgcacccacatatatatatacattagagttatttatatagacataatttaaaaaatttataaacacctccaagagtgaaactagtatatatagggaaatttgaatatttatgcatttattgaactaaaattggtccattaaaccaaaactattcaacatttgtagaataggttaatttttactaaaacccattttacccctctcattccaaaaagtggctctctctctcttctttccctctctcttctttccctctctctttctttctctcgaagtctctcgaacccactgaacccaccaccacgacaaaaatctccaccgaaccaaccatttgagcatcactcgacccaccatctgaggacgaagacccattccatccaccacccagtcgacccaccacgaagacgaacaaccaccaaggtaagatttccccctgtggtatttttgaatatttttcttattgatttagggttaaaatattatttattgaaagatttagggtctgatatgtgcattttg

SEQ ID NO: 338994 - DNA, 769 bp, Cannabis indica
atacaatactccaacatatgaaattagtcaatgctacattattgtttttctaaaattaaaatgcaacttgtattattaatgtattaagtaatacaagaaataaacaagaaatatatcacataattagaaactttacagaagtattacaaaagaaaagttccataagtcaatgctaaattttatctataatctaaatatatggcattttcactatgtatagaaataagcaacttcagctgttgtttggtttcatgaaaagggtcaaaaagtgcattcatctcactttatgttgccttgtttaaaaagatgaacatcaaagacagtatgaagacaagaaaaacatgccacaaacaagtatatatacctttgctaacaagcatacaagcagcacgagactcaaaatgtgccacaaacaagatatatgataccttgactaacaatgctacactagtaactgaacagcaatacaatcacactatcaagctaaaacaatcagaagaccaagcatcaaatagagttttatatatagtacagaaagattaatagaaaatgcaaagtaccaaggcaactcacaacttccttagaagtatagtgtggcttcctctatattacaattggctgcaatctcatgggagaaatcagcaccaaatcagcaatgacttccaaagatgaatgcacccgagatagaacatggctctttcttgaaatacctcgcggttttttcaaaaactctatcattgaagaaaggggtgtgaaatttccaacaacc

SEQ ID NO: 338995 - DNA, 687 bp, Cannabis indica
ttttggtttgttcctcaatgaatacatggatggtattttcaagggagttcccttgttgttgagcattgtattggggtgcatgatatcctttggaggttgagcttgattctcatttctccattctcctccagaaattttgagcttggttgggatcatctctccaactaaaattcgagtggtttctccaactagggttgtatgcatgggagaatggcttgttatattgccctaaggtattgcattgttcctcatgaaccccccctcatttctttgtaaactaagcagtccttagctagatgctcattttctcaacaaacgaaacaaggttcaagtggtctggtttgtgcttgggcaaccatgtgccctttttggccatctttatttgaaagaatttcaacttgctttctcaaagcttcgacttgggcctttatcttgtcctcttcccgcaattggtaaatcccagctgatcgatttctgttggtgctttcagcagcacttggattagtccccgtgtgagattttttagcaagcccaatgagaaactcaagagcttcttcaggctcatattgcaggaattcaccattacacatcatctccacgaactgacgctcacgacctgtgaggccttcgtagaagtagctcacgattctccagctttcatacccatgatgtggacactgacttaag

SEQ ID NO: 338996 - DNA, 1004 bp, Cannabis indica
atgtgaaaagcctaaagaatgacgtacatacatttactggaggtaaagaaggctatgatcttatgctagaaagtcaatcatgtgattttgcaaaaagtggcattggctatgatcctagtagaaaataaaagtttttgagaaatttcgttgtaaaatcatctagtctacgaacttatttttgtagtaatcaacaagaaagagtcaaagcttatggttcttggatagtggatgttcaaagcatatgatcggtggcccattaagattttcaagctttaagagcgaggaaagtggctttgtcacttttaaagacaattcaaaagagaaaatcttggaaattggtgatattggtaatgtatattgtgcatgtatcaaaaatatgcttcttgttgatgatcttaaacataacttgcttagtattagtcaattagtatttttcttgaagaaaggaaggataatgtgtatgttattgatgttgactcctttgatagcaaaaataattgtttaacagttatgaatgataactcttgggttatggcataggaaattaggatatgctagtataaattctatttcaaaattggttagaaaagatcttgatattggtttgccatctatcccttttgtcaaagataaactttgtgatgtatgccaatttggaaaacaaattaaccactacacctttgcaattgcttcatattgattcatttggtccttctataattactagtcttggtggtaaatactatgcatttgtgattactgatgattttttgagatttacatgggttattttcttgacactcaaaagttatactttggaaaatcttgttaaattttgcatgggtgtgcaatatgaaaaaggctattctattacctccataatgagtgatcatggtggtgagtttgacaatgataccttagaattattttgtgatgaacatgattttaaccataactttttggctccaagaactttaccacaaaatggagttgtcaaaaggaag

SEQ ID NO: 338997 - DNA, 1126 bp, Cannabis indica
aagagacatctgaaaggtattcgtaaaggttagcattgataccagttgaccaaaggaagtcagaagtcatccatgtagaggaacccgtatgacctcaatgacgattatactttttctgacacaggatgagatcatgccctctgtgtcagaccatagtaatgtgtacgcctcgcctctgaacatacccttttgcttgacagtttgtcaaggcatctcctttgcaaggtgaatccttttggcgacacatgtccaagttcgagcatttattctacaaggtgaaaccttttggcaacacgtgtcttgtaccatttgtggtcttctattgtctagttacttcctcgcatgagtacaaggatcttcttaggaacccaacagtcagattattgcatgtattttatcccaatagtgggtttactgtaaaaatcctaggcgggtgatgggcatgtacatacccacacttcagcctataaatacccttcgattcccatacaagggggatcgaaaaaaataggtagtcgaagctttgtcaaatttactataagcttttctctttcttaggagaaactaagagtacagagctaagttctcttgcaaataccactgtaaaaaatatcacacaagcctcttaaggtcaataatactgactcgtggactagggtttgttaacacctaaaccacgtaaaaaaccttcaccttctttattattacatttattatttgtttccaaaaatctcgataaacagcatcacataaccctatcaaaactagtttagaacataattttaagtgcaaaccaaagtccaaactttctctcagatatttaagtatcttcttaaccatttttagacgagactttagtggattgtgcatgaattgagatattttattcacagcataaactatctctggcctagtgatgatagcatattgtaatacaccaactatgctttgatactgatagggatcatcaatatgatcactattaaaagataacaaattttgataatttttctccaccagtcctaagagttggaagagaatttacaaattttatcttgagcatacacaaatatgatacacattatcccacaaatcactttaaataattatggtgccgtttgataac

SEQ ID NO: 338998 - DNA, 504 bp, Cannabis indica
gcattaaatcattttcatttttcttatgaagaaaaaatgtttctacatattaacaatcaattcacagttaacaaccacttaattgaggaatataaaaaattaagggcacatttggtacgtcgtattgtattgtattgtgttggattgtattgtattagtattatttaatataatactatgtttggtattgacttgtattaatgtattgtattgtattgtattagtattatttaatctaggtcccgggttcgggtctgggtcctagctcggggttcgggaccaggtttgggtccgggttggattctgggtctgggttcgggtcccgagtccgggtcctggtccgggtcctggtccgggtccgtgttcgaggtccaggtcgggtccgggttagggtccaagtctggggtctaggatcgaatccgggtttgggttcgggtccgggtctgggttcgggtcccaggtccggattggagattggtgttgatcccgaatcctttgtaaata

SEQ ID NO: 338999 - DNA, 723 bp, Cannabis indica
agcaaaaaacagcagtccatctctctttccactgcagaagcagtatatattgcagctggtagctgctgcactcaattaatatggctgaataaaatgctcactgattatggatatcctcaacacacactgaccattttttgtgacagtacaagcgccataaacatctctaagaaccctgtgcagcactctcggactaaacacatcgacatcaggtaccactttatccgagaactagttgagtcaaatatgctgtcaatatctcatgtgcccacaacgaatcaattagcagatctgttcactaaagctttagatactcaaacttttactcacttaagaacatgtattggtctctgtactatctaaactgttcttagtgtcatctgatcaatcaatttgcctatgagtatgcttgtgtttcaaagttcttgagcaatgggttgttatgtctttccccatctactatatgctactttgattgatactacgcttgaatcttccccgaacaaaaaggctacctcttccagatgcaatgggaagagctctcttaaacctttttctaataagtagtatgctccttctctattagttcttggtactcaaagaggacggctacatctctggaagagagtgaaagccatgtctgggtactaaagcaagagccagagtgatatataaaaaaaaggcttcatatataacaaaaaaaaatcgtcatttttctattat

SEQ ID NO: 339000 - DNA, 1046 bp, Cannabis indica
atctaatcaaagttaaatatcagtcccttccaatgcatactccatgcatccaacccaagctttactttaaccaatgccctgcagaggacataacacttatcaaaggtgcaagtaaactatgttgtagattatcatatccgttaaatagagattacattgaaatagagttttatttagggcataaagcccaacactatggtcataccacacaactgaaaaaacaacaattgaacggactccattcgctatggcctatggctatgaagctatgtttcccgtagaactagaacctccgtcccatagaagattgacctatgatcaagaggctaatcagccctcctagtagaatcacatgacaaaattgaagaaagacgagccttaacaaatctaaacttagtagcctatcaacaaaaggtggctcggtacatcaataagcaagtaatataaaacgataattaaacgatagagactacattgaaatagagttttatttagggcataaagcccaagaaactcccatttgcaataatataaaacaatcagtacatttcaattaatcctaaattcagtcggtgcttttcaaatgcagttcctgccgaaactttggtaaagggatcagctaggttgtccttagtgtccactttctccaccagtacatcccctcttgccacatactttctgatgatgtgatatttcctttctatgtgtttgcttctcttatggcttcgaggctctttactgttggctatggctccagtgttatcacaaagcaaaaccagtggtttttcaattccaggaacaacaccgagtcgtatgaagaactttctaagccaggcaagttctttagcagccttagtggcagctatgtattctgcctccatggtagagtctgaaatagcagtttgtttagcacttctccaaaccactactacactcccaagagtaaaaaccatcccagatgtagattttctgtcatcaagacatgcctgaaaatctgaatcagtatagcctacgggattcaaagcaccacccttgtagactaacac

SEQ ID NO: 339001 - DNA, 608 bp, Cannabis indica
caacctcacatgaaagctgccatgcgaattcttcaataccttaagggaacacctggtcaaggtttattgttcagctccagtattccacagcatcacaataaattccaactccacggcttcacagatgctgactggggcacctgccctgataccaggcgttccatcacagggtattgtatctatcttggcaattctctgatatcatggaaatcgaagaagcaggccaccgtatccaaatcatctgctgaagctgaatatcgttctctagctaacacgacttgcgaaatcctatggctcttcaacatcctcaaagactttggtatttcacatccaacacctgcaacaatatactgtgacaatcaagctgccctccacatctccgagaatgctgtttttcacgagcgcaccaaacacatcgacatagactgccatattgttcgagaccaagtaaccagcaatcgcatcaagctcatccacgttccttctcggcataatgttgcagacataatgaccaaagctttgtttcctactcaacacaagtttcttatgagcaagatgagcaccataaacatatattgctcatcttgagggggcctattaggataaca

SEQ ID NO: 339002 - DNA, 370 bp, Cannabis indica
ctctctctctctcttcaatatttcgtcccttatagtgatagagtacatgcccacacatagcaagttggtactcaatcacagtatgtaagactgtgaagaatccaatcaactgaaggagtgtcgggctcagatcttgataatactctgtgacagaaaggatacaagggatagatatctgagtggaatgaatcatttaattccactacaaccaacgtaagatttcttgaactttaaatgtgtttaaattccattgttttagaaattcatgtttatgatgttaaacaacatacatggtagtaaatctagatcttggtaaaataatcccctacatattcatccaccgcttgatagatgaggtagagagactttc

SEQ ID NO: 339003 - DNA, 587 bp, Cannabis indica
aacttgctcatcatcaatttcaagctggtttaaaccatcgaaaaaatcatctccctttaaactagactctttggcttaacattctcaacatccttaaccctctcttcactgcctgcaacaacctcacattgattcacatcagcagcaagaacatcactaacaaccttatcaactccatcagcatcatcaccatctttacccaactcatcaccatcatcgaagtcggaatcaatatattctggatcaggtaatcccttgtcatcatcctcagcattatcatcatcatcatcagaatcttgggttaccaactcatcagatgacttaacctggatcaaacaacactattgcaacaaaaataaaataggaaaaaaactaataataacagcaataaaaaaataaaacaagaacagtataaataaatacctcatcagaaggtcgacgatcaatgacattaacttttcttgaatatccttaattacagtcatgacagacttaaaattaaggtcaacaaaacacctacaagaaaacaaattcttgggccaaggattcttgattggaaatgaccaactccaacttacgatttcaac

SEQ ID NO: 339004 - DNA, 987 bp, Cannabis indica
aataataaaagtgacatcaaagttaataatgaaattgtgtatttttattgatacaaattttatattataatgaatgttatgttaaatttggcatagtaaatatgtattataattatattaccttttgacacaccactaaaatataatatttttttaagtatactatattttaattttgtatcatttatttatatttattggacatgatcttatatacgtaataattgaacaaaaaatatgttgtggaccagcgtatcaatttcattatatataggctagtgcatatataattgagagaattaatagtatatcacctaaataataaataaataaagattttctagctgcttcttttttttaaaaaaaaaaaaaaaaaaataaataaataaatatagatgtttgtcagacaaatattttatgtttttttttttaaaaaaaaaaaaaagaagaaataaaagaaaaattaattagcgaaataagtaaagtgtaagtctttactagtttaagcatactatagtaatttaaattactatgctaacatttactaatcaaagaattttaaaataagtgtatttaaataaaattttaataataaattaaattttacaaaactttatgacataattataaaatattataaacctagggtcacaaaagttatttttcaaaaatattcttaacatacataaatcaaaagtatcacttagcgacaaccaaaactaagcatgttattccgaagatcataatcctctagatttaattgtctcgatatgtacaatcttcaccaagttcatcactcactgttactcagtcttagccttacttttacctacacataaaaacatatctgtgagtcgatagactatgtaagaaaaacataaaacatagggatgttcgcggtgcgggtggtacggtttttgactattttttaaaccaaaccacacatgcggtttttctaatttctcaaaccgcacccgcaccgcaaaa

SEQ ID NO: 339005 - DNA, 1017 bp, Cannabis indica
tcttctctttgaatcaacaaagttattctttagatctatggttatacacttataattatatgtaagatatttatctatgaaattgaatcttattattgtatattttatgagtgataaaaaattctaacgtgtagtataaaagccacctttgattgatgttgttggaagaatttagacaacactatataaataaaaatatgcgattactctgcccagaatggcgagtattcaaattatggacacatagacgtactagaaatgtaaataacacaaagggaatatagtggttcaatcagatcacagtctgcttagtccactgttgcaagggttttctctcttgtcttatttcatattggatcactcctttatatacaaagcaagtgtcctttgattacatagagattgccttgattatcaatctatttttacattgaatatcaacatttaaatcacttaaaacataaatataatgaatgaatgatacttttggcccaattcactaattacaacaacatatgcgacctgggtggtgctaattgtctgttcatattctcacataggctcataggctcaagatgtgtacaagacaaattgagtctcatatgcataagatatttgtgtcctgttcaagtcacatatacggatatcttgtaaaaaggtcaataacttaggacatgcgagtccttatcgggttatcgagcacgttaggtcatcaggcccagcttactgagtaaagaatcgatctttactaactcacaagaacctttatagtcatcacatatatctcagtatatgtgagtcttgaatccggtcctcgatccttcatcgtgtgaggcataataatgcgactagactctgtcaaggtcacatcatctcggtgagtcgagttcgggcgaggtttatactcaagaggtctccttttgacatttcagccatcctcgaggagagtgagtccacgtgtcatatgttaggttttatgccctaaataaaactccatttcaatgtaatctattttat

SEQ ID NO: 339006 - DNA, 901 bp, Cannabis indica
tccaaatcagcctggtgaagctcctctgaagaccttaatttggtagtgagttcttggacctcttccctggaatctcgaagatccctccgggccgcagctataatctcgtccctggccgtcaacacttcccgatggtttttctccatgagggcctccttcctttggtcttcgtcctagatcaccttcttctgctcctccgactcccgaagactcttcgtcacctcctctgtgccaccaaacttagacatggttaacccatggtcgatcaaagtctttgaaagacgaccagcctctgcagcaatctcgtagtcaacagggaaaagttagaaccttgtataaaaagacatgtaaggaatttaaaaggtgagaacatattgcagtaaggactacactcatgtcctgaatttggtacatggggttggcaaaagcgcaagttgcatatctcttggtgggaagttgggttagatcggtagcaacatggctcatcatctccgaggcaaggtgaagctctaagatttattgatcgaatttgaagaaaccgtgggcatgaaggtcgtggagaacttcactcatctgaaaaaggaaatctagcagttagctcccaaaccaaaccctaagataaaaaaaaaacaaaaaaaaaaagggaatgggggtcccctaaccgctggaaagaggccccctctagatgcatgccaaaaataaggaatccagagattcttttaggcaaacatcggatgcaaaacattcgaagaacaaaaataaggggaaaagaaggagaaaagaggggtgtggaagtcgcttcgaacactcgatgacaaacaaacagaagatcactttttagtctcaaagaaaaatgataataagcatacaaaaaaaaagacggtggtcatcgggcgccccc

SEQ ID NO: 339007 - DNA, 771 bp, Cannabis indica
tttcttccttgtactggttctccttactgaacacaatatagtaataatattcccattgtggcacacaatcccttagactcatttgcgcagtactcaagaccattgtcagttcttagtatcttaattttgttcccaaactggttttctagtaacctcttccatgtttcaaaggttcctagaacctcatctttgcttttcaacaaatacacccagactttcctgttgtaatcatcaataatactcataaaatttgtgtgatccacctttggttggaatcctaaatggcccccaaaggtcaaaatggacataagctaacctttctatggtggtgtgttctgccttgttgaacttcaatctacaagccttccccaaaacacattcatcacagaattcaagtctttctgttagcttctccttgaacagtccttgcctattcatttccttaagtcctctctgacttacatgctccaatctgaggtgtcatagccttgcttgactgtgtttggttgagtccataacaggtgttgcactacctattactgtctttccattcaggaaatacaatccattactcaaccttcctctcaacatagtttctgtgccttgtgcaattttcattacaccatgctcaactttgacaatataccccaatttatcaaacataccaatagaaagaaattttttttagatctggaagatacctaacctgctgcaaggtctgttcggctttgagccctaaataaaactctatttcaatgtaatcttttctat

SEQ ID NO: 339008 - DNA, 673 bp, Cannabis indica
ttatttactttcaataaagatcagaaatcatatcttgaccttgtcatatgttttgttcaaatgttttatatatgattataagtttaatatataagttctattaaatctcaaacatataattactcacaattacagtgatgtaatcacagtagaaatagaaagtaattgtgattatatattttaaattatttagtcccacaatttattagtgacgtggatttacactaatgtgataatcagcgataagatttacttacacttagctgagtggaatgtctcttttagagcattagtaaagtaaactaggatcaaatgtatcgactatacatcgaactggaccaatattaacagtggaaaagaaatcataaacttaccattatatcttttctaagtcaatatcacttagttgatcatacatcatttgatctcaatcttaagatggttaaactttagcttagttatattgcacaagttctttgacttgttcattaccaccttaccgtaggactagcccatacttacatcttaggaactcagtagtgtaattgaatgggagtgttaatcatagatatataaatctatatcatatgtttattagaagtgaaacgatggttctttagaccttggcttaacacgataaatgatagagtgctcatttcgataattatattag

SEQ ID NO: 339009 - DNA, 1069 bp, Cannabis indica
ctttaatttttagttgtacgtacgtagttagttttttattttttttttttttgtgactattctactattattttattatttttatttttgctatatatagtttggggaggtctgttgtgttgtaccagtacatcaccttaccggaaaatatagaagccagttagttttttttcatagaaatattcacagtaaaggtaatttaatttagtaaaattttcaaatttatttataatagtaaaaaataaagttcaaattaattatttttacacgggccgtgcaaacaaataattaaaacttttttttgacaatgtaaaatactgagaatatttgaaaattgataggatattcatcattactataataaacatattgtcataaaataaagaaatctgagaaaaaaaatctgatatgattttggagagggagttgtactggtatgttacctcccataaaattaagatatagaaattttattgaatttaagagaaatattaaaatgaatcaattaagatataatatttaaagaattatttgttcaaaaaaaatatttaaagaattaatatagagaagtgtataagtttattgtaatgtaaaaagtttagatctaaaatataaaaattagaattgcgtagtaatattttttttttaaaaaaaatgaagttgttttgagaagaagctgcacttgagagttgggagtgatactgatagtggtagtagtagcaatagtgatagtgtgtggtgggtacgtactatactattttaactttatttacgttacgtacgtacccctgcttttgacctttttctatgtaatgtctctattttgtttctacgaattgatgactaaacgtcggaccccctcctccgtgtaaccatacataccacgtgtaactctttcattggctactccatcatcacgtaatgctcatctcacttcaccagtcggggagagagcccgggacccaccttggccccttctttttctcaccagtgacgatagagtgacgtatcttagtcgcgttagactcggatcctgtcttttaggttttcctttttctttttttttttt

SEQ ID NO: 339010 - DNA, 1180 bp, Cannabis indica
tagttggggtataatatgcaggtctggagagtttggttaagtttggaatcgatttggtttgggtttggaatgttttggattttctggtaaaaccggctaactagttttacaatgcttgtaaaaccgggttttacaatgcttgtaaaaccggttacccagattttgcagcaagtttcccgaaaaattcaactcgtccattcgtactagttttaggtttctagttagttaattccctgccaatttagggtattgccatattaagttgcagtagataggtttttggcataaaacttaagccctgattgtgatttagcgattcacttattcgtgttgttatcgatgtgatttaggagcctataattcgccgagcagttgttctacttaggttgaccgacacacctgaattcaaaattgaggtcagattagtataatgtcatgcatatgtttatacatgtttagcgtacatgttagttgccgtcaaaataacatatcagggtatcggtgaggtgtacatagagttgcaccgagataccaacagatatatgttaggcaaatctatagccatcagattagcatatcagggcaacagtgaggtgtacatagagttgcaccgagatgccaacagatatatgctaggctatcagatagtatgaattatctgctaccacatcagtacgactagagtactgagtataggctggattcgcagttagtcatactttgtcgagaacgttcctgactcagttagggttatagtcgggtgtatgggcgcctggttataacccgggatattagtatgttttatgttatgcttttcttactgagtctgtcgactcacagttgctatttccatgtgtaggtaagggcaaggctaaagcgaggagccgtgagagcgagcaggtgaagattgtacatgtcgggccggttaggcctggagcgtacgatcctcgagacatcatggcttttgctgtttagtcgctaggcgacaaatattttttatatgaatagtaaaattttgtaactgtattttgtaaacaggatcccggaattttataaatgtaatttattatgttttaattaaataagcaaaattttaattattcacgatttccaataatctcgttgattagcaacgagctgcatagtacgttaaaaatcacgctaacacgcctataatagt

SEQ ID NO: 339011 - DNA, 786 bp, Cannabis indica
attttttatcacagtatctcacccattgtcattactgtatctcatttcttgtcattaccgtagtttacttccagtcgccacttttatatttcccaaattaatatcttaatcttaaattttatgtcgtaattttaaatatttttcaacattgttaagatattgaagaaaattcattagcttgttctgttattattaattaatgtattgaaaaagtgattattattttttaaatatcttacttaaaaaagaaaaaaatatataaaaaaaatgtgatatttcagttatgagaaatgttaaaaggcaatcatcatttgtatcataccactattggtgtaattaaatatcaggtcccatataacttaaaaaaataagattttaagaatatcgctaaccaatcgtagggtgccatataattatgtgatacttgacattaaagttattatttctaaaaaagacgtaaaatgggctttatttaaaaattaattaatattttttaataaaaaatttaaacgtggtaaaaagcaattaaaatattatttcaagtatcacgtacacctgattctttttttattattattattattattattattattattattattattattatatcctaaatttaaaaaaaaaaaaaaaccaaaaacaattaaggtagacatattgattgatattttatgtatgtatatagacgaaatttatgattaattatatttgatttaagttttaattaattttttttggtaatttattttttatttttctaactttttttaaaattatttt

SEQ ID NO: 339012 - DNA, 754 bp, Cannabis indica
tataacttaattaagacaaaaaatttatctaataagttgtgtcgtttaccttattttaaggtagttatttgtcacgatatttacctaataaagcgtgttgtttaacttattttcaggtacttgtttacatttttattgataaattatattttggtttatcttatttaaggcacagagtttacctaaataaggcatgtcgtttaccttatttaagacacgaagtttatctaataaggtgtgttgtttaccttattttaaggtagttatttaccttttcaatgataaattatatttcgtttaccttatttgagccacgtactttacataaataaggcatgtcatttaccttatttaaggcacagagtttacctgataagacatgtttacctaataagtcatgttgtttacgttatttttggtacgaagtttacctaataaggcgtgtttacctaatttaagtcatgttgttttctttatcttaggcacagagtttacctaataagacatgtcgcttactttattttaagatagtaatttttatttacttaatttaagacatgttgttcacctaataatgcatattgtttacctaatttaaggcgcattgtttacctaataagacatgttgtttatctaattcaagtcacgttatttacctaataaggtatattgtttcactaatttaaggcatgtcatttatctaataaagtatgttgtttacctaatttaagtttacctaatttaaggcacgttg

SEQ ID NO: 339013 - DNA, 612 bp, Cannabis indica
caattctaggtacccataatgacctaatcttcacgaataggaaagttaatgtggatctagaataagtcttcgtgataattctggtcgtatgtttcggccaacatgtagcccctccgtcgctcggtaagaatcaagtaactccttctgatcggtcaagtccattggttagagatttggttgatgtagcacattatgcttcattatctctcggtattctgctcagcatttgacttcatggatctgccatgtgctgaccaaactttctttctctgccacgtgttatcttgtctcgttccatgttacataggcaatttttaggataatatttgccccctaagtcctcgtaagattgtactggtcatacatggacttctcagttcgttcgttaggcggccatataacaagtgtaacgccctaaataattaggcacgctacccaaaatgcttatgaaaccctaatcccctaatcgggattactaattaaaatagcgcagaatttaaacttttatattaaacagaatgaaaataaacttgtaatatatttaaacttttcaaaatagttgggatcccaaaaatatttacaaacttattacaagttctttcttactagccg

SEQ ID NO: 339014 - DNA, 538 bp, Cannabis indica
aaaatatttatttttctataaataaaaaaattatttaactagtagagtaatttaattaaaatggcacaaatgtaataaagttataattgtatgactaaatattaggtataaataaacattgcttaaaaaatgacacttgtcattagaatatagagagagtgcaaaagagagtgtaaaatagggtgtgattagcactcctcaaaaattaataatcttgtatataatatagaacactataataattagatttacctacgtgccaggttgatccataataattactgcaatttaatagtaatgtaatgtatggtctaagaaaattagtgccaagaatagaatatggtttgaaaagttgtatagattatttttcaggtctcattggagatgttgttaagttgtaattagatatttggagtaagtaatgataatcttgctgattcattaaaaaaaaattgaggcgtttggttgggaggaatgaaaatataagaatatgaatgggaatgggaataggaatatggaatggaatggaataaaattt

SEQ ID NO: 339015 - DNA, 784 bp, Cannabis indica
ttatatatataataattaaaaaaggtgattttttttttaccaactataaaacttttgataaataattaatatttattgttaactcagattttcattaacgataataaacatattttcgtgataagttttgcacagaaattatagaaagtaaaagaagaaaatataacacatagctttttacgtagttttgcagttaaaattctacatagtccacgagtcaatcttattcaaattattcagatacaaactaggtttcttttctcttaagggttttttttttcttcagtacattctgcccctatttagagtaacatagggtggcagttaattacaatcagattcaaatcccacaatcatatttccttgaaatcgtgggccttaattacgcaccacgtaaataaatgaagttattatttgaaaatcttacagctgtgatttatccgcttttactggatcaacgctgacgtgtatttaaatacgctgcaaagtgtatcttgctaggccatctcgttgagaacttgaatagcaacaataatcctggctgcaagctggagcttttcccatgtttttctgatgttgataacctaatcccgttgtttctgcgattgaagacataacgctccatctgacaatcgcagttattggtgacaaggtgaacttcagtagtcaacatcatttgaatgtcagctttccatctgagagagatgacttgaaggagcaatggatctcattgaaagatgtctgcacctgattagtgaaggtccatgagtatgccttcctatag

SEQ ID NO: 339016 - DNA, 571 bp, Cannabis indica
tcaaactaaaatctcaaagcatagtgaaacttaaagccttctggtgatattaatattacccctgcacccgaaccctgctcgttggatgcaccatccacgtataacttctaggtttccgcatctcgttgaacaggcagaatttcttctagagttacaccttctatcaagaagtcggccaaggcttgacccttgatggatgttcgagggtggtatgttatgtcgaactggcccagttcaaataatcattttatcaatcttctaaaagcatctggttttgataaaacttgtctcaagggcttatcggttaacacttttatgggatgtgctggaagtacggctgtagcttacgagacgcgtggactagccacaaagtgagtttttcttgagggagatatctagattctgcccctagtaaccttttacttacgtagtaaataggttgttggtgcttaccctcttttcgcactatagttgaactaattgcatctttcgagatagccaaatagagaaatagcgtctctccagttattggttttgccaaaattggcggcgtcgctagatgccattttat

SEQ ID NO: 339017 - DNA, 664 bp, Cannabis indica
caggggaacatgttttcctgcgggttttacctgtgaagggtattagacgcttcgggaagaggggtaagttaagtcctaggttcattgggccagtttagatacttgagtaggtcgggcaggtagcgtatcgcctagccttatgatcagcgctatcagttgttcataatgtattccatatttcaatgttgaggaaatatgttttagacccgacacatgtcttgagttatgaagcctttgaagtacagtcagatttatcctacgaagaacaaccaattcagatctttgatagaaaggagaaggttcttcaaagcaagaccgtcgctttggtcaaggtgctttggagaaatagaaaggtggagaaagccaccttggagttggagtctgacatgagaactcaatacccaaagctattcaggttagatttggagggcgaaatccttttaacaggggataattgtaatgaccgcattagtactttggattagtaaaggcaattggcactaattactgatatttttataattctttatgaatttaatttaattgtgggtctcaatgttagaaatgggcattattgttataatttctcaattccagagattttattaaactctaggagtattatttgacttatatgtgaatatgtaatttttgttcggcgaca

SEQ ID NO: 339018 - DNA, 526 bp, Cannabis indica
tctcagtttcggtctgggtacacgaccgtgtccacgcccgagttcaagtctcagtttgggtttgaggcttggtatatattcggttctaggtctggctccgggtcctggtcacggtcctagtcttgttttagggttatggttcggtgattcttgtttaggttctaatttttggtcccaggtctaggtttgggttcggtttggttcttcgtctgggttcttgtcctactctcagtcccagacctagacactgactactggtctattccgggccccgttacccgaatctcgagtcaagatcaggatcactgtcacgggtctcggcgttgttctggtttaggcctcaggtcccatttctgagttttgggttcaggatcgagactcgggtgcagttctaggtcctgaccctcattctgtctccctagtttggttccatgtttaggtctgagttcaggtttggattcgggtcccgagtctaggtttgggtagggatctgggtccggctcccaattcgggtctaggtctgatt

SEQ ID NO: 339019 - DNA, 602 bp, Cannabis indica
ggcataaaacccaacagtttaaacaaaaactagccgtttataattgttaacacatttttcaaaaaatcttggaaaaaatgatctgtcgttttctgagaaaaacggtctactgtttagaaaatagtagaccgaaaatatagcagtggcaaaatcctattttttggctctaaaatatgcataactccttactcgattatctaattttagaaattctaattttattctcttagttaaatgatatgtgatttaaaaaatttatatatggtttggtgaaaaaacttgtcgcacaagttagtaggccaaaatttatacttaaaacttttttaagtatatgtgcttgaaaatcactatacaagattaagaaatgtaaataaaccttcattgagttttttcttgagttctttgagtcttgtaatccacttcgggtcattattgagaattttggtaaaattactattttttttctttggagttaattttgccttagaaaaatttattttatctttaatttgtgctataaaatcaacaaatacttagtgacaaataataatcaaatatttgttaatcatcaaaataaggagacctaagagtttgagttaaca

SEQ ID NO: 339020 - DNA, 1058 bp, Cannabis indica
aaatttaccgttctacctttcaatgcattttatccttgaaacacttggctacctataaatgataatgtagtaaactaatataattattgaaatgagtattccaccatttatctctattaagttaagctcgaaggaaattattatttcacctctaagcatttatagaagctatagattctgtatttatgattagcgctctcactcagttgaactaccatgttctcaatatgtaagtatcggaaagatccaattggtcaactttagcgaacaaatcaaagaacacaaataatacaattgaactagaacctaaccatctcagtattgagattattgatctaagatcaactaagtgatattgacttagatagatataataataagtgtgtgatatcttatttaagttcaatatcggtccagtccaatgtataacaatacatccaatctaagctttcttttccaatgccttggaaaggacattacacccatccaaggtgtaaataaactacattgttgattatcatatcaatagaaatcctatgtactaataaatcgtgagacaatatttaatcatataatcttgattactttccactatgtagacaacacagtactcatgaataccaatgtgataaggatttagatggatttataaatcaaacaactgatcatgaaataaacatatgaaccaagtaatacattaaataagtaatgaaataattctgtgttgattaatgaatattcaagattatattaaaatagagttttagttagggcacaaaattcaacactctttctagaggaaaacaagcattaccactaggccacttgttcggtggttactgattcataccttgatatgccttcaactttgtctggactaataaacaagtgcaatgtgtgttctaattttatgggattcaagattttaagacttgtggactatttgtataaagacttattatgattttattattattatttttaaatgtattaaggtgtgtttgtttggtaacttttttaaaatttttaatcacaaaaataaaagtagaatttttatt

SEQ ID NO: 339021 - DNA, 605 bp, Cannabis indica
atgcgatggatggctagtttgatcacatgggtaagtctagaaccttatttttgagtggtatgtgtattggagaaaatagaataccgaggttgagcagggttatggaatttgccaaggagtgagtggtgggtgccttacgtgttgacacctagccactacattcagccaaggttaatgtaattaaccttaatttcattttaggaaaaataaagaaagggcttccttaattgggagttccttgactgcaatttgtgggagggtatccaagagccaaagtcttccccggtcccaagaactgaagccatctgctcccgcaaacagtatgggtttttctcagaagaacaaatgccttttgaaatgtgcctaaataggctatgctcttattccgtggaggctttgctcgtacatgtcagactacggacctagtggccaggctttctcaagtatgatgtcagaagatatcccccaagacacgctatcgtaaagagcatgcgtgtctcatcgtacctgaccaaatgatccaactgttggaatatattttactaggatctagatttactaaaaagtatgtttttaacatcctaaacacgaacttctaaaacgat

SEQ ID NO: 339022 - DNA, 649 bp, Cannabis indica
agttcaggagcatttttacagtcaaaaaaggttgagggggcatgatttaatacatgtcaaagttcaagaggaaaaattaataattagcctatttaaaattgatatcatcaccatgtatcacttgtagtcatcgttaatatctttctcagtagatttgctatgtacataaaatgaattaaacaatgatcactaaatatttacttttacgtgaattattttattataaattaattaagtaaatcattagttattaatatcatatacggttatatagtttatttttttaaaaaaaattaattaattaatgatctccaattaaataaagtaaaaaaataattaattaataatctctaattaaataaaatagaataaaaataaaaaaatgagagaatttaagatagaataaaaaataagagaattaaaaagagaatagctataattttttaaaaaaaaaaattaattaactaatgatctctaattaaataaagtagaataaatctttaactaactaacagaaacaaaaaaaaagtatgattcttagatgtagtttattaaaaatgtgttgaatactacaaaccacaatttatatggggacttttatttgcactccaccaaattataaatacaccctattattaaaaaaaatata

SEQ ID NO: 339023 - DNA, 577 bp, Cannabis indica
agcgtaaaatagccctaaaactagaaacaaagagcgaaaactaacccaaaatatgacccgaaacttagactaattttagcctaacactttgttgacagcgagcacaaaggagatgatagtggagaggtttggggcaatggcactggaaatgggagtaatttttgaggtggtacgagacctaaacgacaacaacgacaacagttcttgccccttcagtgacttctccactgtcgcacctctctctctttcatttttttcttttgacagatttaattgttatatctaagatttaatttagcaaaataaaacaaaataaaataataataaaaaaaaaagacttggaaattcattatatcagttttgatgatgtaccaattagtgaaatcttatttaaccttatttgatttgggcttttcgtgggcctttaccttttattttattgggcttttgaaatctatccatcaacatgtagcactcagtactcacccagctataattagaggaaattacactctataccctttttatattgtcctcttttatttttaccttcttttttaaaaatctatcattttta

SEQ ID NO: 339024 - DNA, 746 bp, Cannabis indica
ttcttcacagtcttacacactatgattgaggacttacttgatatgtgtgggcatgcactcaatctcctcctccttagcttccttctcctccttcacctgatgaagaactgctagaagagaagtcctctcatcttgaagactgttcacttcagcaaataaggtcttgatggtctcctcaagacggtcaaaaacctcgagatccttagtcagctcagttatcttcttctgggcgacaaacagcttcttgttgggttaacccaactcccaccgaacagctccgagttccaccctggcgtcttcagcatccttcctggccaattctgcctccgccctcttggtgtcggatagagtcgtgttcctggaagcggcacacttagcccgagagtaagtgtaggccaacttcagaccggcatgcacaaagaaaaaactttaacatttgagctaagtacagaggattaaagggaagtatcaagaaagacttaccctggtgaacctcttcaagactctgcccaccaaaaattccaaagaagagtcattgtcagcaccaaccagttgctcactgacctcagaacccgccggttcatgtaattgggtagcatctccttgcccttcttggcctctggaagcaccggcaaaggtggagtaggtgcccccacctgttcaggttgaagacctgtccaagcttcctccccgagactccttggacttagcagcttttggggtagaggggtttgcagcagttagct

SEQ ID NO: 339025 - DNA, 928 bp, Cannabis indica
gttgattaatgaatattcaagtatatataaattagagtttagtaggacacaaattcaacactcttactagaggaaacaagcattaccactaggccacttgtcggtggtactgattcataccttgatatcgcttcaactttgtctggactaataacaagtgcaatgtgtgttactattattggatctaagtatttagtacttgtggactattagtataagtacttattatagtatttattattattattttaatgtattaaggtgttgttgtttgttaacttttaaatttaatcaacaaaataaagtagtattttatttctaattaattaaaaaatagtgtttatactatattgtctttaatttaaaataaaaataaagtagtgtctgtaaatattttgtttgtaataattaaaacaaaattaaaagtatgttctgtagttctattttcttttactaaatttaaaaaaataatgaaatttgaattttttgttttttaattaaaatattatgactatcatttattttatttatatatatatatatatatatatatatacaaaaattataataaaaagatcaactaaaaaatgtccaaataatttaaaatcacacgacttattgtcaatctgagataacacaaagctcacaaagtaaaataaaataaaaaaataaaatgaactaattattgtctaatcttgaaaaaaaaatttaaaaatcataacagttaggagtgttcataaaatacccacttcaattcatttcaattcgtaaagtgcgaatatccacacttgtacgaactaaatgttgattgacatatgaaagtaattgatccaatccaatcaatccacatttgatatatttttttaattaagtacttaaattaagcatagaaattcaaatttgtgatttaattattcgttattagatc

SEQ ID NO: 339026 - DNA, 576 bp, Cannabis indica
cgatagggaaacttttagtttcaagtttaagtccccgagaagtgacttagcatgccgcttatctgtgttgtgattgatgtgatttaggagcctgtaattcgccgagcagattgttccactcaggttgaccgccacacctgaattcagaatcgaggtaagattagtataatagtatgcttatgtatttacatgtttagcgtgcatgttagtaagcctgttagattacattagatatgtatgttggctttcgtgctatttgacagtatcacatcggtacggctagagtatgactagcgtaccgtgtataggctgatattattgtcaatagcaccgtattgtttgatagtatcacatcggtacggctagagtatgactagcgtaccgagtataggattatacagtaacacatcggtacggctagagtatgactagcatactgagtataggatgttaccaagtcaaaagtaccatcatacaaacgttcgagactcagcaccgtgtcggacacggagattagggttatggtcaggggtatgggcgcctgatcataatccgggatatatgtatgttatatga

SEQ ID NO: 339027 - DNA, 611 bp, Cannabis indica
tttgtattttgattaagttgatgatgcaaataaggtgcattttggtttagtcgctcacaaagatcagaatgtcttcgattcaggtgttcgcaaagataaggatgtcttcgttcataattactcacagaccttgtctatgaataactctcagattggtagcttcacgtattgctcatgcttttttggtcaatataacgtcgaggtgtacttctctctcgcgttttcctacccgatcgattgtgtcctcgagaccttgagcgtcctgaattggaacttacttcatcttgaatcgaccttctccttcgaaagaggttagatacacgccctctattcaaatacgtgtatacatcctctctctctctgatcgagaaggatgttgagggtatcttggagatagcccacttgactttaattggtttctagggtttctcttgttgccacgagggtttccctagttcccaagtcgaggctgtctcgcgttgtcattcctataagaagcctttggtacatcattttgctcattcccttagttcgtaaatccttgggatccttgaggaatgtctcgccgttgctcttgattatttgtttgattatccattggaacatccctt

SEQ ID NO: 339028 - DNA, 642 bp, Cannabis indica
gctctcatccgatattgggaaccattagaaaacccaaaaacatatcgcagcatcataggtaaactcatttacctaaccattactcgccctgatatctcttttgctgtaaataaactaagtcaatttttatctaatccaagagctccccatcttgatgcagctcatagaattttacgatatctcaaaggcacttctggccaagggcttttctttcaatatgcctcttctgtaaaattgtctgcttatgcggaaactaacatgcccaattcaaactttcatcttaagattttttcagatgctgattgggcctcatgcagtgacgttcgaaggtccacttctggctactgtgtcttccttggcaactccctaatctcttggaaataaaaaaagcagtctaccgtctctcgttcttccgctgaagcagaataccaggcaatggccaatgccacttgcgagatcacttggctgttagctcttcttcggaacttcggcattcaccacaaagatcccgccattctttattgagataatacaaccgccattcacatctccgagaatctcgtattccataaaagaacgaagcacgttgagattgactgtcatgttgtccgagagaaggtccacgaaggcacattgaagcta

SEQ ID NO: 339029 - DNA, 1237 bp, Cannabis indica
ggtgaatttgtggtcaagcatgagaatttagtcccttatcatgaaaaggctaaatatttgcttggccaatttcaagatataactctaaatcacatccccagatacaaaaaatggtaaagctgaggcattagctaatttagctgcatcactaacacttcctgaagaaagggatatccaaattaccataggggaacgccatgtattatcccaatctacggaaagaattgaaagaaagaaaatacagtcaacttgataactttcctggatagtgcaaatgaaaaatgactagcgtgagtcaatcaaagactacatccaaaaaatgacgccttgccagaagacttgaagaaaagagtggatgtaagaagaagagcgcctcgatttgtggtctttaatgacacattgtacaagtattcattcgatggaatattattgagatgcctctcgatagaagaagcgacacatgcacttcaagagactcatgccggtacatatggcgcccatcaagccgacccaaaattgtcggctcaattaaagcggttgggttactattggcctactatggttcaagatgcgattaatttttctaaatgttgtaagtcatgccaattacatggagatttcatctaccaaccccctcaaccactccatccttctatactgtcatggcctttcgaaacatcgggaatggaagtcattggtccttttactccaccctcttccaaagcccataaatatattttggccatcacatattacttctctaaatgggccgaagctgtaccactaaaagaagtacgtccagaagatgtcgctgattttataaggacccacgtaatttatcgatacggggttccttcaaaaattatctccgacaatgccctttatttcaaatgtaaggtgatggccaagttgatgaacaagtacaaattcaagcacagtttctcggctagttacaaccagtcttcaaatggtcaagcagacgcatttaacaaagtgttatgcaaaatcatgaagaagacaacgacaaagaataagagggattggcatgaacgcctcctagaagctttgtgggcttatagaaccactatgaggactgcgactggttgcacagcttataacttggtgtttgggtctgaggcagtgttacctttcaaggtacaaataccttcattaagaattgctactcaactaacaaacccagatgaaaatgtgcaagtccgtctagccgagcttgaag

SEQ ID NO: 339030 - DNA, 424 bp, Cannabis indica
gaggtgttatcctgagctttacgccagtgatcaagagcaatgcgggctgaagatagaacatttgcaacagtaagaaccttatctttccaaacaattgaatttacttgctttccataaagaccacgcaaccataaccaatgaacagacacgatcagaagcaagagactgaaagagactatccaaccagctagcaaaggagagatcaagagagaccccggctggaagacccatatggtgccaacaagaagaagcaaaagtgcaagaaagcaggatatgtgaggttgtttcaggagcagctcggcaggcagggcagacagatggaacatcaacatgcttcattctgagattgacacaagtcggcaaactcccagatgcagcacgccaaaggaattacgaaccttcggtgggatttttaattgccata

SEQ ID NO: 339031 - DNA, 628 bp, Cannabis indica
gttttagacgttctatatactattttgaaacttccaacgagctatataatatgttgtatattttagagccaaaatataaggtttgttttagtgtatttataccgtggggtttggtagaaaatcctatattgtcttacgcaactgttaagtagtattttaaaataaatacttactggtttactgttgttgtgatatagggtcgagatcatcagggatatttttccacttggtttggccgacatgcatgaatctagataggtaagaaaggcataatgtaccacatggcatgactggttttgtaatcattgactgtctgattagatagtaataatgcaaatgtgacatacgacttcacctgattaggtgatatgatatatggatttcagattgtgaaatggatttgcctgattaggcaatatgatatataagtatacctgattaggtgatatggtgccaagttatggcataggcttagctagcttgataaggcaattcggtatacggatgttagattatgacatgagctcacctggttaggcaatgcaatacatgttggaaattattttaccaggatcttagatctactcacgagtatgtttattaacatcctaaataagaactttctaaa

SEQ ID NO: 339032 - DNA, 720 bp, Cannabis indica
cttccccaatattccagcaattcaagtggcaagcattcaggcaacaaccacaagcaaggaaacgggaagaagggaaagttcaccaaaaaacccggacagacttcccgtgatcgcaccaaacacgctgcattcattatcttaattgaagatatagaaagtgtgtatatagcgactcagtcgctaattccgtacaagaagcccgggcccatgaagaaagataccagcaaaagggacatgacaaagttttgtcggttccatggagactacggccacgacaccaacgagtgctacaacttgaagcaggatagaacttctgatcaagaaaaattacccgcacttacagaagtatgtcaaggccaaccaaggtcagaataaccaggatctaatgccttttccaatagatggacacttgcaagtcatcattggaggcccgcacatcgctggagacacgggcaaagctcgagaacgatatgcccgcacagctcaatacaaggaagaagaagtcatcctggccgtggaagagaggaagcccaaagttccacgtgcaggagagccaaccataacgttcaacgacgaagatgctgtccaaataagatttccgcacaacgacccgctggtcgtggaagtccagatagcaaacaaaatggtatccaaaaccatgatcgataatggagcttcttcaaacattttgtttgagactgcttacgagaagatggggct

SEQ ID NO: 339033 - DNA, 644 bp, Cannabis indica
ctggaaatggattgagtaaattgagtaaattgggtattttaaatgccatgaatatattttgtgaatgtgaaatcaggggttaaccctatttgtgaaaatcccagattgtctgactaggattaccggcacctggtcaggagcacccggggatttggaatctctgcctttgcgggacaacaggtaagacggaagttagcacgtagagtatgcatggtggcacttatattgagatttatatatgtgagtaattgtaaccgggattagggttattaccctaatatgagcggttaatagcctagggttattaccctagtgatatgagttgaataaattctttgccatgctaagtgtatgatttattgagatttaaggattatgcgattaagtcataatcaggttggactcggtaatcagaactaagaagaaccattctaaggccttattgtaaatagacgtgtgagagaaacgcgtaggtttacgccacgtaaacataaataggcatgtgagcgcaacatgcaggtctgtgtcacacagacagatctaaatggcattgttttttgtattatatgatgagcatattgttgatatgttttatactgtcttgctggacttggctcatgggtgctctactgtgcaggaaaggg

SEQ ID NO: 339034 - DNA, 1278 bp, Cannabis indica
attttaatgattatatttaggggaaaaattataaggtatttaaagcatggaatttcaaatttccctttatttttcataatgaatccaattgtacttattacattatattatatatatagcttagtttctatttgaatttttttcaggtagtggaaagacttttactgaaattcttgcatccgaaggcattagtacaagatatcttgatagtcgatgcatcacatataatacaactattggaatatattttactaggacctaaatttactaacaagtgtgtttttaacattctaaatatgaatttttaaaacaatgaaacttaaacacatataaagtttgagaaaccttacattagttgcagcagaatataatgtctctttcgattccattcagatatctaacctttgttcctttctatcgtatagtattatcaagatctgagcctgattctccttcaattgtttggatttttcatagtcttacacactataattgagtactagacttgctatggttgggcatgcagtcaatcactaaggctcgaaaatttgaatgaagaacacttaatttcaaaattaaaaagaagaagaagaagaagtctcaaaaactcttgtctgacaagttgtaaactaggtttacagtcattagttggattatgagactatcctattctttttatactaattcacttagggttaggattgagagtggtcggccatgagagtgggccccactaattatatttttgcccttttttcaaccatttatctattattttacaaatgccatatttttcaatttcaatcctataaatggcaaaactatttatttaataattataattaatcatcaaataaaattgtcatttatattatttattaattagactccataaagtctcttaattaacaaataaatcctaaaatcctttttcttcacaattaagccataacttagtaaaaattcatgaataagacagtctaacttaaaattataattgattaattaaatcaattaaccgagtcttataagcaatattgcctcaactagtatggggaccataggccaatataattaagcttccaataagtagatctaaaatttagcaagtaaatttcctaacttattagttcctccttgcaccactataaatttagaattgcgctctcaactatatagagcgctctatatgcatgtttcacgatatagatacgctaaaaattatccatttgttataatcctaataatcaatgatcctctatagataatctacactaa

SEQ ID NO: 339035 - DNA, 792 bp, Cannabis indica
ttcctgctgctcccaatgcttgacttttctcttctatgtttgaactatttttcttttgaatttgctagttagttttttatgcggtacaggggtactcgcactctgtacttagacatatttgcaatttattttggacaaattcatatcctcgcggggataattaatgtttaacattttcgcagtacacgggtactcgcattttttttatatatatattcgactttaattacagcttggtgtaataagtagaaaatcttacaagacttgacaaaatttgtttaaacttgaagaattaacaaatatgaggcatttcctttatataatcaatagtacattatggcatatatactcccctatacttaggatttttttataaaaaatgtctaagtataagtacaaagcgaacataatttaataatgcgagtactattgataatataattttaagctttcgccattccaagctcgtggaatcgcagtaccatcgagtgctgcgagtcggtatgtggcgtcacctattttttccgcgatgagatatggtccttcccaattatctccaaagaccccatgcgttgggttcttggtatttggcattactcttctaaggaccaagtctcctgctcgcaggacttttacttttaccttagagttaaagtatcttgcagttcgccgctggtaagccgcattttttaagtgtgcttgatcgcgtttttcttccagaagatcaaggtagagtgactgcttctcttcgttctgcgagatgttgaaaacatctctgcgtagggaacctgc

SEQ ID NO: 339036 - DNA, 1649 bp, Cannabis indica
ctctagcatatatgatgatcatttgttattttacgatcatttatttataagaaaaagagcacaaatgacatgattttgttataacatgcatttaatggttattgctcttgtttctcattcaactttaagcattccaagaacctctgccatgttgacactgaatggaaccaaccacaaacagtgggtagaatctctcatgttgaatttgactcttatgagagtggatttgaccttgagaatggacgcaccgcctaaacctgctgatgctgtcgctgaaaaggataagaaatcctatgtggattgggagcattccaatcagtgttttttgatgcttatgaggtatcacatggatgagtccattcgtgatagtattcctcagattgaaaatgcaaaggattttcttgctaccattaaggaaaagtacaaaaagttctcaaagaatgataaaaatgagtgcttgactttgtttccatcgcactaattatgctgatacggttgatattagagcccacatgagattggatcttggtgaggattacatggtgtggtttgtgatggaaaccattccttctcaatttgattcgatcagatcaagctacaatgctcaaaaggagcagtggaccattgaggagatgactgctattcttgccaaagaagaagaggacatgaaaaaggggagagcaagaagtatctccatggtgaccaatccaaacaattctcacaagagaaagttcactcccaacaactctagtgaccaaaggtttcataagaagaaagccaccaatcctaagggaaatggacaagcaagctcttcttcaactggtcataagaatgagtttttcaaagggaagtgcaacttttgtcaatgcttcgggcataagaaagctgattgccgaaagctcaaagctcacttagagaagaaaggtaattgtcttgtgatggtttgtttggaatccaatattattgatgtgccctcaaacacttggtggttagatactggtgctacaattcatgttacgaattctttgcaggcagtgacaagtcgaagaaggccgagtaggttggaggagtatgtgtacatgggagacgatactaaagtcagagttgaattttttgggactgttaaactccagctgaatactggggattttttggagttgcatgatgttgcttatttaccctctattaggaggaattttggatagactaggttatagtcttcattttagaactggaaaacttactttgtatcgtgactctatgttgattggaaatggaactttgtgtggaaacttatataagcttgatttacttgatgttgttccggttacttctccctcttgcccttcttcttcttcttctcttaatgccgttattggttctaaacgtgcaagatcatatttgaaatcttccatgctttggcacaaacatttaggccatatttctagagatagaatggagagattggtgaaagatggtgtacttcaggatcttgatttctctgattttactgcctgtgttgattgtataaaaggaaagttgactgccaaggttagaaagagtaagtcagacagatccgcagatgtgttagagcttattcatactaatatttgtgggccttttgttccacctgctatgggtggttataa

SEQ ID NO: 339037 - DNA, 699 bp, Cannabis indica
atctcatggtaaaactgaaataagaaaaggttcggacccaattccttgacgaacaagcctttgcccggtttccataatcccgccaacgtgtgtttcatagcttcaaaatctattgatcgcgcattcaaaaaccttcccaccaaacaccaacgatcatccaccaaaaccgattcctcaacgtcatcctcaatctcaataccacattcttcctcatcatccaattctatatgtccatactgaaactccatgtcattcatggctgtgcttgtcgaagccatcaaaaccagaaaactccacctatcccaagcgcaaaaacccgaataaaacaaacccaacccgcagcctcttcacctaacacaatccaaccactcccagtcacaaggaacagtgaataaaggaaactacacacggacttaatccccacaagcactcctcggttcaacccgcataaccagtcgccgacgcagtcaaacagccccagaacaactatgatccttctgagtcgcagaacccgtgagaacccagaccagagagaaccagtcgcagaacctgtgcccctctgatgaaaacgcaacacccagaccagagaaaaccagtcgcaacccgtgagaacccagaaccagtcgcagaaccagcgaagtgaagaacccagaacccgtgagaacccagaaccagtcgcagaaccagtcgaagtcgaag

SEQ ID NO: 339038 - DNA, 519 bp, Cannabis indica
gttttggaaacaaataatcttttatgatcagattcataaaatatagaataattcaacagtttaagaattctatttttggaaactttccttaattccttttgcttgttttcaattgttgtcttcacgacttggtgtgtattattattcagttataaattcaagtatttacaaacctatttcatctcttgaacactttaaccttttatgttattgaacactttaaccttttatgttatagaatatgatcaacatctaaacttgaattttcctttaggtaataacaaaaagattacataattttttacactttcttgagttttgccttaaaatgtgtggacaattaactcaagttcgaaaattctaagaagaagaagagaattcaaaaaatacgaaagctctttttgattttctattggtctgacaaagtgagtcaatagtattttaaaaaataaaagctatcatattcgatttatattgtaactttagggtgaggtttagaatttaaaatagaataaaaaa

SEQ ID NO: 339039 - DNA, 312 bp, Cannabis indica
aaaaatttcaagcctccttcactaccctagccgaaaccctatctctccattcctctcttcaaaaccgaagcctcatagtgaaaacagtgagtacccacacacatcaagtggtactcaatcatagtgtgtaaggctttgaagaatccaatttcaagagaaggagattcgaactcagatcttggtgataccctgctacaaaaataatacaagggttagagatctgagtggaaggagacattatattccgctgcaacccctgtaaggttcctgatactttatatgtgtttacttcatatcgttttagaagttcat

SEQ ID NO: 339040 - DNA, 1904 bp, Cannabis indica
gtataatgcaaacccgtcattttaattttttttttaaattcgaaggttctcgactaaacctctttgacgaaagtggagtcgaatcattataactccatgaacaaacctttttgacgagagagggtcttgaatcattataacaccttgatcaaacctttttgatgaagaagggatcaagcaactataatttttgatttataacctatccgacgagagaggaaaatcaaaagttataactcgcgtttgaaactgaatactaacggttctcgcgagataggaaagtactgaacgagcaatcacgatgccttggtaaagtacataaatttagaaaatgcatagataatataactatttataccagcaaattaaaaatatacaaagtgataaagtccttaaagtatatttaagttagcttaaggaaaattataactgcaattgcgaggcagaattgacaaccgctcaaaaattataaagtttgatagattattaactatttaaataggaagattactagcaatggaaaaacccaaaagtactgtacatttgatcaaaatatagttgcttactttgtgaaacaaaacgcaagaaaatacaattgtattaagttcgaaagaaaacagtacaaggcatttaagataagaaaaacctaagactggttataaacttgtctttacaaaaatgccactaagggcaaaccattaagtcattctcctaaatagaggatgagagagaaagaccgtctacacatagcttggagaaagaccagctacacgtagaccagaaagatcgtctgcacgtagagagccttgatatctggacagaccctattctcctcatcatcagatcccatttcttgagcagagatctctttctcagccttaggaaatttttcaacaccggagagaggctgacgcaaagatctcttggaaaaaggttagggtcttggattggcttgatcctctgatagaaagcacgtcaacttctttcccagatccatctgaaaccatgccagtcctcctctggaatccttcatcaggctgaggaggacctttgagatcgctcacaagatttataccatttgggatcacttgtgaagatcagtcatggcaagctatggggttcccctggtttggattggtggaagctccttagcccaagaatctatcgtttctggctccggttgaggcttgaagtctgtaggaacaaatggaaattggttggtgcatctgggtattatgagtattgagggataaacttctgaactcagaagagacattttggtaggaaggaaataatccattctgataatggatttaactaaagaagccaaatggtttatgaaaaatgacaagcttgagttgcccttttatacacgaagttcattgacaagaaagccaaagattgagaaatataagggctggatgttgtgcaaaatatgaagagatgattcataatgactctcgaaaccgtacaaccgccagaattaaatggcgcatttttccaagaaaagatcctgacgagaaagccatctgtaattatcaaaaagctctttttattaaaaaagaactttttaaggggcaattgttgtacccgaaattcggctagaggacacgtgtcaagataaagggaatgtgaaccagtgcaatatctttaatggaataactcattaattacataagtatcagagtatatttgtaacccgctgactgtaaggtcttaggcaaggaatcaatgtactaactgacacttagtgtattaaaaagaaaccatatgtcgctaaaggtgaatagcgaggcaccggagaaaagtgacatataccttagcttgcaataagcaaactaagtgtgaaagtcggatcgactcgaagaacaagtatgcgagatgaccatctcgctatgaggaga

SEQ ID NO: 339041 - DNA, 995 bp, Cannabis indica
tagacggagtttaaggacgacaacagcgtaccgtttaggcgggaatcgagtcagataggagatgtactcgctggtcatctcggaggcaaaaggggccaaggtgggcccgaggaaacggttgaaccactccgtcagggggtccacgttcagattccatagatttcggaagttctcctcgttaagagtgttttgcaactcctctcgtaagaccctcctcaaggcctccacctcagcatgcccctgggtgtactggcaagggcgtagttatgcttggctatccgaagattctacctctcctcatctccggggatcggagtcaacacaatgccatgaggcactgtatactcctccgcctcgaaggggatcccggagtcatgactcggggccggagtgtccaccctccgcgggcgtttagaagactcctctgctaccatcttgcctttacgcttgcgcacgagagaaacctcttgctcttcttcaccttcttcaacttcctcaggaagtgccccttgctcttcttcaccttcttcagcttcctcaagaagtacctcctcctcgtccactaagtcaatagtgttcggaggggcactggaagaagctttcccggaggtgaccagctgggaagaagtaggacgaggggaaacatcaggactgtgggctccagcaagggtggccaagatcttatccatgtgaacggccactgcagcaagagaaaaggtttaagtgttagaacatctgtgaaagcagtgtacacttaaaaagcaatcaagttagccctaccctgactctctaattcggccgtagcaaagtcccgaatcttagcactggctgcatcatccccgagatagctgtccgagagacgcaaccagctagaagacagataggctgaagagtccaagggaacgggcactggaggtccaaaacccatccgggaccggcctaaataattgcctaagtgagagaagtaatatgcctttacatgatccccccaccga

SEQ ID NO: 339042 - DNA, 595 bp, Cannabis indica
gttttaaacggactagctagtgtgatgtctggggaaattggggcgttacacagcttgttccaaagcaagaggatccaatccaattgcggatgaacgacctagaggacaagttcaggagatatcaagtgggggaattggggaaactatctggatatgactctgacgaggagcttgagtcgtatcatcttatgacggaaccacagatctggtctcgaatttgaataactttaacaccataatgcgagcgagtaatgtgacgaacaatttacgctgtattttgttccccacctcgcttgttggagcagcgagcagctggtttaacaaatttactcatcattcaataattttgcgggagcagctatccagggattttaagaagcagtttcaggccgttagggacaggcgacttaaagcggcctcgctaaccaatataaagtagcagttcggcgaaacacttaaggcgtacttaagtcgttttagcacggctgccgctagggttacaaatttggatgaaagcatgcatcttacaacccttcaggcaaggatctctattgatccattaaccgcagggggcgagttatgggatgacttacaa

SEQ ID NO: 339043 - DNA, 506 bp, Cannabis indica
gatgccttttttcctctaaccatactatttttgtttcgcgcagacatgtctcaaaacatgcttaatgccctgaagaagaaagttgggggaagctcaagctcatctcctccgaccaagaaatctaagggcggtgaggcaaccccttccaaggaagaggcatcagccggagaggttatcgacctttccaaggagccaactgttgcggatccttctactccaaaagttgctaagtcaaaggattcttgaggaggaagctcggacaggcctgagcaatcaaagggcggatttgagctggccaagagcgaatctaagcaggtgcgggctcctactccaccattgccggtgcttccagaggccaagaaaggcagtgagatgcttgcccattacatgaaccggttggctcctgagataagtgagcagctggctggtgctgatagcgagtcttccttggagttgctgatgggaggagtcttgaaagaatttaccagggtaagtctttgttgata

SEQ ID NO: 339044 - DNA, 885 bp, Cannabis indica
tgttgctttttttcgtgcagacatgtctcagaaaatgcttgaagctctgaagaagagagtgggatgaagctcagacttatctcctccggtcaagaagtctaggggaggtgagacaacactgtccagagagaaggcaccgactgaggcagttattgatctctccgaggagccaaccgttgtggagccttctgccctgaaaataactaagtctaaagactctagaggaggaagctcggacaggcccgagcagtcaaaggacggatccgagctggtcaagagcggatttgggctcctgccccacctgcagcactgcatccaaagactaagagaggcaaagatatgctcacccactacatgactcggttagtccctaaggtgaatgagcagctggctggagctgataatgagctttccctggagctggtgatgggagtagtcctgaaggaatttacgagggtaagtctttcttgatagttgccttttatccttttttacttagctcagattctaatgtttcttctctgtgcagatcgatctgaagatggcttatgcttattcccgagctaagtcggctgcctctaagaatgctaccatgtccaacaccatgaggttgaaagtggacttagccaggaagaatgcggatgaagccaaggttcaacttggagccgtccgaatggaactgggtgaagtcaacaaaaaacttcttgttgccgagaagaaagtggccgagctgaccaaagagttagaggcttctgatcagcttaaagatgccatgacctccttgtccaaagaagtgaacaacctccaagaagaaagggaggttcttcaaactgtcttccgtaggttggaagcgaagaagaattctaaggaggaggagcttgccgc

SEQ ID NO: 339045 - DNA, 469 bp, Cannabis indica
attttctaaaaaaaacaaatgacagaaaataaactaaaatactgaaaaataaagaaatcaattaaagataggaccagtagtgaaataattcactaaccttggtaaatcagatcgtgaaagagcatttcctccactttaggtggtgttaattctaaaaatggtttctgtggccattggctttgaatatattaccagttttagaattttcaatttcaacagctccgtgaggaaaaacagtacgaacagtaaatggatcagttcatttagaacataacttaccgggatcaaaaggaatgtcctaatcaggaggtcgaaataacttttgtggtccagggagtgattgtgattctttaggaattttcacagatcgatctgctaactttttcggaacattggtgtttctttttgcaatacacagatcttttaaaaattttgagtaggcaggtatttgcttaatgacatctaagaa

SEQ ID NO: 339046 - DNA, 886 bp, Cannabis indica
tcagtacagactctgttattatcttaaacagggcacatataaaatctaaaattctagatcattgggtctagatagaaatatgtagtaacacttacttttaaatgttcttttaataaatttaaaacagagtttgtactgacgaaactggaagaaaattacatttttacaaacattgagtacttataccgctaaaaataaatattaaatttatgccgtttaaaaacttaaaactttaatacttatgttactatttacttttttaaaaaataacaaaaaaaaaacaaaaaacaaattacaacgacacacatgcatttacagttatgttaaagtctttatatctttatatttaataataaatcactattccttaaaaataataataataaatgacaagttaaaaataagttaattcccactttaactttctacaataaataaaaattggaagaaagtgaggatgaaaacgataaggatgatgataagacttacatacaattttcacatatctttaacaaaattttgatatgatttatgtgtcatctcatcgccacatcaaccttacaagtggaatttaaataaaatttaataaaaaatattattgtcaaatatttaagtttggcaataacacatcaaaatcccatcaacattttgttagttataggataatatttaacaagtcttctattttaacaatgtatatgatttgagaaattttgtaactagcaaaaggcataatttaatagtggtaatatttcatgaatgaaattttaaatttaatggtgtgtttaaaaataattgtgtaattactaagtagaataattattaaaatgataattacactattaagtattttgaaactttcactccttttttttttatttttttt

SEQ ID NO: 339047 - DNA, 561 bp, Cannabis indica
caaatgtaaaacaggccaaaagtaaaaacaaaatcaagcagaatatatgtcaaagtgaaaatatatatttaaatatcctgacccaaaagcaggtcccaaaaaaaatataaaaatatatatatactaagggcctggggacgggccataataattgtctccccttagaagataataattaaaattgtctgaaaggaaagaaaagggactgtaaataaaaaagaaaaatatagttgtaatggtgaaattggttggactccgcggcctattcaatacgaggaggaagacgagggccccagcgctcttcgagtagagcatcaagccttttcttcttctcctagaacttagcaagagcttcctcaggtttgggatagaagtcaagtttgatgctctggcgattcgactgccaggccatatagacgccatcatcaaagcgcttgacgcaattcttgcaaacgacagaggtcacgagctcatctcttttggcctttttcaaggcctgatctctaaaatcccgtagctccttcacctccacagtcaggttggtcgttgactgcaagtccg

SEQ ID NO: 339048 - DNA, 415 bp, Cannabis indica
tgtattagatttttggacatctccgatatccgatcaaatccaattggatatttaaaaatagcatccaatctgatccgatcataattagatatctaatgtttggcggtcaattataattaaatcggtcagttgtcattggattgaatcgatttatgtacacttctagttattggtacattaattttaattctacataaattaatttaataaataatataaaaaattgctaaccaattataaagtactacgtgtatttaaatagtatgctcttaaccaattgatgtcatatcaattatttaatagaaactaagacaacatagccacttttctgcagtggttttaactatttgagtttttttttttcagaaaaaagaataaaattaacttaaaaaataaaaaataaaaagtaaaaaaa

SEQ ID NO: 339049 - DNA, 490 bp, Cannabis indica
acattcagtctcactggtagattagagattccagatcagtttttatacttactaaaaatcactgcttcacccccagagtaatcaccatttcatcagtagactttctagcatcaacgcaagtctagaaacctaattttgtgtagtctaagagtattaaaataccacccttatcaactaacatatagttcctcttgttgaccttaagattcacttgatcgtcttccaatgttcctttcctaggttaatatgatatatactcattactcctaatcaacaacatttttctagactaatgcattgcaaagcatacctgagacctctcactgttgatccttaagaaattcctttcatgacttttatcttttctggaatagttaaaacttttctctagataaaaaaaaatctacgtcgaagtcaaaagacttcctgtagaattagccataagaaaaatacttcagcatcttactaaagtaagttgcttgcactaaag

SEQ ID NO: 339050 - DNA, 596 bp, Cannabis indica
aagcacaaattcaatgtattttatcctattagcgggctttattaaaaacaaaaccttatttgatgagtctatatttgtctccaaaatatgactaacttatgtattaatattcttaaattaattctttaaattattgattagtgtgattataaattattaggctatttgaaagattaatcatacatttagagtcatttggagggatgttagcacattttggtggaaaatagtgtaagtcggcgagctcggttttataagatgaaacttaattgtaaattttgacaaccttagaagcaaaattagacttggagctcaacatgaaagttgtagaccttgttctcagctttctggaatatcttaaatagtgcaattccaagttgtcttgaagaagttatggctaaaatactaatcatgtgacaaatttttttggcaggaagtcgtggccgtgatgaggatggtgatttttttgggaaaaattcaaattttatctatttttagtgagatatttttaagggttctaattaggacttctagggatgaattttagcacttttgaactacgaaattgaaagaaaaactcagagagagagagagag

SEQ ID NO: 339051 - DNA, 1129 bp, Cannabis indica
catgaaccaaatgacacattaataagtgatgaaaatacttcagttctttattgatatttaaatcatagagattaccttgaaatagagttttatttagggcataaagcctaacatcccatacgtccatggaccaatcctcaaggcgccatgcctccacgcatgtgggcaggcccttgagacaagctaccaaactagttgcatacattagatctctgtccctttccaacatggtgcatccgtcccatgcgcgtatgcaaactagcccacgaatgactacccatgtaatctcgtgttgagactcatggccaaggcgcaccacaacgtctctggaaggtttgggccacgtcccgtgcaagcggcataccggcaagccaatcgaaacgtacctattaacctctggcagcttcataaacgcactactaggttgccccgataatgtccatgagcatggagacatatgagtcccctcctggtcctcatatgcccgtcccactagccctactgactagtagtggctcacttagcactaaggtgccaagggtggtggagcgcttacaccagggtacccctcttgaaagagcattctgagcttttagcctttaccaagaacatacatgattttggctttgtagacatatgaccaagctgcataccaaaaaacatagtttcaccaaaccaattgcaccattgtatttctaagcccaaataaatggcgaataccaagccccgtcccaatctagacaatattgaatataattacgaaaatgccactgcatacaaactaaccatcagcatgcaccacaacatgcgccaccacttgaccaccacttggccaacttgtgggcatcacttagcttataacgtgccatcttagaatgcacgttacattctcccccactaccacaggtcaatcttccttatctcaaatcctaagcttactctaagcttctcccgaatcctaagtttgcacttgtccctctacctccgtagaaccaccctcttggtgacgatctccctcgcccactcttggacttgataaaagaacatgtgccactgtcgctattcagaatcacccatggagtagtgcctccgcactagaatacttcccccaacatgaattcctacgagt

SEQ ID NO: 339052 - DNA, 507 bp, Cannabis indica
tattttattgtgattcttctaaaccatagatttctttttattacagagctctgaaaattacggtgttcccgacctatagcatttgcttgggatgacacgtcaggtcatcacatatacatttagtatatttattaaaatatcgttttagatttgtagaataatatttgaatactgaactgttctacttagatagatcatttctttttttttttattattattatgaatatgaacttgaattaggatttattttttgtattaaataaatatacatttgttttctatttaaaagttatttcaattttatttaaattattgttattttttttttgtttttttgaagtaaatttctgttacatcatgtttgttttaaattttgcaaaacctatattttgttcttcttaattttctataagtaaataataagtattattttgttatgacttatacatacctaattatattttactaaccaaatataatatcacaaatattaagcataatcata

SEQ ID NO: 339053 - DNA, 916 bp, Cannabis indica
tgtgaaccagcatccacttctctatgccatgatgagggaattttctgatcagatctttaaacctctcccaaaactcatggagagattcattatcttgttggcaaaagttgttgatttctcctcgcagcttggcagactttgctggtggaaagaacttggacagaaattttgtagccaagtcattcgaggtggcaatggagttgggtggcaaggaaattaaccaacttttagctctttctttgagtgagaaaggaaacagtctcaatcagatgaagtcatcactaaccccatttactttgaaagtctggcacaactctatgaagtttgatagatgaagattggggtcttcagaaggtagtccaccaaactggactgacgactgcacaattttgagtatggcatgcttgatctcaaagttgttagcctccacggccggtggcttgatacatgacagagccccagtaagagtagggaggatataatctctcaagctatggccattaggttgatcttcaacggcagctccattattaccgttattacctccaatatttccagcgttattattcacatcggcagccatgatttctgatgtttcagtagttgctaaaactctttcttgcctcttgttctttcggttcctcctacaagttctctcgattttagggtcaacgggtattacaactgcttgcccttggcggcgcatgcacttaaaatacctgaaataaataagaacagttttgcaagaaaaaggttagatattcagcaagaaaaaaaaataccaaagtagaagttagtataatttttgtgtaatattaatctttacacaattccccggcaacggcgccaaaaacttgttacgaaattataaacactatgcaagtaaacgcaatcaagtagtaaactcacacaggtg

SEQ ID NO: 339054 - DNA, 565 bp, Cannabis indica
tcgggtggggttgaaaatattggaagttttttaataaaccctatatcgttagttactagttaataaacgacgatataggtgcacactttattgacatgtgtgcacctatgccgtcggttattagctaggaaccgacggcataggatctattaaaataaaaccatcatcttcatcttcctcacttcttcttcttctccacgataaccagccacccatagcagacctgaaaacccatgaaaatccttgccaaccaccactaaaaactcccacatctctctcatttcttaaccatttcatcccatttttgtcttaaaattttctatttttaatatctaatctcatacactaaaaatttttttttttaaccccatttgcactgtacccgaacctattttaaaaaaaggttgtggtataactccgaccaccgattttcccagagaaaacgttaaatctcaatgttcattaaggtataaatatgatttctattgattttattaatgtacatgcgtattatttcttttttgtcaatttttttgggattttttcattttattaatattatatt

SEQ ID NO: 339055 - DNA, 599 bp, Cannabis indica
aacatgcaaaaatataaaattctatttatgacatataaaatgtattctgtattcaaataaatctccgtaaaatgataattcataactaacatgcaagtttaataattaaaccctaattatctgctaatttcaaaattaaagttaagcggtttttacaattatcccccccttaaaaggattccgtcctcgaaatctaacctgaacaactctggatattgagccctcatgtcagaatctaactcacaggtggcttcctccaccttactgtttcttcagagtaccttgaccaaagttatggttttgttccgaaagaccctatcctttctgtctgggatctaaactggctgttcttcatatgacaagtctggttgcagctcaagatttttcataactcagtacatgagcagagtctgaaacatatttccgtagcatggaaacatggaatatgttgtgaactattgaaagagttggaggtaaagctaaacaatatgccacttgtccaaccttctcaagaatctcagaagtacctataaatttagggcataatgttcctcttttctcgaaatgtttgatcccttcattggagacacctgtaggaa

SEQ ID NO: 339056 - DNA, 1038 bp, Cannabis indica
gtatagcctatgcaagcttggattagctgaacaacttttgttatatatatttttccaaataatatttgtaaaccaagttgcatacaaatttttttctaaaagataaatataattttttttgttatatatatttttctaaataatatttggctgatttttttcttatattttttgaatttgggcaagttttcctcttataaggtagaagattataatacattttttaaaatgattgtttcattacacttttaatatggttcgaaattctgtagagctttttagtctaatacttttcatgattatatacatacttgtagttatttaggacaaccagtaaacttttcaaaaattctaaatagtttataatatgtcgaaaataagattcaaacaattacatacaatacatataagaaaaaaatacaacaaaacattttaacttcattttatcactttaactatttcgaattttctaaaaaaaaattataagtagtatgtattaaataacaacaactaacacaaacaatcataaaaaaatagattaaaaaattatcttagatgctgctaccaataagatgtgtattgaactataaatttttccttacttatattatctagtatagtctgtatttttcacctagtatattaataattatttaattttaagaaacttataaagtattttgtttattttgtattgttcttcttcatgtattggaatgatacaacatagtatatggagtagagatcaacaaatacaagaacttaaattttctatgacctcaatgttaggaatattttaacagaatttagatttactaacaagtatgttgaattaacattctaaatatgaattctctaaaacaatgaaataaacacatgagggtttaagaaaaccttacattgattgcagcagaatattccgttcaagatctctagctctcgattcctttctgtagcagagcattatcaatatctgaacttggatctctttctctcctttgggtttggttaccaccgtcatactcactatgattgagt

SEQ ID NO: 339057 - DNA, 753 bp, Cannabis indica
gggtcccagtgcgggtccaggtttgggtctgtgttagggtctcggtctggatctaggtctgagttttgatcccggtctgggtccaactcttggttcaagtccaggtttgaatccgaatccctatctaggtccgagtttgggtctgggatcaggtcccatgtctagttctatgtctaggtttgggtctccgtctcggtcctggtctgggtacacgaccgtgtctgggcccgagttccggtctctgtttggactggggctaggtccgagttcggttctaggtctgggtcctagtccaggtatttgtcctagtctttttcgagggtcctagtctagcagttcttgttcaggttctagttttaggtcccgggtctgggtcagggtttgggtgctagtccgggttcgggttctggtctaagtcccaaatttggatccctattattatcccaattttcgcactctaacgtcacctcacatgatggtgacacgtggaatcgactctgagtatctgctcgtaggatatagtccgaacaggatacctcatatgcattctcgaagcaaagcgatcaactatccgcacatcgcgatcaacacttaatttagcttttgcatcgtgagtcatcaaagaaatctctataacttggcgatcagattgcagagatatcgcaggctgtccaaatcccacgatcagtgtattttgtatttattatgcaatcctttgcttatatccattgtaacgagaagggaaatacttcc

SEQ ID NO: 339058 - DNA, 512 bp, Cannabis indica
ttcaaagaaaatatatttaagttgaacattagtttttcaaactaattttgggtcaacttaaattagaatactttgaaattaataattaaatagaatcttctagaaaattagttattcagatattctttaatatatttttaggttgaaaatttgttaaattttggatcaacttaaatatgaatattttttcaaattaaggtgattagttcaagatacttaatttgagatttaattaaattttggaaaactatttaagttgaaaattttattattttagaacaacttaaattagatatttttttaaaaatttattttattatattttatataattttgaaattttataattatttataaatggattttcgaaattattgtttgaaaattatttttttttaaattaattttggatcaacttaaattaagtaatttttattattaaaatatatagattaaaataaatgattaattaaaaatacattattttaaataatgagctttaatcaaagaga

SEQ ID NO: 339059 - DNA, 785 bp, Cannabis indica
ctcttagatataaatcaactcttttgggttctatctcgtacatacatgaacactatattccatatcctattcgtgcacttgcgagtataaatatttaaaacacacatcaccattgggtgtacaacaagaacacctccggccagagtttgggcaaagggaaaagtattgcccaataagaagtcgcccaaggtggggatgaagatgtgcatccccgacttagggaatcaaatacaaatgtaaggccagtggaacaatttggaagagataatcgacccaaatatcgcaccaggaaactcaaaattggcaaaggtttgttactcgaagtaaaattatgcttaataaaatttctaagagaaaacctagacattttttcctggtcacacgaggatatggtcggtatcgatccttctacaatttctcatgccctgaacattgatccaaacttccgtcctattcaacaaaaaagaagattattggacaaagaacaagcataagcattaaaagaaggggtagaaattttttgtaataacaagttcatcattgaagctttctatccggcttgggtagctaacctcgtactggtacccaagcctaacaaaaaatggtgagtatgtattgattttaccgatctcaataaggcgtgccccaaggactgttttccacttccaaaaaatagatcagctagtggatgcaacagatgggcatgagatcctaagcttcatggacacttattcagggtataatcaaatcagaatgcatccaccagacaaagaacatacaagttt

SEQ ID NO: 339060 - DNA, 825 bp, Cannabis indica
aatggtatcagagcacccgatttaattatctcggagtgcgtcaccaaatagtttagatttattttaaataataatagtaataagtatcttggtatttatatgtataagatataattagattattagcatccaatcctcgataactgattatcttttggttctcaaacctaagaaaatgcctccaaaaggaaggaagacaaagagaacggttggagaagacgcctctcaagctaatatccaacctccacaagctgaattccctatgaacgccctttttgaagacttaaaagatgttcccgctcaacaaatggatcctgccgctcgacaaagtcatcatttttagatctttcatcgatccaagtgcctgagtttgagggtggacaagatcccatggtagctgaacggtggttgaggcagataaagaaaattttaacataataggaacacctcaggaatatcaagttacttttgctgtgtccaagttacagggtggtgcaacatattggtgggagactttgtccaagacaatggaaactgatgggatgacatggcgagaatttcaggaagttttcacggaacaatattttagtccatctcacacgagggctcttattggagtatttaatggtctaagacaaggagatatgactgtgaatgaattttacatgaagtttgtagagctatcctcttatgcatatcctggtgttgttgaccaacccttggtgattaagcagttcatgcgtcgtttgaggcctgcgatacgtggtccaatagcccctttgacctttaacaacctaactgagtgtgtgacagcagccttgcgaa

SEQ ID NO: 339061 - DNA, 711 bp, Cannabis indica
ttaacaaccaaattcgacctccacaatttagtattgctgcaactgttcctccatttagctcttacgattttgatgctctgttggaatagtttcaaaagctccttgctacttaacctaatgtcatgtttgtctcttctttggtaggtcaaccacccattagcacgtcaggtatgccaccttctatatgggttttggactctggtgcttcacaccatatgtctatgtattctacatcattcacttccttgagtcctacatcgtctatgcctatcatgactgctgatggtactcccatgccattagctggcattggttctgttttcagttcaaatttgtcgcttcctaatgcttatcatattcctaatctttcattgaatcttatctgttggtttgtgtgattctggttattcagtatatttttcttctacttcttgtcatgtgcagaatccacagtctcagaagttgactgggactggcggtaggcaggggggattatatgttttggatgaactaagattaccagtatatgcaactcctagggtttaatttgtcttttttttgtttgtatccttcgtcttctagtttttatttgtggcattcttgccttggtcatgtttcagagtctcatttaaaataggctaattagtaattttctccccgaactttgacatgtactcaatcatgccccctaaacttttttggctgttaaaa

SEQ ID NO: 339062 - DNA, 827 bp, Cannabis indica
tccacggggccacgcccagagaataaaatttattagatgaatctcaagtgattacaaaaccaaattgacttatacaaataaagactccctctttgaacttgccgcaactgttgtaatctattattctaatcaaatttctgaagtgctgaaaccttgaactcccttcaaatcgtagcatttgcacacttcatctcgaagagtgactcacatgcaatcttcctcccgaagagtgtctaacttgcaatcttcctcccaaaaggtgactcacttgcaatcttcctctcgaagattgactaacttacaatcttcctcccaaagagtgactcacttacactttttctcctgaaaagtgagtcacgaacaagacttctcccgaagcttaatgaataatatccaaggtgttcaaccggcacaatttcaacaagaaataatacataataacacaataataaaacactaagaacttgttggactcaagttcttcacacaacaaagacaatactctctaactttgaaagtaatttaagaaatgatacaccaagatgagctaagtctaaccaataccagcaacttaagggtgtatttatacaatttagaaaccctctaggtcgtggtccaacaaccaagaaataattaggtcaataaatgaaaatctttcaaaataggaaagtcaaaatctgtttaaacacacagtcagtctgttcaaataggtacaatgaacctggacagtttttcagcaaagttttcataaacaaataaggaaactttgactacaaaaacacacatagctgcacacgatttctgttcggttttatgccctaaataaa

SEQ ID NO: 339063 - DNA, 477 bp, Cannabis indica
tttttttctattttgatttcatcattcttttttatctagctttatattaaaataaagaaactgttttattgtttttaatattatgaaagtaagaccgatgcattactttttatttttaagtttgttattttagaatacagtttacttgttagtttgtttttaaatgttttatgtttgtttaatttcaaagaattgaagtttttggttagctttaatggtggagagcttcgacgaattttaatggcagtccagtagcttcgactaagttgttagaagagcttcaatagtggagattcgaatagtgcgaaattctagtttgagattgtttaaatttgtttgatttcagagaattgaagcttttgagtagctttaatggtggatttagttgccaggttccacagacatgattggagagctttgacgatcgagttatgatttcgaagcttcaacaatagagtttggatttggttgatcgaa

SEQ ID NO: 339064 - DNA, 659 bp, Cannabis indica
tctataaatatgtaataagattcttgagcctctgtattgattcaagctcacttttcatctcatcttcttctcaagtgcctagtaattccaatcatcatcatgatacaccattattcttctcaacatagctacaggtacaataaggacatgcaacaaagaaaaactttattaaagtcattatgtcaacaaagctaatgggtaacacaaccaacttacaacatagcaagaggcactcggcccatgtcgtacacttatggtgttgttagctctaagaattaggtgtttcattaccttctctcaaattcacgagcaattaacaatccacaaaaatagcaaaattctcttgaagaatcggaccacaacaacctccaagaatcattggaatagttgagatattttctaatccaatgcgggttaaagcttaatattttctaatctgatccaatcacaattagatatttaatatttagcggtcggttataattgaatcagtcgactctcattgaattagatcgatttatgcagcacccctacttctaatattaaagtattagtgtagagctattttttcttgaaaaaagacattaataaaataaacgtcatcatataattatacactgcaccttttatatacaaaattaattaattaattttcttta

SEQ ID NO: 339065 - DNA, 724 bp, Cannabis indica
tctggatgatattttaattaagaacttgttatctttcagtcctaatcttagaattgaacatgtgtatagggattctagtcaattagctcattgggctgcaaaactaggattaggattagataatgagttagtttggaatggttctttaccatccctttaactttttggatttgtactttatggtttcatctattgaagcacaagtttttctctcaaaaaaaaaaaaaatcataattgtatatttaattcaaagaaaaaaaaacatgcatttgtttataactgttgaacagtttttccattgactttaaatgttatttagcctcacaatttttttccatttgcattgattaataacagtttgatatagaagatccaagaacagttatgatatattataatggccaatgggtggacaaaacaaactacacagattttgaagtgacagggatattgatttcatcaagatgttcttacaacctacttgcacaaacaatatgttctactctggagttggacaaaaataaataaaatattgatgtttaattccaaataaaatcaggaataccacccatgaagattatagatggcagtggctgcaaattttatgaacaaatcagaaaaaaagatgatgatgagaccaaataccctatgatggttaacctttcgacaaccattccaacaaaaatattggtagcagctctatcaatcacgactactctgaaca

SEQ ID NO: 339066 - DNA, 657 bp, Cannabis indica
cttcacagtcttacacactgttgacctcgcttttagccaacgataatgagtcttatttagtaagcaataagtgatttatagcaatcgatatatatatatagtagaacaaatataaagacacaagaattttatagaggttcagccccgagcagttcggtaatagcctaatcctcattatttgtattgtctttagaacaaaaaaagattcctttttttatagctcttacaacagtatctctgaataagaattcttagataatatatttggggtaaggtctcgactaaacttttgcgaccctttgcccagtgaacatgtatcactatttatagggctgtaaacttggagaggaagtatttcccttctcgttacaatggatataaacagaaaagatcgtgggattaatgctgagtacaaagattgtcatattgacgtaggatacactgatcgtgggatcgtgtgtatgccataatgcgaaatctgaatacgttaagtgttgattcctctgtgcggatcgctgatcggtttgattcaagtatgccagcgaggcatcctgctcgggctatactttatgagcagatactcgaggttgattgcacgtgtcaccatcgtgtgatgccacgtcagagtgcaaaaattgggataacatttgcccccta

SEQ ID NO: 339067 - DNA, 822 bp, Cannabis indica
aaaaaaaaattaaaaaaagcttaaaaattaatgtcaaattaattacaaatttatattttcccaacatgttaggattaataaaaaagggagtagatgagtagaatgaagaatgtgagacatatattaaaatacaatatatatatatatataaaggagagatataaataaatgtatgtataaattaaaattaatcataattgaagtgttgctattatccttaaaagattgaaacataaaaaacttttaaaaagtatgtataaaattgagatgaatcatgatagaagtgttgctataatcttaaaagattgaaatataagagaaataaagaaccaaaaaaagaaaaaatgacagagagaatattatgtgaatatatacacagtactataattgtggtaaaaaaaaaaaatcaattaggtagatttttcttctttgattatttaattaaaaaaaaaatgaatggactatttgaactttttaaaatttaatattataatataaaaaaattaaaatattaaaatgacgtttatgtttgatatttatatttttaaaattttaaaattaaagaaaatatatctttttatttatgaaaaataagaaaataaagttgataaatttgaagtggttttataaaactaagaaataattataaaacgagagaattaaggagagaataaaaagatacaattagagtgattttagaccgtcacatcaccgcttcatacttctcttttatatatatactagtaaatatcccgcgcttcgcagcggatatataaaatatattataaattatatataaaaaaataaattgtgtattttaat

SEQ ID NO: 339068 - DNA, 534 bp, Cannabis indica
gcataacatgttaaaaattaatacaaatttatattttagcattaaatagagtataaagtaaaaaaataagtaacaataaaaatattgggttcaatacttaagacattaaatataagtattgttggtagaggttcaaaaagtaaaataaaaatgctaaagtaaacatgcttttattgggattaaaactcatgacctcgtttagatgcataaaatgactttaccattataccaaagcttattttatgtttatagatatcacttttattatataaatatatgttgtaactaactaaagtacatatatatttttttccctattttttttcagtgtgtaagtggtatttgtgtaatttttttttatttggtctgtatatttatttatttggccaactgaaaatacttttgtaatattattattttttttaattaaaactgaaaaaggaaccgataaaaaatcctcataatttagatttggaccatttttataaaattatatctttatatattaaaagtgcctatctaacggcatttctt

SEQ ID NO: 339069 - DNA, 584 bp, Cannabis indica
aatttgggtacaatactcataaaaagaagtatatttgaattaaattttatttaagagtaaatttgattaatgtataaaaaaagagtatttttcaacatctcccaagaaatttagtaattggtggctaaaactccattttgagacattgtaaaaattaagggaatctttttttttgtcatatttacagtcacattttttttttcattttttcttgtactaagttttcaaaaataatgtgttaaacttttaaaattataaaattactatttttcagtaaaataaaaaaataattaaaacatctaaaaaaacaactctagatgaacaacttaacaaataatatgaaaggacaaaaaataactacaaaacaacataaaaaaaacaaaacaaagacactaatttcaatatgcaaaacaatatcaactcctcaatatatttttgtattacaattttatttacttaattttgacagattgatttatctatttgtactacaattttttttcctagaaatttattgttacaacttcatactttcaattttttttttggttagttaagtgatatttaaaataataatttatttt

SEQ ID NO: 339070 - DNA, 507 bp, Cannabis indica
gttgattacttcactaagtggatggaagccaaaccactcgcaactattacatcaaagaaagttcaagattttattatgaagaacataatctttcggcttgccatacaaaatagtttctgataatggcaagcagtttgttagccaatccttcactgatttttgtgcgaaccatggtatcatcaaaagtttctccccagtggcacatcctaaagcgaatggtcaagttgaagcagtcaacaagaccttgaaggatacacctaagaaaagactcgaagataccaaaggaaattggctggaaaaacttcctgaagttctatggtcataacaaacaactgagaaaatgacaaccgggcagactccattcgtcatggcatattgatatgaagctatgctgcctatagaacttgagccaccatcccacaggagattggcgtacaaccaagataccaatcacatactcctggccgaatcacttgaagaaatagaagagaagcgaaccacaacaaa

SEQ ID NO: 339071 - DNA, 654 bp, Cannabis indica
aaaaatggggaaaactagggttccccaaaatttcccccaaccggtagaccagttccccaaccggaattccggttttgggaacattcctaagagccaactgaaattccggtttttacaggcccctctgaaccggaattcctgttcagtacaggaatgaccaaaaattctataactaaaccaaaacaaccccaatccacatgaatcattctagacctgttctaagcaacctaaagatcaatttcaaagcaacaaaacacaacttcatgcacaagtacaaaaaccaccattgatgagccaagcttgagttcaaaaactcaaaggttgctcatcccactaactagctatcaaaacctactcaaatcaccttaaataaacatactttaactactgaaaacataattaaactccagcagtaagaacagtaaccaaaaacccaaaaacatgcattaatgtttttcttcaaaaataagaaactaaagagggaactacaagagacttacctagagttcaaaatccctttaaatctgctggaaccaacaagaaaaatggagaaaaacatagcaaccccagctggttttgaggttttcgaaagagagagagaacttgagagtgaaatgtaatcttttagaaatttcttattttcttgtaaaatga

SEQ ID NO: 339072 - DNA, 557 bp, Cannabis indica
aattgaaggaggaagataaggacgagaagatccaacctacaacaccatcaatctaggcattgttctcatttcttacttttttctctattttgtattttcttattttgcatagctattctagcactcatggatattaattttctattttggtttatgtttgctactttatttatgagctaaacttttgagacttgaatggttaaaaaccccttttatcatgtattttaaatttaaatgcattacttaagctaaattgtcattgttcattcaagtgagcttcatatttatttattgttattgtttaaaaatcaatggcaacttattaagctagatttagtactgaaaaggttaaatctagtagttggtacttgaatgatgcaagtgaattcgcaggtttaggtttttcttagtaaaggaaatagggatatttcataccttgcataacttgagaattgatgtttaattgctgttctgcatcttgatttgatatagaaatatattgaactaagtggaagaacttaatttgtgagttttgaaaaatctcataaacacaagaa

SEQ ID NO: 339073 - DNA, 733 bp, Cannabis indica
taggagtttttgcagaggttcggttggtagaaatttgtccacccctttgtacataaaaagtggggatatttataggcttacatgtgggtaaggacattccctttatccacctatggttttgtgccatagcccattgcaagagcaggaaaatacaactttaaatctaaccatctggcctaagagaacattcttgattgtcccgtacatagggatggtaagtagtaccatatggatcagggacacatgttgcccaaaggtttctcctttatgaattactctctagacaagccgttaggcaaaaagcgatgttcagaggtacgtacgcgcaataccatggcttggcacgagaaacaagatctgactttatgtcaggaaaaggaataaccatctgtaggtcgatttccatataaattttaagtggccatctgtatttgcgtaggagtcgctgtctgcgatcaatttagagagtctttatctggatgtcaagtagtcaaatcgttgttacaggacttcttaaagtctagggacaagtatgatccttccgcgtcccagagacgctaattcagctagtgatagctcttcgcatcaagctttcaacaatcctgtcccaaattaatgggatatctttatgaggaattgtaatggtcatcgttattaatttaggaggttaataaatatttgcctctaattatgccacgtgtctcctacttaaaaatacggataacatttaccc

SEQ ID NO: 339074 - DNA, 580 bp, Cannabis indica
acttttgttgagcagtttgccagtagcaggaaattagagaagcaatcagaagacctttacgtcatcgtccaacgacgtgaggaggcactgagagattacgtggggcgcttcaataaagaaaaagtgtctattaccaattgtaaccagcacacaaccatctcagctttccgcaaaggacttcgctacgactcagatttatacaaagaactcaccaagtacccctgtaagactatggaagacgtcctcgccaaggcatgggcccaaatcaagtgggaagaagatgaagtcaactactacagatcctctccaagaaaagagactcgcagagatcccagagtagacagacggcacaacgacaaatggtctgagccatacccgacttctaacaagtcagagaaccgaagaaaggaataaaaaccgcccactaacacatatcctcgaaatggaccgaagatgcccaagtacaacttgtccatctcacctgctgaggctgttcaagtacttaaggggcttggaagcaaagtaaagtggcctgagaagatcaggactccagctgaccagagggacagaagcaagtggt

SEQ ID NO: 339075 - DNA, 1247 bp, Cannabis indica
ttatgcccgaagcattgacaaaggttacatttccccttgaaatactcattcttataaccagttgaagatgagcttgcttgtccatttcccttaggattggtggctttcttcttatgaaacctttggtcactagagttgttggaagtgaactttctcttgtgagaattgtttaagtttgtcaccatggagatacttcttgctcttccctttttcatgtcctgttcttctttggcaagaatagcagtcatctccttagtagtccactgctccttttgagcattgtagcttgatctaattgaatcaaattgagaaggaatgatttccatcacaaaccacaccatgtaatcctcaccaagatccaatcccatgcccttaagcttttggtaacaacccatgagcttgtcaatgtgagctctaatgtcacccgtatcagcataattagtgcgatggaacaaagttaagcactcatttttctcattctttgagaacttcttatacttttccttaatagcagcaagaaaatcttttgcattttcagtttgaggaatactatcacgaatggactcatccatgtgatacctcataagcatcaaacaacaacgattggaatgctcccaatcctcataggacttcttgtccttttcagtggcatcatcagcgggtttaggcggtgcatccattctcaaggccaagtccactctcataagagtcaaatttagcatgagagattcaacccactacttgtggttgattccatttagcgtcaacatggcagagtttcttggaacgctgaaaggtgattgagaaacgagggcaataaccattaaatacattttataacaaaatcatgtcatttgtgctcttttctcataaatgaatgattgcaaaataacaaatgatcatcatgtatgctagagttcttagacgaaacaataaaatagaactcatacacatgtaagaacaatctattaaatatcattatcaaatacattaatttttctatcgaaagaatagataaattgtgattcgtaatatttaataaattttcttcacaatattaagcatccttagcaagcaattattatcgataaggatgattaattacttataataatcttaaggaaattttggaggatgttacaaaatttaaataagttaatatttaaacgttcctcgtgaccaaagaattccatgcttaatcttacgataggtaagaaaaataagcactaattgttagaaaaaaaaat

SEQ ID NO: 339076 - DNA, 853 bp, Cannabis indica
agcattaacaacctgccataatataaatctatgttaatgtgttatactataaaaaaaaaaaaaaatagctaaagagcacccatatgatgttcaacatcacttgaattgccatgcttgaatccaaattgatttggtattttgtaattagttagaggttaaactatttatgttcacattaaaaatttggttattttatattttgatgagtggggatagataatagatttgagtcattattgattggaaaacttctttttttcgatcttgattctagtaaaaatttaagaattatgttttttattgaactggagtgacacgaattcacacttgtaatctccttgatgctataattactagaagttcctgactaaattagtatagtaaaaagagaaaaaaaaattaatgtggatattgtaatcaaataaatatttgttgatagataaatgtttaatgattgtcaaaaaaaaaaatgtttaatgatgacaatatcttcacgcgcttaattttgtaatgaacaagttgtggagatataatgaagtaattaattagagtaaacaaagttagaaacttcttttgtactcttatttcatgtttgtaattatgtgtttccactttacaataaataaaattaaaataatcaagaactacctagttccaacttggaagacaaatgcagtcaaatataccaattgcttttaattcaacatttaaataaaagtaaataaaaagttaatacatatataaatggaataattacataagatactattttttgtaaaatatttatatttttacgttcaaagaatatttttttatatttttacggtttttcaaaaaataacacgaaaacaac

SEQ ID NO: 339077 - DNA, 535 bp, Cannabis indica
atacaatctacacagactatgaaatctatgaagtcaaaagactctaaaatgtcatcagccccaagacgctcaagtctacctcttgagatatgacctaagcgtttatgccataatgacgctaaattttctttatttaatttacgtttagtacctcatgattccacatgcaaggtttcattataggatacaattgtttctagcaaataaagattgtcataagaattaaaataaccagttccaataacatttgaatttaaagacaaagtaactagcctctgaaatggttagcgcagggattgagttcatagttggaaagttacacaattcaacacttcaatctgatccgttagaaagggtcagaagagctcaacttgaggatcctgaactagttaaaattcgagatgagattatggctggtcggcctagagatttttcagtctcaaatagtggaatgttgttatgcaaagctcgagtttgtgttcctaatgttgatgagcttaagaaagaaatacttgatgaagctcataccacacct

SEQ ID NO: 339078 - DNA, 980 bp, Cannabis indica
ggttatttcaagagacatgttatctgcttcgccattcataagagtttttattattttattattattattattattattattacatgtgttgcagctatataggatcacttgtaaattttcaaaaaaatttgattaatttacaattttgaaaataatatttccatattttgttgcatgcttgactgtttttcttatatgtgtggtaactatttaaactttattttcgatactataaactattcagaattttctgaaaatttacaagtgattttaaatagctacaatgtacgcagtaataaaaaaaaattgaactaaagacctctttaatgaaatagataaaaaatctaccaaacaaccttttagggtggtatactatagatattttcaataaacatatttgatatcaagatttttgacatttattcactgctttttgtcatcttcaatttataactgtaaactatcattaattaattttatatactattactatcttaatattaattcaaatattattatttaaatagagcttaatccaattaccttatttgctaaggtagtagttgcatagttaggtgtagcttggtaaggaaagaaataggaggggaaatataaaaataaaaattaaggggggcaaatataaaaatttgtaaagaaaaattacaaaattatctataacttctataaaaatgataatagtattgggctttccactaagtaaattacacaattagcctttactagatattaaattacaagaaaaaaaaacattcattattttgataaccacaaaataaataaatttgctaataacaaccaaatatacacaattatttaagtgaatcttaatctttccctcctattagcattttttttattaatcctttcatttttttttttataatcttctataatagtttttctttataacttaaattatatttttaaaatacttttttttttaaattaaaaatttactt

SEQ ID NO: 339079 - DNA, 556 bp, Cannabis indica
attaatgctaataagcattaccaagatatttaacaattttatcataacttatcacgcttctcttacagcttacacattttaataagcaaaccattcaatcaatcaataaataatccactaatcaattaacaatcaataaatactaagccatgagtcgaacgagtcttcgcagccaatgtacatatcaaactagtctttaggatctttaaaccttggtcgctctgataccatgttgtaacgccctgaacctcaagaacgccacgtgtgtgcttttataatcttattatcaataatctattagtttaggaaaagtgtggtttaattcaaaaaaatatattatctttaattaaatttaaaatagaaactttagttcaaaatactgtcgtaatatggggatcccctgctaataaaattcttttacaaccaattataaaaccattaatacaagagtaggttatacatccaatcattataaaaggggaaatcctgcttctaggaagccaagacaacacggttgatatgtacattgctgggagacctctgactcgtggccaaa

SEQ ID NO: 339080 - DNA, 725 bp, Cannabis indica
tttctgtttacagagtttttgctttgctattttctcctctgttttcttcttttctcatatgaagttggtgaaagtaggatacacttatgtgtatgggtttcatataaaatgtaagggtttactttatggcataattaaataatgttaataatgtaataaaataatatagaataatataaaatagatatgaagaaaagaagaagatgatgaaaagagaaagagaaactgaatgagaatttttctgtttattccaatagggtggactcctatttatacaaaaatatgactaaaagaataatgggaaactaaattaatataataaagaaaaatataaccaagcaataatggtgataattaatttggtaatttggacatccataaataatatttcataatacaccctttggatgtccataataattgcctcaataaaaaccttgttgaataacttggtcaaaagaaaaagagtgagtgtaaactaaatccccatcatttagacattcgtagagatcttctaatctacgaatttcgatcttgtatgtcatattctcaaatgttgatgctggtaataactttgtgaataagtctgtaagattgacacttgctcaactaaagctataatgaagaagatagagctaaaggcattttcaccaaattcttcttaactccaaggatcttaaagagaatgactatattgatgttcaacaaattcaatcaagtgtcaa

SEQ ID NO: 339081 - DNA, 530 bp, Cannabis indica
aattcattatttatagtgtttagcacatcccttgagatttcctcaccacttttttagctaagtttattgagctaaaaaaaatgagtcaatattatatttggctaaaattttataacagtacaccaacgtagaattaatccttttttgataaaaaggtgtaaaaaaattaacaaaagtattaaattattattaaaagtatataaaattctattaaatatataaataattaattaatatattaataaatggtaaaagagtaaattaaaatgtaatatttattgtgtataaaatttagtacatgctatattctgtgctaaatttggcacaactaattttagcatgtacaccaacattggagttcacctttatcaagatggactaaaatatcaacatacaccacacttttagctctctattgaagatgttcttaatatgtacatattcttattcactttaattagaattttaactcatttttttttcaattatacgtaattttataagttttgttttttacttgttacactgcg

SEQ ID NO: 339082 - DNA, 500 bp, Cannabis indica
ggttcagtgggtattaaagcttccggtagaggatgtttagtagcacagtacacttttggttttcgtatgccattttgagaacgggttgtcatggcatgggatcgagtgggatttggtggatgcaagtgaggtagagactgggattgaacagaagtattctgtatatcagtgtttgtggtatgtagatttgtatgttggtggacatctgtattggcattttggttgttaggaggtggaatttgttgagtgatgagaggtgtactgtgaactggagtagtggcaaatggattgtttataccagcagtagcatttgttgcatgattgttgtcattatgactggcaggcacaccaccaggagtagcagttggtgtctcatgggttgtttccctcgaaatatttccagaagaggcagtggtattagattcttggtaagtattatgtgtaaaaaatgtagcagatggaaaataagaagtagatgaagattgatgtacctgctggtt

SEQ ID NO: 339083 - DNA, 728 bp, Cannabis indica
tcctagtaaaataatttccagcacatttatgttatcatcaactccaaattccacaccagttgcatcatcatggcgtatttcttcttcatcatcatctgcattaccagcatttgccccagtagcacgatctcgtccatatatttctgcgagcttgtggtagtaagggaataattttccatataaaccacttgcatcttttcatttctgtacattcacaaattaaagcatattaagactatgttctcataaataagcaatattcacatatttatatatatatttataattatagtatatatttacctttacatactcatcaaatacacttttcttacacactaacgtactatgtacttcatcccaattgaaaccacataataataattctgctaaacaagaatactttcccttcaaagtcttaataggtgattcaatatgaggcgatgccttcaagttagaacctggtaattttgcctctagcatactctctatttgttgcaaataaccatttttaaatccacaatcagctcgccatgtaggattttgactcaattctagaagacagtcgatcaatgcattatcttgttctagggtccaataatgtttatttttacctcttcctctttgatcaacattagagtttgaactcatcctgtacattcatttaaaatttttcattataaaaataaaatcataaatttatcaatgcataagcacatcaaagcata

SEQ ID NO: 339084 - DNA, 865 bp, Cannabis indica
tgaaatgattacccctttttgttgcttgcctataaataccagcaagcatttgtacacaaatcattttcaccatccttctttgctaagtaagttcagagcaaaaagagagatttttgcctttatgtttgcggaagtgccttcatctaaattgctcgtttggtttgacattacctgaatccagacatctgattcttgactaagttctcgatttcctttatgtttatttttacatgtttactttttgaatgcaccttcgactttgttctagaagatatgtaggaaaccctaagtttagaaactctgctattctcctttttcatgggttcatgcgtccataatgtttgctttctgaactgcataatgcctgtctttcatcttgcttattctaagcttcatgaaattttttgccctaattcgggaaaattttaaagttcctgagttttgaatttttgttgaacattcttattctttaatctgttgagtacttctggtcggcatatttacttgttttaacgttcgatattccgaccaaacactcatcttgtgtgctgtcttttgtacatgaacccaggtgagttttgggagagtgaacatctaattgaccaggacttgcttcaactcttgcacgaggaccatcctcgtctctgttctagcctaccttcttccattgaaagacattctcccttcaatctttcgtccagccatagaatgatggctcataccaaaaagacgatgcgcatggctgatgcatctgaccctcaaggggctcggcatgccactttgccaagcgtcgaacggttggaattaattttaccaggatcttagatctactcacaattatgttgatttaacaacctaatatgaa

SEQ ID NO: 339085 - DNA, 628 bp, Cannabis indica
attgaatttaaattctaattgtttatgtggtattaactctttacagaaatgaatataccatagattttgtatcaataataaaacgcaaacacatacaaacatgataaacatataaatataaagggtattggtatacacaagataaagaaaatatgaagctcaattcataaatgcaattcataatgaaatttcttaaagagaaaactttattaataatctcaaaaatgtcataatgaattgtctgcataaatatgaaatagggaatagaatcccaaactaataactgaaactaaattattcataaactgagacaattaaatcaaaaacgagcttcatcttcacttagaaaatctctacccttttgtccaaccatccgactcaacttgctaggatatcaatccatgtttaagcagctagggctgaaataagaagaaaataatcatggttaatagatctagaattaataacccaaagggataataattctttaaaacacatgagtttataacaaagatggaaataccttgtttctttgcagaaaacttaggacactaggatttctagtggcccttttcattgcaatagaagcactttcctttttgctttgcatttggattagcagcctttt

SEQ ID NO: 339086 - DNA, 335 bp, Cannabis indica
aggaaccttacagtggttgcagcggaatataagacctccttccactcaaatctctaacccttgtatcctttctatagcagggtatcaccaagatctgagtccgaatctccttctcttgaaactagattcttcacagccttacacactatgattgagtaccacttgatgtgtgtgggaactcactcttttcactatgaggcttcggttttgaaaagaggaagagagagagagaggtttcggctaggtataggaagagaggctcaaaaattttactgaaggaatgagatgcatcatcttttccctttagccatcattacctatttataggaaaccac

SEQ ID NO: 339087 - DNA, 943 bp, Cannabis indica
gtaggttatacatccaatcgtagaaaagggttgatcctgcttctcgaaagccaagacaacacggttgatatgtacactgctaggagacctctgactcatggtcgacagaactgctattcttcttacactcagcaagaaaagctactagacaaaaagtatagtaagtactagtatttacaacataatatacatatcagtggatcattacatatttagcatgtatatacatatcagtacatctatgcaaacacattcatgacacattatatgaataatcatagcaactcataattaacaattttaccttttcactaaatagacattcaatcaatccatagctatataatctcagtgctttgtaaagcttaatagtcatacatcattgtaatcacataattttagtgcttcattaagcactctacttacacaataccataattacctaaactcagtgcttcataaagcacccttaccactcgttatcaacgagctatatatgtcactatcgttgcccgataacgcgaacgataagtaagaaacctatccgcagtttcaacgagtaattactcataatggtaacgaccgtatcttttactcgatcataatcgagtcacaacgataataatcgtttcataacatctccctcgatcataattgagtgacaatgataataattgtttcttaacatttccctcgatcataatcgagtcacaacgataataatcgtttcatagcatctttcctcgatcataatcgagtcacaacatacaatattgggatctcgatcagaatcgagactatcgtatttataattgttaaccacaaacgatacatagtacttttcttacctcagtccagagattaagcgtgcatgtcggcctaagtggataaacaaagcttgacgatcccgggtcctatgtcacgacaataacattcaataaat

SEQ ID NO: 339088 - DNA, 582 bp, Cannabis indica
tttagagaagggtgaaaggattgcaaaagagttcattatagtcctacggcttttaaagaatgtgtcctgaattgtaaattggaggatgtgaaatttggtgggagttacttcacttggagtaataaacaacaaggggatgatagaattttctcaaagattgatagggtgttggcgaatgacagctggctggacatgtatccatatgctgaagcaatttttactgcagaagggttatttgatcacactccggcaatattgacggttcatccttcgcctccaagtggtaggaaaccgtttaaatattttcgaatgtggtctagttaccctttatatcatgaacaagttgctgaagcatggtccaaaccagttattggttcgaaaatgtttcaagttgttaagagattacgaagtttgaaacaggtgctgaatgcgattaaaaaataggggttttccaatgtatatagtgatgaattgaaggctaaggatgggatgcttaagtgtcaacagaagctggcgagtgatcctttgaatgctgaatggcaaaatcaagagagagaggctcgggaaatatatgcagaaaaa

SEQ ID NO: 339089 - DNA, 555 bp, Cannabis indica
gagagagaaagagagtttgagaggaagaaatgagactttgcttcctttttcaattttttttgaataaaatgaattataaaattgatttttccttatttacttcaaccaaaccacaattaaaaaatcagattactaacatatttaaaaaaaaatccataaaagacaaattacaaatgggcaaaaatgaccattttgccgtatcacactaaaatggcattaaaggggtacaaaagggtatttttggagattctgaattctcgaccaatctcgacattcccaatgtctaaaaaaactgccccgctatactaaaatactaaattgtgattctactgagccatacaccgcgttccatgttgccggacaccgaaaataaaaaattatgaaattttactatatgacataaaaatgcattatgaatgcaaatataacagtataaataattatttaaatatacataaataattttcataattaacactaattatttgctaatttccaaattaaactaagcgatctttacaactatccccccttaaaaggatttcgtgctcgaaa

SEQ ID NO: 339090 - DNA, 509 bp, Cannabis indica
aaaaaagaaaataaaattatttcatggaaaaattttgtaaatcacattcaatcatcaaataatcacataaaccaacatgaacacatccaaatcaacacacaaataatattcatcgttttaaattcatatttcatgaaagcaaatcaatattatgaccctgaggccagttgttgggaatattttaccaggatctattattattattatatctactaccacattttattttattttttaaaaaaataataactccaaatctatcacattttttttttaatttattagttataaatagagaaatttgcggctaaactcccttatgtttatatttgtagacacttaaccccttatgttatttttggtggtaatactatcatatgtttacttctgttggcaaatttaaagtataagttaattttgactgttaaataccacataaaactaccactgtgtatacttatttacacgttgcatatatcaatcggtccaaataaatttaattatttaaa

SEQ ID NO: 339091 - DNA, 912 bp, Cannabis indica
gaagaagattattggtaaaggacatgaatctaatggcttgtatgttcttgacccacttccaccaacctttattgcttgttcgagtgttatttttgcttttgaggctcatttccgtttgggtcatccatcccttcctttgcttaagaaactttgtccccaaaatagtaacctgtcttcattagattgtgagtcatgatagtttgccaaacatcatcgtattagtttaagtcctcgagtcaatccatacccaaaataacatcaaaatcttcgaaattcaactctatcagatcaactgacaactcccttccttccacaactgctggtaaagatcgaacccacctgctggagataactaactctccagtgggtagtaaagctccaaagcctcttgaaagtacatcactaggcctattcaaatccttaattatcctacttaaaatataagaatgcatcgcaccagaatcaatcagaacagtcaataaagtaccagcaatagaaagctgacctgtcacaatggaagggctggcatcagcctcagcctgagtcagggcaaacacttgagcatgagcaggtgtatcattcttcttttgttctaattgcagcagttgtgggaaattcctcttcaaatgacccactaccccacattgaaaacaggccctggcctgatactcaccctggtggcgcctcttgcaccttgggcactcaggaaaagtctgccagctttcattcccaccacgacggagaccttggttaccttggaatcttttatttgggcctatagctgatggttcattaggccttttcttgcgatcaccaaggccagtacccctacaagaaccaacaccagatgtctgcttccatgaatctattcttgcaatatttttctttcgtatctgatcttctacaccctca

SEQ ID NO: 339092 - DNA, 835 bp, Cannabis indica
taattgaaattcaaatatttaactatttttaaatttttagtttatttaaacaatttaaattaattaaatatccaatcgtgttgccttaataaaaaatatatggtctattgcaactaaaaaagataacttgtgggtaaaatgggtccatagtgtctatatcaaacaagaagattggtggggatacaacgcccctctccaaagcagctggtattggagaaagctagtggagattaaaaatgaagtcaaacacctagtggatcctgcaacattcatgagcaaatagtatgtcattgcagcaggttgcaaacggtataaacaagctcaggatcgatagcattagagtaagcatgcttggaatagacttaatgttccaaagcactgctttgtggtgtggatttttttgttgaacaggctcaaaaccagagacagactcctcaaatatcacattgtgacagatgataaatgccttatctgtagaggtagcactgaaaatggtcgaccctatgtgggtccatcactacttaaatttttgccacttttctcaaccatttatttatttttcacaaatacgactttttgtactttcaatcctataaatgccaaaactatttatgtaataattaaattaattatcaaataaaattgtcatttatattatttattaattagactccataaagtctcttaattaataaataaactctaaaatcatatttcttcacaatcaagccatatcttagtgaaaattcataaactagacatagtctaactttagaattataattgatttattaaatgaattaatcgaggcttacaagcagtttgtctcaactag

SEQ ID NO: 339093 - DNA, 413 bp, Cannabis indica
ccattcctatcccattcccattcccattcccattctcattcccattccccatccattcacattcccattccccatccgcattcgcattcccattccctggcccattcccaagcccattccctggaccattcctatttctatttccgttcctattcctattcccactcccatttccattcccattcctcgacccattccaatttctattcccattccaattctccgacccattcccattccccagcccattcccatttccaatccccattcccattccccagaccattcccattccccaaaccccaaaatcctaaacgccaatggcacgtttactgtacagtattcataatcgaaataaattaaaggagaaatgtaacggaataaataaaaaataattgaaatcaatatttgta

SEQ ID NO: 339094 - DNA, 809 bp, Cannabis indica
tcggtttgggcggtttacaaaaacttatgtacaaccctagttttaccaaattttgtcactcgaactttgacatgtatcaaatcgtgtctcctgaattttcattattgttagacttttcttgctaaaatagaataaaagtcctaaaatctaataattcgatagttcaaggagatttttcacgatcttaaaagtttatttactaagtcatgcttttatctaattgtattcagttttactaattcagtgattgtgtatgtactaaatcatgttttccagactttgatatctaccaaatcatatccctcgaactttgatatgtatcaaatcgtgtctcatgaactttcatccttgttaaacttttcttactaagataggacaaaagtccttaaatctaacaatctcaatagttcaagagaatttttaatgactttaaaagtttaagaacataatttggttcaaattaaaattcaaatgacaaaaattttaattagccttgtttaaatgaaatttaaaaaattatatttaatgtgattaatttctatataaaaaaatccttaaaaaaatcaatgcttcttttaaattaattaagaagattattgtttttttatttcaacaaatattatgtgtggcatcatttttgtcaatcaataaattcatcaagattgttttctagtactaagtgacactaatctaatataattcaaaattttagattaaaaatacatgtataaataaagctctaattacaaattttatagataatgtatttatattttataaagttgggaataacaagttgatctctcagg

SEQ ID NO: 339095 - DNA, 1105 bp, Cannabis indica
taaattaaaaagtttggctaaagaaaaaaaatctaaccaagattggttcaccaaggctcggtctatacgaacttccacccactccggcttgccacgactccgttcccaagtatacgggtagccatataactcaagatcatgtaggccacaatccaccaaagtgtcattaaaaccctctactaaccacctcggataaggattaccgccctttttatcatcttgggaagtaacatttgttaagatcaccaattatacaccaaggcaaactagacttacttttcagctcccgaattaaatcccaagttctttttcgcaagttcctattaggctcaccatacattcccgtcatccgccaatgaccttgatcacaaccacatattactacatcaatgtaggacaccccatactccaaaacttgaacatcctcctcatctctccacaagagagcaacaccaccactcttcccttggcaatcaaccgccaaagcaccctcaaacccaatcgacacacgaactttctccaccacatccttcttagcaagtgtttcacacaaaaataaaaaactggacttcttttggaccatatgcataaaaagtctattgcattactactcatatatatgcgtttttagatgacttataaaatatagtttatatatattatttctcaatagtacgtatattatatatcataatttttgaaaaataattatataattaaatatcaatttttagaatattaacttttaaaaatataaaattttaatcaatgatcgataataaaaggaaaattaaattttactatttaattaaaaaaaatctctaattttatattatattaaaaatatatttatatttaacactattgttatctatttctctttaattaaaattcaactttttttttatctttttcttttggtttgtatagaacaacttcaattagtctagatagatgttacgtgccaagtcacgttatgttaattttattttagtttttaattttttttaatatcataattttaaaattaataatattcaatgtagtgataatcattaaaatttgtaaagcataatagtgatttaaataaaaacaaaaattaact

SEQ ID NO: 339096 - DNA, 853 bp, Cannabis indica
ataggtagcccatttaattttgtaattaaaatggactaggttgctaaataaaatgatcacttttgatagattttatttaggcccaattagtatttcggcctattcaattaataacagttgtttaaattaaggttaaattcctctcttttgggccttgtgtgagagttagagagtcatagcagtgggtatgacatactgaacccagccctccctcacatgaacaaccccaattgtgaaggcccatttgcttgatttgaataactgtactaggttaattaaactactttatcctaataaaattgattagcaacataattaatttcgaaatatatgaaattaatttttcatttgaatattttgaaattaatttaagaaaaacacgcttagtttaatgaaattttttcaagataaactatatgtgtttttcttgtatttaattaaataaaagaattataactaattagattctcctaatgcttaattatttaatatttcattaaatattttttaagttgtaaattagttatttataactaatttttgaatcaacttgaatttgaatatttttaaaattcataattaagttgagagattataggaaattagttactgaaagattctttaaatattgttttaagttgaaaatttgttaattttatatcaacttaaaatggaatatttttcaaattaagtggttagtaacttaatttgttatttaattaaattttgtttgaaaataacttaagttgaaaattgtgttattttagaacaacttgaattagataattttcaaatatttattttattatattttaatttattttcgaattttatatataattttcgaaattaa

SEQ ID NO: 339097 - DNA, 367 bp, Cannabis indica
attttttgaagattcgaaaaaaggtaaggtgactatgcatcatcacgcgcgcgcggaaccgagttaacctcggtcacacgcgtgttcagacaggattttgtctgaacaacgcgcgcggatgtctgatgacaccccattccgcgcgcggatatgctggcagctcccctgtccgccgaggtttctcggctattccctcaggttgcgcgcgcggacggtatgaaactcccaaatttttcgtttttcttcgttttttcatgctttttcatggatttaagttccgattttttgtgtagttttgtatttatagatttactattcctaattcaattctaattatcataattaatttatttaatattttttaaat

SEQ ID NO: 339098 - DNA, 647 bp, Cannabis indica
tactgtatataccgaatatatttttatttggtaaaaagtaacgatttttttttacatgtgtacacggttattgtttttgagagtgggttgagtgttaaacacgattccacgttctaattttctctgtcaagccatcactcactcaaacacttccatttctcttttcgtttcttcttccattttcttattttccctcatttcagtaaagtattatggtttctctctgctagggtttctcatttcgtttgagtgttaaaccgtttatggtgcgtactaggagttcaatgtctccatcaccggaggtgtctggttcgaagaagaaggtggaaaaaatagaggatgttgcgaaaaaaaatggttggatctggttcaaaggttgttgagtatgataaggagaagaaaaataagaatgtgtccatttcgaagaggagtggtgtttttgaggcttcctctgacgatcgacgctctaagaagttaaagagtgttgttgaagatgacgatgattttgattcagaatgtgatgaagcccctattgtgttgccaaaaaaattgaaggttagtatattggttgtttatactgaatcatgtattttttttatttgattcttgttaatgtggatgcacatatatatgttagttgttttttt

SEQ ID NO: 339099 - DNA, 1083 bp, Cannabis indica
aataaccttgtctcggacaaaatggagatccacttcaatgtgttttgtacgagcatgaaagaccggatttgaggcaagagagccagcccccaaattatcacaccagagaatagggcagtgctgaaaagaaattccaacttctttgagcaaagattgaatccaaacaagttcggtggtggcaagagctaaagctcgatactcggattcagtgctacttcgagccacaacagtttgtttcttcgaacaccagctcaccaagttgccaccaaagtaaatgcaatatccagatgtagacttgcggtcatcgtagcaaccagcccaatcagcgtcagtaaatccttgaagatcaagtgttttggcaggggaaaaatggagtccttcatgaagtgtgctagagagatatctcaggattctcttgcaagcactccaatgatctgatgtgggcgcttgctgaaattgactcagtcgatttacagcaaacgcaatgtcgggcctagtcattgtgagatattgaagtgcacccaagacacttctgtacatagttggatttttcataggagtaccagtatgttgagacagctttgtggtggagaacataggtgttggttgagacttagagtcattcatttgagtggaatttaacagatcctttgtatacttatgttgagttaagtatacgtggctgccatcacgaatgacctcaaaacctaggaaatagcttactggacctaggattttgagagcgaacttggattgaagtgtggagatgacatgttgaacctgattttgatcttggccagtgattaatatatcattcacatacactagtattaacagaagtttaccattagtgttgcggaaaaagagacttgagtcagctttgttgttggaaaatccccattgttgtaatgattgtttgagtttatcaaaccatgcccttggagcctgctttagaccatagatagccttattaagtttgcatacatggttggaaaattggggatcaacaaaaccttgtggttgatacatgtagactgcctctttgagttctccatttaagaaggcattgttgatgtccaattg

SEQ ID NO: 339100 - DNA, 601 bp, Cannabis indica
aaaataaaaaattaagtaaaaaatgtaataacaactataaaattaatgattgttaattatttttgctcctcgttgaaatcatcttcatcaatctaaagattgtaaaaaaaattatcaaagtagattaccaactaattgaaattattaattatttttcacaaataagcataacaataggaaaatagcaaagaaattattaaaaactaaggagaaatctaactgtagctagttgaatagagaaataagtttgtgacatagatgtaggagattgtaacgaagtagaaaattcacataatgttaagttgggacaaactgaaactctaatttttttattttttttattttttttataaaggagaaaaatgagtcaagcagttattgcaaaataataagagagatttttaattatatacgtaaatctttaaataattatacaaataactttaacttaataattctaataaataccactgcttatgtcgaaatcaaatgtttggctattagacacgacatattaaaatatcttataatttaataataataataattataataataaatataaatttatcaattacaaataaattaaaataataaaaaa

SEQ ID NO: 339101 - DNA, 1056 bp, Cannabis indica
gcatgtcattaattattttgccagatcataatctctcttgattaattttataatttatttaattatttttaatatttataattaatatataattatcattaatttgtacaccaaatctatatatatggtcaagaatggagtatatatatgaatattattaattaagatgttcgtgtgtacaaataataattaatatatatcaacaaaatatctatatatatatatgcttatatcacatggaagtaaaaaaaaaaaaaacagagcaccataatatgagctaataagatccaaaataaatgagtttttgttttttaattttcttttaattttggggataaaaaatccagaaatacattcttttcttttttttttttggtaacttaattattagctttttttctctctggctgagacatcaatgattatacgtataagtgtcgtatataatagaaaagtatataagaaataagttaatattaattatatataactaattgttggacaaattattatgctaattaatgtgaatttttgtactgtatagtatattaagtggagtacctattattatcagcaaggttataatttaatattttgctaaatttttagactatatagtgcttggttgagaaattaataggatgtaataatttcatgtgtttaatagtcattcactattttcactaaaaaaattactattgacaaatttttcagtcataatttaattttttgtgactaaatgtgatttttagtcacaacaaaaagttacttgtaactaaaagataatatttagatacaaattgtcactaatttagttttagtcacaacaagtatattgtaaataaaaatacatttagtcacaacaaattataatttttgtgactaattttttagccacatgttttttagtgatcacaacgtataaatgataaattataattagtcacaagttatgttttcgtcacaaaaaatttatgtaatgagtaaaattttatcattaaagatgactttttttgtagtataaaaaataatatataaataacaaaaaatcaacaa

SEQ ID NO: 339102 - DNA, 652 bp, Cannabis indica
taacttttgaagatttttcatgtcgcaaatcctcggcggcatctcttttactgacgaaaaatgagatatcaagatggcgaaggttgattagctcacatattttggtaggcaacaaagtgagttccatgcaatattccaacaagagtgtttccagactatacagcagacacacagaattaggtaactctttgacatttgtgtaagatgcatctaagtactgagatattttaaatttccaatcgaatttggcaactctgtgatacagcagcgccttaacaacagtgtttccaaattgtgcaacacacaaatagaagcaggtaactctttgagtgtagtgttcgatgcatctaagtacctcaaatgctttaaattggtaatcgaatcaatatgctctccaacaaaagaaagagctcttagtcctccattccttaacacaatttcttgcacaaatgtttcaagaaataaaggtggaattgactctaatggtaatgcaatcaggctgcgtaaattcttcattgtagttaagtcgtcaaattcttctgtatattcaaagcttcccatgtaagatagatggcgagtcttgcttcttagcttgtgcaagtcatttttacatctatcatatatgagacaactctgacccgatacatacaca

SEQ ID NO: 339103 - DNA, 1182 bp, Cannabis indica
ttttttactcttgaaaacataattaaacgtgatcgaataaatgaattgttatctcattaattttcattcatgctttaattcctactcatccttttgaatcagtgatatttttctattaagaaggttgggaagtatacataaccttttcactttgtgagccaagaaatattgatcaaatgaatcatggtgcacatgtatatgttttttcttccaggagattgtcttatttatttgttagcattcatcatatactaataagttttatgtgtgattatgtgattaggtttttgtatgaaatatagagtactttggttttttattgtatgtgtttagagcttagatttgttgcttctgaaaattctaagcttcatatctcctttgtgttttatgttgcaaggttatggtgaatgtgtatataagattctaatagattatattttcgataccatatggtaagtattaagaagttgttaaatttatgcagctcaataatttagttggttgtagtgttgtttctactgtccaacacatatggtattggacactttgttctattattattaaaacatatatattacactctcttgattaccaattcactataactgagaaatattgttcttttctaataggactatacttttcattgcggctgccatttctacttttaattgtaagtacgacacaaatgcacgaacaattagtacagatgctatgattaatatattctaattaatttcttccttatttaaaacccaacttatggtaatataaattcattgatgatgatcaatatggtaatttcacaaattgcagataatattaatggtgagaactaagcttcaagtaatcattacaaagatgggattaagcacagctgatgaatactatgttctctaaggatgtctaatgtcgaaaacggctactataaacctgaaggcacaccatctcccagcaatggaccagctgcagcaagtgaaacacaagagaataactataaagttgagaaggatataagtgaggaagtggttcaggagccaagctcctcctcacaacaaaatgaggtaaagattttcttatctcacttttcatttaggaagtgaaatagataacattactattttactcttataatattttttcctttttttttcttttcttttggtcatgtacattttgttg

SEQ ID NO: 339104 - DNA, 595 bp, Cannabis indica
agaagctgacattcaaatgatggagcgttatctcttcaacggcaacaaaaacgagatttacattatcaacctcgaaaagacatgggaaaaactctagctcactgtcaaggttattattgcttattcaagttcccagcgagatatcccaacgagatacactttccagtgtatctaaacccacgtcagcattgagccggtaaaagcgaataaatcacatctgtgtgattttcagataataactaggggtcttcaataaaatttacaaaccgcccaacacaaataaaccacccaaaccaaaccgaataaaccgacaaaaaatacaacccaaaataatataatgaaaatccaaaccgcccaatgaatatattgggtggtttacaaattattctaaaccgcccaattaacccgaataaatcgaattaaaccgatttatatatttttaataaaagtgtatatcttatactatataaattacattaatttatttatttttgagttatataaattacattaattagttaaactattttgtatttaaagtttggacattttaatttttaactcaaaacttagattttatagttaataattttta

SEQ ID NO: 339105 - DNA, 509 bp, Cannabis indica
tatttagcataaacaattcccggaattcctcccaggtcattctagcaacatcctcggtgagggataccatctcccaccacaccaaggtatcctcttgaaattgaaacgtggcacatgccaccctgtcattcccgaccactcccatgaaatttaatattctttcgataacagttaaccactgtttagccttaagtacatcagggcctcccaaaaatacaggaggtgcttgcttcctaaatctctcatataaaggctccatacggttaccagcaacatgctgctccgctggcaccgcaggaaccgcagcacgcggttgcaggggaaactcaacaggagcatcccgttgcctgagtctctgaatctcatcttcttgtattctagcttgcatctcagcaaacctttgctcccaatcagtcggagcctgaggtggatcctcttgaccacctctcggagcacgaccgcggcctctaccgcgtccatcggggtttttgggatttctaccaccccga

SEQ ID NO: 339106 - DNA, 1670 bp, Cannabis indica
agttaaggcctttatataggaaagtctaaatgctaatttacaactaaacccttagatgtttacatattaaattgattaaatacaaaagactaaatttccccttgaaagtagatattttccatcagtttgttggttgttaagggcccaatttgcaggtagcttgcaatccccgtattaggctatacaaagaatcctgccaggccaatcttggccaaccatacactacaggatatggtctagtcggccatgcttctgccagggcctagcaggtcatgtgcctgccaggatcttgtaggtcatgttcctatcagctttatcaagtggaggccaacctttaaatgtggatgacaactttgtacacattttccttgtagaggacaggttcccttggtcgaactaaactccatgtaaagaccgcttaactttaatttggaaattagcagataattagggtttaattatgaaacttgtatattagttatgaattatcattttatggagatttatttgaattcagaatgcattatatattacgtatacaaaattttatatttttgcatgttttgtgctgacaacattagaacgcggcgtttgaccattagaatcatattttatattttagtatttttagtatagcgggacaatatagttagacattaagaatgttaggattagtcaagattttacaattgaccaaattacccttaggtggtttagtgactttatagcttaagtgggggcaaaatggtctttttgcctaattagagttttgtcgtttagtgaaattaatttaaattattaatctgatttttaggctgatattatttagataaatcacctatttttttcatgttatgtttacaaataaaagaaaatagaaaatcaaccaaaaacctctctctctttctctctctcttgagctccttggaaaccagctagggtttgagctttttcagctcaattcgaggaatttccagcaagcttttaatgtatccgagtcaaggtaaagttcctagaatctctttctttagttttaaaggctttaagttaagaattatgcatgaatttgagtattagggttatgagttgtggagtagtgtttgtgtttgcttctgaagtttaattatggtgaaatatattgatttgaggtggatttaaaggttgttgtgaggtttgagcaagctttgagtttaagaactgaagcttgactctttaatggtatattttgattctgtgcatgttgtggtgttttattgccttagatatgttctttggggtatattaagcaggtctggaaggtttgtatggttttgaaacgaattgggtaagattttgaattttttgggttacctggtgtaaaccggttaaccggatcaggagctgggttcccaaaatttttcttgttgtcgattcgtgttagttttagagccttggttggttgattccttaatttttagggtattgccatgttgtttatcgataggggaaacttttagtttcaagtttaagtcatcggaaagtgatttagagtgtcacttacccgtgttatgaataatgtgatttagaggccttcattaaagagttggcgaaaatcacttgttgcccaacttcaaacatttgagaccaaatttttctactaagcttctttttctttctcttctttttgggtg

SEQ ID NO: 339107 - DNA, 748 bp, Cannabis indica
tagcagaattactttctgctgctgcaaacgcttacagtttttatattttcgtatatacaactgacatttgcaaaaacacggtttttcatgtcttatggattctaaccatactagatgagatctcacctggacaagttgctcattcttagtccgaaaggactcatgatttatggatccgacctagttatctcaattaggtccattgttgggccttaggtatttaagctgtaattctaatggaaattctacatgtttcaaaccaatctatatctatacttgttgctttcttagttaaatattcctctaatgtccttctcaatgttcctaacaatgattgaaactctttagtctttaagattcaaatatgcttcatttcgacatttccaaatataatttctatttcagaatagaagggagtgagtgggccgaagtcctccatcctaaccaactcttaatttcctccaaacattgtacactcaaatgacatttaaacaacaaatgatcccttgtctctctattattcccacatagtaagcaatcatcaccaagacagataggaaatctaaatatttcaattgtataacctgtccataactgcaaaccaaacaataaatctatgttttacaattgataatctatattccatacttggtgaatcataagtatgctcttaaattgatctttaactcgaaccacctatgtaaagcccgcttagttaatttggaaattagcagttatttatgttaat

SEQ ID NO: 339108 - DNA, 1207 bp, Cannabis indica
ttgttggtctattggagatggcatttctatttcggtccttggtgaaccttggctacccgacactcaaaatccttttgtttcatcttcacatccagctcttgatgggtcgggttgggacgaagatatagttgctgatttgtttgatcagcgtgatcaaaatctgatccttacaattcctatgcatcatggtcacggtcgagataacattacatggaatggtgagatttcttggttgtatacagttaaaagtgcataagacttgttcaagaaattaatgggtaaaatgatcaaggctctgctactgttgataatttctggaagaagttttgggctttgaagctacctccgaaaatgaaaaacatagtgtggagggcttgtcaagggtgtcttcgaaccatgagtcaattaagagcaaagcgtgtggatgtgtctctgtcttgcctcgtttgtaacagccaggaggagagacaatataccatgctctcgtggtctgtccagctgcagaactctgcttgaacagagttggtatcggtacagtgctaccgcagtaagagaggttttttgactggtgtgcttcaaattttctggtgttagatgcagatcagaaaaagttcttggttgctctttgttggtcaatatggaatgcaaggaatgacaaggtttggaacaacaaagtgtcaagtgtggaaagtatagtgtaatcggctagaacttaccttaatcaatggctaactgctcatagttctaatgttattttcccaagtcctggtcttattccaggtgacggagctgagcagtggcagccaccacatggagatagcattaaggttaatgtcgatgccgctatatttgccgacacaaatcagtttggttttggttttgtggttcgtaattcacaaggacttttcatggaaggagttaccaagctttttaatggttcggcaacaccagaatttgtggaagctttgggtgtaaaggaaagttggatcaaaagaaatcaaccatgtcatgctatccttgaaaccgactgcttagtctttatccaagccttgcgtagttcaattgaaatgatttccatgtttggtcaagtggttaatgattgtaaggcgttatttaaaaaacttaaaaatattatcttttttattaggcgatcagctaataaagtggctcataagtttgctagagcttctttattctatcttgattg

SEQ ID NO: 339109 - DNA, 1109 bp, Cannabis indica
aaatattaaaataaaataatattatatatatatatttttaggaatttgaaatggaaaaatccaaaaaatagtgaaaaaacacaaaaaatcggatttttgggtcaaaatcacccttggccgaggaataggctacatgcagcacgttccgcgtgcacatgagagataagagtgactgctggatgagtggccgagaaatctcggcgtgtgcagcctcctaggtgagcaactcgtgtccgaacaagtggacatcgtgtctttagacatgaatttgtcctaatttgtgtgtgcatgccccctatcttgtccgagttcctggtgcgagtgagcaccatgctcgacaccacttggactcaaaatttgaaatcatcacatcttctttgttttttatcggaattgagtattgcttaatttttcacaaggaatccaaataaattatttttagaatgaaaataaaatatttttcatggaaaaattcgtaattcacaaatattcatcaattcacatataaaccaacacgaatacatccaaattcaaaatatcgttttaaatccatatttttatgaaagtaaattattaactggctctgaggtaaattgttggaacttattttaccaggatctaaatttactaacatgtatattgattaacaccctaaatatgaattctctaatacgatgaaataaacacatataagaaaatattatattgatggcagtagaataatatgtctcattccgctcagatctctaaccctttttcctttatgtcacagagtaataacaagatctgagcctggatctccttctccttcagtttggttagccatcgtcttccgcactatgattgagtacttgacttgctatgtgtggacatggtactctatcactaaaggcttgagttgatagaagaacaacaagaggagttcaaaatcactatgaatgagtctatcataaactagttgtctgacagagttagaaaactagatttagataagttgaaggttggattaagatttcaactagggtttaagatttaattatatggattaaaaaagataaaataataggcaaaataacactaagtggccggccacacatgtgggcctcact

SEQ ID NO: 339110 - DNA, 816 bp, Cannabis indica
aaatatttaattattatttgttattaaataaatttttcaagaaaaattggtatttttaccaaactccttaaattgactaaaaatggattcaacaagcatatcaagagcaaaagattcatcaagggatcaacaactcaagaccctattcaaaagaggtcttcaaaatctcaaagtcaaaagtcaacctgaaactcaaagtaaaagtctactctcaggaaaagtacactttggatcaaaacatataaatcaagctagaaagctcatctacatcaacactacacaaaatcaaatggtataaatttacttcagtcttcttaaagtgatttgcatagcacagtagggtttataagtacaaattttggcccactcactaacttgtgcagtaagttttctcacttgatggttcaaaaaaaaaattaattgaatttctaaatcacattttgtttaactaagagaacaaaattagaatttttaaaaatagataatcgagtaaagagttatccacgttatagtgtcgaaaaatgcatgttttgaaactgcctgattttcggcctaccttttttcaaaaaggtagtccgtttttcacagaataggtattctgttttaaaaatagaagtctatttttcccaagatttattttgaaatgcgtgctaacggctataaacggctacttttcacaccaacactatataaacttgatttttactcaaaaataggagttaaatgagcatttatatcatatacctaacatattcatgtgagattaatgagcttccaagtttaaaatccaacaaacacttttcacatactttgagc

SEQ ID NO: 339111 - DNA, 740 bp, Cannabis indica
ttttttatcaatttttgtaatacattttaaattctatactatttcattactattcctattttcattcccattcacattcttatttttttgttttcattcctctcatgtaaatactaccttaattatggaagagttcttgaaggttatctaaagttttctactctataatataagtttgtattttgaattatgttaatcttgattgtcttgagtttgtagaaattttggttggtaatgcgagagctagcttgttgaatttctaaggagagggatatgtggatctcaaacatttttatcattaatctaattgaaccaaaagttctttaataaagtaaaataagattataacttatctacatatactcaaaattctaaaaagtaactctagattataattaaaaaaaaaagtcaatacacaatattcttttactataaaacttcaattatcattttaagaacacgtaccaaaaattttaataataaatatattataatgttctaatccatgaacatgtaaactaaaattgttccataaacatataagctcaaataatattattttatttgctattgaaataagaaagacaatttattttattacatatatcttatgatagtctacacagttgtaatgtagattttcatacttgggagcatacatagtatgggtagataattaatgatgacgcggtggaagaggtgggatactttgttcgtttctaaaaaaattattgggatca

SEQ ID NO: 339112 - DNA, 700 bp, Cannabis indica
tcctatttcatattgacctttcaaatttggaatgggttggctaagaagtttgcctctttctctttcagttacagtagttccaatttgacccatttgagtctcgagttttgcaatagattgagactgattttggaggatttgttgggtagattgcatgaactgttgtagagtgtcttctaaagaaggttttctttgctgagagtaagattggttttgttgggcatgactttggtttggcatgttaaatggttgcccttagttaatttaaggctgattttgcctccaagaaaaattcggatagtttcgccaattaggattataagtggacgagagtggactatcagaagtcttaccatacgaatataaagtattggcctcttcagaaaatgtttcatgggaagaaggaaatgattgggcattgtgtcatggacataaagaacaaacatctttcttagattgcacatgagaattcatagtttgacttattactaagacttctacttttctctctaatttttcaattgatgttcttatgtcaaagtcatcttttacacatattttcctcccctctttggtgaattgtttgatctagacctaggatcataataattccattgttgggaattaatagataactcttcaagagcatcccatgcttcttacccttgcaatttcaaaaattttccagtatgcatagatt

SEQ ID NO: 339113 - DNA, 760 bp, Cannabis indica
cttggcagctttagctggagggaaaaactttgacaaaaattttgttgccaagtcagtccatgtagcaatggagttgggtggcaaagacaccaaccaactcttggctcggtccctcagcgagaatggaaacaaccttaagcaaatggcgttatcgctaactccgttgaccttgaactcacgcaactccacaaagttagctaaatgtacgtttggatcttctgagggcagtcctccaaactggactaatgattacatcatttggaggatggctggcttaatctcaaagttattagcatctacggcaggtagtcttacacaagactgaaccctcgtcaatgttggaagaacatagtccctcaggcaacaatcagatggattattacagtttgcctggtcttccacgacacctccattattaccgttattagccatctcctcaatcgggtcaatcctttgtgcaactctttctaacctcttattctttctattccgtcggcaagtcttcgcaatcttaggatcaataggcactcttaaatttgatccttgacgacgcataaaccaatggtacctgagatagattaagaaaaaaatgagacaaaaatagttagtaagaagtaagaaaaaaaccaaagtagaatttagtctaattactgtaatatcaatttttaaacaattcctcggcaacggcgccaaaaacttgttacgaaaaatatgaacaatacgcaagtgcacgtaatcaagtagtaaactcacacaggtg

SEQ ID NO: 339114 - DNA, 822 bp, Cannabis indica
tcaggggcaacatttaccccccaagccttgtttaattatgaagtgaacaaggcttgttaagatgcctccggttgcctcctcggtttcctggcacgcgctttgggcgcgtgatggtgtatttaatgaccatcattactgcagttattcgctttcgcaggcgtcgattcgtttcttgtccatttattggtacggcgcattaatgggtgtcagacgggcactcaagcgtttctaccaccttgatgacgattaaatccaaccgttggatctatggaatgcgaatcgattgctttcccaaccattcgatggtagcggatcacagctgtttcacatatgctttggcctataaaagccaaccttctcacttcatttggctactttcagcatttcaccaaattttctcaagttttccagagagaaaagaaaccctcaaacaccatagatttcttactcattttcctttgtcgttgccaatcatctttttaccagcgatcagcaccaacacccagttccgaagccttatgtaagttcttcgcatcttgtactctagtttatctgttgtttacatagcatgctttactgttcatctattttttctgggttgaatgttgaatttctgggaatttctattttgagtttctgtgcaacgcgttagattcctccttttcttttgtgtttgagttacttctttttattgtatatttttttttgtcgaggacccatctttttctcacgtaataagaatcaagggtttagagtagacttcatcttctcgatttttaccccttttccttttctttgcttattcataatgtcaccatctgt

SEQ ID NO: 339115 - DNA, 670 bp, Cannabis indica
gagatcatacaacagaccttgcgaagtttttgagatattgaaaaagtacaatatgaagcttaactcaaaaaagtgttcctttggagtttcctcaggaaaattttttggattcatagtcaacacgaggggcattgaagcaaatcatgagaagatcaaggcttttatagatatgacatcaccaactaaaccaatggaagtccaggccttaataggaagaatggcagctcttaacaaattcattcagaagtcaactgataagtgcctaccattttcaatgtatttcaaggcaacaaaaagtttgaatggacagaagagtgcaaggaggcctttaagagcataaagaggcatttttcaacacctccggttttggaaaaaccaaaaactggagaaactttactcctctacttggctgtctcgaaaaatctgattagtgcagcaatagtgcgagaagagggaaagctccagcaacctgtttactatgttattaagaggttattgggggcagaatcgggtatccccctcttgaaaaacttgccttatgcctaagccacacatctcgcaagttacggccttacttccaggcacatccgattaaggtgtcaactgatcaacccctgagacaggttttatcaaaaacagatgcttctcgaagattgataaaatggtcaat

SEQ ID NO: 339116 - DNA, 1288 bp, Cannabis indica
ttattttttatatgttttatttacagtttaacaaaaaaattttaaaattatttaataattttttattgaaaatatattagtggaccactaatatgttgataggtgtcaacttagtctattttgatagaatttaacgaattgataatgacaaaagtagcgtaaacgtaactttaggtatttaatcaactaaaagaaaaaacatgtggtatataaatgtataaaatttaaaacatcaggtatttataccgcaaatacccctatgtttgaatagaatttaacagaaaagtagtgacgaaagtaacagaaatgtaacttaaggtatttgtcccgccgaaaaaaaatatgtgatatttaagtgtataaatctaaaaacgtatggtatttatgccgcaaatattccttcttaaaatagaaattattctaatattctcctacttggtcaacatttagatttaccatttaaatccaacgattatccttgctatataataaacatatgaatcatggtaatataccctcattatatggcgagtattatctttcatgtattaatacaatatattcattccataacaatgtactttatgtggcatatggatactgaatcccatatttactttactatccttgaatttgtgttgccgcatgcctttagtcaaggatattgtgatcaccctattcagtgttacgtgcttaaagaccagctatcacgcctctatatggttaagtatttaatgttgatatgccaacttcgaccagaactattatagttctttgccataaattctatagctgactcactactacaaactacacttttggtgttagttttaaactggcacttatacttttagtgtcggttcatagaactaacacctattccacagtcacaaaaagttagattttaagtgtctgttataaattgatacaaatgagttttggtgtcattttaaatctgacacttaaagtatacataaatattttttcctttaatgacggtttaaaatcgagactaaatgagtaataataaaaacaataattgttaaaaataagatttagtaattccaaaattactaaacctatcaaactcattaacatacaaattttagcattataacaactataaaatgaaaaattctcgttttcaaaaatctattcaaacacataaaaatataaaattttcataataatttattaatttcatagtacaaaatgaaaaatacatacattaaactcaatggaaaaacaaatctcaaaaatataggtgctaaatacaaacaattatcaa

SEQ ID NO: 339117 - DNA, 826 bp, Cannabis indica
ggttaggtttcttacttatcgtttgcttcatcgggcaacgatagtgacatattcagctcgtagttaacgagtggtaaaggggtactttataaagtaccagaattgtgtttagaatattgtgtaaatgtgtatgaaagttaatttgagattgaattgctaaatattacaggttattattctattcacttttcttgctgagtctctgtgagtcacaggtgctttatggtgcaggttacgggaaagcaaaggtagatcagccatgagttcgaggtcgtagcagcaatgtacatatcagccgcagtgaaccggtccagtgaacaggatgctccattttgatagtaatttggaatttcaaagtttatgttgtaaaagtactaataaactagtttgtaaatatttttaaaataggggaaccccgtagttaatatgacttatcttttatcatatggttttatacgtcaaattttaattataaaaatttaattacccacacttttagtataattatatagtatataaataagaattttattaaaacatacacacacgtggcgcccctgttggacagggcgttactgacaaagtactcataaccacctctagctatgacattaagtggtccacaaagatacgaatgtactatacctagtggttctttagcacgctctccctttgcagagaaagaacgttttgtcattttgccttctaggcaagattcacaaactggtaattaacctaaggtgacatttttcaatggaccacctttggttaacctgtgaagtctatcatagcctatatgaccaagacgtaagtgccatagatatgt

SEQ ID NO: 339118 - DNA, 510 bp, Cannabis indica
atcttaggattactattcacctagtagtctaggattctaaatgtttgtgacaaattacaatttttaatattatcaaaggtatttttaattttgatgaagaatagaacctaggttaattgaattatatgtttcattaatttgttgcgtatattagtctatctccataaatcttaaacctttatctaagttaaataaatggcatgctttgtggatttcctgcttaggtaaaagagttaattattgagcggtttgccttgattacataatagggtgattgggataattgatttcctcagctttatctgcgggattaatagtttgattgtaaaatttatattacattcattaaaagaaaataggaatgattgttgagggtggcgaataacctttaactagtttttcataccgtagtctcacttttaatttattttcacttttatttatgttatttcactcaaaatctcaaaacccccttttcttacttttgtcattaatttttgagtaattaaa

SEQ ID NO: 339119 - DNA, 1196 bp, Cannabis indica
tgtggtacaacacttaacaatactcggggtacggttcataccctacctacactagtacgatggtggtactacgtgcatgtggtattgtggtacatggtcgtatcttagttaagaatattcttactcatttgttgagccttgtaaataggtgtatgggcacctagatacaagtcggtattatgtgatatgttatatacttttcttactgagtctatctactcacagttctactttcatgtgtaggtaaaggaaaggcgaaggtttaataggagtaagcttgagctaggatgggatagtacatgtcatggcggcgcgacctggagtgtttggcctcgggacatctgtggtttccattttgtagtgaatgtgcgacctgacatttgtattttttatagtttataaaagtttaacaacgggatcccgacccttgttaatattatgttaatgtttataaagtttcatagttagtactaaaagttttaatttgacacgattttgaagaaaattctttgattagcaaagatagcactacaattgaaaaatcactgtagcttgcgttagcattagggcgttacaattttggaatcagagccgctgggtttgtctaccgaagctcgccacgacatgtacaatcatcatcagagaaagctcagctcacggttcagtaagcccgtacttgtttagtattaaatgtgagtattaaagcatgttaggaagcatattagtttatattcatttatttttgttagaatattagttgtatattagttgaaaaattatggtaacttgtatttaatagtgtcctattttgtaattagtagtttcccatttagtctcctagctttgtacataaatatatactattttattgaatacaacatataattctattcaccattctctacatggtatcagagcattaaagttagaattataattcgaaatcaaaattaggattcataagaaaaaaaagggagattaggatttgagtttcgggttattttttggaaaccctatttggtgtgaaatttttttctcgtcgcccatatagaaggactgcccatccccgcactacaaaaccccaaattttggcgtccaaattcaccgcgcatgggccccacacgccgtcgtttgtcactacctagaatcccatgcggcgctgcatgaggccacgtctggcatcgtctccgatgact

SEQ ID NO: 339120 - DNA, 746 bp, Cannabis indica
tataatttctcaatttcggagattttcttaaactctaggggtattatttgacttatatgtgaattatgcaatttttgtaatttttgctcggcgacgacggaaaatacgattgatgactagtttgatcacatggttaagtttaggaccttatttcttagtgtcatttatattggagaaaataaaatatcggggttgagcggggttatggagtttgaccattttacccctagtattagaattgcttaagttgtaattaaggggcattttagccattttgcaaaggtgtgatttggtggctgccctaggtagtgacacatggcctattatttattcagcaaggattaattaagttatttttaattctcatcttagaaaataagggaaattggaagaaaaagtcaaaacttgagaactctctctctttctctttcggctgaagcaaaccagggggatttcatcttcaatttggtgttttctgaatataaagcaaagtctttgtgaatccaaagcaaaggtaaaaccctaaaacctttatttttctgtttttgaagctttaggttagtttaagtatgtgattttgataagtgggagctgttagggttagaaatgcttagggttcgaattctaagtttgatttgagttaattttagcctctagtagctgatttggttgtgttgtgatgaatttatgcaaatttgagctttgagctcaaagctttgatctctaatggcatgttgagtttcatt

SEQ ID NO: 339121 - DNA, 1523 bp, Cannabis indica
tttattttatttgatgggtatatttttaagaatatgaattaagaaaaaaaaaaaagtaaaaaatacttagtacaaattaatacataaattttacataaaaaattattaaaatatgttatttttagaaacttttggggtataaataaaatttctcttttactattaaattttattttattttaaatagataaataataaattaataattaattgggataaaattaaaatgtataagttattttatataaaaaaaataataaaacaattaatttgggtaaaatgaaatagagtacatataaaaaattgtgtaaccctaaagacaaaaacctaatttaaaacacagccgcacatttcaaacgtccatatctttctctcagtcgcagggggcaacgaaggagacgacgactctttgaacagggacggtggaggagacggcgacaggctttgcgcagggggtggtggaagagacggcgacaggcttgcacaatgaaggttggatcagggttatcgccggggctgctccctctcttctcggacgagtcatcttcggtaacaaagtccatcgatctcgacgggtccagttgagtcgtcgtctctagcagtgacagtggtgcttgaagggcgttctgtttgtcaccgctttagcctccataaacatgggagttatcaaagcaatgctgaagccctccgacgatggcggtgatgttgatgataaagatctggatctgtctaatgttgttcctggtcatctcattgcttatgccttgctttgaaagagggtctccaggtaagagtatatgtttaatggctattggaagttacatttgaggtttgatgaatggttgagattattcggctgttgaatgttggaagatgtttgtggcaaccatagctaacaggagaagaagattcagatgtgaaacccatttttattctccataaagatcggttcatgatgggtttaaactcaaagaagctttaagatttgaagaagatccattgtaattttttttttagaacaatatctgtaatattgatattattacaattttttgtttagatattatgatatattgatttagaaaaagttgtagtattgatttttattatttattttgaattgtattttttttaaaataatattgtatatattgttaattataagaatatattaattttatttattttaattaatattatttttttgatgaaaataaatattattaaacatatttaatatttaaaaaatatatatcaaaaaagtaatttaatttaatttatataatatttttaccaacagttataaactgtcatttaaagtaatttttcgcaacagttgtaaaccatcatttaaagtgacttttctcaacagttataaaccatcttttaaagttccgcttttttatgacacccacatagccaacggttttaggaactgttgggaaatagtataatagccatggtgacaaagttaacttttagagctgactaatcactataaaaaaatcttacttttgatcaca

SEQ ID NO: 339122 - DNA, 531 bp, Cannabis indica
agtgattccagtatatggcaatgtttgggaacccattgtattacaaatgttgaatttaaaattttggagtataaaataatagccattatcctcaggaaacttaacgtaggaacagaaaaccaaacaccgcatgttctcgcttataagtgggagctgtaacaatgtagaacacatggacacagggaggggaacaacacacactgggacctattgggggagggtggggataggggagagcattagagaaaagagctaatgcatgctgggcttaatacctaggtgatggtttgataggtgcagcaaaccaccatggcactacattttacctatgtaacaaacctgcacatcttagacacatgtacctcagaacttaaaaaataaataaaataaaaataaataaaaataaaaatgttaactgagaaactaaatattttaatatatttataaatatagatttttattctcctgaataaaacacttattcagttaattgtctatacatgcgaaagtactttgcagaactaatcttgt

SEQ ID NO: 339123 - DNA, 481 bp, Cannabis indica
ggtgatcattcaccacaaaatctttaaggtactttatttctttttagttaaggattatgtttcgagagcatgattaaataaatctgactatcaactcagcaaacaaactattcaaaatagacaaatcaaaccaactcaataaaactcaaattatgtctaaattttcttacaaaattttattatcaaaactcaaaacaagcagaagaagacatggatcataaagaaagagatttcactcttttcttatgtaattctaattattttaaagatcttttcaaatatatatttatatatattgatgataggattataacaaaattttacctgattttgtattagtggccggaagggcattgaatttgaagcaaaggggtcttcattattcatcaagaatggtacttgatttccattagtcacatgatcatcactagtatcatatgtcaaaccacaaaatcaataaatatatgttggaaattatttt

SEQ ID NO: 339124 - DNA, 766 bp, Cannabis indica
atgtccacgttgccaagatcaattccatgtgggagtacaactcgtcaacaataaggctaagtcatccacttaatgcttcaactgacaggaagtccgagtactgagcagggacggagaaataacaaagcaccaccctaagggggttagtcggcctcccctagccggcccaatggctaggacaggctagccaacctctagaaattgtagggtcagtcaccttgcacctggcaggtgcatggctggccagcaggcatttggtgcgcatccttcatctgtggaaagcaagcgaagttacgatttggtcttcaacaacccacaaaaataggggaaatatcagctacttccccattcttgaagggataaacccacttaatgcttataatttcattatgtaaataaggctttattttactatttttaagggatattagttgttaatcttcatgtaagctctactatataaagagcacgagcctaaccctgatttcctaagttctaagtctctaagctctcaagctctaagtttgaaactcaaactctctctcctcttctctctttcacgccctaggcactctctctcacatgagatttgccaacttgagtctcacattgtaatctcaagagagccactccagattccacaaatcttgtgatatgagtggtattatcgttggtattaatacaactgaaagaggagtaggtcattacccgctaactaagggggtcgaacctctataaaatcttgtgtctcttttacttttctatt

SEQ ID NO: 339125 - DNA, 522 bp, Cannabis indica
ataactaatcagattgtaaagggttttatttagggcacaaaaacccaacaaaatttcctaaaacacatgtaaagttctagaaaaccttacattggtggcagcaaaatattatggctccttccgttcagatctctgactcttgttcctttttgccgcagcgtactaacaagattcgatcttggatcttcttagggtgatgacattcttcacaatctttcacactatgattgagtactgacttgatatgagcgggctagatactcttcactataaggcattcgaatttatgagagagaagagaaagagagaatttgaaatcaatagaggagcctttctttttagtggaaattacactctataccctttttatattgtcctcttttatttttaccctctttttttaaagtctatcatttttatctctttttttaaatattgtaccaattttgcccttgtcacttcaagatactctccatgtgactctcttatgtcagggtattttgggtacaatacatataaaaa

SEQ ID NO: 339126 - DNA, 705 bp, Cannabis indica
tcaccaaaaaatatatatttttcacattttgaaatatttatattaaaatatagatcacaatagtattttttttaagctcatccgaataataacttaatcagaaaattattttaaaattttagagaaattaaagagataaataagaaagacagaaagagagtagtgtaagataagagggaaaaaacaaaaaaagaaaaaagaaaaaaaaaaaaaaaaaaaaaaaataaaaaaccaacttattttttacaattagataaaaacaagtcatttttaacaatttctcattattttatttatttaggtgccgtttggtaacacttttttaatcagttttctgtttttaaaattgaaaaagtaaaaatatttttcaaaaatatgttctataaaactgtttttactttttaattttttaattgagaatcaaaattttaaaaacaaaaaaaatcactttcaatatttttttaaacagttttttttcttaatcaatatcttagacttcgatcatgacccggacccaaatccccccacggtcctggcgctgaacccgacctctgacttaaactcaaatgacgaccctggagctagacccaacgtaaataaaatcaaaaaatgaaaatgaatatgaactttacagaacacacttttattttccgtttttaaaattaaaaaacaaaagtggttacagaacgcatttttgtttttcaa

SEQ ID NO: 339127 - DNA, 498 bp, Cannabis indica
cgtgggccaaacccgggatgtcaaagtaatgacctgggaagaatttaaaagtttgtttaaggaaaagttttactacatagctgtgagaacttcacacatggaagactttgtgaagcttactcaggaaaagatgtcagtggccgaatacgccctggagtttgatcggctatctaagtttgctggtgatctggtgtccacagttttcaccaggaaacagaaataggtgagaggattgaatgccacaatcagtcggggcttgatgattaccacatcacatgacactttgtataagaaagtggtagagctaggcttgattgctgaggaggctgagcaacatgtagcaaaagagtagactgcaaaggatgccgtcacgacatcgaatcctcctgctagtggtaatttcagtaaagggaccgacagtggcaaccccaatcacaaatcgaaggctggggctttcggagcatcaggagtattagaaagcttcagggaaattgaggt

SEQ ID NO: 339128 - DNA, 1452 bp, Cannabis indica
catagcattggcacataaactcacttcatctcccttcttttctaagtaagctccagagcgaaaagaaagttttctggcttcgaattcgccgaagtgccttcatacaactgttggttgacgttgctcaaacctagacactcgaatctttgagtaagtttctgatttcctttatgcttttctttgcatgtttacattttgaatgcaactttcactatgctgtagaaaaatgcttaggaaaccctagggctagaaacttctgcgattctcctttatcatgtcttcatgtgggtttacagccatagagtttgtcactgaactgcattgcgttcgcctttcatcttgcttattctaagcttcatgaacttttttgccctaactcaagaaatttttttgacttcttgagttctgacttttctttggacatagccgtcctttaatctgttgagtactcttggtcggcatatttgcttgtttatcgtttgatattctgtccaacactcatcttgtgtgttgtcttttgtagatgaactcaggtgagtcttgggaactcgggcatcacgaggatcaccctcgtcttcgttctagtcctccttctatcgaaggacattcttctaaccttgtacccatccatagtatgatggctcgtacaaagaaaaccacgcgtttggccaatgctactgatcctcaagtggctcggcttgccactctgcccagtgccgaacaggattcggtcgtcccgatggaggaggatcgcgaggtggaagctgaggtctaggaagttgagaagctgaacgatgtgtgtctgggcagtccttctgaggcagagggagaggaagaggttgaacccccaaatttcggggagtacaatgaggctgggctgccaattgatgctgacggagacgtcctggttgagggcgtggactacgtcagtgaggagcttgctgcggcggttcctcataggaggcagggtgccttgggcgccaggtgggtaagtcctccgtccaagattacggaggcgcgcctttgaactcttgactaggacgggtacctgggcgagctggactgctacattcccgcccacactaatcgtgccacaaaccctgacaaggggatgtgcgcctggtcgggggcccatggccagcaaggggcgctgatgcccttgcacaagtacttcaaggatgtggcagacttctttggtctctgcccgacccaaatcactcctaagggcattaagtatttgtctgccctcttcgtcctctacgcttcccaaggatggggtgctccttctccccacgaggttgcctggttctttgatctgaagtctacccccaaacaaggcaggtcggggtacttctatttctctcagccaggcttcaagtggttgaccggcacggatgccaaggccatcagcaaaatagggcattttgctgatgagtacttcatggtgaagga

SEQ ID NO: 339129 - DNA, 877 bp, Cannabis indica
ggaggacacgtgtcaaattaaggaggatatgaattaatgaatgtaacggtaatcacgtttgaaaatggaataacttattaaatgcagaattgacagagtatatttacaacttgctgactataaggtcttacgcgagataaagatatacaaactgttgtatcgtgcattaacgaaaaaccatacgacattagatgtgcaaggcgaggtgtcaacctcgttacgcatgagtggacgtaggcgagatataatggttgttaagacacttaatgtataacatacagtatacaaactaagtataacagtcgggtaaacccaaacaactaatagcgaggcgtccatctcgccataggaaggcatgctcgtggtactttcactaatcagctccagacatctttcaaggagattcacagctccatcgagtaagctctctcagatagaagttgaaattcaaatgatgctgactgctgaaggtcatcttgtcgccaagaactgtgatcgtcaaatggagcgttatgtcttcaagcgcaaaaatgacgaggtttacattatcaacctcagcaagaagtgggaaaagttctagttcgctgccagagttattattgttatgttctcagcgagacgtcctagaacgatacgagttgcaacgtatttaatacacgtttacattgacctagtaaaagtggaccaatcacagttgtttgatattcaaatattaaccacatttattttacgtggtatgtaatcaaaccctatgatttcaggagataatcattgtaagatatcagtcaactatgtaattaactgcctgactatgtaattataaatataggcaagacagattgaaaaagggactgaaaaatcataagagaaaaaaccc

SEQ ID NO: 339130 - DNA, 544 bp, Cannabis indica
ttatttatttttctgcaaatattttatattctatctgttctgttttgtcactgcaaaacgagtttctattgtagcagaattactttctgcttctacaaatgcatacagttttatattttcttatatataactgagatttgcaaaaacacgatttttcaattattattactactcacatcaataaatttaattaaatcccttttaatggcaaattatattaattcaactttcttattttctctaataaggatgcttactatataaaaataaataagtctaatacttatgtaacaattttatgttttattttttatatatataagccaatatataaattatgtacaaattatataattaataagtaaaatatatcaaaataatgaccatcttatatatgactatactgtatataactaaaatactcactttaaaaatttgttcttactcttgtataatattaatatatctattttaatttgtaatttatacaacaattaagatgttaaaattagattttatattttttgttacaattatttataaa

SEQ ID NO: 339131 - DNA, 1232 bp, Cannabis indica
caccttggacatatatcaaatgattagaggcatagagatgagttgcagctattctggacttgagcaatctcaggcagtgagaatgctaagcaaattcagacaaagtctgaattttgcttgaggaacatacttggttagcatgtcagcagggttttctttagttccaatcttcttaatctgtatttctttccttgtaatcacttctctaataaaatgtagcttgatatctatatgtttggacctttcatggtacatgggattcttcattaagtgaatagcactttgattatcacaatggacagtgatgtcttcttctttgaaaccaagttctttactgaatcctcttaaccagattgcctctttaatggcttcagtagcagccatatactctgcttctgtggtggataatgcaactaccttctgtagattcgatttccagctaatacatccaccaaacactgtaaatgcataaccagtgatagaccttctggtgtcaatactccctgcatagtctgaatcaacataccctgcaatttcagtttcaaattttccattgtctctgtacagcaatccaacattagaagttccatttaggtaccttagaatccacttcacagcctcccaatgtgtcttgcctggatcagatataaatctgcttaccatgctcaatgcatatgccaagtcaggtctggtacagaccatacagtacattaagcttccaacacaggaagcatagggtacattgtccatgtacagtctgtcttcttcattagctggtgcttgattttgagcaagtttgaagtgtgaggcaagaggtgtagtgactgtcttggcctcactcatgcaaaacttgtcaataattttctgaatgtatccttcttgagataagaaaacagaaccaggtctttgtctcttgatatctatcccgagtattcttttggcttcacctaggttcttcatttcgaattcagagctgagttgttcttttagtaagtcaatggcctttctatcttttccaattatcaagatgtcatccacatagagcagaagccatataggagtcttgttgtagtagacacaggggtcatattcacttcttgtgaattctatttgcagcatgaattcatggaatctaagattccattgtcttggtgcctgcttcaggccatatagggacttttgtagtaaacaaacttgatcagtttccacattcttaaatccctcaggctctt

SEQ ID NO: 339132 - DNA, 789 bp, Cannabis indica
agaatgagatgtgtgaccaattagaggaaaaatttattcataaaatacaacatctcgagaatgatatatttattttgtctcaatatcaagaagggtatatgctttcattccttgggggtaaccaatgaaaattgaagcacgacttctaggtgaaaatttgtgcctagtagacgggagagtaaacacataagctagacatccaaaacaccttagatggtcatattgaggtgatttgttatggagtttctcatatgaggtgcaaccttgaaatatagtagaaggagttctattcattaagtatgttgcggtataaatgagatatgaccaataaggaaggggtaagttggattgataacaaagagttctagctatattcaaaatgtgttggtattttcgttccacaacggaattttgttgtggtctttccacacaagaatggtaatgaacaatgcctttggtagcataaaaagagtgcatattgagttctttggcattgtcggatctaatagcttttatggattttgaatattgtgtgcaaatcatgttataaaatgtgggaatgatagattggacatcagatttatttttaagcataaaagtccatgtaaaacgagatttgtcatcaacaatggtgagaaaatacttatatccttcaatgcttatgacattgaaaggtccccaaatatccatatggacaagatcaaatatatcattagcaaagttatggtttgatatgaatggcaaccttttttgttttgcaatgtgacatatatgacaatgctgattttt

SEQ ID NO: 339133 - DNA, 514 bp, Cannabis indica
gaaagtaacccaatgaagaaaaaatgctagcttttatagactagaaagggtgcaaggcagctgtggtcaggcaccatcgtacggtgggaatcgtagtcgattcgcattctacgaatccaacgggcgagataaatgggtgctagggcagttgaaaacatttgagtactttgctgacactcgcattaaatgcgctggtttctcaatggacaggaagcgaatcgttgcctacaaaaataaataaatgttaatgatgaccatcataaatgcagcccacacgcttaaggcacgtgtcgttatatcaacaagctaaccgaaaacatcaaacaagcctcattcaccttttattaaacgaggcttggggggtaaatgttacctttggtttttcccaaaatatgtggacacagataagggtgacacgtggatttgaaaaaacatccactcacgaaggtcaactaagtcttggacaaaaaggaacaccacagagagtgggcctcccggaggagagcataagaca

SEQ ID NO: 339134 - DNA, 571 bp, Cannabis indica
ggtacagaaatggaaattcctgggctgattgaagatttattttagggaagtttctagtgggttggggtcttgttcagaccgtgtgtaagctgtcaataaggtgtatattgattataaatacaccttatagcagctaggttttgtatctctttcatacacttaaaattgtatacatatcttaaggaaaaagtgtctttgttttgtagagaagagctgttcgactcttactctgtttatttgtagtttgtattgtcttgagtctgtattcaagtctacaacgaagaagaacaatagtgcaacctttaggagaaggtttatcaaagctttcgggagattgcttttcaagtctcgcatcggaggattcaagcacacaaccttcggaagaaggttttttaaagctttcgggagattgtttttcaagtcttggatcgagaggattcaagcactcaaccttcgggagaagattacatgcttttgggagattgctttttaagtcttgaatcgagaggattcaagcactcttcaagatgatcgaagggatttcgagctcttggagttttatcaagattcg

SEQ ID NO: 339135 - DNA, 646 bp, Cannabis indica
gtaggtttagtagcttattctaatggttaaaatttctctgcataagttctctaagctagtttgatacattgtacggtgtaggtgcccccaaagtgagcacacagacttatggtttttttgtcacttgcaattccccaagtttcatagaccttgcctgagaaatttcttggggtgctatcgagtgtatgcatgtggaactgtaaagaataactttaagatgttatctttattagcaagttgtttagacatagtcggtcttacgtgtaataaaagcttacaacttagtgttcgcttttgaaatcacattgtggctaaccctacgtagcttaccacgcaatggccatcactaaagagtgatgggaggccatgctaaaaagtaatagggactagctcttttatatttggctacctctgtaaggcttaccgtacaaaggccaccactgaagtgtaatgagatgccaatactgaagagagatgggtactagctcttttatgagtccctgcatggtaaaacgttagaggaactaatatataagttggctagtgcaagatcttaccgagatgttcgttattctagtattttggtagaagagcctgatgggttttatgcccgaaataaaactctttacaatctgattagtcatca

SEQ ID NO: 339136 - DNA, 285 bp, Cannabis indica
aaaaatgagagaatcaaggaaagaagagatagtgctatttgaagtgactttgtaccaccacatcaccgtctcatacttctcctttatatatatatacgtgtgttagtttttttctaatttaaatttttatttttaacttaattaataacataatataataaacttaataatatatataattttttaaaaaaattaatcatttaaaaaataaataaatacacgtgtgttagttttttttcttaattcacatttttattttttaatttaattaataacatattatta

SEQ ID NO: 339137 - DNA, 684 bp, Cannabis indica
aaatagtaattatttatttttttaataaataaataattttttaaattaattaaatagggaaaaaataaaaattattatgaaaaaatttgtcaagacaatgattttttaaataaaagttgtcaggataaaagacaccatccttgtcttaatcgagacaaggtaggagcctaccctatagtggcgtgtccttattggttttgtgtttttgggctgattaattatttaattagttcatttagataactatttgaatttgaaaagtggttaaagatatttcaagttggttgaggtattccctcaaaatagttgagagatttacttatttgaaatatcagtaactgaattcggttatagatatttatttgaataattaaatatgatttaaataatggagatttaactactataaatagaagcatgatttaagaaatcaggagatgattgttcagtactattttcaaaatatagaggagaaaaggaaaattatttttctctctcaaatagttattgttcatgtgttgagaattgatcaagaacaaattataaactttatcctaatagcccacattattccttgtgtgtggtggattgatttgaaaaactatagtgtgagtttctgatcaaccaaaagaatataacttacgagaagttttgaggatatcttgatagtcatcaagaggtata

SEQ ID NO: 339138 - DNA, 652 bp, Cannabis indica
aaggacatagcacttatccaagttgcaagtaaactatgttgtagattattgtatcagttaaacccagtgtgctgataaatctaggtatatatatttaatcacacaatcttgattactttccactgttctgacgacacaataatcaataacataaatgtgataaggatttggatgaatttataaattaaataaacatataaataaaaacatgaaccaaatgacacattaaataagtgatgaatatacttatgtttctttattgatatttaaatgatagagattacattgaaatagagttttatttatttggttctcatggaatccacttcttctttaatttcttctttgaatgttaaaactgatctggccgagccattatagcattttctaatgttttttttatcactttttgttggattatattttaacaggatctatatgtttggttttgtgccctaaataaaacctattacaatctgattagttatcaatttagaatcttgaagtgatttatgtatgttacatttttagggtttaatatatatatgcacaaaataagttaaatccagaacatgtagttattcacaattacagtattgtcaacagagtggaatgtgattgtgattatatgattcaaaagatttggtccctg

SEQ ID NO: 339139 - DNA, 1454 bp, Cannabis indica
cagaaccgaacacagacccgaacacagacccgaaccccaactgggatcgatagctagacccatacttgtgttacgacctgtgaccaagaacccagaacccaggacccatgacctgagaccttgaccagaacccagacccatacaagaacccagatctagacccagatccagaccaagactcggaccctaaaacggactgaaaccgggacccagacccagacccaaacccggactcgtacacaaactcggactggaacccaagacttggaccaggacagagatcaggactgggacccagaccaggacaacgaccgagacctgaacatggactggggctaggaccaagactgggactgggactgggacccaggaccgagactgggatacgggacccaatactcggacctgagatctgagaaccgaattgtgacccagacccagacaacgccaagacccgagacaaagacaagcacctaacaaggactgagacctgcactcggactaggatgataaccaaaactgggacctaggaccctgaccataattggggaccttgacccatcattcaggacccaagacccaaacctagacccaaacctggacgtgagacccgaaccaagacccagactaaggacctagacctttacttggactaggatttagatttggaccccgggacccaggacccaagacacgaggcttggacccgacccatagtcggtgtctaaatctaggaatcggacctcgacctggacctagacccagactagaacccgaacctgaaccaaaacttgaactagactcgacatgtggttggtttttgaatttgggaccgagactcggttctgaacccaaacacgaagctagagccagaccaggactctaacccagacccacacccgaaccataaatcgtagcttgtgaccaaaaattggagccagaactggaattggacccttaaacattaaaccctaaatcctacactctttacacttacccctaaaccctaagccctaaaccctaaaccctgaatccctatatactaaattcaaaaccctaaaccctaaaccctaacctggacacaggcccagacccatactgttatcccaattttgcactctgacgtggcatcacacgatggtgacacgtggaatatactctatgtacctgctcacaattgatacaccgaatagggcacctcatatattcgctcggacgaagccctctcagccgggcagtgagcaatccgcgcagcatgcaaacacttagcaaattcaactttcgcatcgtgagtcatcaaagaaatccctataactttgggatcaaatcacagagatatggcaagctgtctgaatcccacgattattgtattctgtatttactacgcaatgtttccacttatatcaattgtaaccagaagggaaatacttcctccaaagcttatagccctataa

SEQ ID NO: 339140 - DNA, 709 bp, Cannabis indica
tatgccctaggtttacaggaccttttgagattctcgagaaggttggacaagtgacataccgtttagcttttcctccagctctttcagcagttcacaacgtatttcatgtttccatgttacggaagtatgtttcaaatcctgctcatgtactaagttatgaaaatcttgagctgcaaccagacttatcatatgaagaatagctacttcagatcctagactaaaaagataaggttcttcggaacaagaccatagctttggtcaaggtactctggagaaacagcaaggtggaggaagccaccgaggagttagaatccgacatgagggcttcgtatgcagagttgttcaggttagatttcaaggaagaaatccttttaaggggagataattgtaaagatcgcttaactttaatttggaaattagtagataaatagggtttaattgtgaaacttgcatattagttatgaattatcattttacggagattttttttaatttagaatgcattttatatgtcatatataaaatttcatatttttgctttctgtgtgtccgacaacattagaacgaggcctttggctattagaatcacatcttaatatttttcgtatagcggggcactatagttagacattgggaatgtcgggattagttgagattttagaattgaccaaattacccctaagtgatttggtcgacgaggacgtcggac

SEQ ID NO: 339141 - DNA, 934 bp, Cannabis indica
cagacatatgtgaatggcatattcgtttaattagtataatgagcatattatatttgttatgatttatgctgtcttgctgggcttggctcacgggtgatctactgtgcaggaaagggtaaagcattagctgatcaaccatgagtttcaggtgctgggcgaagaatgtacatgttcgagccatatcagaccaagcgggttaagggtctaccagtgatgaacttttgaaattctattttgccgcttagatcgggtagaaagaaaagacttgtaataaagtttgtaaatatttttgggatcccaactgtttaaaagtttaattgcattgcaagtcttatttttattctggttaatataaaagtttaaattctgcgctattttgattagtaatcctgagtttaggggattaaggtttcataagtattttgggtagcgtgcctaattgtttaggacgttacactttttttcggtacaaaggtgtgctagtaaaatgttcacttctctgctaaacattttccacacatgagaattcacctgtcatttttttcaaacctttcgatggcgcaaatgtgcaccgacaaaggtaatgaacccctgaaatatgttcgcgcgaaaaggctgttccacccatggcttttgttggtgaaattcgtgaattgcgccggtaaagggtagttgtgccgacaacactttaactttagggtctttgttgcccctactttttccaaagcatttggccaaatgtgctggcaaaagttacaattcctgtagtgagcatgaagaatagtgaaaatggtcaacttttggggaacaatcctgttcgtggttaggcatggcaaaaagattcattcattcggatcggatcagtgatccgatccgacggatcattactgatccgaaacattcggatagtattggatcttggatcagatccgac

SEQ ID NO: 339142 - DNA, 963 bp, Cannabis indica
ttagaaaaccgccatctcaggcaccgcctggaggaggcaaatcggcagaatgctgaattggagcgtgaggcatccacagccagggcgacacaggggaataatactcaaaatcaacctgaccctggagtgagaagaccacgaggcagacctcgtggctcacgaaccagaaggcaggaaattgctcaggaggaccctcaaaatgctcaggaagaacaacctggggaaactaaggttcccccctgaaaacccaaatgatcagccagaaccatctcatagatatgagaataggaggcgaccggaaaccagggaacaggaaattcctcgtggaaacgaggaaaatcctatgacacaacctgggggacgtaggtcacaaatgaagaaccaccaacgttcttcccggacccatagggaagaggctcgtacaaatcccagtggggaaaacacgacgaaccacacccaagggggaagaacggggcgtgaagaaacgagtgtaaccttgggacgcacaagaacccacagtcgatcaacgcgaggaggagaaagtactcgtcgcaacaatgattgagaaagcactggtacaagtaaaactggaaatcactcaaggacgaggtccatgagcaggacgaggtccatgggtaggacaccgtccgtaagtagaacgaggtccgctagtaactataaccaaccggatctgcgagagcacttgaaccagaaaaaatctaatcttcgccaacaactcggtccaaagcaagaggatcccatccaattacgaatatatgagttggaggataagttcagaaagtatcaagtaggggagttaggaaaataatctggatatgactcggacgaggagctcgaaccatatcatctagatatcatggatactccttttcctcagggatttaaaaacccccacatctcgtcatatgatgggaccaccgatccgatctcgcatttgaataa

SEQ ID NO: 339143 - DNA, 932 bp, Cannabis indica
aaaagtttcaaatttccttatttttttcgtcaaattgcaccaaatcaaagccaaaaatacattacccaccatctatactacaaaaaccaagcatcaaacactcacattatatcaagaaatccaataatctcaatcaaccatgtcaaattcggccatagcaagagaaccaagaaaaagtttcaaaaatgccaccaaaatatgattttaatgcaaaaaaataactatggaggtgttagaaatttacccatagtgaagaagagttccaccaagtgtccaagaatcactcgaaagcttcaaaatctcctccaatggtggtaaaatgtccaacccaaaatgaagagtaaactggagaagatgaatgaatattgaaatgtgagggttttgttttctttcttttcatacatacaaaattttatttttttcaaaagagggccttttaatccaaaattgctattataaccctccactaccattgagggctaaagagcattttccgtattttttgttggtcattttctttgtataattgccttataatttatttttcttggaaaattatcattgggatatattgtgaaatgtgaaaaaagtagttggtggggaaatattttttggatttttaaaaaaatgtacttttagtatagcatagtatttgtttcatacttttgtaagccctattaaaagtcaccaccattagggtgatccatactaaaataaacaactacaaaaaagtacttatctttcgagattctacgacgttaaattgctaatgaacgttcctccatcagggaggattactcactaaaataataactatgtaaaacgaacaatggagatcgaatatcttaataataataaagctcattatttaaaatatattttcttctaatatttatttcaatctatttatttattaaaatttccaatttaga

SEQ ID NO: 339144 - DNA, 925 bp, Cannabis indica
aggttttttacttatcgtttgctgtatcggacaatgatagtgacatacatagctcgtggttaacgagtggtaagggtactttatgaagtaccgtaatggtgtggttacgatgttgtgaaatggatcaagtgtgctattatgtgaagagttgtaattgaatgcattttagtcatagtatgattgagtggatgttatattgcttatgaaattagtcactttccttgcagtctcagtgacctagggatgtaagaataagtgtttataatgatgcattattagagtgctttatgaagcactaaagttgtgtgaatatgctaatgcttgaaccagagtgctttatgaagcattaaaagtaagtgtttatgatgatgtatggttagggtgtcttatgaaacactgaggttgttgattatgtttagctataaatatccttaattttgtaataagtttgttcgcattgttgaattgtatatgtatgttggaagagtatgacctattggtatgtatattctgcggtaatgaaatctactataactttccatgatttttctttatctagtagcttttcttgctgagtcactgtgactcatgggttcttcgcggtgcaggtaaaaaagtctggagctgtgttcggccatgagttggaggtttcccagtaatgtacagatcaactatggtatcttggcttctgggaagcaacatcaacttcttttctctatatttgaaaatgtaaccttgattttgaaatagtctttttgtaaattaattgtaaaggaattttattagcaggagatccccatatcacgacagtgtttgaaacgaaagtttttattttggatttaatttaagattttaattaaaccacacttttctaaattgtatagattagtaataataagtttataaaatcacacacgtggcgtcc

SEQ ID NO: 339145 - DNA, 584 bp, Cannabis indica
aagttcatgtttccattctgagattggaaatttccacggccaaatttctgtctaaaccttctccaggccagattggcttccatagttgagtcttgatcatcagtaacaagattagcactgagatctacttcttttccagctttttcaatccttgactcagatgtaagaagcagagcctcaatttcccctactgtgtattcttcaattcgagtatttgttgagatgacaaaggtgtcgttagaacaccttaagtaactggttgttagtactgttagcctttcagttggttgttgcaactgatttctattagttgttttccttgctgcttctacatgaatgttgtataaatatcttgtacactcattcattcaataatactctttcttctccattgtctttctctctatctttctctgctctttccttctctgctctttccttctttcatgttcttgttcatggtgtgtagttgctcatggctcacaggtttaacaacttcaattcgtatcattctctgcagggaatgatgaacaataaatacatgcctcatgtatttaaataacattagtcatgctcattgttat

SEQ ID NO: 339146 - DNA, 687 bp, Cannabis indica
acttttcaaagtcagaacaccaatacgacttcatttgtgtttgaacaaaaccacaagactcgagaaccttctcagtcactttctctcttccttaggttttcttcaaaaccctagcagagagtttctctctgagaaactcgaacccaaaccctagcaaacccagaaatctaagcacaaacacagagccaagatcagatctatcaagatctgatctaacctcatccacacacacaaacagaaatagtttagggttagaaaacaccaaaatttttgtcgaagttcaccaataaattggctacgtctccgtttgagctgctcctcaaagatgagagctcgattccactatattttgctgttcagaagtacatcaatagagattccaagccacaggtaattttctgactggtaatcttttatttaatacatgtattttgtgtttaatccctctctctctctctctctctctcaatatctaactctctgttgttttctttgtgcatgtacgagcttttattcttccttcttcaagctctctcactctggatcttgaagaatgccctcaaccttatagatctgggctttgatgcaggtatatatagcactagggtttctggttttgcttctgtatttgttagttagagtagttacagaaattagttaggtgtggattaaccaaatccattctaa

SEQ ID NO: 339147 - DNA, 934 bp, Cannabis indica
attacattttatttaagtttaattcattcaaaaaaaaaaaagaagtttaatactccataagcatactattattacaatgtaatacaactaaaagtttcaaataattaaaacaacaacatttctaagtaataaaataaaacaaacatcatgaaaataaatacacaaaacaactaactgttacaaatttaacacaaaaattaaatctaataaaaatataattaatacatattatattttttattatataaatacatataaatatttttttttaacatatatgaatgtaattggattggatcggtttttaattgaattttgagattgacatttaataaccgatccaatccaattagaatctaacttttagcatccaatccaatccaattgtaattggatctccaatttttgtaattggattggattgtattggttcagttcaattggattggattggatgttgtccacccctagcggagggccatgggttgtggggcacatgatctcacttaattttttaaaatttatttttgtatgtattttttttatatatttgtatttttgttcctataaatttaatttttattttagttttgtcatcacatattataattttgtccatataaatttatatctttacatattttcatttttattctcatatatttactctagtttctataaaatttatatttttttataaatgtaaattttattaatttttttttacccctaatatttgtggctggctctaccactgcacgatgcatcttctactatttcaacatttaaatagaaatttagtctatttcttttatggtgatgtatgttatagttatttaaagtattttataatattttgagaaatttaaaataatttacaatataaaaagcaatgttcaaatcgtctatttcatatatgtatataaaaaaaaaa

SEQ ID NO: 339148 - DNA, 943 bp, Cannabis indica
gtctgggaatatgtagacgcacctgatgattatcatccaattggatgtaagtgggtctacaagaagaaaagaggtgctggtggcaagtcaaaacttttaaagctagacttgtcgctaattatttttgaaaagattatttatgtatttatcgaaaataatttattatttaattaatttaaattaaataaatcatatatctatctatcatgtttgttgcatgtgtgtgttttatatattgtttattatcaaagcttgttttataaaacctattattctttgatctaaattgctatggttagcttgttgacaggtccaattatcttattttaaccaatagttcaattatcaatatgtcaaataaataatttgtaacgggtaaattttataatcctctttcatctgtgtataaacctagtaacatgataggatccatttaaatcagtgtgtctgtgtctgtgcctatacgttggctttgggcctagatgcatatagggagcccatttaaattttgataaattaaaataaactaggttgctaaaataaaattatcacttatgatagattttatttaggtctaattagtattgggcttattcaatgaataatggttgtttaattaaggttaaattcctctcctttgggccttgtgtgagagttagggggccatagtagtggatacgacatactgaactcggtcctccctcacatgaataacccctattgtgaaggcctatttgccttatttgaataactgtaataggttaattacactaatataacctaataaaatttattagcaacataattaattttgaaatatatgaaattaatttttcatcagattattttttaaattaatttaagaaaaacacacttagtttaatgaaatatattcaagataaactatatgtaatttttctgtatttaattaaataaaggagtt

SEQ ID NO: 339149 - DNA, 637 bp, Cannabis indica
aagtattagaatgttattttaataaaatgattactttactttgaaacagaaggaaagattattcaatgcaagttgaaaaaaaaaacaagtattattaattgtaaaaattaagtaatacatatttataggcaggcccggccctaggcatagacgggctaggcccgtgcctagggcctactctttctaggggcccatttaaaattttaagacctcattatttcactactatatttaactaaaattaacacacattgtcatcaaattaggcccagcgtagtggcagttggatgataggatttatgttgtttggaacctattcgatcccaccaaatttcacttcttattattaatttttttaaaaataaaattattaagaaacaactacaaatacatacacttgataactaaagctaaaaaaaatttaaatatataaatattatttaaactttctttctaaatttaacattttataagcttatctatttttttttttatttctttattgtcttttttcctacttttcttattatgttattattttcctatttattttgcttcaatcaaaattacatttttaatattatgaaaacaaaatcattaatcaagatataatatttaatttcaataataataataa

SEQ ID NO: 339150 - DNA, 516 bp, Cannabis indica
ggtgcaccatatttagcttgtcaaaaggagtatgcattggacgattggcgagtgagctacaatcagaggatgtggtagcttcagggtcagtgttgcaagggctacttggttgactggagggacgttgtgatggactcagaggagttcatgttggggaagagattctagtgcagaggcactactccatgggtggatctgaatagcgacagtggcacagggtctttgatcaagtccaagagtgggcgtgcgagatcatcaccaagagggtggttctacggaggtagagggacaagtgcagacttaggattcgggagaagcttggggtaagcttaggagtcgagatcaggaagatttgcctgcggtccgtcgatgagggcatcgacatgttgaagtgggggagaatgttacgtgcagtctatgatggcacgttacaagctaagtgatgcccacaagttggccaagtggtggcgcatgttgtggtgcatgcaggtggcatgctgatgcttagtttgtatg

SEQ ID NO: 339151 - DNA, 1130 bp, Cannabis indica
aaaagcgtaggtcttcataacgacttctactgttttagcaaatgggcaacttctgagatcaatggagtagaaggaatggtgtcgaacatgggggactggaaatcgaagtggttttacgtctttaaaatccctgggattataactgactttaatcgcagacctagtatgtcgcgtgttttttaacttaggcattttttgaattacttttgagatcttatgctaactcgctctttcttgttctcgcagatagaccagctcgaccggcacttgacgcgactcgcagagagacagctgaaatcctcgggagccttccggtacaagatcgcgactggcgattactgtgtacaactgcgaagttgcgagaacaccagctgattcctgagaacgcaagtcttcaaagagagccagtatacaaagaaccgtctgagaggcaacaagagcggatagacaaacgcctctccaagcaaacttctcgaccaatctcaggtaatttatctcttgttataaactgatgtcttgagttttatttatacttatctttcatttatcctcgcagatatgacttttttgaagtctgcgcctgtccttaagatcaagccgaagggtggagcaacgacgacctcgcccgttgtcgcccagaagaggaagagcgatgtggtggctacccttgccgcagactcttccaagaagctggccaagaccacgcaggacaaggggaagaaagtcctgatcgaaccaactgttcgagctcgcgacttcttggccatgcaggagaagttcgtgggcgaggagttcatgtccaaagcggagaagatcccttctgaggagcttgttccgcgctctgtggagttggcctcgcagtcgatgaccctgttcataaaagctgctgccgcaggttcgaaggaagccgactcgctgaagaggcacaatgcccagcttcaggagaacatgaagaggctgaagcaagaggcggctaggaaggataaagagcttgaagaactttgcaaggctaaggagcaggcggagctcgaggtcaagaactcgcgggcgaagatcgaggagatgactcgcgacttggaggctgagaaagagaatgggaagaaacaatatgatcaggcagtttctgatta

SEQ ID NO: 339152 - DNA, 798 bp, Cannabis indica
aaaataaatttccaacacatgcatcattcagttcaaaaagcaagcattatgaacgatgaaactgcatgaatcgtcacaaaagaaaatcgcagagtttctttaacttaaggtttcctacatatcttctacagcaagattgaagttgcattcagagagtaaatgtgcaatgtaaaagtacaagaaatcgggaacttactcaagaatcgaaagtatggattcaggttacgctgagctaaacgagcaattcgggtgaaagcacttcagcaaacttgaagctaaaagaaacctctcttatcactctaaacttacttagcaaggaaggttggtaaaaatgagtttgtggacaaaggctcactggtatttataggcaagcaacgaaaatgggtaatcatttcaaaagaacctcagacgcctcgattccccccaaaaagtgaatatgggaaatcaaaagcaatcaagtgcagccatcaaccgtggtaagagaaaattggatttcaaaatattaactatgttagagcatttattagtcaaaaacggaagggacgcccagtcagcttcacatcgagtcgcgaacagacgtgcctgacacgtgtcacccatccaaatgcaaaggcagcttggataaagtccacacgcaacttcagaagtcccgttcagacttgggggcaaatattatcccaattttttcactctgacgtggcatcacacagtggtgacacgtggaatcgactctgggtatctgctcgcaagatacagtccttacaggatacctctgttggaatttattttacgaggatc

SEQ ID NO: 339153 - DNA, 514 bp, Cannabis indica
ttcacggaactcccattgtcaatcagtattttagccacgatcttattggcgatgggagtctctatgaccagggggtcatggtgaggtaaacgcaccatcttttttcatcttcttccgtgaaagtaattggttgatccatgagtcggggcctttgagctggaagctgagtgacttcccacacctcatcgtgtttaacgaccccagcatagcgctttaattcctttcgagtggtccctccaatatggggcccaccagagatcatggccactcttccgttggctcttagtggcaggccaaaggtctgctgaggtcctcccgagggtgcagctgatgccagcgctccgggcgcaccccctgacatctcttagggcaaaggtacccgtgccggaactgggttgagatggggcagccgactcttgatccactcatagaggtgacccaatcggatcaagttttcgatctcatctttaagatttttgcattcattggtgttgtgtccaatgtcgttgtggta

SEQ ID NO: 339154 - DNA, 969 bp, Cannabis indica
agcatttggtaaaaataaaacaatcacgattgcacgacaattataaacagagaatgaaattcattaatgataacaaaagcacgtaataccgtgattaaaagcttcccggtcagcctgttgtcggaaaaatgaaacataattccatgtttaaagaccgcttggccggtcatgatgtctaagaaaaggccctgaggccgaataagatatatcaaataaagagataaaaagagaagtgtttaagcagctggagtcccaggttcttgattcggttcttctgggtcaactggagcaggaggatctgttgtttgaacaggaggtgcatcagcggcctgaccggaggttgaaacagccgcctcaatttcgccataggccacttgggacgcacagaaatcaaggtacatgtccttagcattgcccaagtattcgtaattggcctgaggattagccttccaaaaatcaaagaagagctcgagatcggctgtctccaaggcattcaccttctccttcaacctgtccacctcagccgaaagctctccttccttcgcttccttttcctccttcatccgatgaaggactgctagaagggaagtcgtctcatcccgaagactgttcacctcagcagataaggtctcgatggtctcctcaaaacggtcaggaacctggagatccttaatcaggacagtgattttcttctcaacggtaaatagcttcttgttggtttcacccaattccaactgaacaactccgacttctgccctggcttcttcagcatccttcttcgccaagtctgcctctgccttcagggtgtgggacagagccacattcttggaagcagtagacttagcccgggagtaagcgtaagccaacttcagaccggcctgcacaaaggaaaaactttagcatattgagctaagtatggaagattaagggaaagtatcaaaaaagacttaccctggtgaactccttcaa

SEQ ID NO: 339155 - DNA, 750 bp, Cannabis indica
cattttttgaaaccctcgatggacaaccaaaggtcaccaccttgtgacacctcatcgcctgcctctcgcttatagtttcccttatgaccgcatctgtcagtcgcgaaagtaggggcatgtgttatgagattttctcacctagaaactcgagaccaaaatcctatttaaaagacacgtgtgctcactttcctcgaggaaaactgagatatcaatgagagacccctcgagtacgaacctcccctgaaccagactaagcgagatgatgcaaatataaccaagtctaatcgtattcgcataactcgcattatgtaggaccaaggaacaattttaatccgcatatatatgcgagtataaggatatatgcgagtatccccacgatcctcttacgaaaacatagagatcgattctctatgttgcgatctggtcccgatgacccaacaacctcgataaaccgatacagactcgcatgtcttggttttattaacccgttatatgatgtccgtaaaagcgactttataaggacgcaaatatcctagactcaactagtctcgaatacatcttaagcctgcgagcttatgcaagaatatgaacaaccaacttgcactagagaagtcgcatacgttgatgtatttagtgaattaaaactggaaactgttcttcatttattatgtttacgttctttagcttaattattgtaaatcaatgtataaacggattgataatgaatgcaatgttgggttttatgcccta

SEQ ID NO: 339156 - DNA, 498 bp, Cannabis indica
tttttttttttatatagttatttgtttactgttagttaatagtttattcttattaaatatttcactaagagaagaaaaaataaatacatatggtatatatatatatatatgtttagttttcataggtacatattttaatataattttttgttaatttttaggtgctttataatttttgaatggtattatagtaaacaaatatcaagttaatttttatttatattttagttgattattattttaagtgtaatttttttatagatatacttgagttaattatgtctaaattatttataaaatatttgatattgttgtttacttgatttctaattgaacatattttttattaatcactttaattgtttttaaaaattattattttagtgtaattattgttatttttttagtttattgtgtttcaaattttttatattattgcaattgaatttgtaaaatattttttttttaatattgttcaattagtagtttttgttatag

SEQ ID NO: 339157 - DNA, 668 bp, Cannabis indica
ttggagttagtctcacatttgttaatgtgtggaaataaattgtcatatataaatgaataggctactcctctcattgtcaattgctgtgagcccaaagtgccgccggtccaaaatacgagccaaacttaaaaactttcgctgtctcccatttaacctccatttggcacctttcgtccaatgtgtgccaattttcattgttggggtctttaacctgtttcaaaatccacaaatttccaatgcgtacacccaaaaattttccaaaatttggcatagtcggactctttcaaatatcacattcggtcatgtggtctcttaaaggttgttcgttatacccacattttccagacccaaacatgaggaaggtgtattagagttagtctcacattactaatgtgtggaaataaattgtcatatataaaatgaatgagctaccccacccattatcaattaattttaagataaaacctcattcatcttatctcaaattctaacaaaaatcattatcattttttttttttttttgttttgtgtgtgttactacagtaagtaagtttttggggaaattgctaagtggtgtgggatctcctacagaggtgtagagctacagaaaatgatccattgagtgcagaaaaagaagttgtcaaaaaagagaagaagtgtgctactgt

SEQ ID NO: 339158 - DNA, 562 bp, Cannabis indica
aataaaacaaaagaaatctgctttttctcggagtttgtcactactcaacattctaagctcttgaatattccattacttgatatctgcataacaataataatggttatgatttttgtttaaatagcatgaaaatcttgggttgtcatgctctgttagcacttgggcaagacaacaaaattggagggatctattttacggcaagttggcaaaaactgaacatgtaatgacccttcagatttttttaatcatttagttaattataatgatgttatggtaataattaatttctgtccctttcatatgcagatgtgtgtcccggtcatatgcaaaactaaaactccccactggttcatgtgtgacatagacatgttggcgagtaaggcattcatttgggacagcctgaaaacaccacgcgggaaggatctgaaagatttccgtgtacgagctgcttctgaaatggtacttactttcgattgtttcatttcacattctaggttccaagtttttttagatgaaaactagaatccaagttgaataataaaattaataagtaatttgaaga

SEQ ID NO: 339159 - DNA, 609 bp, Cannabis indica
tttctctctttgattcctttaaacccagaatgttcgacccttttttagtctatttgtggggtatttatagtgtttttctagagtgatccctaggaatggatcacttgtctttttgtgttagcttcatgggggcacatattcccagcagatacaagataggaaatacatgacctataacgtaggtatcttaggagctaggtggatataatcttttatcacctcttgattgatgtgattcctcataaaatagccgccactagccttattaattatagcgtaataatcgaaaaaaggggggttacgccatctgtcatgtcgtttatggagattttaatacgtcttcccctatgcggcattaaatgcgaggtgactattcaagagatctctgcacctcccggaactgccttatcatacctccggcctcccggggagtagaaatatttcttgtgctctcctctgggagacacctccctgagatatttccctttcacctaggacttagtcaattttttatgtgtcctcacagatccacgtgtcaaccttatccaggtccacgcattttggaagaaaataagggcaacaaaaaaaatatataattttattgtcata

SEQ ID NO: 339160 - DNA, 902 bp, Cannabis indica
atctgattattaaaaaaaccattttcaaaatcaaaaatatcaattatacaaaaaacaaagaaaaaccctaaaagtgaggaaacacagtcgggagtgcggctgcagttcttctccgaccacgacgggaccacgggaggagcagaccatcttctccgaccacgccattagcgccgaggagagagaaatcgttgggcgagaggaccacggcaacccgccagcagctacggtacgttggattttcatcttctccgaccacggcgaacgatcgagagagcaggctgagaaaaatggggcgatgggtatgtaattgcgaaccaccacaagaagtcgcggttcgtacctcaaagacggtgaagaacccaggtcgaatgttcaagtgttgccgtaaattcaaggtttgaattgctgccccatttttttcttttttttcgtggtctaattttttgggtatggattttcttgatctgatctagaacttttatatgagggaaccaaattgtaaactaataccaaaaaaaaaaaaaacagaaaaaaaaaccttgttaaagccgatggaacaaagaaggcatatgtacaagtaaggagttctgtttgatattgtagtgtcttttgtacaagtaccagcttctaagtaaattgtatctgggccaatttcctattacatcctcagttgctcaatcgatagattcataaaatcctcccgattatttgattatgatcaatgtaatacatgcctttaatcacaggttaatggggattctttctccttctgattcaaaaaaaaaatctaaatagtgtagcctctgtttgttttgagcaagttattcttttcttagtgtcacagttttgtttggaggaatgcaaggattttgagataagctgaagtagtttcaagactcata

SEQ ID NO: 339161 - DNA, 607 bp, Cannabis indica
tgggtgggtctggtgctggacgagtggaggaaacagctaagttttgaatgggaattgaaattgacgatgatgatgaatgtgaatggggtagggtttggagttattgggctgatattgaggaagtgggctagtcaataacaacatggggcccagttgaccaaaaccaaaagataaaacccaataattaatctttatatgcttttttttggcatttttgaatggaagggtcaactaaagtacataaatccaaatgattgggctaaggaaaaagagttgtgcctaatgattgcacatcattaacatcattgtcagacgttcctcttgattcagaccatgtacttttttcttcttttttttattcttttttttttcaaaaccccaattctttgatcagcccaaaaccaaaactcctcttgctgccgactaacgttgctaagccattgctatagcaactggatagcatcctgccaccccaaacttaatgcttttgcccaattcaaaatttcttcacttccacagcctttttcacttgattctctgcacaaagaaaagaacacaatctcaatctcaccatgacaattatttatagttaattataatatatata

SEQ ID NO: 339162 - DNA, 613 bp, Cannabis indica
tgttctatgttatatacaaatagatcttgggttaattgttaatttatctaacataaatgggtccggatcgtgttcgggttagctcatctaactcgtttaataaatgggtcgtgttcgggttgacacggctaacacaaaactgacccgttaatgacctatttaaagttagtttagtactttaacatgtcataaatgggtcataaacgtgttattggttgacatgtttaaacaaaatatatgcttataaatgagtcatacgagtcgtttcgtgtcaaactgtttataaacgggtcatgttctagtttcattttatgatacgattattaaacgggtcgtgttcggatcaagcattgataactctatggtatagagttaatttttatgcttttaaactaaagtattgtgaggagagtaatgaaaatgtgtttattttgcttaattttaattagttttagtgttattttctatttagtaatctaatctttaagttttgtaaatattgatattgttgggtgtgtttttccaattaactgtgcttattttgttgaaaaggaggaattaaattgacaggtaaaagagaaagaagcaaggaagaaaaggagtacaagctgga

SEQ ID NO: 339163 - DNA, 522 bp, Cannabis indica
aaaaaataaataaacataacaaaacaggtctttgaacccaaaaaaagataaccaaaactaatacattaatcttttaatttgcaatctcgtcatcattatctcgctttttgctctgaaagcctcttcaatggataacttggtgaaataacaacaacaaaataaattaaaagatgaaacaactataaaacaacttatacacaacgttaaatcaccttagttatttaaagtctttagataaatctctgattcataaaattataaaacttagaaaaataactttgccagcttgtgagataaatggacaacaataagcattaaattttgaagttgagatcatttgaaaaaaaaaatttaaaatcaaatccaaagaaaattattgaataataaaactctaaatttgagttttatacctaacatttagatttgagcttcgccaataaaaataaattaactgaaaatgcagcagcaacaacaacaattaacaacaataacaatagcagcaatataaataaaaagatgaaa

SEQ ID NO: 339164 - DNA, 503 bp, Cannabis indica
gtgggtatatcttaaaaaatataaaaataaaagtaaaaactaaaataagtaaaataaagtgggtatacaatgtaatttccttaaatatttatataatttttttttgctgattgtaaaaaataccacattttttaaataagggcctaaaaataattattttcctatgatccactaaattttagaaccgacctgctcttggtgtgatagtatttatacgctaatagtttcatacttctcctcaagttcaaattctactttcccaatatatatatctatttctattctatataaagtgtgcctatataacagaattcttagtttttgagaaattcatgggtgactttttatttatattaaaaataagatggtttattattaaaaagaaaataatttatgagaaattcatgggtcactttttatttatatataataaaataaaaataaaataaatctcattaaataccaaaaaaaatagggttatagatttttttaattaccgtatt

SEQ ID NO: 339165 - DNA, 508 bp, Cannabis indica
tcaatatgctaaagtttttcctttgtacaggccagtctgaagttggcttacacttactcccggtctaagtctgttgcttccaagaacgccgctctgtctgacaccttgaaggtgtaggcggacttgcccaggaaggatgctggagaagccaaagcggaagtcagaactgttcggttggaattgggtgaagccaacaagaagctctttgccgctcaaaagaaaatcaatgtgctaactaaggatctcgaggctgctgaccattttgacgagaccatcgagaccttatctgctgaggtgaacaatcttcaggacgagagacttctcttcgagcagttcttcatcgaatgaaggaggaaaacaaagccaaagagggggtgcttttggccaaggtggacaggttgaaggagaaggtcaatgccttggagagagccagtctcgagctcttgtttgatttttggaaggctaatcctcgggccaattttgactacttgggcgatgctaaggacat

SEQ ID NO: 339166 - DNA, 624 bp, Cannabis indica
tagaatccgtcagggattggccgagaccgaaaatagtgatagaatttagaagcttcttgggtctggctggttattatcgtcagttcgtggaacagttttctaatatttcaacacctttaatcgagcttaccaaaaagaatcaacattttgtatggacggataagtgtgaagcaagttttcaggaactgaaacagaggttaatcacagctccggtgttagccctaccttctaacaaagagaagttcgtggtttattgtgatgcatccagacagggtctggggtgtgtactgctgcaggccgatcgggttattgctatgcctctcgtcagttaaaagattatgagcagtagtacccgactcatgatctagaacttgccgtggtagtattttctttaaagatttggtgacattatctttacggagggagatgtgaaatttatactgaccataaaagtctcaaatatttctttactcagaaggatttaaacatgagacaaaggagtttgttagagctgtttaaggtttatgattatgagatcctttaccatcttgggaaagacaatgtagtggttaatgccctgagcatgaagggtctcgggcaagtaactagtatggttcagatttc

SEQ ID NO: 339167 - DNA, 502 bp, Cannabis indica
aacttgcaaaacctcatgtactctcaaaacctctggacggagaaaaattaggaatatacctagctattacaaaacttgctgtgagtgtcgtgctgatcagggaagaaaacaattccagcatccagtctattacatcagcaaaagactcgttgaagctgaaagacgatatctactaataaaaaagcttacttactgcctaatcttagcaacaagaaagttaaggccttactttcaagctcatcctgttcgggtatacaccgaccaaccactatgccaagtattacaaaaacccaacgcttctggacggttactcaaatgggcagtggaattaggtcaatacgaaataatctttcaaccctaaacaacaatcaaaggacaggctttattagactttgtagttgagtgcacgggcaaagaaaaaagcatttcaaaaggcaacccgaagccagtacaagagcctcagtcgaaccacattgaagacaaacctgttgggttttatgcc

SEQ ID NO: 339168 - DNA, 635 bp, Cannabis indica
gagtaagcttcaggcattaaaagtattggacaatgatctgaagttgaaatctccacattatataacttggccaaagggaataattgaagccaagaatgagacacaagagctttatctaacctttcctcgacccaattacttgaacctttgcctttttcccatgtaaatggataaccttccaagtgtaaatcaaccaacccgcattggtcaagagcaagtcgaaacccgtccactagtcaattggggtagcttcggcctcccctcttctcatcttgaccccctagattgttcatatctccaatcaaacaccaaggtagttgtacttccaaattcagagaacgaaacagatcccaagtattcctccttaaagcacggttcggttcaccatatatacctgtcaatctccaaagtcgcgactcatcttcatgaataatgacatcaatatggtttctagagaacccccttaactcggccaacttttgatctttccaaagtaaagctagcccaccactatggccttgggcttctaccacaaagcaaccctcaaaacccaatgtaactctcactctttccactacatcttttttacataatgtctcacaaagaaaaattatgtcgggcctcttttgaacaac

SEQ ID NO: 339169 - DNA, 796 bp, Cannabis indica
ctctctctctctctctctttgccttgcttgggagccgctagggctttgattttccttgctaattcaagtgatttccatcaatcttagagtaattctagttttcttgttttcttgaagtttaactaaaaaatgagttaatgcatacttgttgaattgtggttgtggctgttgttattgtttattgttgttttcctaagatttaaaatggttaattaagtgaaataggataggttttgatgcatgcttgttacttttgttcaattttggagttttggctcaaaaactatgattttgaaagtgaaatggtgaatttggttgttgtagttgttgttatggtttatggatgttttctgcagttattctatgcttgtttgagtagattaaatcaagttttgaggcatgttagtgagatttagtcaagcttgagttttgaactcaaagcttggagctttaatggtagtttgtgtatttatgcatgaagctcggttttgttgctttggatttgttctttgggatgtgtatagcaggtctggagagttttgtatgatttggggttgaattgcatgagatatgaaaatttttaggtttcctgcactgaaccggaattccggttcagtttggcttgtaggaactggaattccggttggtgttctgggttcttcccagaacggaattccggttgtagaaccggtctgccggttgggaatttttttggaaccctagttcttcccaattttgtgttgtttagggtattgccatgctttttatcgatagggaaacttttagtttctagttt

SEQ ID NO: 339170 - DNA, 608 bp, Cannabis indica
tcgcaataaagtttcggctttgggctatttgaaagaaaagtaaggaaaagattggaagggtggggatcaaatttcatttctagagcgggaaaggagattcttatcaagtctgttgcccaatcacttcccaactatgctatgaatgtcttcttattacctatggaggttgttagagatatggagagtctcatgtcaaaatactggtggaggacctcggttaatagtaactccggcatccattggatgtcctgggagagactatgtcatcacaaaactgaaggaggaatgggtttcaggaacctaagggattttaatctggcaatgttggggaagcaaggttagtgcttactaaccaaacctaattccttggtagctcgaattttcaaagctcgttatttctctaatggtacgttccttacggctgaaattggttctaatcctagttttgtgtggagaagcatactagaggcacaacatctggttgctagtggagtaagatgggcggttggtgacggtgagaacattgatgtgttaggagatccttggttgctggataaatcaaacccttgggttatttcctcacatccggggcttcataatgctaaagt

SEQ ID NO: 339171 - DNA, 514 bp, Cannabis indica
tgtggtatgatctctttgcagagatgaatttaccatagattttgtatcaataataaaacacaaaaacatacaaatattataaacatataaatataattggtattggcatacacaagataaagaaaatatgaagcttaattcataaatgcaagttataactaaaagagaaaactttatcaatattctcaaaacaaaatgaattgtctgcataaatatgaaatagggaataaaattccaaactaataattgaaatcaaattgttcataaattaaaacaattaattcaaaaattaaaagaagattctgagcttcatctttaatcttggacattttccacccttctgtccaactatccgactcaactcattaggatagcaatccaagtttaagcaactggaactgcaataagaagaaaacaaaaatggttagtagatctagaattaataacccaaggggataataagtctctaaaacacatgagttttttagcatagaaagaaataccttgtttcttt

SEQ ID NO: 339172 - DNA, 775 bp, Cannabis indica
tagagatagattttatttatctaaggaacagttttaactatttcaaaaaagataaaggccaagaaaagaattccttaggatcaacagtgagagatctcatgtatgctttgcaatgcattagaccagacacctgcttttgagtaggagtaatgagtaggtatcagagtaatccaggagaagcaacattggaacaatcaagtaaatcttaagatcaagaatatgaactatatgttagtcgataagggtggtattttaatactcttacactacaccaaatcatgtttctagacttgcgttaatgctagaaagtctacggatgagatggtgattactttgggggtggagcagtgattttggagaagtataaaaacctaaatgatgtctctaactcttctagtgagactgaatgttaaagttacaagaatgatacttatttagcctatggaaagttcaatacgttttttggcattgtaccaattataaatcaactactagtgttacatcctagctaacacagaagtagttgccaaaaagtaaagaatccagtaaccctagaggagtaaacatatagagaggaatttcacaatatcaatgattttgtgactgtggatattaatggtggagaaaggatgtattgaatacaacctatcagatcctattatagagataatactacatactatacttgatcgggatatcaaggtgttgagattatttgaattgcaatttttgttttatattagtgcaagtgggagcttgttgggttttgtgccct

SEQ ID NO: 339173 - DNA, 666 bp, Cannabis indica
aataaaatcttaagcttactttttaatggctttggaagtgacgaccttcttcataacagcaaatttagggcccttcttcgccttacccatctctttgattttgtaagaccctaacaagtgagttgctgatgcttctttcaacggttttcccaggaagagaacagttgcaactgaaacagattaaggaattctaaggccttaaacccaaataattagaattaattttacttttatcaaccaaaacccttcgttgaatacgaaactaaatcttcaaaacacaaaaaatcaaagcaatcaaacaaacccaaaaaagaaataaaactctaattcacaacctgatgctcaaattacactccagaaatcccaataaacagttcaaaacgagtcgaaagaagagaagaagaattagaagaaaaattaaacttttgccgcacttcaaaatacaaaaaacaaacaattaaaaaagcacacatacctaactcaacggtgaagcaacaaatcgcggcggagaagcgactcacggcggaggaactgtgagacaacgagaagaaagaaaggagagagatatgaggcgaagggtttagggtttagaatcaaagctgcgccgtttcgtatgatatgtttaatttaatttttttttttattgaaaatgtttaattttatttt

SEQ ID NO: 339174 - DNA, 710 bp, Cannabis indica
aattttatgctaatttttttttttacgttattaaaaagtgatacaattaaaaattttaaaaaaatatcataactcggtgttcataaaaagccacctatgaatttctcataaactaaaaattctattatataggcacactttatatagaatagatatatgcatttctatgcataatgcatccatgcacatatatatataatatgaaatttttattatactccctaataattataattttacatgcatcatgcatcttcatatatttcattcacatatatatgtttgaaaatttgaatgtactcattaataataataatactaataataattgttgaccgaagttttcggcaaccaataaaataatagtagattaagagctgtaagaaatcaagagaaggatttttacgtggttggggcgttaatgagccttagtccacgagtctgtgtatttatgagtgtatttaatacagagaatgttcttggtgagtatttactcttcttgcacttatgcaacccaaaattttcgaccccattaatgagctttgagggggtatttatagtgtttttggtggggtgattcccagaattatagtacatgtatttctgtaactatcaataaagttgggtattcccaatgaatataccatgggtaatgcatggtcaaatccctaggtgctgtagggattttatgtggaatgtccttattgcct

SEQ ID NO: 339175 - DNA, 672 bp, Cannabis indica
tttatgctcgctaatctaacgagcaagtgtggcttctaagtctcagtctagatttctgagtcaataatgattataaatattaaattaaaaaattcataacaaatatattgatcatgtattaacatactaacatactaaaaaattaatatgataaaaataaatatttaatataaattaatataattattaataaaaattaatatatttaaagacttaagatgcatcacccctcctaataagttattaaaatttaaatataatttaatatagtatggtatgcaaaggatgggtatccgatccaattcagcttttttttttatccgatccaatctaattagttgttgaatttgaaaaatcatcattagacgtaatctaattagacctcaaaattcaatccaatccaatcatatccagttacacacttaaattttaatattaacttaaaaatgtaaagaaaaatacgtaaaaactaaatattacaatttatttaaatttaatacttcattaaatatactatcgttacaagtgtaatgcaactaaaagttttaaataattaaaacaacaatattgctaagtaataaaataaaacaaaatatcatgaaaataaatacacaatacacccatgtattacaaattcaacacaaaaaaaatccaataaaaatataattaata

SEQ ID NO: 339176 - DNA, 799 bp, Cannabis indica
tgtgcaagcttgcggaaaaatattattatttttggtgccattatttttccctgtaaaatagcacacctaattactaaagtgtgattttgtagttctcaacgtaattagagatgaaaaggagaatgggtcccaccgggagtgccaaaaattatgttatgcaaaaatttcatatttagaatattaaaagtaaatgcaaaacacaatttcctctatgccaaatatatatcataagagtttattaatttaagttcgacccatccaagattataaaataatctcttaatgataatcctcttgtttaaagaaaataccctttgattccaattacgatgatgttaaacttggtgtaaattttaggaaaattaggagaatttggaaatggagctgaactcaatcaacataattaaccgagctgcttacataccttctttgtgaaggatcaagccacttgtagttcagaatacggtattttaaaatttgaatataagaattttgctagatgaccagttttaggaattctttgctatttgaaaatttggaaaaattcctaggtataaccttttatggaattttgagatgtgtgttttataccattttacggtatcgtgactgcgcttagtcttagcaactaagttgactacatatcctcttataggaatcaagtcaaacgtagtttcaagaatgttaaaagattttatatcttcaataactttgtggagaattaacttactttgatattttgaggtaaatgaccttacttgggatttttgaggtgtatgacctcatttagaatttttat

SEQ ID NO: 339177 - DNA, 447 bp, Cannabis indica
taagatcctggtaaaaataattccaacagaaactcattcctgcaatgccaaatcttccaaagcaaacaaagaaaaaattggaactcattttccatgagttcagtaccagccaagtgaaggatatccctgcaagttagtgctatattatgtgaaatgaaattgtaaaaatttgttaacttccataccttctggacagtttcacatctgaagagagcatgctctagggattcggtttgattggagcagcggcagcaggcagatgtagaaagggtcttcttttgtgcacattcaaactagttggtaaaatgtcataataggctctccaaatgaaatgcttggtttttgagggaatcggttgtgtccacaaagttttccaccaggtttgattgctcggggtatttgaaggtgagggtgttgggttttgtgccctaaataaaactctttaca

SEQ ID NO: 339178 - DNA, 992 bp, Cannabis indica
gattttttgaaaataattttattatttaattaacataaattaaataaattctatatccaactatctagtttgttacatgtgtgtgttttatatattattaattattaaaacttattttttttaaaacctattattgtttgatctaaattgctatggttaacttcttaacagatctaatgatcttttttttaaccaatagttcaattgtcaataggtcaaataaataatttataacaggtaaattttgtaatctttttttatctctgtataaacctagtaacatgataggatccatccaaatcagtgtgtgcctgtgcttatatgtttgctttggacttagatgcatatagggagcccatttaatttttgtaattaaaatgaactaggttgctaaattaaaattttcacttatgatagattttatttaggtccaattggtatgggcctattcaatgaataacagttatttaattaaggttaaattcctctcctttgggccttgtgtgaaagttagggggccattagtaatgggtacgatatactgaacccagccctccctcacgtgaacaaccccaattgtgaaggcacatttgccttatttgaataactgtaataggttaattacacaagttttacctaataaaattgattagcaacataattaatttcgaaatatatgaaattaatttttcatcagattattttgaaattaatttgagaaaaacacacttagttaatgaaatatattcaagataaactagatgtatttttctgtatttaattaaataaaagaagttataactaattagattaatctaaatccttaattatttgaattttcatagaaaatatatttaagttgaaaattattttttcaaagaatttttggatcaatttaaattagatattttgaaatgaataattaagtagaattttctaaggaaattagttattcaaatattctttaaaaatattttttaaggtgattagtt

SEQ ID NO: 339179 - DNA, 512 bp, Cannabis indica
aatcaaaacggagcatcctgttcactgggtcgtgccactgcggttgatatgtacattgttgctacgacatcgaactcatggctgctcagccattgctttcgccttacctgcaccataaaacacctgtgagtcactcacagagactcaccaagaaaaatgaataaaataataacaagtaatattcagcagttcaatctcaaattaacttgcatacacatttacacaatattataaacacaactttggtactttataaagtacccctttaccagtcgttaatcacgagccgaatatttcactattgttgcccgacaaagaaaacgataagtaagaaacctaaccacaattttaagagtaattaatcgtaagaaaaataaccattcccaatccctaggtcataacctaggctcaacatacttttaatcagaatcttggtaataatcaagatataatcattcaaccgtcaacatttaaccacatatggtgcttaccacttttcttaccttaattca

SEQ ID NO: 339180 - DNA, 671 bp, Cannabis indica
acacgatggtgacacgtagaatcaactcatgtacctgctcacaagagatacgccgaacaaggcaccacatatattcgctcggatgaagcctccttaaccgggtagtgagcaactcgagcagtacgccaacacttagcaaattcagctttcgcatcttgagtcactgaagaaatccctataactttgggatcagatcacagagatatggcaagctgtctgaatccctagattagtgtattttgtatttactatgcaatctttccacttatatcaattgtaaccagaagggaaatacttccctcccaagcttaaatccctataaatagtgactcatactcactaggaagagcgtcgaaaaatttatttaaaaattcatattcaaagatactattgtaagagctaaaagaaaatggatatttttccttattcttaagtcaatacaaactacgaggattaggctattaccgaactgctcggggctgaacctctataaaattctcatgtcttatttgatttattatattacatacatattatactacttgtcgcttataaattagactcgctgtcgctggctaaaagcgaggtcaacaactataaacatttaaccatcgttctaatcccaataatcaaagatcctctatggatgatttacaccgagtggggacaaa

SEQ ID NO: 339181 - DNA, 1031 bp, Cannabis indica
atacagagtctaaaatagtattacttttattataaacttccctatttaaaaggccctcctttttcatcatccttttatatataacaatataataaatttttttataatgtatagtatacataataaatgttcaaaaaagtaaatacacactaaaaaaaaattgataaaatcttgtagttccaatacacacgattctaaaattcttctctattttagaatttatgatgttttttttgttttgttttttttttaactgaaaagtgaatttataaagtattgattaatttttaacggtaataatacctaaattataattttagaacttctgtaagtagtagttactggcagttaagtgttaagtaaattgctacgtggtaattcttgattggtccaagtcattaaatttttatatcttttaaaaaaaaatagcttagatgtactaataagaaaataacacgtgaataatgacttgacacttaacggtcaggtacttaaggagttccagaaatataacttaattatttttaccgtcaaaaattaaatttaggtatttatttgcaacccaaaattaaacttagatatttttatcgtaaattactctacaaataaaaaggtatgtattatttttaatttgataacgtatatcaatataaaaatatttaaaataatacaaaactaaataaacaaaacatcatcatttaaaaacttatatagtttgagaattaatttaccaaaaaaataaaatatgggaaccaacttgctaaaacctataaaatttagagtatgggtgttcataaaatactcgattccatccattccgtacgatccaatccaatcaaatctgtaaaatgcggatatctgcacatgtgcatattagattggattaaaaaatttaatatccgcacttgtacggatagaatgttgattgatatataaaaataatcgatccaattcaatccactaaatataattttggaccttgtgttttgcaaaagttatcgattggaccatgtgttttgttaaatgacaaa

SEQ ID NO: 339182 - DNA, 630 bp, Cannabis indica
taaagttttacacatttggtattgaagttttacacacttcccatgagacgaaaaaaaagaaaaaaaaaaccaagtagaatttttaaaaatactatttcttttttatttttttattattttacaacctaaaattttaacttagaaaaaatacgcttttaaatttaaaattacaaaaatacgattttctcggcaaaaaataagaaaataatttcaaaacaaccaaaaacaatttcatcacaattataaataaattataaaataacaaaaaaaaaaggttattaattttactgacgagcatatttttgtgaataaaaaacgttcaaaggaaaaaaataaaaaaatttgtgtgttgacatatttttgtaatttgtttcaaatttttagtctattatataaaaatttcaaaaacttgtattgtaaaacctttttgacttttcagtaggggtgagcataaaattcggaaaaccgaaaaaatcgttcaaaccgacctaccgaacaccgttggaatcgaaaccgacgaaaccgaaaactgaaaaaaccggtaacggtttaaaccgccattgaacggtcatttttttttgtaataaaccgactgaaaaaaccgaatccaaccgttatacatatatatat

SEQ ID NO: 339183 - DNA, 539 bp, Cannabis indica
caggagcacccgaggatttggaatctcttttattgcaggacaacatgtaagacagtagtcacgtagagtatgcacggtgacgcttatattgaatatgacatatgtgagcaattgtaaccgacatcagggttattaccctaataggaacagttaattgcctagggttattaccctagtgttataagtgagtaaattctatgccatgttaagtgtgtgattatattgagattcaagggttatacgttcaaggcataatcaggttggactcgacaatcataaccgagatgaaccattctaaggccttattgtatctagacgtgtgagagcaacacgtaggtctacgccacgtagatataagtagatgtgtgagcgcaacacataggtctacgtcacatagacataaatgggcatgtgagtgcaacatgcaggtctgtgtcacacagacatatatgtgaatggcattaccatttaaatagcatgacgagcatattattgttattatttatactgtcttgctgggcttggctcacgggtgctct

SEQ ID NO: 339184 - DNA, 659 bp, Cannabis indica
acatgtgggtgaagcgtgcgctgtagaccaacgtgcgtaaagttatcccgggatatccagattttccagatcaaattcttgcaccttggcatccgattgatggtgaagagaggggctctgtcggtgaagagtccgacccgtgagaaagttttattctttccttaatctatttgctttactgtaaatatgtgtgatagttgtgtttgtttagtttaaatgatgttagttatgtgatgttgttatgtgtgcttctgtttaaattgtttgtttttattgttgtctttagttgtttgtgtagtaacattgtgtagttaaagtcatgttagtaatgttatgtggtcatgtttgtgctatgttgtgttagcttgtaactgagaagtatatatcattttgctttagcttggtttagcgccgctcgatgatgaaaaataacgatttcctttcatttgtgatgtgccctgatttttgtgtgttaaaaatgctaagtttaaaggctattttgtctaaatgctagtttaaggagaattctttcaaataggtgtacttgtgttatcccaccatactttgagtttctagaatagctaacactttgagaaagtttaagcatctagaattggttagcgtaattcttgaggagaaatcctagctagctttacaac

SEQ ID NO: 339185 - DNA, 880 bp, Cannabis indica
taatcaatttcagtgattagccctccatgtgttggttcgtaattagttttggtcaaattaccattttaccattctaattacttctttatcctttagtaccattagttcactagtggaagtataatttagatcccatctaaatttggccacaatattctagtttatgaattaacacttaaataatcagcattagatccgttaggaaagtcaggattccataattataaatcatgttcctaaccattcacattattagcttcccaaaatagaagttgtaagaatcatcttctctaagaaactttaacgggtgaatcaaagaaactaataacatgaacaagagttcatgattactcaggatttaggtcgatctactattgatcatcgtgatgatatgaattaggtctttatgataaacgacatgttaataaaaataactttattcatatcggtccttgtcatatgtattatctattatatatagcaccttcactttgatgtcatactacatccataatcagaactgagattacttgcaccaaagaacgggcatcagtaaatcgtactagcaaccattgattaaagattctataattttgatatgttaccgactgtttattcataactaagtggtcttagttctttgtacaaatacaagctacaacctcatatacaaataagaaattttctgatatttatatataaattatttaataataaatattaataatttaatcttcatgcatatagggatgttcataaaatagctcatccaatccaatccacatcatccaatccaatccacaacttgcagatatccacacttgtgtggattggtttggattagaaaattcaaaatctacacttgtgcggattggatgtt

SEQ ID NO: 339186 - DNA, 703 bp, Cannabis indica
agtttctatctaaaaccaacacaaatcataaccaaaacaaaaaagtaaaaaaaaaaaaaaaaataacaacaacaacaacctgatgcttaccaaaaattaaaaaattaagaccaaaaaccaaaaactaaaaatcaaaatactaaaacatacaaccaaacctaaaacaaaaactacatataaaatacattatgaacaaaacaaaaacacacaaatcacttcagatgaatcatttttttttgaaaaaaaaacaacaacaaactcaacacattgaaatacttatcacttaaacgacatacaataaataattttagaaaatttgtataacaacaatgataacttccaaaaactaaaaaatagagatgaaaaaggaaacctttaaaatcagtcaatagaaaaagggaaaaaaggataaatatcttgaacaacacacgagaaatgtcacactcttactcgaagcacattgcaaccattattgaccaaaaaccgagagcaaaaaaaaaccagagaataaaacgaagaacaaaggaagaaaaggaaaaaaaaaagaaaaacaatgaagtgaaatagagagggagagagagaagtatataagcagttaattagaaaataaaatgtgaaaaaggaagagtggagggagaaaaaaccatcaatcatagatcattacatgcaaaaaaaaaaaaaaaattagtaacaataaaaaaac

SEQ ID NO: 339187 - DNA, 772 bp, Cannabis indica
tttgggttatggtttgggttcggttctgctctcagctatgggttctagtcataattccaattttgattccgggtctgggtttggttctgggtccgggtctaggtccaggttgtggtcgcggtctgagtctttgtttgagtctgggtgacgggtttttcagattccggtttcggtcgaggttcgtctctcgggtcaggatctgtgtctggtggtccagttcttgtgttttgatccttgtcttggtctgagtcagtattccggtccgggtatgggttcatgtcaatgtccttgttttaatcctagttgaggttaggggcttggtctaggtccaggatcgagtcctgagtttgagttcgagttcaggttcaagtctcaatcttagtctgggtccgagactgagttcgagcacgagtttcggggctgggttatgatctagttttgggtccctgtctttgtcaagatcctggtcactatcccgatcatgttccaaggtcttgataacgttttggttcaggtttcggttttgggtcctaggtttgggtccgggtccaggtcctgctcgatcttggggtccttctttgagtccccgatcaagacactgactatgggtattgtccaagccccggttcccagatcccaggacaagatctggatcccattaacgggatccagtctggtttcggttcatgtcccaggtcccgatctgggtcttggtctagctctgagaccgagacttgggtgcagttttgggtctcgatcccaattgtggttc

SEQ ID NO: 339188 - DNA, 579 bp, Cannabis indica
tacccaggtttttacccaaaaaaacataaccttatacataccatctataaacattcattcttaaacaaccctcatgcatactaaaaacccagaaaatacagtccccactcaagcagaaaaacgaaacacggtgaagattcgaaaaaaactaaccttttactttgccaaatctgttcccacgaatcgcccttgacagcaatgtagaatcaagaaaaaaacccacggagaaaggcgaaaagctgggcaatttgtggaagtttttctctgagagtgaagaaacagaagagtaaagggagttgaagaaaaatgagggaaaatggggatttttggttcgaatcagggggtttaaatacccaaatccctcattaattgggatcacgacacgtggcagttggaatgcctagagtcgcccaatccaacggctagagatggccacgcctacacagaaaccaaagatttttgtgacgtggcaccataaatgcaataaaagcaatgattatagtcgtcatttttcgaaaccctcgaagggacaaccaaaggtcacctcctcgtgacaacctttcacctgtctctcgagta

SEQ ID NO: 339189 - DNA, 634 bp, Cannabis indica
actagggcttagggctgaattatatggattaaaagagaataaaatattgggcaaaataaacttcatggtcgtacactataataagaccattctctagttacagttttgccactttattacaactactaattcttctttcaataatactatattttccaattcaatcctataaatgccaaaactatttatttagtaattataattcattatcaaataaaattgtcatttatgtaatttattaattagatcatacaaagtctcttaattaacaaattgatcccaaaacctcttttcttcacaattaagcccttgcttagtgaaaactcataaataagacatcgtctaattttagaattataattgcttaattaaaatcaattaactgagtttgcaagcagtattatctcaactagtgaggggaccatgggcctatataaccaagctttcaatatgtaaatctagaattcaccgaataaattccctaatttattaattccgccttgcgccactaaagatttggaattgaatactccctcaattatatagaatgctctatatgtaccacgatatagatatggtgtgattatccattgttacaatcctaatagtcaaagatcttgtatagatgatctac

SEQ ID NO: 339190 - DNA, 794 bp, Cannabis indica
cacttaatgaaaaagtagaaatgagaaagttgtagagatatcaagagagagaattaaatagaggtttaagtttccaaatgtatccttttgttgttttcttgactatttattttaaaataattgtttattttttgtttcactctcattggtgaagaaaaattataatttaccctaacatctattaatttttatttttttattttttgtgtttgatgtatataaaatagtataatataatttttgtcttttatgatttatctattcattaaattttatatattttttttttctcattttctctttttcatatatataatttaacatagatatattatttttaattttattatttatctagacattttttagaagactatcaacaataaatacaaatttactaattaattcataatttaataatcttttatatatattggctgtacaccattttgggtttatctatttattcgctattttttttatgtaagattagtaaaccttagtttcaattaatttcaaatgtgactttttgtttgttaagaaataaataaataaaagtgatatttgtagtatatatatttattattattaataataaattataagattttttaatatattgtattgtgctttttgggtatgtcgtgtattgtgcttttcgggcttgttgtgtgtagtgctttttgggttagtctattcgtacttacgtatcgtgccttttgtgttggaaattattttactaggatcttagatctactcacaagtatgttgattaataccctaaatatgaactt

SEQ ID NO: 339191 - DNA, 838 bp, Cannabis indica
gcagttgacaagattagagtgtggatgctcgcaactcagagtagacagaagagttatgttgatccaaagcgtcgggatatagattttcagatcgaggacatggtatttctctgaatatcataattaaaaggcattaaacgctttagtaagaaaggaaagcttagcccgaggtttgttggaccttttgaaatccttgagaggatagggcaagtagcatacaggttcgctatgcccccaccgctggcagctgtacatgacgtgttccatgtttcaatgcttcggaaatatgtctcagattcgtcccatatcttgagttatgaagcattggaacttcagctaaatttgtctaatgaagaacaaccgatgcaaattctagacagaagggagaaagtcttgagaaacaagacaattgcactggtaaaggtattatggaggaatagtaaagtggaagaggcaatctgggaactcgagacggatatgcaacagaaatattcgcagttgttcaagtaaatgtcgggaagaaatttctataaggagggggtaattgtaataccctaggattaagagaatagattagcaaaaccctaactagttaattatgtattattgtggaattatattattatataatttaatatgtgagaatttatatgatttatgacatgttaagaccccgttggtgagccaggggcattttagtaatttttacccgagaagggtaaaatcataaaattaatatatttacgtgcttatgggactataatattatatagtatgcatgtgttgtctttttcaggtgtgttctgcaagttggggcggtatagtcacaaccaggtat

SEQ ID NO: 339192 - DNA, 905 bp, Cannabis indica
cctatcttctcatttttgattaatttttattgtctctttcagcttcttgaatttttattcaattattgaactttaaaaatattgatttgccaaatagaaacatagatttaatctagtggtactcagtccaattccctgtggttcgacctcacctgtgtgagcttactacttgattacgtgcacttgcgtactatttacaaaattcgtaacaagtttttggcgccgttgccggggaattgtgtagagattgatattacataagattagattaaattctagtttggtttatttttcttgctaattgctaatctgtttcctttaatattgtctttgtctattttaggaattttaggtgtatgcgccgtcgaggacaaggagccatattactcgttgatcctgaaatcgagaagacttgtaggagaaacagtaggaacaagaggcaagaaagagtttcagcaacagctaaaacaccagaaatcatggcagataatgctaatgttgctaataatggaggcaacaacggtaataatggaggtgccgttgaagatcaagcaaatggccatagcttgagagattacattcttccaactcttacgagggttcagtcttgcatcatgccgcccgccgtagatgctaataactttgaaattaagcctgcaatactccaaattgtgcagtcttcagtcaaatttggtggactccattctgaagatcccaatctgcacttgtcaaacttcacggagttatgtcagactgtcaacgtcaatggggttagtgattatgccatccgtttgagactttttccattctcgctgggagactgagccaagagttggttgatttccttgccctcaaattctatagcatcatggacaaacttagcaacaaaatttctgtctaaattc

SEQ ID NO: 339193 - DNA, 712 bp, Cannabis indica
aatcttgagggagtttttcttttccatagttaaattgttaatgttggttgtgtttgattgtttacttagtttacttttattgttgtctttagttgtgtgagtaataaatattatgtggattagatgtgtattaatcatgttattttgtcatgtttgtgatgttatgttttagcttgcaaatgagaaaaatactgcatgtattttcagctttgtttagggtagcgctcgatgatgaaaaatatccattttcctccatttgtggagtgccttggtttgtgtgttgaaaatgctaattttaagtgttattcttgtctaaatgctagcttatgaggaatgctttcaacaagtatgtgcttgtgttatcccaccatactttgagtttttagaatagctaacactttgagagagtttaagcatctagaattagttagtgtaatccttgaggcgaaatcctagcgagctttataacttggaaatgatttaggccatttttggacgattgagcctttcaagccaacccgagaatatttaattgtcaatagtcacccctaattgagccaaaagcctagtttttcttaacacccatcaagttactatatccacacattcacacaaaatgttatccgtcacaaaccgaacccaatcgctaaaatttatcaaggacaaactaaacattatttgggataggcaagtgaggatagatctttgcaag

SEQ ID NO: 339194 - DNA, 496 bp, Cannabis indica
tcagggagcatgatttggtacatatttatttagaataattttatggtggtgactatgtttttgtacttatactatacatatacttttttaaccattcatctatatgacttttaaaactcaacattgtgtaacatgtatttgtttgtattatttaaatttttccatttttttaaaaagaaaaattagacaccaaattaaaaaaaaaaatttaacaattaatcaaaattaattttatcattcaaaaaaataattatttaaataattttctttgaccgaataatataatttttcacgtgtttaaaagtattatttcatgtaaattttctattttttatttttatttgggattttattacaaatcttcttctaagcatatatttctcctttttaaattattttctttgaccaaaacaattaagataataattatttattttgctaaaataattaaatagtgaaaatctatcttatccaaaaacaagaaaataaaaaaatt

SEQ ID NO: 339195 - DNA, 482 bp, Cannabis indica
gtttgcaccttggtcggacatcttctcaactatccttctcagatgtctgaatgttacagatgccaaatagtcatctgtgggctgctagggatattttcctctgtctaggtatctaaaatatgggacacgtgtcatccatacctatcgccacgtcatggtgcaaaaagtaggataacaagatccttacctcttccagtagttctttcattgaacttcctaattagatcactagcttttctattatgacggtctaattccacctgatgagattggaggatgtactcttggtcatcaatccatttaagatagggtaaatggcggcaaaacccccaatactttcgttttggtttcattaaacccccacaacccaaatttctgcgggtaaacccgcaaaaccacgaaactgttaggaatttaccctttctgtccaaatttacctgttaagtgccaggttggcttgtccacgtggacacaatatacac

SEQ ID NO: 339196 - DNA, 797 bp, Cannabis indica
tatgtctactttatgaattttcactaagatatggcttgatagtgaaaaaataagattttaatttaggtttatttgttaattaagagaatttgtggagtctaattaataaataatagaaatgacaattttatttgataattaattataattattaaataaatagttttggcatttatagaattgaaattagaaaatatgacatttatcgaataataatagataaatggttaagaaaaatagtaaaaatataactagtgatgggcccacatatggccgaccacttatctctatttttggctgtttttttatcattttttatttcatataattcaatcttaaccttaagtgaattagtataaaaagaaaagagtggtctcataatccaattaatgactataaaaacctagttttcatcttgtcagacaacgagacagtttgagatttcttcttcttcttctttcttcttcttcaatttcgaatcctaaagtcttcttcacaaacaaattcgagcctttagcgattgagtgcatgcctacccataacaagttaatcctcaatcatagtatgtaagactgtgaagaatctaaacaacaaggagtgtcaggctcagatcttgattatactctacgacaaaaaggaataagtgttagacatgtgagcggaaagagttacttaactctgctgcaatcaatgtaaggtttttcatattttatatgtatttaattttaatccttttagaaagggaaattttacttttacccctaataaaaccccaatatcaaaatttagaccctcca

SEQ ID NO: 339197 - DNA, 770 bp, Cannabis indica
tctcttattctctctctgtcttccttctatctctctcctatagaagtgaaaagactagacttatatatagtcccaactcaaacaaggatagcacaaactaactaactaacagaaccgaaagttagttaagttagttggtttaaatgagttggataataagttggtttagaggatcaatttccacacaaacagttgggaaagagcggtttggtgaatatgtcagccaggttcattttggaagggacatggttgagctttaagattccatttgtgatcttgtcgcgaacaatgtgacagtcgatttctacgtgtttggtgcactcatgaaacacaggattttttgagatgtggagggcagtgttaggctatttttagcctacgttttgggtcactttttatagttatttttccttttttcttattatatgtggaatggaattacgctggttttctttggtttcaggttgcacacttggaatgtataaattgatcaaatttcgaaaaacaacaatctatagtatagagaaaattttgcaagaaaataaagctgaaacttcaagcttaaattgactatgttctgatcaaattttggaaaaagtaaaaatattgagctttagatctcttcttcctctttccaacgcattttgaatcaactcatttggagttcgtatgtgaaagttatgcatattttactgaaagatgttgaagttgtcaatttgctttagtagttgcgaccaccattttcatggtcgcgaccctttttcatggtc

SEQ ID NO: 339198 - DNA, 621 bp, Cannabis indica
tcatatgccccgcagagttcagttattacacctgccaaaccaagaccaccacccgtggctccttgaacaatttgctcaatgctgcttctgatgacttgtccaatattaatgttgtaccccttcataatggcgtagacatatttgaggagatccatttggacatccgaaaagtgtttactcgacaccaactgagcactcacaaagtacatccatgtctttgccaccgggtttatctcacacctatgtagaatgtttggcgacccgtcttggccatcattgtcgtggaacctcaaccccaaaaatcccacggtttcagccacatctaccaaatcaaactgctcttcctcctcaataattcggaggcgttgttcctccctagaataatccgggacagagaacataacattgaatgcatcagcagtagcgggaaccttctttccttgcaccttcacctccccatttgtgcgctcgggccaattggcgagaaattcacatgccatagtcacattagcccagccccgagcatccacaaaactaccccatttcatcctcttaatttgagcccgaattgcttcgaacctaggttgacgcctcaaggggttttcagggaattcaataccc

SEQ ID NO: 339199 - DNA, 800 bp, Cannabis indica
tatttaatttttttttttaaaattcaaaggttctcgactaaacctctttgacgaaagtggagtcgagctgttataactccctaaccaaaccttttttatgagagaggggtcgattgttataacatcttgatcaaacctttttgacgaataagggatcaaacaactataatttttgatttaaaacctatctgacgggaaaataaaatcaaaagttataactcgtgtataaaactgaatactaacggttctcgcaacctaggaaaatactaaacgaggcatcgcaatgccttgataaaagtacttgaacctagaaaatggatagataatataactattcatacgagtaaattaaaaatatataaagtaatagaatcattaaagtatatttaagtttgcttaaggcagattataactgctatagcgaggcagacttgacaactgctcgaaaataaaaaaaaaattgtagattactaactacttaaataggaagataacaagcaatggaaaaacccaaaagtactgtacatttgatcaaaatatagttgtttacattgtgaataaaaatgcaagcaaacacaattgtattaagttcgaatgaagatagtacaaggcatttaagataagcaaaaacccaagtagggttacaaacttgtctttacaaaaattccactaagggaaaaccattaattcatcttcctaaagaaatgatgagaggagaagtcgataaactcgagaaagaccgtcttcatatagcttgtgaaagatcgtttgcacatagcttagagaaagaccgactacac

SEQ ID NO: 339200 - DNA, 619 bp, Cannabis indica
atctatgtctattcctgtggagacgaagaaagaagggcaatggagcaacaaaaaacaaacaaaattaatgaaatgtataaaccgactcaaaccaccattcacaagggatgatactcctcttcaaggatcacttgtgaggatctctcacagcgggctacggggttcccttggtatggatttgttagaagctcctcagccttggaatccatcgttttcagttccaattgaggcttgaagttcttgggaacaaatggaaaatggttggtgcatcctggtattatgagtttgggagagtaaacttctaaacatagaagggacattctagcaagaaagagataatccattctgaaaattgatctcatcaaaaagctagaggtttgtgaaaaatgataagcttgagccgcctttttatacacaaagtccagtgacaagaaagctaatgattgggaaatcaaacggttgggtgtgagcagaatatgaagggacgatttataatgaccctcgaaaccgtacaactgccagaatcaaaggacagattttttccaaaaaaggattttgacaaaaatgccctctgtaattattaaaaagcaatttttagcaattgttatactcgaaatta

SEQ ID NO: 339201 - DNA, 728 bp, Cannabis indica
aaactgttaaaaaaaagtaaaaatttatattagtttatacatatattatttgttattataataataaatactataataattaattaaaacttacagctttttgatcttgtatgtaacggttggggtttacatgtgcgacgatgtcactcatgtatttcaaaacataaaaaccacattcttagtttttaagttgtcttggacaattttctagaaaaattcctagccatgggccaagaaatgcatttgatgtccctatatatttgtatgatttgtttgaaaaattatattatcatttcaattcattagttaattaaataatttgttacataaatagtcattaaattactaccttcccaatatttaagtaatttgttcgggaacttggtggttagatatagggtctaaatggataattttctttggcgcaacgacctctagtatgcaatgcgcacaaaaaaattatattgggatataagtaagatagtatgaaaataatttgaagttataatatataaggtaacaattagcactaaagaatttttacccgatattctaaggaataaagaacatttagtggttgttatttatcgatgataaccaagcagccaatcgtcttgccgcattgtcaaaagactgactcttctcttcatcgttgataccattcactacaagaagcttcgggtcgtaaaacttaaaattttttctcaaatcgttgatgctctcccaga

SEQ ID NO: 339202 - DNA, 786 bp, Cannabis indica
tattttcagtgtcgcctctttttcgtttccccgagcacgttcagatagagcattcacttgttctaatatttcagaacaagtaaatcgtcttggcggaggtctcttctcaacatttccatcaaattcacggtcttttctcatacgatgattggatggcaagaaacgtctatgaccaacataagatgtcttaccaatcactcgaatagaagtagtatcctcgttgcatgtaggacaggctttatatccctgtccactccatccggacaagctactacgggcaggaaaatcattaattgtccaaagaagagctgcgcgcatgttgaacattgagttggttgtagcatctcttgtttcaacaccctgagtccacaatgcgttcagctcgtccaccaatggccttaaaaagacatccatgtccttaccaggtgacttcggtccgggaataaggagactcaacatgaaattgttatccttcatacacatccaaggtggcaaattgtaattcaccaacactacaggccacatactatacgagaggctcatgttgccaaaaggattaaatccatcagcagctaagcctaggcgaacattccgaggatctcttgcaaaatcaggatgtctggagtcaaagtctttccacgcggcgaatcaacaggatgacgcataacaccattttctctcacacgaccagtacgatgccataccatctctttggatgtatgtcttgaactgtataatcttttcaatcgaggagtcaacggaaagtagcgcatcactttatgcgct

SEQ ID NO: 339203 - DNA, 769 bp, Cannabis indica
gcaatatcttttgatggaataactcattaattgcgtaagtatcagagtacatttgtaactcgctgactggtcttaggcgaggaatcaatatacgaactagcacttagtgtattaacgggaaaccatatatgtcgctgaaggagaatagcgaggcaccagagaaaagtaacacatacctcagcttgcaataagcaaacaaagtgtaaaagtcggatcaactcgaagaacaagaatgcgagatgaccatcttgctacgaggaaacttcctatagtttcatctcactgacaagagcgacgctcataaccctggcaagtcagaagatttctgtatacctgcgatcgacgtaagacatatcttgtcgacctcagaaagaagaatggttccagctcgctattgggatcactacaatcaagtttctgtcgagacatctccagattcaacaattaaagacgtgtttactacacgatgttcttgacccagtaaaagcgggaaaatcacagatatttgattttcaaaatcatagctatatgattttcaaaatcatacaccgcatttatatttttatgtaaccagattccacgattttagggataatggctgtaatcatatttcggtcagctttgtaattaactgccactatgcataaatagtggcaaacaaactcaaaaagggacgaaaaaaactcttatgaaagaggccttaaaaaaatacttagaaatttgaataagattgacttgtggactatgcacaattttaactgcaaaacca

SEQ ID NO: 339204 - DNA, 602 bp, Cannabis indica
caaatcgttgatgctctcccagaagtgcatgcattaaatagttaagtattagtgtcttataataatttgactagaatttgatatataagattaattagattaaagaagagtatatatcattccaaacaacattccctggttgccgatgaagtcacacattgcaacctgctgcaaatcctctccagattacgtgatctgggtacgtggtgttatgaatcccttaggcacaggcattgtgattatatcacttttatctttgaggttcagaaattcaacaaccatctattttaacgatttatggatcaagtccatgaccttttccaagaataattcatcttcttcatcatgaccgccttgtggagaaagcatgagagctttccccttcgacgcatcgcgtcttgatggcggttaagcgagtggaccctacaaaaaatacaccataatatattaaatttcctcttcatcactaaccagggaggaagattgtacataacaaggaagacaggccatgaactatgacgactacatagagatctatgtggatttactccatccgcagacagaccgagacgaatgtgtcttggttcagatttgaattcagg

SEQ ID NO: 339205 - DNA, 1495 bp, Cannabis indica
aaaactcgaagagcgtaaggggtatggccagacgagctttcacaagttctatggtcatataacacgaccccccgatccacgactggcgagactcctttctcgctctcttatggatgcgaggccatggtgccagttgagattgaagcaggttccttacaaggagacgttttcaacattgaacagaacgaagaaaaataagtcgctctacctcgaccttcttgaagaaaagcgcgatcaggctcacctgaaaaacgcggcttatcagcggcgaaccgcaagatatttcaattccaaggtcaaggcaagagtcctgcgagtaagagacttagtccttcgaagagtaatgccaaatacgaagaaccctgtgcatggggtcttcggggacaattgggaaggaccgtatctcatcgcagaaaaggttggtgacaccacgtaccgactcgcagaactcggtggtactgcgattcgaagggcttggaatggtgagagcttaaaattctattatcaatagtacccgcattttgtagtttgtactcgctatgtatttatacttagtcattttttataaaaaaaaaatcctaagtatagggggtatacaccactatgtactattgattagttatgaaagctatggaattttttcaagtttgaaattttttaagtttctgaaattttctactctaatacttattacaccaagctgtaattaaagtcgcaatcaagatattataaatgacaaaaaacgtgagtactcgtgtactgcaaaaatattataaatagatatccccgagaggatataaagtcattcaaaagaaacataaatttgttcaagtacaaggcgcgagtacccttgtaccgcaaagataaaaaaaataaagtttaacacaagtaaatattaaaggagaggtcaagcattgggagcagcaggggcagatccatctgcgactttgttgatggcttcgttctcgacttcctcgatatccgcagcgtcagcctcctggggaaacagattccctccaccgccttgagtatgcataggcgacatggcgtggaaagtctcagccatttcagcggcttctgctccgaggattgagaagtcaaagtctggaatttaggagagagtggtgtaaatgtagtctgagactgcctggtcatactgcttcttcccattttccttctcgacctccaaatcatgagacatctcctcgaccttcgtctgagcactcttggcttcgagctcgacctgctccttggccttgcgaagttcctcgagctctttgtccttggaagttgcatctcgtttcagcttcttaatgtcctcctgaagctgaacgttttgtctcttcacaagttcgacctctttggatccagtaacaaaggccttcgaaaacatggcaatgaactgcgaagccaactcagcagagcaaggcaacagctctttagcaggggtcttgtcgatatttgactggaattcatcacccacgaacttctcttg

SEQ ID NO: 339206 - DNA, 863 bp, Cannabis indica
catgacgcttaaggtgaattaatatgggatggatgtaccaacccttcagttagtgtggcaaatgtggcaaagaaaacatcggtggaattgggacacaattttgtggctcaagggcttctagatgccttatcagaagagctaccaagattattgatgaaataggaaattaattttgaattaaattgatactaggagtaaaacctgagtccaaagttttaaattgaatggtaactgtaagattgaaaggggtgaatattccgttacaggaaatattaggtttgaaatatcaagtttgagtgggttttatttatgaggaagagggatgaaatcatatgagtgagtattgactgctgggagattaaaccaattaatggtgaagaacgagtatcctttgttaaggatagatgttatgttggttaattttaaaggaccatcttctctaagatcggtcttcgatctggttattaccagttgaaggttcggaggaaggatagtcctaaattagctttttatattcaatgacttcgtagctgtctttattaatgatattgtgatttctttcgacttaaaggaggtatatgaggtgcctctcttgaaggtgttgcaacgttcttggaagcataagctttacgctaaatatcagaagcacgagttttcctaatctcaaatttacagtgaagttaaaggttttcttgaattaacaggatgttgtgggataattgctgaaggatgtttatgtccttaatggaattaagtgaaaagaattaaaataaaagttacctattgcaccagtgctaacgttgcctgtccgtgaggagatgattatgaattattgcgacacctctaaacaaggattagattat

SEQ ID NO: 339207 - DNA, 803 bp, Cannabis indica
catacatggattattgtctctttacccgaaggacaccatgtcattgactacacagacacttttgccccggttactaagcttgttactgtgaagttagttctctctcttgctgccattcaaggatggcatttacatcaattggatgtaaacaatgcctttctacatggtgacctccatgaagatgtgtatatgtctatacctcaagggtatagacctaagggggagttaccaccaaatgctatctgcaagttgcaaaaatcattgtatggactgaagcaagcttcaagacaatggtttgccaagttctcaagtgccttaactgatgaaggatttcatcattcagcaactgatcactccttgttcatcaaacatttcaatggaaatttcatatttctattggtttatgttgatgatgtgattcttgctagcaacaatctagtggaacttgaagctctcaaagcaaggttacacacaagatttcagctaaaagacttaggaaatttgaggtatttcctaggactagaagttgctagatctgagaaagggatctttgtttcacaaagaccttatgcacttcaattgttggaagatctaggctatctaggttccaaaccagtgagtacaccaatggaagcaaatctcaaacttgggcttgatgagaaagagaagttggccgatccaacattatatagaagaatagtgagaaagctacaatacttgaccatcacaagacctgacatttcctactcagtaaacaagctaagccagttcttatgcacaccaagagtcactcatctacatgc

SEQ ID NO: 339208 - DNA, 942 bp, Cannabis indica
ttcgggcatatctctctcgagctttgcacgtatctcctgcgatgtgtgggcctccaataatgactttcaagtgtccatctatcggtggaggcaacagaccctagttattctgaccttggttggccttgacatacttctataagtgcaggttgtttttcttgatcagatgttctatttcctgtttcaagttgtagcattcattggtgtcgtggtcgtagtctccatggaaccgataaaattttgtcatgtcccttgtgttggtatctttcttcatgggcccgggcttcttgtacagaattaacgactgagttgccatatacacactctctatatcttcagttaggagagtgaatgcagtgtgtttggcatgatcacgcagattctgtccgaaccttttggcgaactttcccttcttcccgtttccttgcttgtggctattgcctgaacgcttgccacttgaattgctagaataattaggaatttgggcagaaattccaatggaaggagccttcgttttgctcggcttttgctcaccttctgctcgctgaatggcttgctcgagcttgatgaaaccttcggctcagtcaaggaaatcactcattgagtcgaccagtctgtttttccttatatccttccacaatttgccaaggacttcaatgccccccagtatcgcggataactttcgatcctcggttacccgcgacaccttggtcgcttccgtcatgaatctggtgatgtatgcccggagtggctcgcctggtcgctgttttacttcgacccaatctcccagatgcaatgtgagctgatgtgaggaagagaattgtgcttggaattccgaagagaaggttttccatgaactaaactttccaggagacaacttgaaataccattgttgtgtggcttccaacaaagtggcggggaagattctacaacatacgtccc

SEQ ID NO: 339209 - DNA, 978 bp, Cannabis indica
gccttagttttctttgatagactttgcccggccttgtggttgccacagaatccatcatgtacttcggacaaatgctgtgcagcttcttcttgtgtaaacacctgagtaacagcatggagaatcctcttctatacataaatccttctacgatgatgcaccgtgcaacctttcttctcattttctaagcttcgtttctgtcacttgggagttcctcagtgtggaggtaggctgctattggcgtcatccagtttggagatgtgtcaatcatctcaatttcttctaagcgggtgacacttggcttttcaagaaattggattgggattagattggctttgtcagctacattgctgcttgcaagtcaggctaaatcatcagcagttgtattctcatctcttggaatttacttgaggacatagctctggaattgtgcgagcaggtcatgtattttgcttaaataagctatcatcttttctccccgagccttgtagtcccgagatacatgatttactactaactgtgagtcactacagatctcaatgtgttcggcatgaagttcctgagcatgttttaggtcggcaataagggcttcatattctgcttcattgttggatgctctaaacctaattttgactgcctcgtgtagaagttggccccatgtgtgacaagggcaatccctacacctaacaattgatctgtagccgacccatctacaagtaatttccttgtgggtttgcctttgttgttgcttggctgaggctcttgtactggctccggattgttttttgaagtgctctcttctttgcctatacattcaactacaatatctgctaaggcctgccctttaattgctgttcggggttggaacatgatttcgtattggcctaactccactgcccatttgagtaaccgtccagaggcgtcaggtttttgtaatacttggcgtaatggttagtcagtgtatacccgaacaagatgagc

SEQ ID NO: 339210 - DNA, 517 bp, Cannabis indica
taatatgataagataaataaagagcaccgagttattaaagaggttcggccttgaacagtgcggtaatagcctactccccttgatttttattgacttaagaacaaagaatgtagtgattcttctcttagagctcttacagtgatatctctaactaaactctcttagataagtcttttcgaccttttgcccagtgagaatagatcactatttatagggccatatgcttgagggaaagtttcccttttgtttaaaatgtctataatcagtaagattacacattaaatacagaatacattgattgagggatttggacagcttgccatatctctatgatatgctccctgagttatagggattgcctctatgattcacgatgcaagtgctgaagttgctaagtgttggcatgttgttcggattgtccattattcggctaggaagacttcatccgtgcagatatgtgtggtgttctatttggaacattttttttcgggcagattatggggagtcgattccacgt

SEQ ID NO: 339211 - DNA, 624 bp, Cannabis indica
tttaatcgaaatagtgaaaatctcacatttctgatagtagtacccctttgtgaaatttggctcggatccatctcagaatattttacaccactagtcacaatgagttcgtactactaagatgtgaatatgaagattagttttgcattaaatttggttaaaatggacccctaattcaaaaaatttaaatatcttttcaaggtacattttaacaagttttttctttactcttactctcgttagtgttctcttaaaatctcacccaacacatctcgaaaagttatgaaatttcacaaggacaaagccaagatcattgtgcatcacttttctattggatacattgaaagataaagtagttttcaagcacttataatcattttaatcgaaatagtaaaaatttcacatttctgatagtgatacccctttgagaaatgtggcccgaacccatctcgaaatattttcctagtgttaaaatgaattcgtactactaagactagaatatgaagattatttttgcgttaaattttgttgaaaagaccccgaaattcagaaaatgaaaatattcttttttcaggataaatttaaacaagttttttccttactcttacactcgttagatttctctta

SEQ ID NO: 339212 - DNA, 691 bp, Cannabis indica
gaaaatacttgaggatgctaaagaaactagtcggaggaacttcttgaagttctatggtcgtaccgaacagccgagaaaatggcaactggatagactccatttgccatggcatatggatatgaagctatgctgcctgtagagctcgaaccaccatcctatagaagattgacgtacaaccaagaagaaaatcatgtattgttggccaaatcacttgatgaaatcgaagaaaagcgaaccacaaaaaacttaaagttgataacccatcaacaaaaggttgctcgatatttgaataaacaactgaaggctcggaaattatttgtgggtgatatggtcctaagatgagtatttttaaacaccaaagatagcacggttgttgtactcggacctaactgggaaggaccatatcaggtggtcgaagttctcgcattaggagcatacaagttgggtaagtatgatgaaaaaattcaacttgttctagtaccatagtattggaatggggaacaattaagaaaatactaccaataaagtacaaggtcgaatgaccacattaagtactaaatgaacatttacttttaagtgaatggcctgctcgacggatcacgcccaaaggttcggtgaaaattgaaaagtactcaagtcggatgaccatcatctaaagtacaatttctaatttctgcaattttttttattt

SEQ ID NO: 339213 - DNA, 1307 bp, Cannabis indica
ttaatactttcccttagcgcaaagccttagtattcagctttatgcgctagtcgtaattttttgattttcctctctcgtcagataggttataaataaaaaattacagttgtttgatccctttcttgtcagaaaggtttgatcaaggcgttacaacgattcgaccctgttccgtcgaaaaggtttggtcagggagttataacagtccgacccctcttccgtcaaaaagctttggttgaggcccttataaaaagttttcaaaaaattttattttttttgaaactatgggtttgcattgtattatgtatttcgagatcaattccagttagtcatacatatatgcccctcaagtaattttaaaggatttacgctttgtaattacttgtttgaaagaaatgattattttattcacaactggaattcaaaatatttcatcaataatgtgatttacaatcattaatctcaaaagaacttccccagttcaattgcttattttatcaatcttccaggagcatcagattttgataaaacgggttttgatgtccaggttcaatgcccaacattctcctacaattgtttcaatattcagggtcgatccctgacatataccggggttccaggtagagtaatcctggttttagttgtttatctttgactgctactggttgacgtcaagctttccatgcgacagcttgatatggcaaccacagtgggccgatatctactcacgtcgcaattcttttacacaattgctttaccggagtaactgccttttgtactcttgcgacccgttccctctcgagataaccaaagtgtcccttcttttcgcagaagagggttataatcttcagtcgctcgagttattgggcagatcaaattgatcatggacatcttcttgcccctttatatatcgttgaaggtgtccttgcgatataagactttctatctcatctttcaactgacgacactcttctgtggtatgaccaatatcatcaaggtattcacaccgcttatttggatccctcttgcgcctcacatgtttcataggtcttggttcgctaaaaacggcttcttgacatgtgtaaggtagattttttcccgagttccattgagctcggtgtattcggtataaagagggatatacttgttgggtttcttttcattagacagccttttggaatcatcttttttctttgatcccgagacctccaaattaagtttccaacaatatcgtgccctagttgtctcatgggtttcgtgatttgatgcactcttgacttattctccaactcgctcattcgcaaatggaa

SEQ ID NO: 339214 - DNA, 517 bp, Cannabis indica
caatcattcctgtacatctaacgaaaccaagatttgacaaaaataatatgctctaagaatcttgcccagtcgaagaaataaaggggaaaaagagagaactttatcaaactagctcatcaaaattcacaaccaactaaaagatatcaaacagaagattaaaaagctaagctaaaaattttatcgtaaccatcaatatcatcattactaattttcaatccaaacagaggaattgaaacaatatgcatatacctcaaaaagaatccacctaaaaacacaacagaggccaagattgaggagcttacctatgtgtactggcaacgaataatcaaaataggaaaaaccttcacagcaccgtcaacaagatgattgattacattgggtccacagtcgaatttctttagcctccagccatggccatcgaccccaaaagtgtggaatcagacagggttttgatactcgactacggttcccagtatacccatctcatcactcgccgtatccgatttctcgatgtttt

SEQ ID NO: 339215 - DNA, 668 bp, Cannabis indica
ggcacaaaacccaacactaaattctccaagatttttcaacttaaacctgtcattaagtttgatcttcaaagcttcaaggtctttgatgttattgctagctaaaataacatcatccacataaacaagtaacaaaatcaagcttgatccattctgcctgatgattaaagaatgatccgaggcagaatgtttgaatccttcttcaagaagggttgatgaaaatttctcgaaccatcactactacaaaaaccaccttgagcatattgtttggctcttagctcctcccttcaacttagcctcacaatttagttgaataagctccttctcctacttagaatattcctgagcatactgcttggctcccgtatcacccttcaacttagcctcacactttagttgaatgagttcctcttcttggtcggctccctcagcccggccagcagtggactttttcttcctccctttcactggctgaggtataaaatctactggataaagcctgtactccacaaagttggcctccgagggcaacagagtaatattccgagcagcaatgggtagttagacaattctctgagctctttccctaagagccagtgtaaggggtggatggtaatatattgggatctgttgaaatcgagtataagggtcccgggcaagtagctagcatg

SEQ ID NO: 339216 - DNA, 538 bp, Cannabis indica
tttttctttggaagcttcaacttctaactcagaggtcttatcacgcacctaaatatattaggatgacaaaattagtaaaacaatgaaccgaataaaatacgattaatagttatacaatattgcaagtatattatgtactgaacaacattaaaacaacaatataacaactaaaaaagaacgtaatttataaaatttaataaacatgcatgcaactaaccaattctaattaaaactcaaatataattgataaatgtaatacttaacctaatgatctagtttttcttttaaaacttaagaaccttagaataagaatcgtataataactaaattaaaactaaaaaataattaagacataaaccatttaaggttgagcaattctttcaactaaatacataaaaaaaataaacataataaaataagtctttgaaattagataaagacaacaaaaacaaatacattaatctttaaagttgcaacctcatcatcattatctcacatttttccctgaaaagcttcttcaatggatgacttggtgaaa

SEQ ID NO: 339217 - DNA, 520 bp, Cannabis indica
taatttttatttgttccctactgttggttttattgttcatgactgtcagttgttattaagtttttaaagtattgtgtctttatattttgttaaacggtctatcaatcggattgctcattatctagctaggcaatctcaatgttgtgttgatatctttatgagggtgatttttctttgaatttgttatcttctatttggagcagatttaatgaagtttgatctttcattcaaaaataaacatttgtataaatataaattaatcatgtaaagaaagcaattggttgataaaagtgatatctacttctttattgataataaattaattatatggaaaaaaaattatagttttataagagcatacaacctcagagataagtagtgaaaaattaaatatagctcatttaataaaaagtgtgcttcaatagtatgtttaaaagttatataaatttggcagatatcaaattttgtaccagatttggcacaacatttactatgatgtaaaatttacatcacaataaat

SEQ ID NO: 339218 - DNA, 759 bp, Cannabis indica
ttaactatttttttttgtagtaaacaagagatgtgacttgtgacaagtcaaatttacactttgatattttaccttttttgcaatatggaatattggcaaaattggggagtttcgagtctactcaattttacaaaaaaacgacatctcgaagaactggtgaacaacttcaccaaaatgaagaaattgactaagtgatgtcaacatatcactttggcatccaaaaatataagtccgggtcgttttttcacttacccagcatctaggttgatgtcagaatgttaacctgggcgaacaacctttaggtaaaatggtcataactccctcaatatcgattcgattgatgcgattcaacttgcattttaaagaaattttcaaagctttttcaagtaatgtatcacactaataccacaattttgaagatttaaagtccaaaatttgtgcccaagacaagtataattttttacgtagattacccaaaaacgatacaacggacaagattcaagctcaaaaaattgacaattttcatcaaattttcaccattaaatcatcatttatggccaagatcagcccaaaatgaatttttcatatgttttgtattattttattattattttaatggacctccttccctataaaaggagaactccactagatcatttttcacattctacgaagtcgccataaggtcagagcatctctctctagaaatctgatctctttccttagtcaattctcttgtaatttttgtgagaaacaaaa

SEQ ID NO: 339219 - DNA, 620 bp, Cannabis indica
atcttcatcctcgccttgggaagttccctacttgggaatgttttttcccttgtgtgggctctggctagaggatatttccttcttagccttggccactgcaaggttgtaacattctcgagcagactgctggtttcctcttagacaacctaccccattctttgttgggtacttcaggcacgagtgaaatattgatatgacagcctttaagtcaaacagggctggtcagccaagcattacgttaaaagctgaaggaacatacaatattaggaactgggccatgatagttatgttcgtcggagcttgtccaacaatgaggggtagccgaatttatcctagaggtgcaactccttgaccggagaaaccatagacaggctggaggcatggagttagatccttgagttggagtgcaatcttttcgtaagcagtttgaacaagatgtttgaagaagctccagtgtcgatcatggttctggccaccattttattggctatctggacttccacgaccagcgggtcgttgtgaagaaatttgactttgacagcgtcttcatcgttgaatgatatggttggctctcttgctcgtggaactttgggccttctttcttccacagccaggatgac

SEQ ID NO: 339220 - DNA, 1094 bp, Cannabis indica
tttttcaaaataattctaagaaaaaaaagcacctcccttaattttctacttcccaaaaaattaaaatcactcaaacaaacccaacaataacacaacacaattccaataagcccaatataacaacaaatccacacagtatgcactataccacccaaaatttataaaaagtaaatcaaattccttaatatggtaggaagtgatacttacaaacccaaagaagctttcactccacctccattgttgaatgttcttgaaagcttgaggttgaagatgaagaacaatggtaatttttggatttgggattgtgttggtgatttttgggatggtttttgttggaaaatgtagatggatgagtgaaattaggtttatagatggattgggattgagaaattggattgaagatgaaagaattaaagatttggggaagaaaatttgaaatttttgaatgagaatgggttagggtcggctgagagaagaaggaaatatttgaaattggtgtagggttgaatggggggaaaaattgggatatttataggaaaaccgtcagctggtcgcgactagcttaaattcaaaattctgggggcttctggaaaattggctagtcgcgactggggttgcgacttggaaaaagggtcgcaacttccagtcaccctagtcacaactactgggaataaaattttttttgtggttctgtaaaacccgaggtcgcgaccagggtcgcgactaccaaaaagggtcacgacccaagaacctggtggtcgcgaccactgggttcccaggtccaattttttttttcacgcttttcatgcttcaactgaaaaaatttaatgtctggtccttaactaaaaatttaaaatacaagaaatactaaaacataaactagaaacatatccaaaaagtctgaaaaatgaaagaaaacacttgggttgcctcccaagagtgttgtctttatcgtcatatagccggacactgagctgtgtctagagaggcgccagaataatggcggacttggcttggtcaaattgacctcccaagtagagctttaaacgttgtccattaactttgaatgttgctggaccttcaccttttaactc

SEQ ID NO: 339221 - DNA, 1552 bp, Cannabis indica
ttattaataataaatttttattaatattattattatattattataattttaacttttaaaaatttatcgctcaaagtttatatatattatataagttatatcagaaatagtaaagaatgaatgaaactctcgttcctctcctttcgacaaaaccttctctctctatatatatttattttcttcgattttgaacccgaaacctagcgatctaagctccagtagtagcaagatagcgaattctcggagcaggatagcttgaggtaaggtttaatttcgttttaagtttaataataattggtgtcgtataggggttttgtaaattagaatagctatgaagattttgaccttataagattgtcctcgggtagtcatgggactagttctgatgttttcttactgaaactgaggtgattttgggttagaaatcgagtttggaactttttaaagcttagtccgagcgttaatggcgttttccgtttaagggctcaattttaatttcaattacgtaaagatggtggtattcatggtatatatgtgccctgtgaagtttggagtgatttggataagttttggtagtgtttcggtgaatgtgaaaattgagattttcgtgttccatagtttttagaaattcataggagattagaaattgtatttttgttataatttttcactcgggtgtctatttagaacgttctatataccgtttcaaagcttgcaacgagctctatggtatgatgtacgttttagagccaaaatataagttttattttcgtgtatttatatcgcgagatttgatagaaaatcctaaattgtcttacgcgagtgttaagtagtattttgggataaacacttattggtttattattgttatgacataggacccgggatcatagatcgttctctgagcaggtcggccaacatacctgaaccggaacttgaggtaagaaaaggataatgtaccacatggcataataggttctaaaattatcgattgtctgattagacaatggtaatgtaatgatactatggacataatatatgggcttacctgattaggtgatgcgatatacctggcgatgaaccgggcgtaggtacgggcatcagtgacacatgatgagtactgagcgtaggtacaggctcacctaatttggtgatgtaatagtactggctacgtatcggacgtaggtacgggcgtcggtgatatgaaatttcctggttatggcatagattgaaaccattgctgggtttcttcctggcgacgtatcaggcatgataacaggcatcagtgccatatgataagtatcacgcatatgtacgagcttgtctgattagacgatgcgatatattagtgccaagttgtggcacgggctcacctgactaggtggcgcaatgatattatatatgatattgtattatgacatgggtttgcttgattaggcaatataaatatgtgaacatatctatttatatgcatatgactggttatattacctattgttgaatgttatagtttaatcattatgtgataatgaaatatataattagctattta

SEQ ID NO: 339222 - DNA, 820 bp, Cannabis indica
attcatatatgaggttgcgacttgtagctatacagagaaagggccagtttggcacaacttttaaaaaagctaaaaactgcttttaaagaaaattgtgataaaaaggtggttagtaagcagttaaaaatagcttattgaataaattatgaagaaactatagctagtacaacctaacttttagaaaaaattgttttgattaaaagactctataataaattatttttttactaaaaacatatttaattatttattatatatttaaaataaataatattaaaatctcttattttttattttgttttaaaaaatacttcatatttatattttttatttttattatcaataaatcacattaatttagagtttcctataaactgcaagttataaaaatataatttatattatcatgaattatttttatcaaatatgtataattttatagtgtgggaaaaaataattaaaaatatataaaaaataaaaaaaattatataacataatttttatatagatttatgattataataaactggattataacattctcattattatagtagaatcttaaaagctcacagtactttaaaattaatatttaccaaacgctcaactcaacttttttccacaattttgctacaactgctttttctcacggcacaactacaactactttttcccacaacatagctgtgccaaactggccctaagaccacttagctatgaataaaatagtcagcaacatattaaagttatgaaatctttaaataataattgttgtacggttcattgatgcctgttctttagtgcaagtaatctcaattca

SEQ ID NO: 339223 - DNA, 641 bp, Cannabis indica
gtggaaaagaaataaaaaaggtgataaaaaatgaggcccaaaactatgaaaaagagaatttttgaagataaaaacaaagcccaagaaggagagcccatttggcccaagcctcctcttcctctctccgctgccacgtgtcacgcgcagaggccatctgcgcctgggccccacacggacagcactaacaggtgccttgtcccctctgcctcctccacgcgtgcgtggcatgcaccggcccctatgggccatgcgtttcgtacactcgccagccacgcggctagccttcgcttggtccgagccccatcagccaaaagccactttccacgtggctttatctcctctcgccatgtgtcaagttgcacaccaaagccaccaatccgagcttgacacgtggcactccggttataattttttgtatttacatttttacccgcatgcaatttataaaaagtttaattgcgtattagtccttttacccttctataaatagaagcttaggtttttagaattcagttacagtttcagagtttcagacagaaaaatccagagaaaacgctcgaggcggtcagtgttagtttatcgcttttgttagttaattttcttatgggtttctaagttcccttattattaaggaggacgat

SEQ ID NO: 339224 - DNA, 711 bp, Cannabis indica
tatgatttttcttttatttttttagctttgtttagcttggtaggatttctcttcaacaattttgacccttaaaagtcatataatatatagtctcattctcaactataaagaaatagcctataattcataagaaataaagaaaaagaaaagaatatgaataagacttgaatattgtacataaaaaattatacattttaggataaataatattttagaccttgttttataaaaatttttaatttaataatctattttaataaatgataaattagatcatgtatttttttttaaataatattaaatagtattctgaactgattttttatcaaaataaaacttaataataacccgatctagaggtgttatgacggaactagttatatttactatacatgtttaggggtgtgcataaatcgatcaaatccaatgagaaccgaccgatccaattacaagcgaccgccaaacattggatatccaattgtgatcggatcagattggatgttatttttaaatattcaattggatcggatcggatggtggatggggtgcgtaaaaatccaatacatctaacatctaatcgaactaatttgtattttcatttagtttggatgagtaattagtttttatattgttatacgtcaaatctatatgtatatatgaaaattaacattaaaattttactattttttcttggattggatggatctagtc

SEQ ID NO: 339225 - DNA, 577 bp, Cannabis indica
aatccgcgagccactcaaagacaaattctatgagtagtacgcgatctgtgagtaagacgaggtctgccagcaattactctcaactggatctgcgagagcacttgaatcggaagaaacctgacctttgccaacagcttggtcaaaagaaagaggttccaatccaaatacggataaacgagctagaggaaaagttcaggagatatgaagtggggtaattagggaaactatctcgatacgactctaacgaagagcttgagccgtatcatccagacataatgaatgccccttttcatttaggatacaaaaacctgcatgtcttgtcatatgacaaaaccacagattcggtctcgcatttgactaactttaacacaataatacgagcgaggaatgtgacaaacaatttacgctgtattttgttccccacctcgcttgttggattagcgagtgtctggtttaactagtttacccatcattcaataactttatgagagcagttgtcaagggattttaagaaacaattccagtggtctaaggataggcgacccaaagtagcctcgctaaccaatataaagcaaca

SEQ ID NO: 339226 - DNA, 601 bp, Cannabis indica
ttaattaaatctaaaaaaggaaagtctacctattagtaacctgctattgcaggttaaaaaaaaaatgtaaccatatggttacaataaaaatgtaaccattaaatagtcacccatatatatatattaaaagaggagcatctaaaggcttcaaatatgctctaaaaaaaattagataataaaatttcatttacaaattatataaatagaaataaattagtgttgggattaaactcaattaatttgtcaaagtcaacagtttcatcttatcaaatgaatttgaaaaaaaaaactaatgttagttataagtgatggctttgtcattaacttaaagagagtcccaccaatatttataagggatattggcagctaaaccacctgaattttacgttttgtaacacttaaccacaaaaaccaaaattttggtggcaaaatctactgaactcccattctattttctctgtacccctccatccaaaaatcacagttaagtgctacggtggactgtccacgtgtacacacttgcacacgtggaaaatttttagcggtccacgtaatattaattttaaaatattttaaaaaataatataaaaattaaaaaaaa

SEQ ID NO: 339227 - DNA, 891 bp, Cannabis indica
tctctctcttcgaacccagctagaaccagggagaattgttgctggattcttcagttcagcaaggaatacaaggagaaatcaagtggaggtaacccctagatcatttgttgtagtttttcaagcttagatatttgtttaaatatgtgattttgtgaaataagggctgttagggttagaaatgcttagggttctgattttatgttaattttaggttgattctaagttttggttattaattttgagctaaggagataggtttgagcaagcttgagctttgaaactcaagtttaggtctttaatggcataatttgatttaatgactttttttgggaatttctggttggaatatgttgtgtatacattgtttaggtactctggaaagtttggtggcaatcggacaagttttgagcaaattggtgagttttgggggagactggtataaaaaccggtaaactagttttggcagggttccccgaaaaattagttttctcaattctcgtccatttcagtgtcgtagttgggtgtttccttatttcctgagttagagtaatcctgagtataacagaacctagggttgtgggttcaggtttcccggattagggttgcaaccatgtgatttacccagttttattagataattagggcatccatctagcgtgagactttccgtttaggtcggccaacacacttgaatctggaaagaaggtaagaactgtacataatgtgtgatatggatgtgcgaatgtatgtatatgtttagtgtatatgcatgcttatatgttgtgattcatacactaccaacacttgtacggttacggtacagagtgcattgctaaggtgtatgatgtctgaaagtacatcgtggtgttaccagcacttgtatgggaaggt

SEQ ID NO: 339228 - DNA, 708 bp, Cannabis indica
tttttttgatttttacggaattctacataaaaatttctattgcaactagcgctacaacctaaattgcaacaaaaaatcgtatagaaaccactattgcaactagcgttgcaaccactttagaaactgaaatcataaattttaaaaaataatatttaaagtaattttcttaacaaaaaataattacaatttcgattttgttaaaatatttaataatatataaatttcttattagctttggagaaatctgggtgtgatttggtccaaatctggaagagagacaatacagacaaatatttataataataattattattattattaactaatactattatttggtcaaaattttaaccctattttttgggattgatgttttcttgttttttatcttttttgttttttataacagtaaaaattatgtatataaaaacataaaataaaaatcattcacatgttgaaattgattttggatatttattcataaatatttttgatatagtaattaaaataatgtgacattgtcacatgtgttgctattttctatacataaaattattattgctgtaatttcaaaatggaccacattatatatgatgatggaaaataatgtcaactaaatttagtatattggaaaataatacaatatgcaagtcttaattatataattattatcccttcaaaaaaaaatttatataattattattatta

SEQ ID NO: 339229 - DNA, 1023 bp, Cannabis indica
cagagattaacccttataccaatgttgacgttgttagttagtgagggaaaagtgatttgatgtgatacttctatacaaggattagattgtatttttacacagtttaggagagttgttgcttaattacttagaccaattgaaggaatataagaagtggtattttagtcatgatattgaattggcgataatcgttatgcactgaaagttgggcaccattttctatatggtgaaaatgtgaaatttatacagatcatagaagcctcaaatactttatcttttggaaagatttaattaggcgatagtaacaatagtaagtgttgattgagattataacggtgtgactccttaccactctaagaagtaaattggtagtagatgatgtaaatcgaagaggtctaggacaagtttgtaaagagaaaagatctcaccaaaggttgttaaagatataaccagaacagggattgagttcgtggttagagagcttattaatatcacatcgtagcttgtaatttgatttactggaaataatttaaaatggcccagcagattgactctgaactttagaagtacgaggaaaggtttggaaccggcttggcaaaggacttttgattttgtgtgagggaaattttatgatataaattaaaattagtgtattagtccgataaggatactgaatggaaggttttaaatgagttttcatgtaataacagttattagaacactgttaatgtggtactgatgcagattaaagattcaagtttgtatattgcttatataatggatgaaagagctatgctgatcttaagtgtagaaatattaatttcaagccgggaattctatctttcttcaggtggttccaatgaaaagggaaaaattcagaaattggttagaaaggggagttaagtcccaggttaatcagtccgtttgagttttcagaaagggaaggtcgggtaacttattagctagccatactccctgttttatttagagtttacaacatatgcttcaaggttttagaaatac

SEQ ID NO: 339230 - DNA, 566 bp, Cannabis indica
ttttttagattttcaatttcacgcttcttaaaacttcaaaccagcaaaaattcttggcactctagattttctcttgccttttttccgatggtgtcaatctcggttaaactgtcgttgtgtctcagtaccggcaactgctcaagcctctcccatttttaagtggtttaccatatgcactttattactgtttgatggtgatatatacatgttatactcaaactttagctattcaccagaagtgacacgtgtactataaaaggaatatgaattagctcaaagaatataataattaaattgcattattaagggtctgtttggaaagccacaatgtaattagatttgtgtgtaattggaggtaattacacaatttgacatgtttgtctgaccatgtaattacactgtaattgtgtgattggaagtaattgaggggttctaattacactatccaattctcatggccccccatgagaattgaatgtaattacacagtgtaattactaaaaactttccatattaaacattagctactaaaaaatattattttcccatttaattactaactattt

SEQ ID NO: 339231 - DNA, 502 bp, Cannabis indica
tggtactcgcatcttttgctcggatccctccgggagctatctttgtacaacgggtgcggtctccggtagtgcgtattttgcctagtagcaaagtacacatgctcttgggagtccgtcagctccgtgtactgggtgtattgaggagtgtacccccttttctggcgcttctcccccgtccgggtgctgcctttggaggatctcttactcctcgagtcctgggaagggcctgccaggctagcggtcggagcggagtgcgagggagcttgtccattcatccctgagggatttttaaaatgggatgaggctggcgccaaagcctggccctgactatctgtatgccgcttatcggtggaactgcggtcggggcggtacccgacggcggtactccgggcatgtaccctgctatcccggtgggatagtatcctccataggccactatttgggcttcttcaaggttgatatatttttggaccctcttctggaagtcctgaaggctagcaac

SEQ ID NO: 339232 - DNA, 540 bp, Cannabis indica
ggagcttaagcttaagaaaactcacttaagcttaagaagtgtctaaagagctgtgagacactaaaactctacctatatgaactagaggtggtgccgcctcttataagaattgggagtattctctagagagtccatgaattagaattttgcacatcgccatgaacggtgcacaagcgagatataatgaggtctcaagtgaactctagcaaagatgtatgtgttatcaccggtttgtattaaaggaatagtggttcaatgcttcggcaaccaaaatttcaacaaactttgtgataactacactaaattaaaatttatatcgaaagacattttactttatgcatctaagcacgatctctataaaaatgtttgatttattcaatcaaagtggaggatatatgtaatatttgattgattaaattgaaattccgtattttaatattctcagtttgattatttaattaagtgattaattaaatgcggaataatgaaactagtactgaaaacagtttttccttagttacagaatacaactctgtaact

SEQ ID NO: 339233 - DNA, 547 bp, Cannabis indica
ggcatgcgggtttttataggaggtttattaaagatttctcaaaaatctcaaagcctcttcgctctttacttgagcagaatagatcttttgagttcaccaaggaatgtcatgaagctttcgtaactttaaaaaaggctcttgtatcggctcctattattgtagccctcgattgatcactttcttttgagctaatttgtgatgctagtgattttgcagtaggtgatgttcttggccaaagaagatagaaggtgtttcactctatttagtaagcaagcaggacattagtcgatgcccaattgaactacaccactacggagaaggagttattggctgtggcttttgcctttgacaagtttcaagcttaccttgttgggaccaaagtggtggtgtacacagatcattctgcaatcaagtatctcattaccaagaaggatgccaaatcgagactgattcgttagatgttgcctcttcaagaatttgatttggagatttgtgacagaaaaggagctgagaatcaagtggctgatcatctttctagactagaagg

SEQ ID NO: 339234 - DNA, 667 bp, Cannabis indica
tttattttttaattgtaattggtttaaattattgtgtgatatttgtttgtattcattatgttatataaccgattctattttagttatagtcagttttgagttatttcatgttattgattttttttcattataacgctgttatagatacagttctatttaattataattggtttaagttatttttgttacttatttttattcattatgttacagagctagttatattttaattataatctgtttgagttattttgtgttatttatttttattaatttcttatagaaccggttctattattattatattcgagacatttgattcccactttttttttttaaaaaaaaaaattataatcggatttatgagatattatgtgttatgaagtattttattatgaaactagttttgtctttaatttatatttcattgttttaggaactaatttcttctttatttttaattgtaatcagtttgagttattgcgtattacttgtttgtattcattatgttatataaccggttctattttatttataacaagtttgagttctttcgtattatttatttttatatattataacattgttatataaccggttctattttaattataagtggtttgagttattttatgatatttatatgtatttattatgttacagaacc

SEQ ID NO: 339235 - DNA, 475 bp, Cannabis indica
aagaacaagtatgcgagatgaccatctcgctatgaggagacttcctatagcttcatccaactaacaggagcgacgctcataaccctggcaagtcagaagatttctttatacccgcgatcgacataagacatacattgtcgacctcggaaagaagaatggtcccaggtcactattgggatcactacaatcaagtttttatcgagacatctccagattcaacaattaaagacgtgtttaatagaaaatatttttgacccaataaaagtgggaaaatcacagctatacgattttcaaaatcatacaccgcatttacatttcctgatatgtaatcaaatcccaagattttagagataatggctgtaaacatattgtggtcaactctttaattaactgccactatgtacttataaatagtggcgaaaaatctcaaaaaagggagaaaaaaaactcagatgaaagaggccctaaaaaaata

SEQ ID NO: 339236 - DNA, 1054 bp, Cannabis indica
cataacaaatgcaacaaaatgtggggagctagggacaacaagagaacatacaggagacaacagtggaacaacacgaaggaaaactgaacatatattggagtataggatacagaagaaaataacgtatatacaaatttcattattttcctattactattaaaaatagagcagtataaaaatatttagaaaaaaatgataaagaaatgaaagaaacaacagtaaataacattaaatttagaaaaaaagtgataaagaaatgaaagaaacaacagtaaataacattaaatttagaaaaaagtgataaagaaatgaaagaaacaacaataaataacattaaaacaataacaaaataaaccagtaacagaaaatagtaaattggagaaagaggatggacttagaagtatggtagagatggagtcaacactttgagaccaaagagactaaagaacatgtacttaacgagagtttttgaaagatttctacaagaagtttatcacatatcaagctctccgactctctcttacacacaaccacactcttatcttttccaaatcttcttgtatttcttactcttttacatacttttttttgttacctactacaaaatagaggtcttcaacaaaatttacaaaccacccaacccgaataaatcaacaaaaaatataacctgaaataatacaatgaaaattcaaaacctttcaatgaatatactgggtggtttacaaattactctaaaacccgaataaactgaattaaatcgatttatatatttttaaataaaagtagtatataatatattacataaagagtaatttgcggtataaataactaagtttaactcccagttgtaaataaatacctaagtttaatttttggtggtaataatacctaagtataattctaaaacttttgtaggtacctgactgttaagtgttaagtaattgtcacgtagcaatttctaattgatccaagtcattaaatttttattttttttaaaaaataatttaaatataccaataaaaaaatgacacgtagataatgacttaacatttaa

SEQ ID NO: 339237 - DNA, 793 bp, Cannabis indica
tttgagataaataaaattattttttcattggattgttttaaaattaatttagaaaaatgcacttagtttaaagaaaagattctagataatgatttctagtaactaacttgtattttctaatattttatgggaaatttaattttacatgcttacatatacttaaaaattttcccctaaactcttaataactaatatttataggatatgacaaattttatgatatccctaaaataccccccatttacatcacccccatttacacaatcggacccccaatcgggccctatattggacccatcggacccccccactcagacctacgtctcctacctcgcaaactcacagtttcattcgaccctatcggaccccattagacctacatcggaccttgcccaaaatcacatatatgagattctaaaacctaaatctatccctaaatctaataaaatctatctttaacactaaaatcacaaacaaaatcaataaaaaataaaaaaacagaacacgaactcaccttcgacattgtgtttaattcggtggtggtgcttcgatggtggtgcgctgtgggtatcgtgggtcggtggtggtgcttcgatggtggtgcgctgtgggtcggtgggaaagcctcgtgggtcggtggggatgctgaaggggtccgatcgattttgtgggtctgtggggtggtttgcatgggttgggttgggatgttcaagtatcaagcgagagagagaggggagagaaaagaggttatagagagagttaagtttgaaaatgagaggggtatttttgggtt

SEQ ID NO: 339238 - DNA, 798 bp, Cannabis indica
gaataagattgactcgtggactagcagaattttaacagcaaaacaatgtataaaaccctgtgttgatatattttttttctatagcttttattttttctgtgttgaataatcatcgtgaggctcaaattcggttaacgaaaatctgcgttaacagtatattatgttgaaatgctccagttcaatccaccattttatcaatcttccaaaagcatctagttttgataaaacttgtctcaagggctgatcggttgacacttttatggggtgagcctggaagtatggcctagcttacgagacgtattgactaggcacaacacgaagagggggatatatggattctacccctagtaacctcttacttacgtagtaaataggttgttggtgcttgccctcttctcgcactatagttacacaaattgcatctttcgagatggctaaatagagaaacaacgtctctccagttattggtttcgatgaaattggaggcgttgtgatatatcttttcatgttctgaaaggcgtcatcgcactcttttgtccactcgaacttcttgtttcctcgcaatatgttgaataatggcacacacttatcagttgacatcgaaatgaatctgttaagtgcaaccattcttcctgtcaaggcttgtacctccttaggctttgtcagtgaaggaatgtctattaatgccttgatcttttatggatttgcctcaattcctctcgcattaactatgaatcccaaaaactttcccaaggagactccaaaggaacatttttttaggtttagcttcatgttata

SEQ ID NO: 339239 - DNA, 483 bp, Cannabis indica
ttggggcttagaaacccaactcaatagttggtatttttgtaaaaataagcattagcccaaaatcccaatttgatcactccttgtcatcaattataattgaggaaattacacttattatgggattttaaaagttcttatgataaatatggcacattaaagtttgaccaatttatatggtatttttttatttttaggtctttttatggtatttgatatgccatatatacgtaattagattttcaaatcccatatttaatgtttttatttgtttaggaagttttgaaactattgtccaagccgtaggtgtttttctcaacattgcatttgaagtgggccaaatgaagatcaagcccaagtagtggcccaagtaatttgccaaatctaatgggaaatttacatggtatactaacttttatcatttcttacaaaaatactgtcatgcgatattttttactttttactgtgtttttttataagtttcat

SEQ ID NO: 339240 - DNA, 1003 bp, Cannabis indica
ataatatagtataacataaggtatatattcatttaatactctctattttgtcaaaatacatatttggtactctttattttaataataattaattggtacctcttatttacaaaaattaaacatttagtatcttgtgagtttaaaattttaaaatttctaagtacatatatactgggttcgcgaaagtttcttacttgtgctcgcgaagaactaattaaccttcatcgcacgaccagagccataaaacctgggttccacaactcgagaactcatcttcttcctcggtcttatgtggccaaggttcaaggttttttttttctttgttaaatattttaatgttagtctagtattttggtttaacttaacccccaaaacttaaatttaggcggtaaaatccacaatactcgtgttctgttagcaatttaacacttttgtctaaatttagctgttaactgccaggttggattgtctacgtggacacaatatacacgtagcacaattttattggctcacgtaaatgattatattaaaaaaattaaaaaataaaataaaattaatttaaaattaaaaaatatatataaataaaaaattaaataatttttctttctttttttcctttctttctttttctttttctttctttttctttttgtctgaaacatctctctcgctctcttgatctcctcggcaaccccatacatccatacattgtatctctcagcttaaggtttgcttcatataccaaactattagctgcatgctttctgccaattcctacatatataaatataattaattaattattacttataagaccacaaaaaaatcattatgaaattaaattaattaccataagcatcttggaaacgttgcttgcaccaaaaactttgtggacagtggcaaatttttgaggctcttgaggtgaaaagtagggagaaaaagggcattcctcagcacatcttcttctcaaaagcttacaagcagcacaaggtgttatggtgtt

SEQ ID NO: 339241 - DNA, 537 bp, Cannabis indica
ctcaaactcaggtgggtgttgttttcgaaaactctctgctaacaactcatgtctagcctctgtagcaggatataccactgcagctggtgggtctctattttctgcatcctgccttatttggactggcggctccggttgacgtctcagctgacgaagttcttcatcctgcctatgaatgattccttccagtgcggcaatgcgctcttcccatccctgtggtgcttgaggtggttcattgatccctccatcatctcggcctctacctcgtccttgacctcgacctcgacccactctaactgaccttctaggaggcatttctaaactcctgaaccacacaaaccaaaacacatcaagatcattttgatcatcaattttacatgaaaagaatattacactcccgcgtgcagaaatttaaggcaacttaattataagtaataaccacttacagtacagtgagtcgagctcgtctcatggcggtgaactttacatgttagggctaaccacattctttaggaccgtattgctctgataccatat

SEQ ID NO: 339242 - DNA, 755 bp, Cannabis indica
cactagagttgttggaagtggactttctcttctaagaattgcttgggttcgttaccatggagatgcttcttgcttttccctttttcaagtcctcctcttccttagcaagaatggcagtcatctcctcaacggtccattgctccttttgagcattatagcttgatctgatcgaatcaaattgagagggaatggtttccatcacaaaccacaccatgtaatcctcaccaagatccaatcccatgcccttgagcttttggtaacaacccatcagtttgtcaatgtgagatctaatgtcacctgaatcagcataattagtccgatggaacaaaagtcaggcattcatttttctcattctttgagaatttcttgtacttctccttgattgcattgagaaaatcttttgcaatctcagtttggggaatactatcacgaatggactcatccatgtgatacctcataagcatcagacaacaacgattggaatgctcccaatcctcataggactttctatccttttcagtggtatcatcagtaggtttcggaggtgcatcagttctcaaggccaaatccactctcataagagtcaaattcatcatgagagattctacccactgcttgtggttagttccgttcagcgtcaacatggcagaggttcttggattgcttaaagctaatgagaaacaagagcaataaccattaaatgcatgttataacataatcatgccatttgtgctctcttctcataaataaatgat

SEQ ID NO: 339243 - DNA, 631 bp, Cannabis indica
aaggtcaaaaacgacctttcctagtctaagtaatcccttagactaaaacgacaccgtttaacccacacgacactaaacttgatgtcgtatcaaacctttggtttaaagactcagtagaagagtctagaaaccctaaacaccaaacacaactcacacacagcctctctgattcgaaaccctagcagagcaagttctctttgagaacttgctcgattccaagccagaaacccagaatcaaacccacacacacatagatttagatttagtaaaatgaaaaacaagagtgagggagagaaaacaccagatttgtttcagagttcacccaaaaattagggctacgtctctgtcaagctcgtctcagagattagcttgatatccactatcgacaatgatgcaatacaatgattttggagcttcctgtcacaaaatcgatcaggtaagactcgattttgttgcttttacaagtttattgttttctctctttctgttctttgtaatctgaatctaactttgtgttcttcttgtgcatgtacttctccttgctcgataatcctcaccacgagagttttactctcagatctggaccagttctctctggatcttggatttgggagctcgaggctagggtata

SEQ ID NO: 339244 - DNA, 666 bp, Cannabis indica
caaagtaattgtcttttcataatgataataataataatatgtagggcactcctacctatttaaccaatattttcagattttaaacttatatctaataaaagagtaaaggtaccatttattcaccaaaatattatataaattacattagtacatatacgacattccatccaattttaacatttttttgatcaaagttgtaattacaattttttataataatttttaattaatttttacgtttgaaatcacatatcaaaatattatttttaaattttatttcatagcgatattcgttatagtacaatatcatccttgtaaatttttaaaaaattttgaatagttaacagttgtgaaaatagagttcttgatattctaatccaccacgcgtgttcaaaaaacttcaaacctattttaggtactattaattattcaaaattttcaaagatttacaaaaatagtattgtaattataacgaacaccgtcaagaaaaaaaatattctggcatttatttttgagcacgaagattgattaaaaaattgttataagaagttaacggtagcactcttaattaatggaacatagaaaattatgatataatttaatccaattaggttataaaattcaatcaaatctaatacaaactataactgaattagattttaatta

SEQ ID NO: 339245 - DNA, 732 bp, Cannabis indica
aaaaaattacattgtatacctactttattttatctattttaagttttgcttttatttctatattctttaggatatgcccacttttatagatgatatcctcattatacccattaggttaatgtaaaatatgtactaaacttaagtggagggtgcgggtatattgggcaatccactcacttttataggtggtggtttggtgcatcgctggccttcgggagagagtggaattgcggttgtgctagggtcaaaaatgaagaagatgaaatgaaaagattcctttatcaaagggggttagcgaaaattcactctttttgcttcggtggataacagtcgccaatcttttttcccttcagaaatttgcatctttttttaaccgaagcaaaatgtaaaaacaattttaaaactttagtccttttttcctcggttccacttttagcattggagatataaccgacgctaattagattctagtagcttcagttattatttgaagcataaaattactgcttatttattgtgtcggtcaaccattttagttagaagcattgaccgacgcaaattgtgtattttgtagtagtgtaggttcaaatctttgtaatacaatgcgacagaaaggaacaagagttagagacctaaacgaaaggagccattatattccattgccaccaatgtaaggctttctacaactttatatgtatttgttgacttcccttttagccaacgacaatgagt

SEQ ID NO: 339246 - DNA, 1437 bp, Cannabis indica
ccttatatggactcaaacaagctcccagacaatggaataggaagtttgatgcttttatgttaaagcatgagcttaacaagagctaccatgacacctgtttatactataaaggaagctctataaaggatgtcatctatctactgctatatgtatatgacatgcttattataagccaagaaaggtatagggttgatatggtcaaaaatctgctcaagatagaatttgaaatgaaagatcttggtaatgctaccaagatccttgggatttctatcctaagagacagggacaagggaaactgattcttagacaagaagactacattgagaaaaccatagataagttttctatgagagatgctaagcttgttaaggaaccaattactagtcagtacactctttctaaggagcaaagtcctaaaacagaaaaggagattgaagctatgaaggatgtgccctattctaatgcagtaggatcagtcatgtatcttatggtaagtacaagacctgatttaggctatggtatgagtgtacttagcaagtacatggcaaatccaggaaaagttcactggttggccatgaaatgggtgtttagatacctacttgggacaactaaggttgaattagtatacaagaaacagaatgccaacactataattgaaggctacagtgattttgattatgctggggatagagataataggagatctacatctgcctatttctttatgattggaggtaattgtgttagctggaaagtccagattcaacctgttgtggctttatcaacaacagaggctgagtatgttgccacaacagaagctataaaggaagctatatggctaaaaggactaatgaatgagcttaaactacttaagggtgtgcctactgtgtattcaaatagccagagctgtatatttctatgcaaaaaccctatgttccatgatagaacaaagcacatagaaatcaagtatcactttatacgggataaagtgactcaaggtgaaatagacattgaaaaggtgcctactgaggataatccaacaaacatgggtactaaaattgtgactcttaacaagttcacactttgtatgaacttgttaaaaatcgactcaggtgactaaaggtaggacctatcaagcgaagactctcagagataaacacacatacatcagaactggttataagaggaattcaggtggaaattgttgagtaaattccacttataaccagtcccttttacaacaaatatccacaacaaatatccacatcagcaaacttacaacagaaaataaacaacttgactcaaccctaggtggcttcgcctctactgtatcaagaaataggagttagttacaactgttattgtagctaactcctagatctgtgataaaccgactcagtacaagtatataaagatcaaatcaaagcaaatacaagc

SEQ ID NO: 339247 - DNA, 1146 bp, Cannabis indica
ccactgtgttgacaatactgtaattgtgaataaatatatgttctggacttaacttattttgtgtatatattaaatatatatatatatattaaaccataaacatgaaaaatacatgttaacataaatcacttcaaatctcttaaattgataactaatcagattgtaatgggttttatttagggcacaaaaccccaacactttctgctatagaacatcgtctccaagctatgcaattagacatgaaaaaaatcaacgagcaatacagaataccacacaaactcacacgatataacataactaacccaaaaatgtgaattaactagctaactcatttacagacgaaattagctatttataggcaatagttcaaccgacataatcaacaaataaaaccaaccgttgaaacataacagatccactcgaactttgacagaaagctggtatgcagttatatcagattagaaacaccagatacgactggacttactattaatataatttgtcaaaatactgacacttacaatctccccttgacagattatgtttgttgacctcacttttagccaacgacagtgagtctaatttagtaagcgacaagtagtttatcacaattgaaagataataaagcaatataaagatagaagaattttatagaggttcagccccgagcagttcgataatagcctaatcctcgttatttgtattaactcaagaacaaggagaaatgttccttttcttatatctctgaatatgaattcttagataatatctctcaagtaaaatctttcgatcctttgcccagtgaacatgcatcactatttatagggctatgagcttggagaggaagtatttcccttctcgttacaatggatataagccaaaagattgcgtaataaatatagaatacactgataataggatttggatagcttgttatatgtctgcaatctgatcccaagttatagggatttccttgatgactgacggtccaaaatcgctaagtgttggtcgctctgtgtggattgttgattgctctgcctcaagcatgcatatgaggtatcctgttcggactatatcttgtgggcagatactcagagtttattccatgtgtcaccatcatgtgatgccacgtcagagtgcaaaaat

SEQ ID NO: 339248 - DNA, 490 bp, Cannabis indica
atacttgtgagtagatctaaaatcctggtaaaataaatttccaacaaatactcccttcaaatcttcaagaccacacaggatgagcagtccattttttaagagtaagtttcaatcgttattgcatgtgatgtgaacttcatcttacagtgtatggggagttcttgatgaagttgtagattggtccgattgagtttcaaattgaattgttagtcggttggtccgaggtgagtgggtcaaactacaacagagtcgtttggtaagatttattggttcgattggacgattggtcgattcattcaagcccagcacgatgaacagtcaattagtcgaggctcttcaatacgatggagaacgattgatccgattggtccgattcattcaaggtcagcacgatttgtagtcgattggacgaggagagtgggtcgaaactcctcaaccacagttcaattcgatacaattcatttggatcctttcacttttggtttttctg

SEQ ID NO: 339249 - DNA, 564 bp, Cannabis indica
accttggtcgttgaggaataaactcctcagcataagtttgtggttgtacctcatcctcaggagcgtatggttgtggaacatacgcctcaccagccacctctccttcttcctcttgttcggcagcgtttctctgctgcttaagggattggacttcggcttttaatttttcaatctccttcgcttgccgagccacaacatcagacacttcccttttcttcctgccgaacagttgagatgccctggtcaggaacctacaaatcataaaatgcaaattagcaacgattttatttgtgtaactaaataaataacatttcaagtaatagcatacccagcagccctgacacgtccaggatgctctggtgtcccgagcgcctgcgtcaggatatcgttttggccctggacctgaatttgtccctgactaagcttctcctctaattgagcctaatgcacgcatatattcaagcaattagtatatgaattatatacactaactcatgagtagaactcaattaaggattaatatatacttactatcttctctgcaatttccttgtcgtaatcagt

SEQ ID NO: 339250 - DNA, 501 bp, Cannabis indica
gtacaataaattattctttaatagtttaattagtccaatcaaaaacaaaaataatcttttaaatatttataatactcataaagatcttacactagttacctttagtaataattttttagtcgcaacataattttttaattttgtaactaaatgtgacttttagttacaacaaaaaattaattatgactaaaacataacatttagatataagttgtcactaatttagttttaagtcgcagcaaatattatgactaaaacaacatttagtcacaacaaacattgtgactcactacaaataatcttacttttccacaaacaatcttacttttccacaaacaatcttacttttcatagtcacaacgaaatttgtgactaaaagtaaaaaaattgtgactaattataaattgtcattcctacgtaagttgtgactaattaaaaagtccgtgactaaaagtattagtcataaaaatcacaataaaatcacaatgtattgtgactaaa

SEQ ID NO: 339251 - DNA, 578 bp, Cannabis indica
attggcttgccgatatgctgcttccacagacgtggcctaaacctctaagagacattgtggtgcaccttggccacgagtctcaatacgagatgatacaggtagtcattcgtgggttggtttgcatacgcacatggggcgaatgcaccatgttggaaagagacagtggtctaacgtatgctactagtttggtggcttatctcgagggcatgccaacatgcgtggaggcatggtgccttgaggattggaccatgaacgtatatgggtccttgggagatgagggagacagtttagacagtatcgaatggggcatgattagaagcatcaagacttcagcttagtgttggtatcttatcacacatgctaccttggtcacgagtgactaagtgagcgacaatgttgggactttccttatcatagtgagaacctatggacagtgtgagtatcttggctaaagagcctcgcttcatggatgcactcatggatgcttccgagcatgacttgacaggagttgttcgagagacggaagtgtgcacgaggcacacggttgcgcaaaaaatgagcccattattactcggatg

SEQ ID NO: 339252 - DNA, 513 bp, Cannabis indica
tcgagttgctcactatgttgctaggcaatctcgattttttgctgatcgtcgagtccttagttcaaatgtttctgctgatatgcaggaaatattgtatcaggattcatgctattaataaatgtttgctttgttttcaaaaaaaatacctatgtgtttataagataaaaaataatctaaaagctacctatttatttatttatttatgagtgtaacagaatttgtttaggaattgttacacaatttgattaaaaagttaaatcttttacataattaataaaaataatatatatttatatatatattgaatattttgtagtttgttggaattaatttataaataatttgcatatttcaacaaggttgatatcttgttttttttttttattgattttatagtttttattttgttattttatagttgtttttatgttgttgtttaagtgtttttatagttatgtattttttgtaccgttatttaatttatgtgaatttttttatggtgtatatttttta

SEQ ID NO: 339253 - DNA, 907 bp, Cannabis indica
tattttctgggatattacattcatattggttatatgggagtttcctagagtcgaggtaggctgctattggtgtcatccagtttggggatgtatcaatcatttcgatttcttctgtgccggtgatgctaggctcttcaaggaattggataggaaccaagtttgctttgtcacttacattgctgcttcccaatcgagctaacgggtttgcagttgtattttcttctcttggatttgacgagcatatcatccatatctcgcccgatttgatctttaaacatttggtttaccaatctttggtatgtagctccagcgttttccagaccaaacgacattactttgtagcaatatagacccatatatgttcagaaacttgtatgttcttggtctggtggatgcatttttatttgattgtagcctgagtaagcgtccatgaagcttagtatttcatgccctgttgttgcatctacgagctgatcgattccttggaagtggaaaacagtctttagagcatgctttgttgaggtctgtgaaatcaatacagactcgccatttcttgttctgcttgggtactagtaccggattcatgacccaagctcggtagaaagcttcaattatgaagttgttgctgcacagcttttcaacttcatccttgagggctactgctcgttctttgtccaacaaccttcatttttgttgaactaaccaaaagttgggattgatattcagaacatgtgagatgatacaagcatcgattatgaccatatccgcatgtgactacgcaaaaacgtctaggtttgagttctgtaccataccattgatgactggctgatttgctgagcaatgatatttcaagttggcccctggaagtttagttgtggaaaaccttctcttcggatttccatgcaca

SEQ ID NO: 339254 - DNA, 774 bp, Cannabis indica
aaatttaatgtaagcccaaataaaaagtctaacatagtgtttttgggaaactcaaattttggctccatttaaagaaggctaaacgcaaagctttgacatcattcaaaaatttagagaaattctcagcatagaaggagggcaaggaggagaaggcaccattggaggactctaaacagttttctatctcttcacttctatcttttatgtttttaattaaatctctattgttttagaatgacttctagtagttaattatttttaagaattattatgtgaaccacttgaatttattttatggattaatgtagttgttcaatttctttttcttcttttaattcaattccatacaatttgttttaattctacaattatttactgaccatctataattattacttatgaaaataaatcaaaattttggaatgtgagatttgaatatgctctaattgttatggatgtaaattgatttagaatgaaagtacctaggttatttgtatgattctattagttgatatacttaatgctatctttgtgattaaacttaccataggaatataggaagtttttatataggttaggtttataagtttaaaccagattataaacttcttaactcaatttgtcaattgaatagggagaaggcaaactgggtaactgcattgggaagtaaaataaatgatagttggatatcataataacctttgtctttattattgtgtatttttctaattttaattattgtcttattttaattactttctgtcaaataatttt

SEQ ID NO: 339255 - DNA, 1602 bp, Cannabis indica
aatttactaaaaattctggctgcgacataggaatgagtggcctcagagtcaaacagcacagagaaataagagttgttgaccgagagcggacttgttactactgaggggttggcttctgcatcagcctgagttatcgcgaacacctttgcttgagtgggtttcgctacagtctctggtgcttcagtcttgagttggggacaatcccttttataataccctggcataccgccctaaaaacatccatgccctctacactcccccaaatggagctttttacaactgaggcactctgggtaagtgtatcgggtctcagtgctaccctgccgattgccttgaccctggttccataggaacctcttgttttgacctgagccactggatgcggtaggtgcctttcttttctaatcagtggttaagccactacctcccctactacagcctgatgtaggaagggtaggagccccgccaacaaccggagtctctcgagattctaaggtgcactttactgcaccctcagctcgcaatcccttatccaccatatcaacataggtggtgttgtcatcggtggtaatcattaggtcatgtctgatttttgcatttaacccgtccaggtacttctctttcttattgaaatcggtcggcacaattctcgaagccaaccttgccaagcattcaaactgcatcgtgtattcagtaacactcatgttctctttctgagtccacttggtgaattcctttcttttagcacttctgacgtcctcattatagtacttggcattaaacagctactggaatttctcccaggtcattgtggtaacatcatgaatcatggacaccatgtcccacaaaaccagagcgtcttcttgaaattggaaagaggcacaggccaccctatcattaccagtgacgcccataaagttcaagatgttggtgatcacagttagccattgctcggctttcatgacatcggacctcccaggaaaactggagatgcctacttacggaacctttcatacagggattccatctagttcactacaacaacggattcggcctgcacagcaacggcaggggctaatggtatttctggagcagggacttcaggagcaccctgctgtctcaactgccgaatctcttcatcttgttcattaattataacttgcatttttgtaaaactattttcccattcttgggcagcttaggcagcgtgtggcgggttaacatcaccccaaccacgtgctctacccctgggacctctacctcggccaaggattttaaggggaatctgagctccctgactaccacttgatccaaccaaaattccctagctcctggtgttttgcctggcatccatactaatttgaacagcctgcgtaaccaagagatagtctgttcagattgtggtcaaagaaaacttactaatgccacttatttggaaattaaaaatatgcacctattctactattaggctactatcatacttcctaatagacttttcttaaatcataccatcaaaataaactacaaagcaataaaagcttactgaactgtggaacgagctgactactgatgataatgtacatgtcgtgacgatcttcggaa

SEQ ID NO: 339256 - DNA, 586 bp, Cannabis indica
agggatattttgaatatgagaatcgagttcaaggtaacatcataaatataaaaaaattcctagctaatatgcatgttatatatcatttaattttcagtttaagaaaatcaaaaatataaattttatacaaatggataacttctttgtttatttatgacgagctcatttgtttttttcattcttagtgtgatagaaactatcaggttttatttttgtttcaatatgtcaaaataaactaataagtttatttggcatatattattagaatattttctatttaaggcaataaataaataattgattttgtgataaatgaatatttatattcattgaacctggacaaaattaattacataatgttatactcaaaattcggatggaggacacgtgtcaagataaagagaatgtgaatctgtgtcgtatctttttatggaaaaactcattaattgagtaagtactagagtatatttgcaacctgtaacgtccccgcttcaagcctccattgggtccttacacccacggaatgaatggctcttatacacgagtacgccactctggctgcttcctggattgatgactgacccta

SEQ ID NO: 339257 - DNA, 594 bp, Cannabis indica
attaatcactttatattaaaaaacttttaattaaacaaaaaaattaaattaaattatatataaatatttattgtatcgttaaaaaattaaattatataacacctaaaataaaacaaaatatatgtgctttgcaacccaccaaaagctcataacttgcacgaataaaactaataatgcgtggcttggtaccaaatatctttatttttcttatctaattatcaacaatttaggtttaattttcttttttattttatactttatacacatttaagttgtgttttcgttagtatttaagcaataatttttagtttatttttaaattatcttaagaacatattacagttaaattatcaagttttattaaatactaatatattggattaagtatttacttttaatcgtcaaaattataaattacactatttagatatacataataataatctcacctaataactaataatattttttctttctttttttttttttttgtaaaataagcgtgaatgtaccattaataattagatttagacctcgcggtcattacatagaaggttctccggaaccgaagaaaccggaataatcccatacaac

SEQ ID NO: 339258 - DNA, 965 bp, Cannabis indica
ttcaataaaagaagaaaagagttgatttacttgcttaataatcagcatatagccactaaaaatcagatttaaacataatattaaatccccactaaaagacaaaattcaaaaggtaaaaagaccataatgcccttgcccatactaaagagtcacacaaatcacctagggtattttgggaaaactctgaattcccgactaatctcggcattcccaatgtctaactaaaccgtcccactatgctaaaataccaagatgtgattctactgggccatacaccgcgttctaatgttaccggacactgagcatgcaaaaatatgaaattctatatatgacatattaaatgcattctgaattcaaataaatcatcataaataattattttaatatcaataaataatttccatagttaaaccctaattatatgccaatttttaaatttaaattaagcggtctttacaaatcctatgactatcttgtggtggtcgaccgaacctatgggtcccatggtcgacacgtgaaggtagaaggagaggatcgaaaggtccaggagctcccactccaatttgacatttaggcgggtcaaatggacccaatttccactactggcccttggcgttgatctccatgggcctggtggtcttcgaggtgttggtcgtgttggtcgacttccctctgccactgcctccacttggctggccccacccctatcaccaccatacacggccatccatgcctgactccaactatgtatatgcatgtatatacgctaaatatatgtatatatatatatatcttttacaatttattttattattaaataatttgattattattatttgtagaaataaaaaaaattgagatattttgatacctcaacatttgaaatgtgtattatcttttattttaataaattaaataatttttttaaaaataaattattatttttggtatatatattatatttt

SEQ ID NO: 339259 - DNA, 506 bp, Cannabis indica
aactacttattagtagatgggttaaagagagctctttccattacatatggaagaggtagccttttatctggagaagatacaagatcaatatcgtacgaaataaatcaaaggagaaggtcatagaaatgaaaaaaaaaattctcatgttaggactttaagaacaaagtttactcaaagacaaaaatatttgaccagatgccactgggaacagtttaaatggtacagagaccaatacatgttcttaagtgagtaaaagtttgagtatctaaagctttagtgaataaatctactagttgaatagttgtggacacattagatattgacaacatatttgaatcaactagatcacgaatgaaataatacctgatgtcgatgtgcttagttcgagagtgatgatctggattttaagagatatttatggcacttgtatagtcacgaaaaatggtcagagtttgttgtgggtatccataataagtaagcattttgttcagccaaattaattgagt

SEQ ID NO: 339260 - DNA, 1025 bp, Cannabis indica
acaaaatgtcgagtggacaaaagagtgcgaaggggcctttcagaacataaaaaggcatctagcaacgcctccggtttttgcaaaaccaataacgggagagacgctatttctctatttatccgtgtcggaggatgcaatagttcggttatagttcgagaagagggcaagcaccaacaacctatttactatgtaagtaaaaggttactaagggtagaatcccgatattcccctctagaaaaactcacgttatgcctagtccatgcgtcttgcaaactacagctatacttccaggctcaccccgtaaaagtgttaaccgatcagcccttgcgacaagttttatcaaaaccagatgcttctgaaagatttataaaatggtcgattgaactggggcagttcgacataacataccatccttgaatatccatcaagggccaaaacttggctgacttcttgatagaaggtataactctagaagaaattcctcctaatcagcgagacgcagaaaccgggaacttatatgtggatggcgcatccaacgaacagggttaaggttcaggggtaatattaatatctccagaaggctttaagtttaactatgctctaagattccaattcgacgcatccaataacaaggctgaatatgaagccttgattgctgacttaaagatagcagaggcattgaaagtcaaaaatctcatttgccatagtgattcacaactgatcgtgaaccaagtccttggggaataccaagccaaaggcttaaaaattgcgaagtatttagagaaagttcgaaagaacttggaaagattcatttactttaaaatcgaacgaattccaagagaacaaaactcaaatgtcgatgccctagcaaatctggcctcgcagaatgacctggacgaattaaatctggttctggtagagatgctaaacgagacaagtatatgtgaaattgaagatgtcgagatgatagatagctctccaacatgcatgacacctattattaattatttactcgatggacaact

SEQ ID NO: 339261 - DNA, 493 bp, Cannabis indica
tttttttttactaactaattaatccaataatctcaatttaggctgaaaaactactaagtggccagctgtcaacaccaagactagccatctaaataaacaaataaaattcccaaaatgcctttctttcttccaacttaagtaattataagcttcggagtaaaatggtccaaaactataatcccgcttaaacccaacattctaaatgtctcaaatgtttgttccgctaagaaatatgttctaaacttacccatggactctaacgaccatttatcatattttccatcgtcaccgagcaaaaaaaatcgtaaaaattgcataattcatatttagcataaataatacccttagagtttaataaaatttttgaaattgagaaattataactctaatgcctatttctaaaactagagcctacagcaaatattaaatcttatataattataaaatgtccataattaatgctagttgcctttactaatccataatctaacat

SEQ ID NO: 339262 - DNA, 530 bp, Cannabis indica
tcactaaaagtagtagttttttgtagtaataacttgtatttgaattcaatgttttagtcacaagtaactttttattgcgactaaaagtcacatttagtcaaaaatttatgttgactaaaatattatcactaaatataatatttttttagtaataaatatatgtaatatgatttgaacattgtctcaaggcatcatttaattatttctatattagtatttacactggcaaaagttagatttttgttaacacttttcattttgcattggtaaaagtttcaacgccaacacggattaatttgccaaccgcttttactagcgcaaaaatgtcctgccgctggcaaaaataaatattgttttaccaaatacgctgacaaaaatcttatttcttgtagtgcatactgataccactgatcatttgagcatcactagatcccagtggctctagtctcttgatcatgcattaaaaaagaaaactttagtgtaattttttaatcacaatataaattttttataactaaatgtgactttta

SEQ ID NO: 339263 - DNA, 636 bp, Cannabis indica
aaagacataaccaaaaattcataatgcctatacctcgtgtagaaagtcgtctttggaatgtcctcctctcggattctcaattgatgatagcccgatcggagatcaatctttgagaaaactgtcttcccctgatgttgatcgaaaagatcatcgatcataggtaaagaatacttattcttaattgttagtttattcaattctcggtagtcaatggacatacgcaaggatccatctttcttcttgataaaagtacaggagctccccagggtgacacactaggccgtgaaaaccctaggtcaagcaacctctgaagttgaattttcagttctttaagagccattctgtaaggggccttagaaaccggttctgctccaggtgccagatcaattataaattaatctccctttgcagtggtaaacccagaagttcatcaggaaaaacatctaagaattcctaaaccaccttgatgtcctctggccgaattgattcaggccaagtggtatctaataccacggccagaaaccctagacacccgtctcgtaacaattccctggctattagtactgaaattactgggaaccgagatccgtgaactgatccaacaaaaacaaatggttcctcaccctctggttggaa

SEQ ID NO: 339264 - DNA, 426 bp, Cannabis indica
tgagtaatcataaactatgttcatattattttctttgattcactctttaaagtttctcagagaagataattcttaaagcttaaaccctaataaggacataaaggaccaaacccaaccagaatagcatcatcaaagtctagaatttagtttcaccattgttgagctaagtttgagctttaaaactcaaacctagctcaaactcaactaaagccataacaagcaaccactaacaactcaaacaactcaaaaaatactaaagataacaatccccaaacaacctaaactcgaacaagaacaaaacatataaaatgcatagtcaaacctaacttttcctttaaaaaactatgaagaaagaatgctagggcttaccttgatcttcctttcactaaccacttgaatctatgttgtaactgttggaaattattt

SEQ ID NO: 339265 - DNA, 1540 bp, Cannabis indica
aaaacccccgtggacacggtagaggccgcggtcgtgctacgagaggtggccaagagtatccacctcaggctccggctgattgggagcaaaggtttgctgagatgcaagccagaattgtgcaataagaagatgagattcggagactcatgcaacgagacgctcctgttgagcttcccctgcaaccgcctgttgcggttcctgcgatgccagcagagcaataagttgctggtaatcgtatggagcctttctatgagagattcaggaagcaagcgcctccagtatttctgggaggccctgatgtacttaaggctgaacagtggctaactattatcgaaagaatattgaatttcatgggagtggtcagaaatgacagggtggcatgtgccacgtttcaatttcaggaggatgccttggtgtggtgtgagatggtatccctcacgaaggatgtgccagaatgacctaggaggaattccgggatttgtttaatgctaaatactacaatgaggcggtccgcagtgcaaagcagaaagaatttgttgagttggtacaaagtgagggtatgtctgactgaatacagaacaaagcttgatcgcttggctaagttagccattgggatcgtaccaacggatttcagtaaaaaggagaagtacttggcgggattgaatgccaagattaagcacaatctggttatcacaacaaatgatactacaacctatgttgaaatggttgacaaggctcttcgagctgaaggagctagcagttaagttcttgcaagaaactcaggatactcctggtgctggtgggaccactactctccctatttctagccctggaaaagagagtggtgattccacttttgagcaaaagaagagaactttcccatctttggggagttcagggcaaagtaaaaggtttcgaggaaatcagggtaaagggggcgtcagacttactcctatcctgagtgcccgcgctgcaagaaacatcatcctgggacttgtaaccggagggcttgtttccaatgttgatcggtggggcacctcaggaaagattattcccaattgaagaaagaggaacctaagcctgaagttaagcctgcaccagcacgtgtatttgctatcactcaggcagatgctgccgccagcccttcagtagttacaggtcagcttcttatcaatgaccttgcttttactattttattttgattcaggtgctacacgatcatatgtagcattgagagttcttaataagctgggtagacctagtgatgtttttaaaatgggatttggaaccctattgcctaatggggaattgattatttcaagaaagtgggttagatcagtgttaattagagttgaagagagagaattgagtgctgatcttgtggagttaccattggccgagtttgatattatacttggaatggactttttgtccaagtactctgctagtattgattgtaaacggaaaatggtaacattccaactgaagaatgagtaaccatttgtttttgttggttcagttcaaggttctcgtgtcccaa

SEQ ID NO: 339266 - DNA, 552 bp, Cannabis indica
atcctcaattctgatcgcatagacctaataaaccttttcgagatgactaattctccgccaggcagtagggttccaaaccctgtatcatatctatcatgcggtctacccgatttcctaaagattttggctgcaacataagaatgagtggccccagagtcaaataacacagagaagtaagagttgttgatcaagagctgacctgttacaattgaggggctagcttctgcattagcctgagttaacgtgaatacccttgatggagcgaatttcgctgcgatcttctgttattccttcttgagttagggacaatccatcttatagtgtcctggcataccacactggaagcaccctttccctctacactctcccaaatgatgccttttacaactggcgcattctgggtaagtgtatcgggttttgaagctaccctgacgattacctcgaccctggttccctcggaacctcttgttctgacctgagccaccagatgcagtaggtgcctttcttttttggtcagtggttgagccattacctcccctaataaagcctgat

SEQ ID NO: 339267 - DNA, 639 bp, Cannabis indica
aagacatggactgtggtgaaactccctcctaatagaagagtgattggctgccgttgggtatacaagatcaagttcaatagtgatggatccgttgaacgatgcaaagcaagattagttgctcaaggttacagtcaacaggaaggactggacttcttcgatactttttctcctgtagcaaagatggtaaccttcaaattactactggccatttcctccatcaagcaatggcccactttgcaaattgacatcaacaacgcttttctcaatggagatctccaagaagaagtttacatggcattgccccctggattttctcctcctaccacagaggacagccccaaccttgtttgcaaacttcataaatccatatatggtctcaaacaatcttcaagacaatggtataagaagctctccgatgctcttctaacagcaggtttttctcaatcaatagccgactacactctattcacacgaggttctaatgacacattcatcgcactactcgtttatgtcgatgatattatcaacactggcccgaacattcatcttctacaacaagtgcaagaccccctcaatgcacaatttcaactaaaagccttgggtccactcaaatattttctgggctttgaaattgctaga

SEQ ID NO: 339268 - DNA, 528 bp, Cannabis indica
attttgatataatcctgggaatgaattttctatctaagtatggggcaacgatcgactgtaaactgaagatggtggtgtttgaggccgatagtgctaacccaacaatatttgtgggtaaaattcaggggacacgcataccaagaataacacttttgtaagctaaggaccagatgagcagaggttgtctgggattcatagtcactgcagtggataccagtcaacctatgacatctggacctaaaaatataagattggtgtgcgagttccttgacatctttccagaagatttgtcgagattgccacctacccgggagattgaatttgtaattgagttggttttgggagtggaacaagtatcaaaggcaccgtatcgaatggctctaactaaattgaaagaattaaagatacaactgcaagagttaccgaatttggaattcattagatcgagctactcaccttggggtgatccggtattgttgtgaagaagaaagatgggtctctgcgaatatgtattgattaccgagagtt

SEQ ID NO: 339269 - DNA, 1016 bp, Cannabis indica
tttctttaccatctaactccatcaacacttaggaggaattggccttaaaatttctctctaagttctttcctcctgctaaggtttccaaattgagatctgagatcaataactttatccaacaagataatgagtctctttatgaagcctgagaaagattcaaagacatgatcagaaagtgtcctcattacaggatagaaaagtggatacaaattcacaacttttataatgggttgactagtaccaaccctacactcattgatgctgcttttggtggagcctttatgaagaaaagtgctaatgaggcttatgagctattagtgagatggtcatgaataactaacagtggccaagtgagagaagtcaatcaaagaaacaagttggttttgcatgaaaatgatgttattactgttggaatatattttaccaagacctagatttactaacaagtatgtttttaacatcctaaatatgaatctctaaaacgatgaaatttaaacacatataaagtatgagataccttatattggttgcagcgaaattaaatgactcattccgctcagatctctaacccttgttcctttctgtcgcagagtatactgagtctgacactccttcaattgtttggattcttcatcgtcttacacactatgattgaggactaacttgctatgggtgggcatgcactcaatcactaaagactcgaaattgttttgtgaagaacactctaaggattcgaaaataggaagaagaagaagaagaagaagaagaagtctcaaactctctaattgtctgacaagatgtaaactaggtttagagtcattagttggattatgagactattcttttcttttaatactaattcacttagggttatgattgaattatatggaataaataatgataaaataatagcaaaaatagggtatagtggctggccatgatgtgggcccaacactaagtaacatttttgctatttttcttatccatttatcaattatctcacaaatgtcatattt

SEQ ID NO: 339270 - DNA, 794 bp, Cannabis indica
tttttatgttgtattattattattttattgttaactttttattatttgtatattattttttatgttgatttgttgttattttgatatttttgtgttaccttcgtgtgttttacttattttttttttgtagaataccataaaaatatatatgtaaaaatataaaaattttacaaaaaattaatattttatataattatcccatatattttcctttcattattttcttttttattattatacatataatattgtaatgtttttctttaataaaaaaaaggtaagccttattttggtgtcctaatggcactacaaaaaacaattagttttagtgttaactttttagtcacaacataatttttttttttttgtgactaaatgtctacataattttttttgtgactaaatgtgacattcagtcacaacaaaatgttacttgtgactaaaacataacatttatttacaggttgacactaatttagttttagttacaacaagtattgtgactaaaaacacatttagtcacaataaattgtaatttttgtgactaatacattgagccacggaccttttagtcacaacataagaataatgttttataattagtcacaattgtttgacttttaatcaaaaatattgttgtgactaaaagtaagattttttgtagtgacattgattatatgttactgacgttgttgatataaattagggttccttgaaaatcaacgttaataactaaggtgacgtttggcaatatttttttaatcaattttctgtttttaaaattagaaagtgaa

SEQ ID NO: 339271 - DNA, 556 bp, Cannabis indica
cagatcataatctgactgaaccactataattctctgtattactgttattttccagtttttgttgattattttccaattccaagtcgagtactcaccattctaggttgaatactcgcacttgtcattacccataaaattctctttgatatcaataaaataatataatttggtgttgcgaaattcactcgacaacagtttccgaaaacctcggtcaacattttagtgctttcattgagagctaaaggaagcgtctgcaagtaggcagtattattacaaaacaataatggtggagactcgcaacacacgttaaccccgtcctccttaagacgctcaagacccagacaatgaggatgtggcctcaagagtgaacgtgggctctgaggaaggagaaggaacccacgacgatgaatacgaaggaaacttcgatgagtacgacgcctacgacgaaggcagctatacagggctagtactcttcagataagaagttgctgatcacgaagttgaaatcacagcccaaaaagaacaaaacaaaagatgcaagaggtgatgctggcca

SEQ ID NO: 339272 - DNA, 1247 bp, Cannabis indica
ccgagacccgtgacagtgatccaaatcttgactcgggattcggggccgcgaacagaccagtagtcagtgtctagatctaggactcagtctaggaccagaaccaagacgaagaaccaaacccgaaccaagacctagacctgtgaccaaaaattagaacctaaacaagagtcgccgaactaggaccctagaacaagactaggaccgtgatcaggacccaaaccctgacctagaacccgaccccaaacccaaaccatttcctaggacccagaccattacttgggacccaaagttgaactagactgggacacaagaccgtgatccagatctggacctggggcttggacctgacccgtaaacagtgtttggatttgggacccatacccggactcaaacccagacctagacttggacccagacctggactcagacccagaccctgaccaagacctagacccgtactctagacctgggttcgagtctgagtctaagtttgagtccctgaactagaatctgactaggacccaaacctagatctaaatcaaaactcaaatcaggatgcaagacacaaactggaacccagacacagacttagaccaagacccaaacacaggacccagactgagattggagactcagaccttgacccaggacctagaactagattagggacccaaactcaaaattagaaccagaattgggacctaggattgggactgggacccaagacctgaccccagtctcggtcccagacccagacccagacacaaacacgaaccaggacccaacatccgaatgcaaacgagactctgacccaagattgggatctagatcttgacccacgacccgaggcttgtgttggaattattttaccaggatatagatttactaacaagtatattagtaacatcctaaatatgaatttctaaaatgatatgaaataaacacatataaagtatcaagaactttacagtggttgcagcagaatataatgtctccttccactcaggtcactaacccttgtatcctttctgtagcagagtatcaccaagatctgagtccgaatctccttctcttgaaactggattcttcacatccttacacactatgattgagtaccacttgaattgtgtgggccctcactctttcactataggctacggtttataagagaggaagagagagagaggagttttggttagggtataggagaagaggctaaattttttttgaaggaatgagatgcatca

SEQ ID NO: 339273 - DNA, 500 bp, Cannabis indica
cccttaaagagcattctgagcttttagccttctaccaggaacatacatgatttttgctctgtaaacatatggccgaaacatataccaaatcacatagttttgccaaaccgattgcaccgttgtctttgttggcccaaataaatggcgaataccaagtgccgtcccgttctggacagtattgaagatgtttacgaaaataccactgccatacaaactaagaatcagcattccaccagcatgcacctcaacatgcgccaccacttgaccaccacttggacaacttgtgggcatcacttagcttgtaacgtgccatattagcacgcacgttacattctcccccacttcaacatgtcggtgccctcatcgatggaccgcaggcaaatcttcttgatctccactcctaagcttactccaagcttcatctgaatcctaagtctgaacttgtccctctacctccgtagaacccaccctcttggtgacgatctccctcacccactctt

SEQ ID NO: 339274 - DNA, 1276 bp, Cannabis indica
atcaagtgggggaattagggaaattatctgcatacgactctaacgaggagcttgtgctgtatctcctagatattatgaatactcctttcccttcgagattcaaaaacccacgtgtttcgtcttatgacagaaccacagatctggtgtcgcatttgaataactttaacaccttaatgcgagcgagtaatctaacaaacaatttacgttgtagtttgttccccacctcgcttgttggagcagcaagtagctggtttaacaagtttacccgtcattcaattacttcctgggagcagctatccagagacttcaagaagcaatttcaggccgctagggataggcgacccgaagcggcctcgctagccaatataaagcaacagtctggcaaaacacttaaggcgtacttaagttattttagcacggctgccgctagggttagaaattttgatgacaacacgcaacttatagcccttcaagaggggatctctactgatccattaaccgcagggggcgagttgtgggatgacttacaaggacgttcggtaagaagcatcactgagttcaacaaaatggctcaagtttttttctggaaggaagaagctcgaaaggaaatgaacttgttgaaagcaagcttggaaggtaaacccagcaatgtttcaataggtactgcttccacgagaattgatgactcgggggattctagtctgaagagaaaggacggaattaaggaactgtcaaaggatacaaagaaacaaaagaagcatgacaaatacgtgccagtgtatactatttatactgagcttaatgaaactcgggagaatatttacctcgcacatgagcataaagtagcctttggcaaacccgaacctatgaggaattcgaggagcaaaagagatcctaacaaatagtgtaaattccataaggatattacacatacgaccgaaaaattttgtcaattgaaagatgagatagaaagtctcatcgctcgaggccattttaagcattacatgaaaagacaggccaagggatacaaccagcccagtctgcccaataacccaaataaccaggggttacaacctattcctgtggagggagaggacatcctggttattttgggagggccacatatcacaggggaaagaaataatgcccagaaaagatatgtgaaagaaatgaagagtctttgcccccaaactttccaagaaggtgaaaatcaaggaacctcccattacattcacggaggaagatgagaaaaatgtgagatatcctcacgtcgatc

SEQ ID NO: 339275 - DNA, 611 bp, Cannabis indica
cactgttgtgattcgccggatcaaccacgcctttgcgagtctgtaccaccattgtatttacgattagatttgagataaagagcgatccttgagttcaactctcaatgaaatcaccaaaatattgacctcgcttttagccaacgacaatgagtctaatttgtaagcgacaagtagtttaatatgagtgtaatataatagagcgaataaggacacagaatacactaatcaaggaattcagacagcttgccatatctctgtgatctgatcccaaagttatagggatttcttcggtgactcacgatgcaaaagctgaatttgtaaagtgttggcgtgctgcgcggattgctcactgcccgcctaagaggacttcatccgagcgaatgtatgtggtgccctgttcggtatatttcttgagagcagatacatagagttgattccacgtgtcaccatcgtgtgatgccacgtcatcagagtgcaaaaattgggataacaacaacaataaccttgtatcaactcttactttgatatggtattggataaatccactttagagatctatgggtgtaaagaccacttagtttaatttggaaaattagcagttaattatgatt

SEQ ID NO: 339276 - DNA, 975 bp, Cannabis indica
tttctattaaaaaataacagtttttttattaagatattttaatattaatttttaaataaattaatattacttttaaagtctaagtcaccgatatttttagtttagcatttgtgcttttagcggtgtcttttagaacgcaagctggaggctgctgctaccatcattcaagccctaaaccaggtgaggtgttcactattgagaaggtgacaatgaagctaacctttttgcttaaatgaagcaagcttcctctactttctttaagaaaacataacattataaatatgcgtatacttgacagttgtcgactaatatcatcattcgtaagagattgtacaattactaattgttgacaccgatttatgcaatccaggatctaccagaggtaaaaaagtcaagtgagtctctaaaaccaaaaattttaaatgttttgcagatgatctttttgttttatggcaattttgatgatgaccaactgattttttatcatgctatcataccactttgtgcatgttttttctttttcatttttcacttacagtaatgaataccattagtttcttaatcaagtcttgtaaagtgacattttcttatgattatatttgtagtctgtatttgttcaaaaaaaaatgatgatgaaaaccatcagtttcttaatcaatctatgaaatgatattttcttaaatcaattggtatattctaaaggaaatttcattaattgaccctaataatacaacttatatcaaaaattggacccttttattttttgtacaaattgataccactaattcaaaaagattcctaaaatacccctaaaataaaatttcactcattctctcagactttccctctctctctctcactttccctctctcgctctctctctctgactttccctcttcacgaaccagaaaccaccgtcgacctcaacccatctccaccacgaaccaggaacccgtaaaccccaaacccccaaac

SEQ ID NO: 339277 - DNA, 666 bp, Cannabis indica
tggagctaatctcttcttccataaagttaacaagccaagccatcaccatagaattttcagcatcccaagtttcataggttgaatcagtttctgctggagccttcttttcaccagtcaaatatcccatttttcctcgacctttcatatacatcttcaccgattgataccatctcagaaagttttctccattcaagcgaatagtagtgatctggacagagtgagactcagtagatttggtagaaagaacagtggaattggttgggatggggttgtttttggttatacccgactcaaaatctaacatggtgcaaataggacagaggtgattagggttagggtgcgattagggtagagtacgatttttttttctttttttggctctgatactagggttgttcatcaaaccgctcaaaccgcccgcgtcgcaccgcaaaaaaaaaatgcagtttgaaattctttataatgtggtcgcggtttgaatttttcctaaacagcgcagtgcgatgcgatttgcagttttgaattattaatatgcagttcaaaccgcacagcactgcgtaataaaaaataaaaatactaatttttatatttatattaggtctaatatgtgaagacccaacccaaagcccactaattattatattgttgaaacttgaaacctttttt

SEQ ID NO: 339278 - DNA, 698 bp, Cannabis indica
aagatctggctctacattagcctaaatatcgcctttttacatcttgaacactcaggataaggtcactatttcttatactcactttgaccgctatcctggtcaccctagaacctttcattctattccacaattggtggttcatttagtttctacctactgatctgctcgtaagttgggttcatatatttcaccatatctagatgtacaaccaaaagtgtcggtagtacaagaatagcacaagatgagcctgttgttctcttagatctcggatctgcttcccctattttctaatcatattatgcatagcaaaatttatatttttcaagtattacgccaataaaggattctttttgtaataccctggaattaaaaaatggattagcaaaactctaattacataattatgaataattgaagaattatattattatatagttcactatatgtgaattgatatgaattttaatatgttaagactccgtttgtgagccaagggcattttagtaattgtgacccaagaagggtaaaatgatgaaattaatttaattatgtgcttaatagaacaatattactgttgggttttgtgccctaaataaaacccattacaatctgattagttatcaatttagaattttgaagtgaattatgattacatgtatgttacatgtttatggtttaatatatacttgatatatgca

SEQ ID NO: 339279 - DNA, 662 bp, Cannabis indica
aacaattattagtaaaaaaaaattagaacaactacgaaatacaaaccatggttcgaaccaaatcaatctatttttgagtggtttagtttggtttggtttggtttgatcatttcattagtttggtttggtttggttttgaatttttaaaaatcataatagtggtatgatttgaaaaaattaaaaattcggactaaacaaatccgtaaacactcctatatagaagtactaggcacactttagtggcccacaacaatgctctttaattaattaggattattaaaaattaaaaaaaaataaataattagtggtcatagtcatagtctagtggtttcacactctttcaagttaatctcccctctccataattaaaaaaaataataataaagctaatttggatttttgtccctgaactttggtatgttcaaatcatgccccctgaactttttttctcgttaaaaattctccctaaactattgaaattattagatttaagaacatatgtctaattttattcaattttactaattttttctttaattgtcattgtactaaatcatgctctttagactttaatatttatcaaatcatgctctttgaactttgaccagggccagccctgaaacaaagtgggccacagggaaaaaaaaaaaacttgggccctt

SEQ ID NO: 339280 - DNA, 643 bp, Cannabis indica
tattagtctccgccatcatcgacgtaccatccgccgatgaacctttttggctcttccctttccttcccccgtctctattacggcaacaatttacaaaaaccaaacccatattaaagttttgctagggaaaacaactttaaataagcaaaagcttaaaaaaaaattatttcagttttttaaaaggaaaagagtagctaacctttaagttctaaaagatataggttcgtttggtacgaggtattacaccttattgtattgtatagtattatattgaattgtatttcatggaatatttttatgtaaaactatataggtgttgacttttatggaaacctaaatatataatattttagtataaattaaagtttaatataatattatataaaagggtaaattgtggcataaatgcctaatattttaaattttatacacttaaatactttatttttatttttagagacaaaaatacccaatatctttaactattactttcgttaactcataaatatgaacatgtggaaggcccagatgcattatatttatttatattattttaaaatttaatattcttaatataaaaaaaaattaaatgctacttgtttcaaaaaaaaaaaaataagagagatgcaataccatagctgag

SEQ ID NO: 339281 - DNA, 612 bp, Cannabis indica
ttttttaatataatcaaacttgaaaacaattcctaatacgaacagatacataaaatataaataattttgtcataacacatttagatcggattataattaaattttattttgacaaaaaattaattcagggtcctatttgtaccattttagaaaatacagggtctattttgtcatttaacaaaatagatggtccaattaatattttttgcaaaacacaaggtctaaaatggtatttacccgtaaaaaaatgactatcaatgaacctgaaaatattttattattatattttataattttttttctacatatgttatttatactatagcatttcatttgaataaaatatattcaaataataattaaataatattgaaaaattaaaatttaagtatgatataatataaaagtttaagataaaatataaaaagaattattacataaaaaatataaagtgacacattatgtataaaaatacctctataaggtgtggacaacatttataccttttatgtgattttaattaccaaaatacatttttgttgtgataaatccaacacgcaagtatacgtatcgttttaacaagtaatactcaggtaagtgagatcgttccca

SEQ ID NO: 339282 - DNA, 1241 bp, Cannabis indica
ggaattttttgaaaaaaaaatggctgcacttgttatcgattgattagcttgaggcctcatacttagttcatataattgtaacaaaataattaaatatacattttaaaaaataattaattatttgaaaatttattataagaagagaattttaatttgtgtcaaaagaagtttaatttttgtaaaaaaaaataaattttattgtaaatattataattaaatggcttaattattaaaataattcaagtaaggatttaaatataaatattaattgctaaaagaggtcttgttaaatatttaattaattattttaagaaaatagttaattataattaattaattctaaaaaaggaatgtctactatttaattaattattttaagaaaatagttaattataattaattaattctaaaaaaggaaagtctacctattagtaacctgctattacaggtcaaagaaaaatgtaaccatatggttacaataaaaatgtaaccattgaatagtcacccatattatttatatatggttagtgttaaactattgtgtgtactttttatcttattttctctttctttgtatcctttttgttctttaaatttacaatcaatatggataaaaaaattgatcaactggtttatgttaagaaaaggaagagaggtgctgaaaaagttgagccttttaagaagaaattgttctatcctgagaacatgtttttatttattttttgttgttagttatgttttatttttttatatgttgttgttgttgttttgtgtttttttttttttgatataagtatcgttaagtataatctgatacattgttattatttttttaggatctagatcttatagttgattctttttttaaccgaaattggttcaacaaatcagcattgaaactgataatataaatagtaagttaaataattcgtttcatgtttatttttagttaataatttattttattcttcctcttggttttgaaatatttatgttttaaattttatttttttatagggatatttgcggctaaacaacttgaactttacgttttgtaataattgaccacaaaaattgatttttgggggcaaaactacataaacctccattctgttttgctctgtacccctccgtccaaaaatcatagttaagtgccacggtagactatccacgtgtacacacttgtacacgtggcaaatttttagtggtccacgtaatattaatttaaaaaataattataa

SEQ ID NO: 339283 - DNA, 1052 bp, Cannabis indica
ctattgggtcgttgggaccaaatggcatcatagagagttggtctctatgctttcgcggaaatatagaggggacactcgcacatgttctgacacacgcgagttggatctaccctgtataatgagaattacggttacgccgtgcgacttaggtcgcactcgcagtatctcgctggttttatcctgggcgaggtctaaaacttcgagaagtctctcatggacatttcagctttcatgggaaatctgaatacacgtgtcctttaaataagagtctggtctcgagtttctaggtgagagaaatctcactataacacgaatcgtggcagaaatgaataaaaaattagtacacttatcaccatccctaatccaagaaaccctggatctctgttgccagtaaatagctttccgccttaaagcctcattaagctctttcctcacctcaacctctgtagcccaatttctatcaccagcaggcaaactttggatagcttgtaattgaccctccaacttagagatgcaagagtccaacttgccaaattgcacccggttccagctactcagggtcaggcgggtcgcaccaactttcttaaagactctagcgggggcccaatcgtgggaaacagacccccacgcttgatccaccaccaaggaactacgagggtcccttgtccaccaagcttcaaagcggaaaggccttctggcgttagagaccgaagtgtcagtattaataaagaggggccgatggtctgaattacaggtggtgagagaccggacgaccatcttaggaaagatttgtagccaaccattatttacaagagctttgtccagggccgacttaatgtgattatcaccgtctctatgattgtcccaagtcatgttatcccctttaataggcaaatcaaccaaagcatgacggttaattaactccaaaatgaatgggataaattgatccctccccttagacccaacccgctccgagttgctcagaacaaaatttacatcgcctaagattaaccaagggccaccaaattttccaccattgatcatcaagctag

SEQ ID NO: 339284 - DNA, 1046 bp, Cannabis indica
ttgggattcatagttaatgcgaggggtattgaggaaaatcttgaaaaaatcaaggcattaatagacatgccatcaccgacaaagcctaaggaagtacaggccctgactggaagaatggcggcacttaacaggttcatttcgaaatcaactgataagtgcgtgtcattcttcaacatattgcaaggcaaaaaaaagttcgagtggacaaaagagtgcgaagagacctttcagaacataaaaaggcatctagcaacgcctccagttttggaaaaaacagtaatgggagagacgttatttctctatctagccatcttagaagatgtgattagtgcagctatagtgcgagacgagggcaagaaccatcaacttgtttactatgtaagtaaaaagttactaggggaagaatccagatatttccctctagaaaaactcacgttgtgcctagtccatgcgtctcgtaaactacggccatacttccaggctcaccccataaaaggattaaccgatcaaccattgagacaagttttatcaaaaccagatgcttctagaagattgataaaatggtcagttgaactggggtagttttacataacataccatcctcgcacgtccatcaagggccaagctctagctgacttcttgattgaaggtataactccagaagaaattcaacctgatcaccgagatgtggaaacctggaagttatatgtggatggcgcatccaacgaatagggtttgggtgcaggagcaatattaatatcactagaaggctttaggtttcactatgctctgagattcgaatttgatgcatctaataacaaggctgaatatgaagccttgatctccggcttaaagataacagaagcgctaaaagttaagaatctcatctgccatagtgattcgtagctgatcgtgaaccaggtcctcggtgaatactaggcctgttgacctcgcttttagccaacaacagtgagtctattttagtaatcgaaaagtagtttataacgattgaaatatagtagacaaatataaagacacaggaattt

SEQ ID NO: 339285 - DNA, 1367 bp, Cannabis indica
agggagcctatacttaaggcctaaggaaagtgattagtcttactctttcactttactctcagaaaccctaagttctgcaactttcacacctttctctctaaaatggagaatacaactcccattgcagtaccccctgtcgctatgtttgttctatcagtggcaactactgttgatcctacagtcgagactacacttgctaatccctgtcgtgacattatcctctaccagtcggaggttggtggttctgctcgccactcgaatcctgagtcgactctgtctccgccttcacctccagtcaatcagaaacctcgtacgtttcaaggtaaggctcctcccctgactaaaaaggttagtccttctctgtcgtcacccccttcgtctgtatcaaaacgagtcactcgttcatcgtcgagtctacaacctccatccaaacccgtaggacctcctcctcctccatctaaggtttctattccttcccaaaccagtgaaagagttcagttaaaacgaaagtcctcacgtgataccacgcatcaaccacctgaaaagaaatccaagaccaaacccattccagtcccatctacagactcatctcccaaacagtcgtccagaggctctaaaaaatccaaacttcccaaagcccctatatcaactgtcgacccagcctctgtacaatgctatgttgatgcctctaaagcctccgtttatcaaagatggtttggtagtcgtgagctttggttcgaacaagtggttatattagatgattttcctgaactgcatgagtttttaaaacttaggaaatgggtaaacacggtcactaacttgtctgctcctcatcccatcttagttcgagaattctatgccaacctagataggacagttattgctgagggtcatccagggtgtgtgagtgcatttgttaggggtcatagagttccatttggtccatccactattgcatgcttgttgaaagttgagtccatcaagaaaccaacatatgggaaacaattcaatccagatcaaactttgatgggtagagtgctaagtggaaaggatgactatatttgggacaaacaagaaatcttagtcacgcatctgactcccttctatagggttcttcatcgggtagctttgtacaattggctcccttattctcatttgtcatcagttacacttgagattggcaagtttctgtatgctgtaggaactcatgtatccattaatctgccatctctcatatttgaaaggatacttgaagcttcagaaactactggcactcgtaacaagctaccatttccaagccttgttcaacgagttcttatggctgctcacccgcctcttacaacgcatgactatcaagttcaaaatcc

SEQ ID NO: 339286 - DNA, 725 bp, Cannabis indica
tgttaaaacgatacgtatacttgcgtgttggatttatcacaacatcatggtacagaatactgaaagatattgggttggattcaagatattaaactctgaacttccatcctagagatcccactgggcacagggctagggtccccttccaggtcaactgctatgactcgagtctactcaactttgtgacgtcatccttcatgccatgtgtcaaacattgatgtccacgtaaccagggaaattttttgggttaacactcatcgtgaaagaactctacaattaagcgtgcttgacctaagataatttcaggatgggtgacctcttgggaagttttactaaaaagtgtgcgagtgaggacaaattactctggaaacacttgtgttggtctatagggccagtcgtctatccaagaagtagccaaagtgatgtactcgtatataagagtcataaatccgtgaagggaacccaatgaagacttaaaacgggaacgttacaaagtgcatcactgtctttagaaaatggcattgtaagattaaatttcacctgaaaagattcatgatgcaattgcaaattgatatacaaaaaataatacataattaataaattaatatatttgaaataaataataaaaataatattgtttactaaattttgtgcaatatttgtaggctaaaattagtctagtttcgggtcatgttttcggttagttttcactctttgtttctagt

SEQ ID NO: 339287 - DNA, 1122 bp, Cannabis indica
ccatggccttctgcaaactcaccaagaatttcgaggtaaatttagggtctctatctgagacaatagactttggtaccccatgaaggcgaacaatctctttcacatacaagtcagcatactgatctactgtatatgttacctttacaggcaagaaatgtgctgactttgtaaagcgatccactacaaccaaaactgagttgtacattcctgtgatcctgggcaaactaaccacaaaattcatcgcaatgtcctcccacttccattctggaagtgataatggctgaagtaatcctgttggtccctgatgttctgctttaatttgcttgcaggttaggcacttggtcacataatccactacatcccttttcatgtcgtaccacaagaaataaggctttagatcttgatacatcttggtggttcctggatgcagtgagtaaggggtagtgtgagcttcatccaaaatttctttcttaagctcaatgatactcggaacacacacatgagctttaaacaacaacatcccactgctagaaatcgaaaagtccttaacttttcctgctaagacatcttctcaagttttaagcacttcagggtcttctagttgtgcctttttaatcctttctaataagtctaattgaagtgtcagattatgcaatttctcgatcacaaactcaatatttgccatagacatatctaaggctagctgaggagaaatcattaccatgttgaaagtctgatcaggtccattccgactcaaggcatctgccacaacatttgccttttcagggtgatacatgatttcgcaatcatagtctttcactaactctaaccgccgcctttgtctcatgttcaaatctttttgagtgaaaaagtacttgagacttttgtagtcagtataaatctcacactgttcaccatacaagtagtgtcggcaaatctttagggcaaacaccactgctgcaagttccaggtcatgagttggatagcgctgctcataatctttcagttgtcgtgatgcataagctatgactttatccacttgcattagcacacaacccaaactctacctagatgcatcgcaataccccacaaatttctcttgatcagatggcaaggctaaaa

SEQ ID NO: 339288 - DNA, 611 bp, Cannabis indica
aggagtgaccgccattctaccatggcagaggtctccaaaactggagagcattgccattctctcatggcacaagtcacctaaggtgacttaggttggaaatgactttcctcacttgtaccatgctccttaatgtcgagggaacccgttcgaacacatttccttccatggtttctgaggagtgacttgtgccattttcctatggcacaagtctctaaaattggagagcactgccatttccttatggcaatggtcacttgttgctattttcttgtgattttagtgctattttgactttatacataaacacaagtcatgttcatgcctaaacaagtcaagtccttattggtctccttggcggattgaggtctcaagggtgaaacgctctcgcaggcccatgaatcctcgtttgggcacacttgggtgtgtgagtctcggcgccaaatggttggttgacattttcaagctctctagaagtgccttggggcccccaacaaggatgtcttgatttattttatatttatgagtcttggtcaaagtcacaaggttgactttttttttattttttgaaaatcgggtataacattttccccccaaaagtgtttgtcgagaac

SEQ ID NO: 339289 - DNA, 1108 bp, Cannabis indica
aaatcatattaattcacatatatggaactatataataatataattcctcaatttattcaaaattatctaattagggctttgcaaatccattcataattccagggtattacaatatggatcaatgtaatcactttatatggaataactcattaattacgtaagtatcaaagtatatttgtaacatgcagactgtaaggtcttaggcaaggaatcaatatacaaactggtacttagtatattagcgaaaaaccatatgttgctgaaggcgaatagcgaggcatcaaggagagtacacgtagggagacaaaagcgccatatatcaattacaaaagcccttagtgtacagtctatgtgttatagtcggatcgactcaagaccaagtaagcgaggtgtccgtctcgctatgggaagacttcctataacttcatcctgttagtgtcagcgaggcttacgaccctggcaagtcagaagctaacattcaaatgagcttcgaagaacccttcgtaaataagaactgcgatcgatacaagacatgcatcttcaacctcggaaggaaaaatggccccagcttgctattaagatcactggagccaagcttctgtcgagacaactctagatacgataatcaaagacgtgtttaattcacgatcattttaacccagtaaaagcgggaaaatcacagctatatgattttcaaatcatgatcgcgtttacattacgtgatatgtaatcaaatcccatgattttagggatgattgttgtaaatacattacagtcaactttgtaattaactgcccactatgtaattataaatagtggcaaataagatcaaaaaagggacgaaaaaacacatacaggagaggccttgaaaaataatcaaaaatctgaataagattgactcatggactattcagaattttaactacaaaaccacgtaaaaaaaccctgtattcatgcttttattttttacagcttttattttttctgtgtgaaatcaatacggtgaggcccaaatttggttaataaaaatatgtgttaacaataacgtatctatatcgttgtacatatagagcattctatataactgagagtgctattcaattctaaa

SEQ ID NO: 339290 - DNA, 616 bp, Cannabis indica
gtaatgggttttatttagggcacaaaacccaacaatgacatcatgaaggacctgctacatgagtttggggtctcgatgggatatcaaaaggcttggagaacaagagagaaggctctagaattgtcaagaggaaagccagaagactcataccaacaactcccaatgtaccttcatatgctaaaaaaaagcaaatccagacaccgtaaccgaattgataacagacaagaagaaccggttcaagtacatgttcctagcactgtcaaactcaattagaggatggattcattgcagaccgctgattgtggtagatggcacattcttgaaaacaacatacgaagggacgttgtttacagcatcaacaatggatgctaataaccacatattcatattggcattcggaataggagctcggagaatgattcatcatgggagtggttcttccacaagctaagagaaacattcagagaaagagaaggtaagaaactggttcaagcagaaatatacagcaaatacatcatctttattgtaatagttttcctattgtttgttagacttacttaacataaataaccggtttcaaaaaaaaagtaacaaaaaaaccgattaaaacagacat

SEQ ID NO: 339291 - DNA, 610 bp, Cannabis indica
aaaataaaaaaaaaattacacaaataccacttacacacaccttcaacccaggatccatgcctcctgggcaactatcgcgccaccattgcgcaactacgcagcaacccaatgcaaccgaaacgaaaattcaaccagaaagataaccaccattaattccggcaatttcacttgagaagacgaccataatcaatcaaaacatggactgtttcgaattcataaaaaaagtgtagaaaaactactacgaaactaaaattcagccggaaatcctgtttaatttgcataaaactaatgtcctgacttcaaattttagattcatgaaaagcagatctcaaaaagttgaactggagttcccaaacaatccaacccaagtataatccaaaaaaatacatcgatactataacaaaatatttatcctggtgtatttttgttattttccaaatttataatggtgaatttgttcatattaaatcataaagagacatgtggataaagttacgtacgtggaaacactgttctgatttttaatgtttcacaacagttgcattacagttgcataaacattttgctaacagttatttcatctgattgaaacctttgtctgatgtaacct

SEQ ID NO: 339292 - DNA, 523 bp, Cannabis indica
catcttagtattttttagtataggcggggcgatatagttagacattgggaatgtcgaaaatagtcaggattttagaatttccgaaaatacccctaagtgactttagttagtttgtatgggcaaggatatttggtcttttgcccaatttgtatttgtcttatgtgaattaagtaagtagatacattcagatttttagttgtatttggctgaaattgatttaataaaagctaaaccatttctttattttacaaaaaagaaagttagaaaatcacatttattctctttctctattttctctctcgtgagccctagaaaccagcaagacccttgggttttcttaagcaattttgggttaagatagcatctttgttgaggtttcaagctttggtaagttttctagttcctcttttgttgtttcttaagtttaaagttaagaattttgcatgaaatgagggttattgttgctgttcttgctttgattgcttgttgtgttttatgaagtaaaatttgttggaaattattt

SEQ ID NO: 339293 - DNA, 1337 bp, Cannabis indica
cttatggattcgcaggctaagtcctataaaatggacgccccgtgaaatacaagaagtcagggtgacatggttgagaccgaaggcggtcagagaaatcgccaaaatcctcgcggtcgcggtcgtggccgtggcagagctcagggtggtcgccctgtaaatccatcacaagctcctctggactgggagcaaagatttgcaaaaatgcaagattggatccgccaacaggatgaagtgattcagagattgaggcagcagggtcctcctgccgtgcctcctcaagttgctcaggccgttgcagttccagcggtgccagcagaacaaccagttgtgtgcaaccgtatggagccgttgtatgaaagattctggaagcaggcacctccagtgttttctgggaggtcctgatgtaatgaaggctgagcagtggctcacgatgatcgagcgtatccttaactttatgggagtggttggtaatgatcgggtgacatgcgccactttcctgtttgaagaggacgctctcgtgtggtgggagttgataaccctcaatcgggacgtcacagtgatgacctaagaagaattcaaggagttgtttaactccaaatattacaatgaagctgtccacagtgcaaagcggaaagaattcactgaactggttcaaactgacgggaacatgtgggatactgagtatatgacaaagtttgaccgtctggccaagctcgcagcgggaatcgtgccaactgattttagtaagaaagagaaatatttggctagtttgagtgcgaagattaggcacgatttggtgattactaccactgaagcaacttcaaatgctgaaatggccgaaaaggcttttagagccgaaggtgcggtgaaattccttcaggagccccgagtgactccaagtgttggtggaacccccacttttcctactcctatttatggtagggatggtggtgacaccaccactgatcagaaaaggaaagttattccagcttctggtggctcagggcaaagtaagcggttctgtgggaaccaaggtagaggtggacgccagggttactcttaccctgagtgtccacggtgcaagaaacatcatccgggagagtgtaaccggaagacatgctttttgtgtggcatggtggggcatttcaagaaagattgccctcaggcaaagaaagaggagccgaaagctgaggtgaaaccggttcctgctcgagtgttcgctatcacccaagccgatgctgcagccagtccttctgttgtgacaggtcagctttccgtcaacaactcattgtttacaatcttatttgattcgggagctacacgctcatatgtagcta

SEQ ID NO: 339294 - DNA, 740 bp, Cannabis indica
ctcttcaaatttttgttgcgtatactttaaatattaaatacttcattctttttaattaatttttttctaccttgtttggattggacgaacaggggaaaagaaacaagaagtatttttgggtgccggcagttgctcctatgatctctgttgttgtgtccactttttgtgtttacataactcgtgctgataaagatggcgttcagatagtatgttggatcttgtacaagtgttaccaataatatgttttagtgatttaataattagcctcatgagttaagctgcaatgaatattaattgtgctatattcaggtgaaccatattgaaaagggcataaatccaatctcagctaatgatctattcctctctggagaatatgttggtaaagcctttaggataggcgttgtggctggtatcatagcgctaacagtaagtactaattaatgcttgataaaattttatattggaaagccaaatggtttctcctatgaacatataatataacaaaattaattaactatttataaggccattttgttttcttaatcaatatatcaggaagcaatagcaattggaagaacatttgcagccatgaaggactatcagattgacggcaacaaagaaatggtggcattaggaacgatgaacattgttggttctttgacctcttgttatgtaactacaggtactgatcagatcgattaagaaaaggctaattaggatttttgccttttgaattttga

SEQ ID NO: 339295 - DNA, 534 bp, Cannabis indica
tggagacaagtcccccaggtttagttgtatctccttcaacagaaactgataaattagaacttgtagttgaacttgggcccacaccaaagtgcatctcattgtaaaaatcaaacagcttgcgcaaattctcttcaattttcttaatcaactttgactgcaatgatatatcatagaaagtttcataacagtcaaccacaaattgtaacttgtacctaggatcaagaacagtagcaatgattaatgcaccattagctgcctttgactctccccaatatttatcaaattttctcttcatattagcagccatggaggatagcattccatctcttgcctttgacaaagttatcaactcattctgaatttcgcagatctcttgaaaatacaagttagaggtcacataagaagacccactaaatttcaaagtgacttcataaaacgtttttaaaaacttcacaaagatccttgcattttcccaatcatcttcattaggtggtccttccttactctttccattatcctcctcagtgaaataat

SEQ ID NO: 339296 - DNA, 518 bp, Cannabis indica
ttaaaggttgattgaagatgatgttgttcacattgtctatttttagctgaaaaactataagcttctctattttgggccatttgagaagcctagggatgccaatgtttgaatgcaaagtaatttttccaatcacatatggaaaacactcaaaaaaactaaatttgcattgcataaggaaaacctaacaacctataaaacccgccatccttatccttcttcttaacagtcctaatatcaacatcaatcttttcctctatgtttggtgggagggagggcgagtaggatggatggagaggttaaagaggatggggagtaagagggatagagatgattgttaatctcctttgtattgtttggtgttaggtgtgaggtgggaaggatggaaaaaaaattgattagtaaaattacaaaattgtccttttaaaaataaattttattatttttatccttccaaatttggagggattaaattttgaaggtttggaaggagaaagtctccctccatctctcttctccct

SEQ ID NO: 339297 - DNA, 1243 bp, Cannabis indica
gtagcatcccagacttccaatttattttatttcgtgatctagccgcggccaagctgtgtctagccgcggccagatatacacaattcctcaaaaattgtgttttcctcggctcagctcgtcttttattgaatttctgcacccgagacctcttttattccaaagaacctgaaaacatagaaaacaagcgtaattccgtcccagcacagcgaaaaacgcacataaattagatccaaaacataggctaaaaatagcctaacaaatcctaattaattaaaccttatatattatatttaaacctttattcaagttaaataattataaattaaaacataaatataataattaattaatttgacaccaaattgtcataattaacaaataagcctatatctcacttatcttctcaatttcgcccaacttagtgaaaattcaaaatttgacatggttacttttgaattataatttattaaataaatcaatttactaagtaaatttcctaacttattaactccttctaactccactattgattgagaattgcactcttgattacatagaacactctatataccaaatatagatacgttatgtattatctattatttcaatcacagcaatcattgatcttctatagacgatttagattgggtagggataaaattatcactttaccctttaatgtattttattgttaaaatacttagctacttgtacatgatatttcgagatactaatataatttccgaaatgacgtctctatcatttattgcctttagccaacctcaaaggaaatcatcctttcacttctaatagacatagaagttatagatgtccatatctatgattaacactctcactcaatttcactaccgaatttccaagatgtaagtatggactagtcctacctgtaagctggtaacgaacaagtcaaagaacctgtgcaatacaattaagctagagcttaaccatctctggattgagatcaaattatctatgatcaactaagtaatattgacttagaaaatatataatggtaagtttataatatcttttccacatttaataacggtccaattcgatgtatagccaatacatccgatcatggtttactttaatagtgcactggaaaagatattccacttattcaagtgtaaggaaacttcatcgttgatgattacattagtgtaaattcagtgcactgataaattgtgagactaaataaatttgaagcatataatcacaa

SEQ ID NO: 339298 - DNA, 783 bp, Cannabis indica
agagaatcctcgagcaactaaccgagccttgtatctctcaattgaaccgtcaagatgagtttttaccttgtagacccatttgcacgaaatgggtttcacttctttcgactttggcaccaactcccaagtccgattctttgctagtgcacttatttcttctttcatagctcctagccacttggagttttggtatgcctcttcatatgactctggttctctgaacttttcttcttcagctacaacagcattaacatattttgaatttggcttttgtgctcttgttgatctctgaagttctggttgactatcatcatgtccttctctttgatgcatccctgtttgccatggattctgaggtgcctcatcctcggtgttttcttcttcagttgtatcttgagttggaggtaactcaataattttctctcccattttcttctacaattcggctttccacactaggtataggcactatgaatttctggttatgtcttttggactaaccaatgctcccgcagcttttattgatctaatgaatatggtattcaaagatttccttgatatttgtgttattgtatttatcgacaacattcttgtgtactctcaatcataagaggagtatgagcaacatcttcagatggttctatagcgacttcgagaacataagttatatgctaagttcaagatatgcgagttttggctatcaggtgtcttttcttggacacattgtcagtaaagatggaattaaagtggatctggggaagattgaatccgtcagggattggc

SEQ ID NO: 339299 - DNA, 859 bp, Cannabis indica
aatggagatcaatttcaaaaaaatattgaggcataaatatgaaaagaactagttccataacaaaataaataaacacaattaataatacacaataactcaaatataatataaagaaaccgtttatatttatcaactagttaaaaatttaagacaaaataccagttccgtaaagcaactaagataaaaactcacacaaaaaccaattaaataaaatagcttaagcaaaaacattcattcaacatgctccaacccaccaaataattacacccatatcatatctacctcaaaaatactcattcattatgtctatatagatagttctattttagttataaccggtttgagttattttgtgttatttgattttattaattataacattgttataaaactggttcattataacactgttatagaacatattctattttaatcataactgctttaagttattttgtgttatttatttttattcactatgttacagaaccggttatattttaattataatcgatttgcgttattttgtgctaattatttttatttattatgttataaaatcggttttacttttattatatctgagacatttcctcacttttttaaaaaaaagaaattataaccggttttatgagggattatgtgttatgaaatattttattgtgaaactagttttgtttttaatttatatttcagtgttttaggaactaatttcttctttgtttttaattgtaatcggtttgagttattgcgtgttacttatttgtattcattatattatataactggttttattttagttataaccggtttgagttatttcatgttatttattttttattcattgtaacactattat

SEQ ID NO: 339300 - DNA, 782 bp, Cannabis indica
agcttcaattatgaagttgttgcacagcttttcaacttcatccttcaggggtactgctcgttctttgttcaacagccttcgttttgtttaactggccggaagttgggatcgatattcagaacgtgtgaaatgatagaaggatcgattccgaccatatctgcatttgacaaggcaaaaacgtctaggtttgctcttagaaattttatcaattcgtattttacttcgagcaacaaaccttttccgatcttttgcttttggtcgggatatctggatcaatttcaatctcttctaattcctctacaggtccaacattgctgattgggtgcccaagttgaggatccacatcttcatcccgccttgggaagttccctacttgggaatgttttttcccttgtctgtgctctggctggaggacacttccttcttagccttggccactgcaaggttataacattcccgtgctgactgctggtttcaactcatacaccctacgctattctttgttgggaacttcaggcacgagtgaaatattgatgtgacagcttttaagtcatacaaggccggccggccaagcattacgttaaaagctgaaggaacatctaatattaggaactgtgccatgatagtcatgctcgtcggagcttgtccaacagtgaggggtagacggatttggtcctagaggtgcaactccttggctggagaaaccatagacagactggaggcgatgggattagatccttgagttggagtcgctatcttttgtaagcagtcttgaacaaaat

SEQ ID NO: 339301 - DNA, 676 bp, Cannabis indica
atcgttcccacgaggactgcagctaagtaccaatcaactgaattcttgtttctatttggcagaatcgataataaggttgaataattaaataactaaaaattgaaaagcagaaaaataataaaaagtataattaattacggatgaaaatttaggaatatgaatcctgttagttcagtttctcaattattaatgttaattattaattctctcacttttggtgatgatagattatcaaattaatcctaactcttctcatatcattaaggtcttaaatcatatattatctactttcatctctgaagtaaattaacatataacttgcattaaattcagaatttaaaaatcacataagctatgtaaatactctcgttttacatcaaaacttatgtttgtcctattagagcatttctaatattcacttttcagatttcatattaagatcataaatcacattcaagatggccagtctaaaatatgtaattaaaataaataagaacaaatcacacaatatagggaagaaaaaaactaataatcacattaactaaattgaagaaacattatctaacattcatcatatccctaaattgggaattcagttcaaaaagctcatgttcacatccataaaaattgatgcagaaattaacataaagacataaaaaagggaagaaagaactag

SEQ ID NO: 339302 - DNA, 377 bp, Cannabis indica
gtaaaataatttctaacaccaacgtggtcacgatcaaaactcaaaaactgggaatgaggaaactaatactaatactggctatgtacctaggaatgaggatgcttatgatcccactaggtatataccgttagttgaattggaaaatcgaaaactccggcaacgtctggccgagtccaaccaacaaaatgctgaattggaaagagaggcagatgcagccagggtgactcaaggaaacaatgcatataaccaacctgatcctagagtgagaagcccacgaggtagaccttaaggtttaagaatcaggagacaggaaacaaatcaagaaaatccctagaacacccaagaggagcaacctgaggaaactagggatgttccaa

SEQ ID NO: 339303 - DNA, 675 bp, Cannabis indica
aatgtacatatcagcttatccagcaagtggaattgagtgctcaggaactgtatgttaaatgttctgaactttaaaatgtattttacaatattattgtgatggcatgtcttgtaatattttatataggagatccccaatcataaaaagagactatgccacgattttatggtttaaattagttggtaaaatttttattagatcacattttgtttaaattgctagtttatgattataaactagtttattaatgcagacatgtggtgtccctaaggattagggcattacaacatggtatcagagtagcaacgattttaaagatcctaaagactggttgggtatgtaaatttgcagtgaaaacaagctcgactcatggatagtaagtattatttaccggttatatgattaattgttatctgatgtcgttagcaatatacatagaataagcatgagttaggttaattatagtatgggatattggcggctaaaccacctgaactttacggtttgtaacacttaaccacaaaaactgaatttttggcggctaaactacttaaaccctagttccgttttgctctgcacatctccgtccaaaaatcactgttaagtgccacggtggaaaatttttagtggtccacgtaatattagttttaaaaaataattataaatattttaaaa

SEQ ID NO: 339304 - DNA, 542 bp, Cannabis indica
agagcatatttctacttagttcttcattatgcaaaaatataatactctttgattaaatgtctttcattaaattgtttacatctaattcttagaatataagtgttatattttgcctaaacatagtttctttgattttgtgtagtttcattaaattgtaacacatttaatgcttagaaattatacattttataagtgaagaaaaatcctacctttttgaaaataacttgtacttaaatgaaaaatatattttggaaaatatggtgagatttatttcaactatatctaaaacttgggaatcaatatacttataaatattattgaacttgcattttgtggattctaatatcttaataatcttattttacacatcttatttgaaaatcattttcatactcactcatctttaatcttaagtattttagttacttgtcttttattttattttgcaaaactaaaatcccatcaaatatttggagctaggttagaatattcttattttgtttgaaatagtttcttttgatgttagtcaactcccatgggtt

SEQ ID NO: 339305 - DNA, 2006 bp, Cannabis indica
ttatatcctttctaagttaatatcacttagttgatcttaggtcaatagatcttaatcttaagatggttagattctagcttaaatgtattatttgtattttttgacttgtttgttaacgctgaccaattggatcgacctaatacttacatcttaggaacatggtagtataattgagtgggagcgctaatcatagatatagaatctatagcttctataattacatagaactgaaatgatgatttcctttgagcttggcttaacagacaaaaatgaaagagttcttatttcagtgattatattagtttactaaaatatcattgataggaaactaagtgttttaaggataaaatacattgaggggtataacaataaatttatccctactcgatataaatcatctatagaggatctttgattatttagattaaaacaatggataatttatagtgtatctatatttggtatatatagagcattctacgtaatcagaagtgcaattttgaatctacactggagttaggaagaattaataagttacgaaatttacttggtaaatttcggatctacttattaggagcttggttacatagccccatggtgtccatattgtctgggataatattgtcttgtagactcaattaattagtttgaattaatcaattagaattctaaataagactatgtcttgtttgtgaattttcactaagcaagggcttatttgagaaaaaaataagatttagcgtttgtttattaattaagagattttgtatggtttaattaaatggaaattttatttgataattaattataattattaaatagatagatttgacatttataaagttaaaattaaaatatggtatttgtgaaaagaaagatgagtttaaataaaatggtaaaattaaaatcctaaaggcccattaaggatttgaccaaggagattaaataaagccatgattttattttttcaattctattttgattctaaaccaaaccctaaaagctatcctataaataagatgacttttattttcaattgatgatcagactcctttgtcagacaaaaatagaaaataaagagagccaccataatatttgaatcactcttcttcttcctctattatttttgaagcctatagtaaattgaagagttgtccacacaattcaagtcaatactcaggcctttgtgaaagattatatcgaatatttaataagactaattttaacagttaattcagattgtgatgaacacaaagatgaacacaaagatgatgtaaaattcaaattgttaatctgatacttggaaggcacccagattgataaattgtcaacttgggcactgggtgctcgggcaacgagtgctccaggtgctcaaaaatgaacttgcttcgaatttgattctgatgcctcaaatatgtccttgttatgtctagttgatgtcacaatgcaaagtttgatccatttgcaccaagacgatcccagaaactaaaaccttagttcggaatgtcaaactgggcattgggtgaaaccctagatgcccaggttggctttcggggtgtaggttcgtgtaattttagctctcagagcttggatttgattgctctatgtcttcatggtacaaaatactgaaagttagtaagttggaatcaagttattgaagtttgaacttcgatcctgaagctcccaaagtcaacctggatgcagggctagggacccctcccaggtcgactactagaattcaggtctacttaactctgtgacgtgatctttcttgtcacgtgtgaaacattgatatccacatcatcaagaaaattttttgagttaacaactataacgaacaccaccataaaaaaatatttctacaactatgttcaaagatttatatttaaaaaaataaacaacaaataacccccttgtttagattatctctaacatatcttccaaaaatataataataataataatgttataaaataatataaaatagatgagaagaaagaagaaga

SEQ ID NO: 339306 - DNA, 1184 bp, Cannabis indica
caagtaaaagtctcaactctactaatctcacaggtcattgcatgtatttatatgtggctaagaatttcactcgttaagttgaaattaaaaagtgaccacatgaatggataaatcaattttagtacaaacagttaaataatcattgatacaaagataggttatgaattatttggacaaaccaccataaatattaccacaaaccaatatttttggaatttctgaaggagaataaagaatcttttacatttattttaggatcataacgaataaaaaattaaatgatacaaacttttttttttgaaacaagtgccaacatatttagagagaatgatagaaatgttgctcttattgttgttgttgtttgtttgttttttttttttctacataagaaaaataattacaaaaaggatttctaataagatttgtccatggaaaaattatccctaaatcaacaaccaatcaaaccataatactatgtctaaaataattataatcatttctatgaatcaatgaaaatttaaaaaattattttctcaaatgtcaccactcacaataatatgactccttaaacttgataaattttcttagcaaatatgtgctaacaaccatcttaccacaaagtttgacatgtgcattttataattttagataaattataagtaaaaaagataataaaaattagcttaaaataacattttacaagaatacataagtaaatgtttaaaaaaaattaaccataaaaatattaataatgacagaatacagtaaacatgattgaatatgttcaccaatcccaattaaaattagtctgtgttcacaatgtctaaagatataaaaatctaaagagaatagggaaagagatcacatagagagtaagcagcgatggatggcatggatattgattctctaaaacataaaattaaaaaatgataacaaataacaaaataatgatgacaaaaaaataaagaaaaataaataaacttatatacgaaatcatggaaacactgttagacatttatatgtataaactgtaatatatatgtttatgtataaaatgcggaattaaatcaaacatatatacactatgaataaggatcgaaatacctccagccattgattcttgagctttagtcccacataagctttgatctgcaaagaaaactggttgatgtgggtaatcgggc

SEQ ID NO: 339307 - DNA, 463 bp, Cannabis indica
ttttttctggtttacctttttatttttggctttgtctgggttaatcattttgttgttgagagattaacttgggaacctggtattacacagctttgatgttttttttagttgaaatcgtgcttcagttgagaagaaaaatggaggagagaatgctttggtgtggctcggaatgaaggaggaagaagatgcagactgttcagtctatatttttgaaaaaaaaaatactttgaaatttcttttttttgtttaattttccttttcaagctaaaaatgtaaaatttaagccttaaatatccattatagaaaaaagtcctaaaaaaattattaaattttttcttatcatgcattaaaatagtctttcctttcaccaaaataaagtagtcattccaccaaaatggtagaacgccattatattagaatgacattccaatactttaatggcgcgtttactaaattgtaattg

SEQ ID NO: 339308 - DNA, 693 bp, Cannabis indica
aaagaactagttggtgattgcattccggatcgccaccattgcttcctctgcctccttctttcacttttgggtccaatttctgcctcccttggccttctgaatcgtatcccttatataggaacgagaggtgtgcctctaattggaaaaaaatcagaattaggtcaaaaatcccgttttccgtacctagtcgcgacccacttaaaagttggtcgcgaccacaggcaaaacttaaaaaaccgagtttttgccaaaacctcaagtcgcgaccatagtcgcgaccaaataaaagggtcgcgactaggctaaaggctggtcgcgactactgattcccattgagcagctttggccgattttttactagtttgtcccgtcttttcgtcaattgactgaatttgaactctaacgcaccgggaacctgaaacaaggaaaatcaagcgtaaaaccgctccaaaagacaacaataatctagaaagtgcttaactataagacccgaaacttaggctaaaaatagcctaacaacgcataagtgtgttgaagtcacttatgtgtactccaagattcgtacttccttcgtacttggttgtggtcggcatcttaaacccttgcagatatggtaaggccaatattctaggagagtaaggcttcagctcctcattcgaattacacccaacgaaattttggttgttggtcacc

SEQ ID NO: 339309 - DNA, 709 bp, Cannabis indica
ttaagtttgtggatgaaacacaacactatactattaatctagcttcttccacgtctcaaacacccaaccaatccatcatatattaatggttccattaataatcttagcattttttttttaaatgaaataatttcattaagaggcaaaaagctaaaaaagagtcaagtacaaaaaaccctcaataattaaacaactaaactggaaggtccgactacaagacacgtaatttttatttagatcaagaactctattattagctaaagaatgaacaataagatttttaaaccttagataaaaaaaatactagtaaaagacttatagacgtgagtaatatcattaagtataatagcaaatttattgaaatgtgtgacatgactatattagcctcgcgcaagcaaaccaagaaagtagtgacaaacgtataatgaattgtagacgaagggagagactgtaaaacaaagccttggcttccgccatgcgaggctcaagagaacccacacttggaaatgcatcgaagaagaaacacatgcccattaagactagacgccaaccctcatcattgtttaacgctcaaatgtgacttccactagttttagttgtagtataattaaattggacggtcgattctacaaggaggcgattttagaaaaaaatgttaatagaaaaataaaaaacaaaatgttaatattaataataagtgataatagta

SEQ ID NO: 339310 - DNA, 741 bp, Cannabis indica
agatgagttctggagaaaacggtgatgagatcaaggaagattggttaagaaagttggatgacgcattgtgggcctatagaaaagcgttcaaaatgccaatcgggatgtcaccatatcggttggtgtttggaaaggcttgtcatctaccggtggagttagaacacaaagcgtattgggcaatgaaaactctgaacatgaatttaatggctggtggacagaaaagattactgcagttggatgagttggaggaatttcggaatgaggcttatgagaacgctaaaatctataaggaaagaactgaaaggtggcatgaccgaaacttagtcaggaaggagtttcaacctggacaacaagctctacttttcaattccaggctaaagttgtttcctggtaaattgaagtcaaggtggtcggggccatttacagtggtcaaggtgtttccttatggagcggtggaactgaaaggtgaaggccctaatactttcaaagttaacgggcagcggttaaagctctacttgggaggtcaatttgatcaagccaagtccgccatgattctggcgccactatgaagaactcgattaacgtctagctgtgcgacgataaaggcagcgctaattgggaggcaacccaagtgttctttatgatttagttgaactctttttgttttagtgttattttctttttctgttctgtctagttttgtttagaaaactggtaaaacaatttttagtattctttttc

SEQ ID NO: 339311 - DNA, 589 bp, Cannabis indica
tattgggcaaattactcacaaaagtgggtacatttgaatgaaatataataagaaagtatttttgattaatagatacaaaaaagaggtattcttcaacttttctcaaatttttaagggattatctataacaaaaattataaaaataaggttgtacgaaattttaaatatttttacgatttttatgattttatttacaaaatatacaatttttttattgtactcttattaattttttgttatctatatttaattttaaaataaatttgaaataatttttataatttttaatgatatttaaatatatatataattatatggaccaatatgaatgcaacgcctatatatttgtttatatgtaggataatctatactagcacataaccactcttatagacaacacctttaatttgctaacagaagtagaggttggcgggttttcccaccaaaatttgaggttagagggttaattgcaagtgaattgagagttaagggggtttagctgcaaataattctattatttattagtttactttttttattttggaccattttttaggtaatggcaaaaatatatatactttccacatat

SEQ ID NO: 339312 - DNA, 773 bp, Cannabis indica
agttcaggctagggttcaaagatttgtgggtgatggttctaccgtcaatattttgtctgagccttggcttcctgatgagatgaaccctttacaattgaatctgtccatccaggactcgtggggaaggctgtcgactctttaacgaaagttgacctggttgaatgggatatggaagttatagctgatgtgctcaatgctagagatcaagctttggtgtggaaaattccactcagtagtcatgtgagtactgatttgtggtactggttacatgatacttcaggtgttttcactgttaagagtgcgtattccctgcttcaatcaatgaaaaccagcagagatagtccagataactctagtttctggcagctcttatggtagttacagctccctccaaaggttctcaattttctgtggagagcttctaccaacaatctcccaactcggtttcatctttccacaaaacatattccaattgctgcaacatgtgcattttgtcttgctgctcctgagacgactctgcatgttctggtgcggtgctcttttgctcaaagttgttggagcaaggttccaattcctgttgtggcgcctgatgcgatgttgttctcgagttgatttgaagctgggttgacatcatggaacacggctgaggctcttgaggccggtatgatttattggtcagtttggactcattgtaatgatttggtttggaactccaaacaccctgatgcgagtgaggtagtgacaatggcaaaattaaattatgttgaatggtt

SEQ ID NO: 339313 - DNA, 700 bp, Cannabis indica
ataatttttattatgtggagtttttatttgaatttaataaaattatattgtgtattttttttttctcatattcttaaaaattatatttataaaataaaattaaaaatatttaaatattaaaacaaaaattataataaaaattgtatgaaatttattaaaaaaaaataataaaacatacataatttgttttaaaaaagaacatgtaaaagtaaaattaaaataattattgatattaatagaatataatgtgaaaaagaaaatttaaaaaaaagaaaaagaaaatttaaaaaaaaatgaaaagtgatttttaaaaattaatttaagttgatttttttaattaaaatataattattattttataaggtttaaataaaactcctcaaatattagcttaaacttcacttctcacaaatataaacatgtattagttttataagaaaaaaaattaacatatcaagattgtgattgaaataagaataatttaataagaagtggacaaacttttttttttcatttctatttttttattgtgttctccacttgaaaatatggacacattctatttatataaatatatatatataaatatatataaatacacttcttattttaaaagttacatataatctctattaatttttattttttttaaattaatttattatataaaaataaaattaacaacaacttatttcaaaaa

SEQ ID NO: 339314 - DNA, 1031 bp, Cannabis indica
aataaataaataaataatcaaacattacaaacaccatatccatgtaacaaatacatatgttctggatctaatagaatttatacattaaatataatcatgaaataaatcatgtgaaccatgcaacataaaatgatttttgatctttattaattagtaaatctgattatattgaaatgagttttatttagggcacaaaacccaacacatctttcattaacgtgtcgtttaccatgaaagatttatttatatcacaatgattatcattaatagatcagcctgaatcctgagtatacatgaactcctatttgtgttcgttgagttctttgattcactctttaaagtttctcagagaagatgattcttacaacatttattttggagcttaataacatgagtggtttggaacatgttatacaaaagtggaatccaagctttcctaatggaatgaatattagttcccttagtgttaattctgagagtgataataattagattcaaatctataataagttataactgttcacattgaattaatggtacataaagaatcaagagctaattagaagagaaaaacggtaatttgaccaactctaattatgaactaataatttgagggagaactacttatattgattatatcaatgtaccacaaataaaaattttataaatataattctatattgttaaagagtgcaattccatatttatagtggaataacaatagaattaataaactagattattctattgatgagatcgataataatcaagtatttattggagttccaaaatataggtccatggtcacgagtcacctttataaaatactatacaaaggaagaatttatttgatgagtaaatttcaagtaagaattgatttttatggaaaataaattcttaaaggcaaaataataatttatgaaattattgttttaattacttatgacaattatgaattgtataaataatagtattcaactatttagttttattagataaaattatattaaatagttaaatataatattatt

SEQ ID NO: 339315 - DNA, 916 bp, Cannabis indica
taaaaagaaaaaaaactagtaaaataataggaaagagctgaagaggaggaagaaaaattaaaaatgagaagaagaagaagaatggagaagaaaatatagagattggtgttatacttaatatttcaactttttaattttttttttaaaaagaaaaagtttcaaaattgttattgatgtgaggaaaaccaatcaaatcagtatttattatatatatatatatattttaaaaatgataagaaaagcccttgacatgataaatgactaaatacaatataaatacaaactttttacacattatatagtagacagtataaaatggacacattatttttacaaacataccgtgtactagtataaatataataattttgaaaaaaaatagtatatagtataaatactcctatacatttagaatacatcttagtatatatatgtaaagaccgcttagtttaatttagaaattagcagttaattatgattaattatgaaattatttatcgatatttaaataattatttatgatgttttatttcattcctggatgcatttttatgtcatatagtgagatttcatatttttgcattttcggtacccggtaacatggaactcggtgtttggctcagtagaatcacaatataggatgttagtatagcggggcagtttattagacattgggaatgtcgggattggtcgggaatatagaatttcccaaaaataccctttagtacccttgtatgttattttagtgtggaggggcaaaatggtcattttgccccaatgatattttgtcctttagtggacttagtgtaatgtgaatatgtgattaatggtggatatttgttggctgaaataagattaattatatgtattttcatcttttattcaaagtaagaaatttgagagaaaaatcaagaaa

SEQ ID NO: 339316 - DNA, 1079 bp, Cannabis indica
agtatctctgaatatataattcttagataataatatattcttagcttagctgcgtatcgactttcaatctctcagttcctttgcccagtgaaaaaatatcactatttatagggctggggaacttgaggaggaagagtttcccctctcgttacaatgcgcataagcagaaagatcctgggctcaatgctgaatgcaaggatcgtgggattgaggctgattacactgatagtgggatcgtgtgtatgtcgtatccacgtgaattgatccctgagttatagggatggagctgatgactaatgatgaggacatgccagtgaggcatccttctcggcctatcttctgagcagatgttccaagtgtactcttgtgtcaccaataccaattatatttatatgtttatatttatatgtttatcatgttttgtatatgtttgtgttttattattgcaaaatctatggtatattgttctctgcaaagagataatatcacataaaacacttagactttaaattcaatgtttatgaataattgttaattcttaagcaattattaagattttgtttaataaaaagatcttttgacctgataggggttgaagaagttaaaaagtaatgtatgcagttcaacgatcttttatagctattgaactctagactttattcattactccataagatttctataacacttaggggcggaaaaagctattgatatatgtagttcatttttttaaaaaaatttgaacactagactatactcaatacaccacggtatctctatggctcacatattttgattagacattgatataatataacgaacaaattagcaaattattagaacttattctttatcctataattgttccaattaatatgtcactgtagtaatagaaaatggataccaatgaaattcttggacatagtatcacagtaccttatcttagtgggagaactttaaaattcttcccatctttattcggatgataccagtgatagattactatattatgatcatgataggaattttaaatacaactgagaaagtaaatctaaccattcatatggatagaaacttat

SEQ ID NO: 339317 - DNA, 537 bp, Cannabis indica
tgtccttttgctatgtcatgttggcatactcttggtatcacttatgacacgcttcatcccttatcttttggaggttggtttgagatagtacttatggctcttgatgaggaggttgtctcacgggcagctatgctttgtagggcaatttggaaggcccaaaaccttgttgtatggaagaataaaacattctcacgaaatgaagttattgcatctgcacaaataactcttgatcattggcgtaacgctcaagataacacttcactatcttctttattctttgagaatcgaggagatggagctgagcgttggactaaacctgaagcaaacaaaatcaagataaatgtagatgctgcactttttccacatgataactcttatgggttcaggatcgttgctagagatagctctagcaatctcattgaggccaaaacgtggtattatggcggtgtctatgatgcggaagttgttgaaacaatgggggtcaaagaagctctgagttggattaagagcaaaaattggtctgatgttaagattgag

SEQ ID NO: 339318 - DNA, 857 bp, Cannabis indica
taaaggtataaagtttctccagtcattggctttgccaaaactgggggtaggggtgttcgcggtgcgggtggtgcagtttttgattattttttcaaaccaacccgcatatgcagtttttttgatttcccaaaccgcacccgcaccccaaaactaaaacccacagaaaccgcaccgtaaaaactagtgtggtgcggtgtggttttggaagtttctacagtttggactatcactaaataattaaactatcacaaatacaataaatcttgagaaaaacttgtcaaaataccataaggcttgaaaataaatgtaaaaaaatttaagtgttaataatacaataattagtggactttgagttgaacattcacatattggaccttaataaatataaaaattgatatttttatcatgtgcggtgcggttcgaaccgcatattaataattcaaaattgtaaaccgcaccgtaccgcgtggattaggaaaaaaatcaaaccacgactgcactgcaaagattttcaaattgcattttttgcggtgcggtgcggtgcgggcggtttgggcggtttgatgaacacccctaacttggggtgttgaaaaatgtttttttatgcctttaaaagcttcctcacattgttctgtctattcaaatctcttatggcctcgcaaaatattaagaaatggaaggcatatatctgttgacttcgagatgaatctgtttagtgctaccattctcctcgtcaaagcttgaacttcttttggctttgttggtgagggcatctcgattagggcctttattttttcttggttggcttcaatttctctcacatttactatgaagcccagaaattttcctgaggaaac

SEQ ID NO: 339319 - DNA, 833 bp, Cannabis indica
aaggatactatcaaaaagaagttagatgcagccaaaggtatatgggtcaatgaactacctcaagtactttgggctcacagaacaactaagaagacagcaacaaggcatactccattctcactagcatttggctcagaggtaatgctttcggtagaagtcaatattgcgacccacatacgagatttttataatcaagaagaaaaccaagaactcttaaaattttccttgtatctatttgatgaaaaatgtactgagtcacaaattactaatgcagcataccaacatcgagtgacgagatacttcaacaagaaagtgaagaagaggctcttccacgttggaaacttggtgctaaggtgagtatttgcaaacacgagagacgcatctggatgagtatttaacccaaactaggagggttgttatgtgatcgaggcgatagtaggaaccagggtttaccaattagctcggcttaatggctcgctaataaagaactattggaacatagaacatttgcaaccctactaccagtaaattgatgctgtaacttctacttctggtgtaatattttgaacttcagttattaataatgatgaatcatttttcaactaattataaagttttattctttaaaattacttgagggacatatatatgtgtgtatgattaaccggaattcatctggaaatacatgatatattgcaaacccacttcactttaaaagttatttatgactaaccagaattcatctgaaaatacatgctatatttactccactttaaataacctttcttacgagaaaggaaaatcaaaagtagcagttgtaaatgagatttaac

SEQ ID NO: 339320 - DNA, 990 bp, Cannabis indica
taaacattccatcaatagcataatcattccccacaaaagttattcttagtgaaggtgtacaaatcaaccccaattatttgactaaacccaggcttgttaagcaacaaaaccaaaaactaggttctttctcatctcgggagtatgcattacatctttcagcaataaggtccttcctgaggtaaactttagctccacgtttccagttccaacaatagtagtggtgtggtagtctcccaacaacactttcttgtcatcaacagcagtgtatgtcttaaacatagcacgatcacaaaagacatggcgagatgcgccagtgtctacccaccacccttctgatccaccaatcatgttgatctcaaaaatcatagctgtaaaaccttcttcagtcaagttagcctgcggagcagtgctaggcttgtttcaacactttcgtgccatatgatccggcttgttacagttataacacagaaactgtgcggggtcattctgtttatgtggaggtggctaccttccatgttggttactattatggttccaactctgattattgttacgagaagggtttttgcggttagaattggaatttgagttgcggttctgattcttgaaatttttgccattaggcttcagaaccactggtgtggacttcttagtgttgttgtttgaaacaacaagcacttcatctttctagtcttgttttctcgtttcctcctgttggaaatattttaccatgatctagatttactaacaagtatgtttcattaacatcctaatatgaattctaaaataatgaaataaacacataagggttaaagaaaaccttacattgggtgcagcggaatatattgactccttccgttcagatctctagcccttgattcctttctgtagcagagcatcaccaagatttgaacctggatctctttctctccttcttgagtctgattctccttcttgttgattggattcttcacagtcttacacactatg

SEQ ID NO: 339321 - DNA, 1000 bp, Cannabis indica
gtgatcgaggcgatagtaggaactggggattacaaattagctcggcttaagctaataaagaactactggaacaaggaacatctgcgaccctagtaccagtagactaatgctgtaatctctattgttgatgtaatattttgaacttcaattattaataaggtgaatcatttttcaagtaattacaaagtttcatcctttaaaattacttgaggggcatatatatgtgtgtgtatgattaaccagaatttatttagaaatacatgatatattgcaaacccactacactttaaattatttaaagtttttcattaaagaacctttctcacaagaaaggaaattcaaaggtagcagttataaatgggatataactcataaaaacaacattaagctacatgcgaagctgaatgctaacgactcacaatttgtaggaaagtattaaacgagacaccaagatgcgttgaaaaaatacttaaacctagaatataaatagaaggtctaactattcatataagcaataaaaaatatacaaagtgatgaatcattaaaagtatatttaagtttgcttaaaacagattataactgtttatgcgaagtagaattgataactgcttgcaaatcgaaagcatagcagataataattgcacgcacatagtagattactaactacttaaataatatcaaaagaaaataagagcgatggaaatgcttcaagtgttttaaatttgatcaaagtataattaattaagttgtgagtaaaaattcaagtaaacaaatgtattaagttcgaatgcaaaagtacgagacattaaataaaagataaaatagaagcaaagttggccatccaaccttgcaaatttgtctttacaaaagtgccacaaagggcaaaccattgtctcggccttatggccactttcctaaaattaaaaaaaaaaataaaaaaataaaaaaccaagcctacatagtaggagacttggatcgtctttcttcgataacttctcat

SEQ ID NO: 339322 - DNA, 777 bp, Cannabis indica
gcttgctttttgaattgcataatatctgttttttgtcttgcttattctaagcttcatgaaaatcttttgccctaactcgcgaaaattccaaaattcttgagttttgacctttcgttgagtattcttactctttaatctgttgagtacttcttcgagtgacaggcattcttccttaactcttttgtttagccataggattatggcttgtaccaaaaagacaatgcgtagggtcgacgcatcagaccctcaagtggcctgacacgccaccttacccaacgacgtcctggttgagggcgtggactacgccagtgaggaacttactgctgcggttcctcacagaaggcaaggtaccttgggtaccaagtgggtgagccctctgttcaaggttactgaggcgcgtctgcgggatctcgaccaggatggctacctgggcgaattggactgttacattcctgcccataataatcgggccacaaaccttgaaaggggaatgtgcgcctggtcatgtgctcatgcctagcaaggggcattgctgcctttgcgcccgtactttaggaatgtggcagacttcttctacctctgcccgacctaatttactcccaaaggcattaagtatttatttgccctctttgttctccatgcctcccagaaatgggatatgtccctctccccatgaggtaagctggttttttgatttgaagtccacccataagcaaggcaggtcagggtactcgtatttctctcagccaaacttcaagtggttgacgggcaccaggg

SEQ ID NO: 339323 - DNA, 1056 bp, Cannabis indica
ttggacaggggagatgagaagacaaggagagagggtgcaaggagttgagctttgggcgtggctcacgaggtcgagcgatcctttgctgatccgtgtttgcatgaagaaagaagctccatctgtggctcacgaggtcgttcgacgcctaagatagatctgaatagttggtggtctgattctttttttgctaaggctagcactgcggctgaataatagagacagaataaagggtttctttaaggttatatgggagggagtagtttttaataataataataataataataataatagcatccagctgaatacacatgtgatacaatttttatttttaagtaatgttacaattttcattttttttaagtaatgtcacgtccatcatagttggacggcaaatagtaccaattttattttcttaaaaaaaaatatatatcacttcactactaattttttatgtccagcattattggacataatgaattttttttccaagtccattaatattagacttgaaatctccttaaacatttttcaagtccaacactatttttgttggacataaaaaagagacataaaataggttatttgtagtagtgcactaacactccatgttatattataagtattgtaggttgtcttgataaggcgaaaagagacaggaagcgcatgaagagctcgatgaatgatgtaagagtcaggaaaaggaatattatgatcttttaacttggactgaacattaataatttttaaaaataaaacctcgcactcctttgacttatcatattgaaagattgtcatttcatccataagatgtctagttgcagcgtttttaccagtgtcaaatagtttttctaccactttgaaaaactcattagcatttgtagtgtttggcaaaccacttaataaatgtttaagaattgaactttttatatagcagtgagactaagatgatttgaattttgtaatgaccgctctagtaatttggattagtaagggcaattagcactaatttttattattttattattatatgtgaattaatttaattgtggaccc

SEQ ID NO: 339324 - DNA, 610 bp, Cannabis indica
attttaatacccgttagtgtttttggaaaaacactgattattctatagctattatgacagaggacccagatcgtcgatcgttctccaatcaggtcggccaacatacctaaaccgaaacttgaggtaagaaaaatataatttaccacatggcatgataggttttaaaattttcgattgtctaattaggtaatgataatgtgatgatactatgggcataatatacagactcacctgattaggtggtgcaacattcttggcaacgtatcggacgtaggtacgggcgtcagtgacatatgataagtaccgggcgtaggtacgggctcatctgattagacgatgcgatatattagtgccaagttgtggcaggggctcacctgattaggtggcgcaatgatattatatatgatattgcattatgacacgggcttgcctgattaggcaatgcaaatatctgagcatatctatttatatgcatatgactggttatattacctactattgaatgttatagtttaattattatgtgaaaatgaaatgtataattagctatttaatgtatccttttttattacttttcttgctgagtatatgtgactcacgggtgctctgt

SEQ ID NO: 339325 - DNA, 1298 bp, Cannabis indica
caatttaagatagtatctgacaatggtactcagtttgatggagagttattcactgagttctatgagaggaataaaataattaaaagcttcttgttagtatcgagacctcaagtaaatcggcaagtagaagctgttaataaaaccttgaaggatactatcaagaagaagttagacgccgccaaaggaagatgggttgacgagctggcacaagtgctctgggcccatagaaccatagaaaaaatagcaacgggacacactccattttcattagcatttggatcggaggcaatgttgcccgtagaagtgaacattgtgacccataggcatgaattttataatcaagaacttctgagtatgtccttagatctttatgaagaaaaatgcaccgagtcacaagtaattaaagctgcttatcaacaccatgtcactagatactttaataaaagagttcgaaagagactctttaaagtaggagatttagtgttaagacgtgtatttgcaagtacccgagatccagcagcgagagtgtttaacccgaactgagaaggctagctcgtacatcattgaatctgtagttggaaccgaagtttacaaattagcttagattaatagcttgctaataaaaaatcactgaaacagtgagcatctacgaccttattaccagtagtttattacataataaatataccatataatttttatatgactttaattttattagtcaaaaaaactaaatcatgaggcataaataagaatccattagtaaaattacccataatatatataatgttagaataagtcaacaatgcgcctataattttacctaattttctttatgaaatatttactatatataggggtgtgcaaaaagtcatccaatccaattcataccgaccgatctaattccaaccgatccaatagaatcggctatccaatcataattggatcggatcggatgcaaatttaaaaatccaattggatcggatcggatattggatgagacatccgatccaatggataaccgatccaatccaatccaatatcattcaatgtccatccaatcatatttaatatttataattttatatatttaattattttatttaatattttatatattattttattatttattagattttaaataatattttttcacatatatatattttttaatgaaattagcctaaatagtggttaaaatggattggattcatccatgggattcattgaatggatccaatccaaatctaataaaaaaccagttaaagcatccaatggatggaaccgatccaatc

SEQ ID NO: 339326 - DNA, 930 bp, Cannabis indica
ggctataccgactcaaatttccaagcttgtcttgatgacaagaagtctacatttgggatggtattcactcttgagagaggagcagttgtttgaagaagtgtcaagcaatccataatatttgactctaccatggaggccgaatacatagctactgctgaggctgctaagggactggtctggctaagaaagttcttcataaagcttgttgtcattccaggcatggaagaaccattggtgtaactttgtgacaacactagtgctattgccaatgataaagagcctcgaagctagaagaagagtagacacattgagagaaaataccacatcatcagagaatatgtggcaagaagagacgtgctggtagaaaaggttgatactgaatacaacctaacttacccaattactaagacattaatagagactgcatttgaaaatcatagagagaatttgtgattagttgaaatatactgattatttcattacttgtttaatataatgcttggttcatatttttgtttcatttgtttgatatataaattcttttaaatccttatcacattgttattcatgattattgtgttatctacacagtggagaataatcaagattatgtgattaaactattagtccaataatttattaggaaacaatatttatattgatataataactaacaatttggtttacttacacttacatagtggtatgtcttttccaagggattaataaagtaagcttctattggatgtactgttatacatcggagtggaccgattttcatagtggaaaagatatcattaacttaccgtaatgtcttttttaagtaaagatcaattagttgatctaagatcaatgatcacaatcctgagatggttaggttctcgttcaagtgtattatttatgttcattaacttgttcgttcaagttgac

SEQ ID NO: 339327 - DNA, 881 bp, Cannabis indica
ttgtcaccactgacggactagcaactgcgttagcctgagtcatggtaaaaagtcgtcctgggttctgagtagtactcttcttaggctcccccctcttggcctgaggacaatctctgatgaagtggcccaccatgccacactggaaacaagtcttggcccgacattcaccttgatggtgtttcttgcatttcggacactcaagataagatcggaatgaagatccgcggccctgacggctacctctatttcctcgaaactttctggtacaccctaatattccagaagcattaaccttccgtttgtgattagggttatcaccgtcggtccccttactgacattaccattagcaggaggattcgatgccatggcggtatcctttgcagtctgctcttttgttacatgctgctcagcctcttcagcaattaaggctagctctaccactttcttgtacaaagtgtcattcagtccactcacatatttctgtttcctggtgaaatctgtgggcaccagatcaccagcaaacttggacagtcgatcaaactccagagtgtactccgctacacacattttcccctgagttagcttcacaaaatcttccatatgtgaagtcctcacagcaatattataaaacttttcttcaaacagattcttaaactcatcccaagtcattacattgacgtcacgagtctgtccaacaatatcccaccagacgcggcatgatcttgtaacatgaaagctgcacaattcactctttctgttccagtcactcccataatatccaggatacgggtgattgttgtaacactctaactagcataggcatattacgtgatttttaaacatattgtgcagctcgctgcaaatcaacgaggtttatgga

SEQ ID NO: 339328 - DNA, 672 bp, Cannabis indica
tagactgtcttatttatgaattttcactaagtaagggcttaattgtgaaaaaaaaggttttgaggtctatttgttaaataagagagactttgcatggtctaattaataaataatataaatgacagttttatttgataattaattataattattaaataattagttttggcatttatatgattaaaattggaaaatatggtatcattgaaagaagaataactggttgaaataaagtggttaaattgtaactagctagagatttgtccttaagtggccggccactctagtgaatttttgtctaatatttttattcttttttaatccatataattcaaacctaaagcctagttgaaacagtataaaaggaacatatctcatccaacgattttcaacttgccaaaatctagtttctaactttgtcagacaactagtagatgagagacaccttctatacagtttttgaactctccttcattattcttcataatcggcctatagtgatagaatgtcatgccgacacatagcaagtcaagtactcaatcatagtgcggaagacggtggcaaccaaacttgaaggggagaaagagattcaagctcagatcgataatactctctgacagaaaggaacaagggttagagatctgagcgcgcggaaggagtcatattatttcg

SEQ ID NO: 339329 - DNA, 689 bp, Cannabis indica
aatataatagtaatttaaataaaaataaaaattactattatactttatgatagtaattgaaaaaaattattattcgtcctaaatttatcttcggaattaatgaaaatgctcatctgattaaactatcaaaacattcaaatttaatataaaataatatttaaaaattaactaattctaaatatcaaaatttgaatataatttttaataaaaaaataaacaatatgaacaaatttattatttgaattaattaaatttaagtttaactaactacatggatgctgatcctttacgtggtaacatctaataatttgttattttttttatttaaaaaaaagtcactcaataatttcccataaaccaaaaattctgttatatagtcacattttatataaaataaatatatatttctatgctatatatattgagatttttttcctatatgccaaaagaagaaaagaagaaagtgtgtataataatatatcctcggttggaaatttataaatgtttcaatataaagaccaatgtcaaaatataattcaaagataaattttacaagaataataatattaataaaataatgttacaatttttgataaaatatacacataataagtatagaaaagaagataaagagaaaattatagaaggaaacttacaaaaaatacttgaattttggttaacttttacaa

SEQ ID NO: 339330 - DNA, 787 bp, Cannabis indica
aaaagcctttttactaaaaaaaagaacttttttagtagcaattgttatatccgaaatttggctagaggacacgtgtcaaggtacaaggaatgtgaatcggcgccatatctttttatggaataactcattaattgcgtaagtatcagagtatacttacaacccggtgactgtaaggtcttaggcgaggaattaatgtacgaactggcacttagtgtattaacaagaaatcatatgtcgctaaaggagaatagcgaggcaccagagaaaagtaacacataccttagcttgcaataagcaaactaagtgtaaaagtcagatcagctcgaagattaagaatgtgagatgaccatctcgctataaggaagcttcctatagttccatccaactaataagagtgaggctcataaccctggcaagttagaaaattcctgtatacccacgatcgccgtaagacatatcttgtcgacctcggaaagaagagtggttccagctcaccattgggatcactacaatcaagtttctgttgagacatctccagatttcacaattaaagacgtgtttaatacacgatattttaacccaataaaagcgggaaaatcacagctatatggttttcaaaatcatacaccgcatgttcattttgtgatatgtaatcaaatcccacgattttagagatgatgactgtaatcatatttcagtcagctttgtaattaactgccactatgcaattataaatagtggcaaacaatctcaaaaaagggcgaaaaaactcttatgcaagaggccc

SEQ ID NO: 339331 - DNA, 713 bp, Cannabis indica
aaaaaaatatcgtatattaagcacgtctgtaattattgaatctggagatgtctcgacagaaacttgattgtagtgatcccaacagagagctgggacaattcttctttctgaggtcgagaatgtatgtcttacgtcaatcgcgggtataaagaaatcttctgacttgctagagttatgagcctcgctcctgttagttggatgaagctataggaagtctccttatagcgagatggtcatctcacatacttgttcttcgagccgatctgacttttacacttagtttgattattgcaagctaaggtatgtgtcacttttcttcggtgcctcgctattcacttttagcgacatatggtttctcattaatacactaagtaccggtttgtacattgattcctcgcctaagaccttacagtcagcgggttacaaatatactctaatacttacgtaattaatgagttattccataaaaagatattgcaccgattcatattccctttatcttgacacgtgtcctccagccgaatttcgggtataacactttttggaaccaagttttcctccccaaagcctatggcggtcttagattcaaggagggactaaatggaaccaagcaatatttctgttaggttataattaacctatatttcgggtctttaaagttagcattatctcgtctattgatgtcttttggagcagttttacgcttgattttc

SEQ ID NO: 339332 - DNA, 591 bp, Cannabis indica
ttttagctgacgtggttgggtatggtcttgggttaggtaaattggtcggaagttaaatattttccaatttttaaataaaaaaacttgaaagattttaacttgtattttttttagtcatttttttttttgataaaaggcgttaatatcatagatgcataattagttagacctcacggtcattacaaaacagggttcccgggacagagtcaaccggaaggggcccaaaggtctgatgggagaacgcccacctagccacattatgagcggcgaaattacaagatctactaataaaggaaaaacaacaactactaaaagcgtgggatgacttagaacaaaaggagatgtaattatcaattgcccaacgagactctttcccattgatggcgttgataaccacactcgagtcactctccactattacatacttatagccaagatccagagcaactgacaccgccaaagaacaggccgccgcttcaccacacaaaacgtccgagaaattctctcgagcagtacgaacactaattactctgcttagatggtcccttgccactaccgctatgcacatgctgtccaaacccaccttgacat

SEQ ID NO: 339333 - DNA, 1304 bp, Cannabis indica
aattaaaatcgggtcggatgagacctgatccagaaagaaattagatggggtagagcggatctgatccaggattctataagtatccgaatgtttcgaattagaggtgacccatcggattgaatctccagcccgctccaactaaatgaatatttttgacatgcctataaatctcaatgtttacatgttatgttatatgagtgataaaaaaaatcctaacaattgccgcaaaaggttctacttcctgcgtgtgctttatggttagatcttgcattgcaaataatatttaagatgtggtatgtagtgttatagatttcccattaacgcatgccagttacgacaccacgaacacgaagggtgattttatatcgagaggccaggaagagtgattcaaatagaagatcttgataaaatacaagcattattattcaacttcactttgcaaacaattttaaaacaagtaaccacaacttaagctaaaatatgttgtgtttccacaacagaaagtattcattgttcataattttcatgacttaaaaattgatatatatgcattgtatttgtaaagtaaatgtcagtgtgtaaaagatcgggtaggaaagaaaaataataatttagttataaaataatataaaatatataagaaaaaaagaagaagatgaagagaaaaagagaaactgaatgataatttttcagttgcttattctaatctaatgggataaactcttatttatacaaaaatatgactaaaagaacgagaaactaaatcaatgtaataaacgaaaatacaaccaagcattaatagtgatttggatatccataaataatatttcataatataccctttggatgtccataaaaactgtctcattaaaaaccttgctaaaaaacttagtcaaaagaaaatgagtgcagtgtaaactaactccccctcatttaggtattcgtgtgagatcttttaattgacaaattctaatcttgtgagctatcttctcaaatgttgatgttggtaatgactttgtgaataagtctgcaagattgacacttgattgaatttgttgaacaccaatatgtattttcttgaaatgtataaagaagaatttggtgaaatgtgttttaattctatctccttcaatgcaccctccttttaattgagcgatgcaagtagtattatcttcatagagtactacttgttttgatacttctttattgagtgtaatccatatgtttttcgaatatgttatgtcaatgatctcactcccacacattctctacttgcttcataaaatgcaagtatgttaacatga

SEQ ID NO: 339334 - DNA, 537 bp, Cannabis indica
agagcacccgtgagccaagcccagcaagatagtataaaatatcaataacatttttatcatactatataaacattattgccaatctcacatgcttgtatctcacagacctgcatgttaccctcacacgcctatttatgtctacatggcgtagacctacgtgttgcgctcacacgtctaaatacaataaggcctttgaacaattcatctcggttctagttgccgagtccaacctgattatgccttgaacgcataactcttgatctcagtatatgtatatttatcacataattaatggtgccactgcgctatttgtctatttgctatagacctgtgtgttacgctcacacgcctatatatgtttatgtggcataagcctacgtgttgctctcacacgtctatatatgtctatatggtatagacctacgtgttgctctcacacgtctatttacaataaggcttactaaggtttatctcggttataattaccgagtgtggttatgccttgctcgcataaccctattcatatatatttacgta

SEQ ID NO: 339335 - DNA, 1243 bp, Cannabis indica
agtcaatataagtaacgaggattaggctattaccgaactgatcggggctgaacctctataaaatctctgtgtcttattattgttttatcatatatctgttattataagtcatttatcgcttataaaatagacttattgtcattggctaaaagcgaggtcacattttggtgctttcattgagaggaggatcacgagtcgctctttattgaacatccaaccgccaatacgattgtgcaaactcgtagaggcctgactaatccggcaaatttacagacgctggatcctacatcgcagaacctagggagcacaagggttctgcctgctgttaatcctggacagccggcaagcgtgtggaatggtgaaatagttcctatagatggaattgcgcctggtgtggaagagattggaaataacagttccgcaccaaaccagggcattcataatacgactgtttcacctggaaccaatgcccagacgactatcggagatgccactgaattcaaaatctccgtgacgcgctcggactcatgcagggtcataacacaccctgcatcatgatcaagcgaactgcgtgctgcaataatctttcgttcgacaacaaaggcgtatgttcaccgaatggtgagataaagagatggaggcattaagggctcaccatgcagagattgaagatcgtagtcggcaagccaccgtgctgatatgaagagccttccaaactgtaagtcagcagtcgccgagcgtcattcccctgggagaaacggacgaggatccaacgatgaacacttcccatactgcaaatggtcagccgcccaatccacggtcacgagttctgctcgtgggcccagcggtaggcgagcagaccttgtctggtaattcatcaggaggagtcatacctgatggctccaaccagatcaacgatgccattccacccgtcaaccaagcaaatcaattgctaaggcaaccagacacttctgtgttcgaaaggttaggaacaacccatgacctaaggaatgatctaaacagaaggaggggaacaaatgatcagaatgttacgacaatcgtgcagcccggagcccgtactcaaatccctgctcagaaagatgctgacgtaatccaagttgaccagaatgccgagtaaatcagcccagccgtacaggttcagctagacgaactgaaaaatatgtttcacggcatggctagacaaagaaataatgatcttgagttagaccgagcacgcggaact

SEQ ID NO: 339336 - DNA, 706 bp, Cannabis indica
ggcatcgtggaggactaggaatcaagaacctggaagcatggaacaaggctgcaatatgtaagtacatatgggctatttcaaataaacaagagagcttatggcttagatgggtccatagtattaagaaccaggtttggtgggactactctccctccatacactctagttggtattggaagaagatggtagccctcaaagatcaacttagaaatttgatggatcctgatattttttagaagcagaagtataatgtctcagcaggttataaactgttttcacccccattaacccgactgtattggagcaaggaaacatggtcaaggctaaacacccgtaaaaatagtgttatagcttggttggcaatgcttaatagactgaagacccaagataggctgctgcagtttggtattcaggtacaggggacttgcagattgtgtgaattgcagatggaatcttgtcaacacttattttttgagtgcagtgttgctagacagtgtttacaggacttgaagacttggctggactggcatgctcaaaccagcaacctccagcagctcctcaagtggattgggaagtccaaaccgtcaaagtttaagaaaggagtcctctctgctgctgcagtaggactgctgtacaacatatggagagcccgaaatgaagctgtgtggcaaaagacaagagtcaacccgagccgtattgttgaaga

SEQ ID NO: 339337 - DNA, 540 bp, Cannabis indica
atttttgcactctgacgtggcatcacatggtggtgacacatggaatcaacattgagtatctgctgagaagatatagtccgaataggatgcctcgctagcatacccgaagcaaagcgattagcaatccggacagagcaactaactcttagcaaattcagctttcgcattgtgagtcattgaagaaatccctataatttggggatcagattacacagatatggcatacccacgatcccatgatcagtgtattctgcatttatcccacgatcagtgtattccgcatttatcccacgataagtgtattctgctttgatgtggaaatctttttgcttatatccattgtaacgagaagggaaacacttcctctccaagttgacaaccctataaatattgatgcatgttcactgggcaaaaggtcgcaaaaagtttagtcaagactttaccctagagattttatctaagaattcatattcagagatattgttgtaagagctataagaaaaggaaactttttccttattcttaagtcaatacaaatca

SEQ ID NO: 339338 - DNA, 585 bp, Cannabis indica
tttttttcagtagtttattctaatgggtgaactcctatttatacaaaaatatgcctagaataatggaaaactaatcaatgaaataaagagaaatacaatcaagaatttatggtggtaattaatgcattgatatggacatccataataatattttataacaccccccttggatgtccattaaaaatatctcattaaaaactttgtaggaaaaagaaaggagtgtaaattaattcccactcatttagccattcgtggagatattctaatcaacgaattccaatcttacgaaccatcttctcaaatgttgatctcgataatgactttgtgaataagtgtgcatgatttacacttgatttagggcctgtttggcacagcttttggaaaagctaaaagccgattcttgaaaaagctgtgataaaaatgtgtttggtaaacagtcaaaaaatagcttcttaaagaatttttgaagaagctacagctaaaagctgaagctgttctaccccaacttttagaaaaagttattttaattaaaagactataataattacttttgtactaaaaccatatttacttatttattacata

SEQ ID NO: 339339 - DNA, 907 bp, Cannabis indica
tgagttatagggattgagctggtgactcacgttgcgtttagttgaattcgctaagtgttgctcattctgcacggctcgttgagtaatccattctggatatgccagcgaggcatcctgctcggcatgttgatccgaacagatgttctaagtagaatccacgtgtcaccattctcgtgatgccacgtcagagtgccaaatttgggataacatttgccccccaagtctgtacgggacctccgaggttgcgtgtagacttattccgagctggctctgcctttgtatggggacacgtgtcgagtatgatcgtttgagactcgatgtgaagctaactgggcgtcccttcagttttcggctaattaatggtctggcaattaatattttgataatccaaatttctctctccacggctgacggtttcactcaattacttttgatttcccatattcgcttttgaggcgggaagccgaggcgtctaaggttcctttacgtacagttaccctttggcctataaatacttggagtactggcacattacctcatttcatcacccttcattgttaagtaaactttcagagcgaaaagagaaaatattctggcttcagagttgccaaagtgcctacagacgattgctggctagcttcaatccggacattcaaatctttgagtaagtttctggttccctttatgcttttcctttgcatgcttatgctttgaatgtaacttcgttgcagaaagaactctttaggaaaccctagggtttgaaacttctgcgactcttcttttccatatccttgtgttagctttcagccgtaaggcttattttagaactgcattgcgtctgttttccatttcgcttattccaagcttcatgaactttttttttcaccctaactcaagaaaaactttc

SEQ ID NO: 339340 - DNA, 779 bp, Cannabis indica
accgcaatttcagactctaccatggaggctacaaaagaacttgtctggcttagaaagttcttcacaggactcgctgttgttcctggaatggaaaaaccactggttttgatttgtgataacactggagccatagcaaatagtgaagagcctccacgccacaagagaagcaaacacatagaaatgaaataccatatcatcagagagtatgtggcaagaggggatgtactggtggagaaagtggacacaaaggacaacctagctgatccattcaccaaagttttggtaggaactccatttgaaaagcatcgtcagaatataatcaattgaaatgtagtgattgttttatattagtggaagtgggagtttgttgggctttctgccccaaataaaactctatttcaatgtaatctctatcatttgaatatcaataaagagacagaagtattttcatcacttatttaatgtgtcatttggttcatgttatcatttatatgtttatttgatttatatattcatccaaacccttatcgcatttatgttcttgtttattgtgtcgtcaccacagtggaaagtaatcaagattgtgtgattaatatatattcctagatttatcaatacactaggtttaactgatatgataatctacaacatagtttacttacaccttggataagtgctatgtcatttcaaggtcattagttaaagtaaagcttgggttggatgtatgtgttaggttttatgccctaaataaaactccatttcaatgtaatctattttat

SEQ ID NO: 339341 - DNA, 578 bp, Cannabis indica
tacccttgaaggtcatcacgtaaggaatagatggacctttggaaaaatataatgtgcaaaataagagtgacccagacaccagaaaagagaaatctaaacgtgttacgcaaaaactcaaggcgaaaaattcccagaaacttcgaacattaaacccagaaaagcagatgaacagtaaagcatgccattaacacaagcaataaagtgagggatgcgaaaaacttacataaagtgttagaactgggagttgttgttgatcgacgaagaaatgttgactgacagtaacgaatgaaggttaataagaaacctatagtgtttgaaggttttctggtttgatggttttctttctctctggaaaattcgaagaaatttggtgaaaggatgaaagtaaccaaatgaaggaaggatggtggcttttataggccaagatgcatgtggaacaggcgcaatcacctaccaatcgaatggctggggaggcgcacgattcgaattcccaagatccaacggctagattgatttgtaattaaggcggtggaaacgtttgagtatccgtctgacacccattaatgcgccgtatcaat

SEQ ID NO: 339342 - DNA, 611 bp, Cannabis indica
aactaagctacctatttcataactttttatgaaaactaaactgctcacaccactttccaacacatcagctcaccaaggttcttctacgaatcataagttcttctattcacgatcatttctttcttcttacaaacacagttatatggtctaatacacctcatttatctacaaaatacatacaaaaaatcaacctaatcttggtcaccacatatgcccaggattgatcatttttgtaagaagatagatatcatttgctcttgatctttataatatttcacactaataaaaatgcacaactgactgtttgctaccgtagatgtaggcaaatataatttgcttaactatgtaaatttgtgtcttattttatttaaagcaataaatatatatgatatatgtgtatattatttaaagtaacatatatcaatattattaaatgtttggctagaactcctgaacattttagcgactctgcttgtacattaaggtgttgagatgaattgaaatgcacttttagttttatattagtacaagtgggagtttgttggaattttatgttctaaataaaacccatttcaatataattagatttactaattaataattaaaagatc

SEQ ID NO: 339343 - DNA, 923 bp, Cannabis indica
tctggttccatttctggtgccgggtcacgagttgggttctaggttcaagttaaggtttgggtcgagtactaggtgtcggtcctagttctgtttcccatgtccctatcctgattctgggttcaggaatgggttattgtgtgggtttgggtcccggtctaggttcgagtttgagtcctagtctcggttcgcgtttaggtctctgtcttggtttttatctgggttttggtttgggtttagttcctgaacctggtccaagtcctagttcagttctagttccattttcaattctaagttcgagtttgggtttgagttcgggtcgaagttcgagtcatggtctgagtttgggttcgggtttggatttcagtgaaggtctagatcaggctccgaatgcaggttcgcgtcctggatctttgtctagggtgggtacgagtcccaagttccaatcctgatctgagtctggattcagttctgtgtctaagtcccttgttatgatcttggtctgggttcgagtttgggtccgggtccaggtcttgctttgggtctgattctaggtgtgggtttttgagttcgggtccgattttgtgtacgggtttgtgtctacgtctggaccccaatctgagtctaggtccaggtacaagttcgggtctcgagtgcgggtccaagtttgggtctaggtcaggatctcggtctagacctagggccagcattttgatccctatctatttccaagtctgtgtttgggatcaggtcccagatttaggtccaagtccgggtctcagttccggtctgggtacacggccgtgtccgggctcaagttctagtctcagtttgggtatgaggctaggtctgtgtttagttcaaggtctgggtctgtgtcctgttcaagatcctagtcttgttctagggtcctggttcggcgattc

SEQ ID NO: 339344 - DNA, 1119 bp, Cannabis indica
gaatgcggttagcgcggccttaggaggaagaggaaaaaactcagcaccatgtgtactatgtcagcaagtgcatgataggggcggagacacgatacccggtgattgagaaactagttttttgcctcctaatggcctcgagaaagctgagaccttactttcaagctcacccaatcaaagtattaaccaaccacccgctccgacaagtcctacaaaaaccggaggcattcgggagacttctcaaatgggctatggagctaagccaatttgatctacactacattcctcacacctccataaaaggacaagcgttagcagacttcattactgagtgtcacgaggcagaagctaacgtgagcatgcctacaacgcaagtcccggcgttgaaagtatttgtggatggcgcctccaacgagaatggatccggagcaggggtatcgatgatatccctgaacggacttcgactccaggcagccttgcggtttgaattcacaacttctaacaatgaggctgaatatgaagccctgattgcaggactgagattagcaaaagtcgtgggggccaaaagagtggaagtctacagcaattcacaactggtagtaaaccaagtgtcgggagaatatcagacgcacggagaaaatatggctgcatacgtagcaatagtccgggagctgctccacgagtctgcggactacaaagtagaaaggatccccagagaaaagaacgtgcacgcagactgtctggctaagttagcttcagacagtgaaattgagaaactgggggtagtacctgtggaacgccgggcgaagccaagcatcaaagtcaagagcaccatagcaacagttgagcaagagctcggctggatggtccccatcatcaaatacataacggaaggtgagctgccccaagaaaaggcactatccagaagaatacaatatcaagtgcaccgttatgtgatgatggacaacattctctatcgaagaggactcagcatgccgtatttaaggtgtgtatcggaccctgaagctaagcaaattatgttagaggtccatgaggggttctgtggagaccatacaggaggcccaagtctctcaaagaaatattgagacaagggtacttctg

SEQ ID NO: 339345 - DNA, 718 bp, Cannabis indica
aggtttacattatcaatctcagagagatagggaaaagctccagatcgctatcaaggtcattggtaccgagtttctgtcgagacatcccagaacgttatgatttataacgtgtttaatacacgtttactttgccccaataaaagcggactaatcacaactttgtgatattcaaatattaaccgcatttatattacgtgatatgtaattaaaccccacaattttcaggggataattgttgtaaagattttagtcaactctgcaattaactgcatgactatgttattataaatagaggcaagttagactaaaaaagggttgaaaaattcatgagagaaaaggccctagaaaaatatcaaaaatctaataacattgattcgtggactatgtaaaattttaattgtaaaactacgtaaaaaaaccttcgtgttcattcttttcttattatttctttactgttttcattttctgtgcatttttatcactgtttaggatcaaatttggttaacgaaaatctgcgttaacaattattaccgccaaaaattaaacttagatatttatttgcaaccaaagttaaaattaaatatttatactgcaaattactttaaatgttattaatattttttagagatttttacaccatatagtgaaatttctaattttttttactattttactgtggtgcggaattttttaaaaatactgtgtaagttttatattg

SEQ ID NO: 339346 - DNA, 336 bp, Cannabis indica
tatatgtttactttaggcaaatcatacttagagttagattagtagtggtggtccaagaaagaatactcatgtacatttggtataaatttaagtctttgactttaaactttagattccaaatggaaaatttttatttctatttccagaatacaatacagttaaacttttacaagttattaatatccattttctctcaaaggattcaaactgtatgtaagtatggaatttgagtttgatattctgtgactagaatcaacttggactattctaagaactctttgatgtaactgacctaagtcatcgaaagactacaagcacatattttataaatctatg

SEQ ID NO: 339347 - DNA, 1020 bp, Cannabis indica
atttttaatttcataattgtaaagtaaaatagtaaaaaaactccacaaaattaatttagtataagtgattataatttttgtttaatatgggcagtgagcacaaatatctttaggggagttttattttcactttaaaaatttataaatgcactatattttaataatttttattttaaataaaatttatatctgtaattgtattagttttttttttatcaaaattccttcaattcaaattgttaacaaataaatttatcaaaaacaatttaaatattttaataaaaagtaatatgaaattctattataaaaaaataaaaaataaattacataaatttgaaaaataattatgactggtttttttttttaaataattactaaaattaacacaaaaaaattcaaaaaaatattaagagtgatttttaaaaattattttaagtttattttttataaaatattagggtgtacttatactataagaaatgtcactattaccagtacaattccctactgcgctggtaaaagtagtagcgcattttgcaaactatgctcgcaaaaaggtcaaaattttaccaacgcatatttgtagtagctacaatctaactttttccagcgcatttacgcactgagaaaaattatttttgccagcgcttttcattttgtgtagcaaaagttctaataccaacgttgatttgtcaacccctttcgccaacacatgagaagtaaatttcattttaccagcgcttaccaaacttttgccagcacaaaaatatgctggcaaaagtgacatttcttgtagttaatttgtggggtgcaaatgaaatttttcatacttttataataaatgagtccccttaaaagaaaaaatcgtgttgaatacatgtgcggagcacgtgtgcctcccactagtctataactactataaaagtgacaatcgtttttttgggcttccacatattaaattactagaaagtacttctcccccttagtttattatgttgagattgatcatatacaaaatat

SEQ ID NO: 339348 - DNA, 806 bp, Cannabis indica
aaaataccatattttctaacataaggacccaaaaaaaattttttcccctatagcgcactttgtttcagggccggccctgattatagttactatgcgattatatttctagttaatttttgttgttttattatttatttatagttatcgtgaggttaattttttgttatttttcagttatttttttattttttgttgagcaaagtgtgtttttataattttaaaactttacaagcgtatttttgtaattaaaaattttagaccgtaaaattataaataaatcataaaagaagggtatttttgaaaattctccttaagggaatgaattattttataaataccgaaaatgacaaaaaatttacatttttatggatttacaatttttttctttttacttttttatatagatttacaatttattttactattttatttcaactgagaaacgatgagttgtttttttattattttcaaaatacagtagaacctctatttaagaatactctattcaagaataacctctaatttgttataaaaaaatcaagtctcaatttgggccagttataaataagaataacctctaaattgtaattagttatacattctctaagtcccgtattaccaaagtatacctctatataagaataattacatcttaataaaatatatacatgtattttataaatttatttatgtaaaattaataattttattttaaattataatacatgtatgaatattatatttactctaaaatatttctattataatatagtattaatgattatttattgttattattgttacgt

SEQ ID NO: 339349 - DNA, 490 bp, Cannabis indica
ataatctatttttgaatttaaaaatattatggttagaatgtctataagaaaatctaagttaatttcaaaatttatatttatttaatatatcatataagataagaaaaattcaaaatttgtgaaaaaaaatccacaaaaaatcgcattttttggggcaaaacacttggctgcccacgaggaggctgcgtccagcctcctacgcgcgcgcaattgtagagatgcagactcggatgaacaacattttctcagcgcctgcagcatctagatgtgcgcatgcgtgtctgaaccgagggacatgtcgagccttcacacaagatttgtctgagctccgtgcgcgcaaggaccttcttttctgagtacctggtgcgcgtgtgcaccatctcaacacaccttggacccgatttttcaaatcaccataactttgttaatttttatcggaatcaagttccgtaaaaaaaattgcttaatttttcataaggaatccaaataa

SEQ ID NO: 339350 - DNA, 597 bp, Cannabis indica
tttaataaagaaagtatactttattactttctgttctttcaaacattgtaaaaaaaaattatggtcactgataattatttgagctcaagagttatgcttcattaggccaaactatcacaatctacttttcaaggtgattctttttacacgtacgaagaatacattttttcaccattgttaaaaaagataatcgaaataaaaggtgacgttttagtttttttttttttttcttatatatatataaatatttagtgtagaaaatataatcaaattttaaacttaaaacaaaatataccaactaatttcacaagttaccaaagtgtattttattattttatattcaaaagtaactaaattatattctacgttaagatattcaaaataacttatataaagaaactaaatagtatcttagacattgcaaaaaaaaaaaattggtaatgtaagtgattctatgacttttttattattattattggaggagagagaattaaaactcctctttggagatgtgtgaaagtattagattatacttagggcattttacaaaaatactggatttggggtaatacttttcaattttactgccacacggca

SEQ ID NO: 339351 - DNA, 505 bp, Cannabis indica
ttagaaaaaataaaaagaaaaaatggcaacatcagacagtatgcattgcatagtgtccgcgttcacaaggatggggggtatttctcgaacatgtcttgtctgaatggcgtgttgttcgagcatcagccccatgaaatgcaaatccgcacgcacacatgtagggtttaaaccctagccaaattccaaatcttcaaaaaattatatctttttcaattttaatccaaattcaattctataaaaggctaacttgcttattttttagctagctttacaaataaaataatttcagatcgaaaatcaaattattttttatagaaaattttgtaataacataatcaatcatcaaactcacataaaccatcatgaacacatccaaatcaatcaaaaattattttaaatccaaattctatgaaaaaaaatcattaccgtggctctgatacctgttgttggaaatattttaccaagacctaaatttactaacatgtatgttgaattataattctat

SEQ ID NO: 339352 - DNA, 752 bp, Cannabis indica
aaagtaaaaccagtggtttttccattccaggaacaacactaggtcgtgagaagaactttcttagccaaacaagttccttagcaaccttagcggcagttatgtactcagcctccatggtagagtctgatattgcggtttgcttagcgcttctccaaacgactgctccatcccaagagtaaaaaccatcccagatgtagactttcggtcattaagacaagcctggaaatctgagttggtatagcctacgggatttaaaccaccacccttgtagactaacacgtgtaatgtcaatggctcctctagcattactggttttgcttggatgactactactggtaccaggtttttggcaattttctctatggggcactcttctccgtgtcggtggcctcggtggtatttggtacgatagtggactcaagttcaaagctacagcagcaggggcctctgtaccttggtcatctcttacgccatcattgccctcaacataacattcagggtctggaccatcaaaaaaccgtcaatgaagggcatttatgctacaatatcagcactcgacatcatagtgtttaattcttgtaatacattagaaaccaacagatctggatttgtttctggaacaaaactcccaacctcgttgtgattatcctcaacaaaaattggtgtgggacttggatcgacacaaatattcttctttaacaaaatcacaaacaagggagtaaattcatcaggcttcttcgcaagtgtagata

SEQ ID NO: 339353 - DNA, 740 bp, Cannabis indica
tttagaagtataatttagtacatgacaaaattcaagaagcgaaaattctaattaattttttttcatttcaaagataaaattatatattttttttcttaattctttacaataaaacaagtaaaaaataaatatataaagtaaaaaaattctaaaatttaattttatgcataaaaattagttttttttttacatttaaaatccaggatctcatctaaatattactataaacaatcactgaaatagtctaattaaataaaattagacaaaagtctttaaatctaacaatctcaatagttcagggtaaatttttaacggcaaaaaaattaggagcgtgatttagtacttgtcaaaattcaaagaaaaaaatcctaattaacgttttttttatcattataaaaaccgcacaacagtttttcatataatttagtaatttttaggggtgttcgcggtgcgggtggtgcgatttttgactattttttcaaaccaacccgcacatgcggtttttaaaatttttcaaaccgcacccgcaccgcgaaattaaaaacccgcaaaaatcacaccgcaaaaaatagtgcggtactgtgtggttttgtagtttatgcagtttggactatcactaaataattaaactatcacaaatacaataaactttaagcaaaacttgtcaaaataccataagacttgaaaataaatatgaaaaaaaaaattaagtgtcaacaatacaataattagtagacttt

SEQ ID NO: 339354 - DNA, 528 bp, Cannabis indica
aaaacgtgaagcacctcctctattatattcagaactaaaccagcaaaatatttattctttttaacccatgttttcagaacattttttccttttactctttattttttaaaatattagaatctctcaaaaaagttgttttttgcaaagttctttagagtaaaacacttaggtcgaatatgacattttctttcacaaaaatgactaggtggaatcaagtctaccattgttcttacctgctagctgtaactgatatgttagcacaatagagtcaattgatgcaacaactttctgagaagatggaaaagaaatactagaaggcagaattccactagaaacaaagatagttttctttgaattttgagactttgatgctccaaggcccacatgattcctttgacttgaattctgtatatccttaaaaacagaagaatcgggattaaacattcttatatttttttcaattatatttaaatcctttgacaacttactaatttcatcattttttaaattatttctttttcaaaattt

SEQ ID NO: 339355 - DNA, 701 bp, Cannabis indica
ggggccgcgatgcggcgcccgccgttggttcgtcatcagagagggagggaacaatagcgtcatcagtaggggccgcacgagcacgcttcagcatacttctgacggaatcccccacttgggcagtctggcgagtgaaatgagtcctggtgccagcagaagagataggtgggggttggggattggagtcattaataaccaagccaataggtcgagttcgagggggagtagttgatggtagagcaacacctttaccttttgcagtatgggtgacggtggaagttgtcataatcggaggagcaatggtggtggggaaagtctgggaatgaggagatgttggagtagatggaatggtggtagtgttggtgataatacggggggggagagtgaactcgcagaaattgattgacagcatgttggaggctttgatctggtgaagatataggaggaagaaattcctcaaaaggggtagcgttggagatttcgaaaggattcttcttaaacagggactgggtcggagcacgaagagtatcacgatattctaagagtgggggggaagggaagttatcacaacggaggaggtaacgggtgcagcggttataagtatgatcaaggaggccacaaaagtagcagaagttgggaaggctttcatatttgaagctaatccatcttggctcagggatggatctgaaacgaattgtcat

SEQ ID NO: 339356 - DNA, 1112 bp, Cannabis indica
cttatatagattgccattagaagaatgctatagcaacctactaaagtaagttgcttgcactagagtaagtaaattaccaagtataccataagccacaggtttagataaactcaaacctataatactaggaacaagaggttttgttaagtcccttgaatagacttattttaaaaatttcctttcttgtccttgtaatagaaaactttttgttggtccatatgaatgcttttaaccatagttctcttgactttacttcttagatccttattttaacaatccattacctgtttaaactaacaaatccgaatttcatcacaagtgtcttccaagtcataatagggtgagttccttaaaaccctcccactacgacaaggtaccgtgacttgctgtctaacaacagaagtggtattaacatcatcggttgtgtcaagacaagagagcagtgagaccatcttatatcgaataagatgatataacactttggaatcaagaaaaaatatctcctttactttgcttctttattttcagacatagtcatattcttaaaaaaaaaattagtatttattgaaataaacactttctcactgaataaccataggatggtccacccctaatcacttagaatagctatcaaacatgcaaagattaaattaaaagttctaacttttgttaagttcacgataagctcatccatgaatctagtaatggtttacactaagtacataaccattccatcattctgaaattttcctatcactagggtatttccctagaaggacttaggcagttactagtaactaatcataaccttatactatcatcaatatgaaaattgaatttctcgggaggtaagtttgaatacgattaaaaaaaattaacttagtgatctttgaactgcatatccaaatatttctccacccctatcagttcgcaagatcttaaccacttaccttaatatttttcaacattgctagaaattcatgaaatttctcaaccatttcaaatttctttgcataaggtaatatctagagtgatcgtcttaagaatataacaaaaactcatatccacccctgaatatacatccatatttgtgaatatagatgatcctactt

SEQ ID NO: 339357 - DNA, 578 bp, Cannabis indica
taccaattcccaggtccactcagaggagcgggccgcggcatgctccagagcatgccgcggcatctgggtgcagaacccagaaaaccagcaagctcaactcgaattttcagcccaaaactcaatcttttcactccaatttctcaaccaaactttcaaatcaacaagtaaggttgctagcaattattagatgatcaaataaacacatttcatacatcaattctagtaataagcttcaaaaatcagattacctaaaaatcacataaactcccatttcaagcttaaaagctagagttcacaatttagctccaaccacaattctcagcaatcaaatagcataaatactggaattcaaacatgaagaacaccctagattccatccaaagctcacccaaacacaaacccacacaataaaccacaagattcaagtataaacatgcttaaattcacacaagaacactcacatgcaacatcacaacatcatcaacctattccatgcttttaatccataaaattcagcaacaaaactaataaatcaaagctgtaaaactacctcaatattaatccaaaagcaagcttaa

SEQ ID NO: 339358 - DNA, 901 bp, Cannabis indica
aactcaaggctgaggttaagaaccagaagtccgaggtggcgaggatcggagagaaggttaatgtcttagagacagctagttttgagatattttatgacttttggaaggccaatcccaagtaaaactttgattatctgggcacttccaaagacatgtttctcgactactgtgctgctcaggcggcctacaggaaacctgaggcaaccacttccacctctcctgccgatcagagtgttgaggctcgttccacccagaatgatgatcctttggctccttcaaatccagttgacccacacaaagagcctgggactcctgtcatttaattgctttccttttagtatctttttttatgtctgttcggccaataggccttattttaagacaaggtgaccgaccaagcggtctttaaatttggaatatatttttcattttttgaacaactggctgactagacagcctttaatcccaggcttgaatgcttttgttattcttaatgaattcatcctttgtttataatcattgtgcaattgtgttcgttttgttttttaccaaatgctttgtgcaggtataggtgccccccaagtgaccgagcagacttatgactcttggtcacttttttttttacaagtatgcttttttgtctgttcagggtttagggtacgaccaaaccttttgtacgcactggatggtaaatttataacatgctaatgaactcgattcaatttgaatttaaataaacatctttattcatttatcggaaatatgtctgttaccgtagtaacttacatcaaagctattatgttgatctgatttgatctttagcttagcataaacaaaacaaattgcaaaaaataaaaatcgtacttttaaaggtggttatctgacctgagtagataatttt

SEQ ID NO: 339359 - DNA, 604 bp, Cannabis indica
ggggaacccaagcactagtcggctgagatgtgttctcagtgcagatgaagcagtaaatcacacaacaatcgtgcaacctggaacccatgctataattcctgctcagaaagatactgacgtgactcagatcagccaaaatgccgaacaggttattccagctatgcaagcacagctaaacgaactaaagaatatctttgaaggcatggccagacagagaaacaatgatctcgagttgaaccgagcacggggaacccctttctctcccgagatcaatctcctggcgctgccccacaagtttgaaatgccaatctggaagatgtacactggaagagaagatcctctttcccatctcaagtgattcgaaatgcaaatggatctgcagagggtacaaggaaagctttctcctcaagattccatggacaattctcctcctctcgccaacttctgttgcacaattctcctcatggaaagctttctcctcaagattccatgcacaatttgttggaaatattttaccaggatctagatttactaccaagtatgtttcattagcatcctaatatgaattctaaaacaatgacataaacacataagagtttaagaa

SEQ ID NO: 339360 - DNA, 498 bp, Cannabis indica
tattccccttcataccatctccactcttgatacatacttttggcccctcacccctcatggctcgtacacggtcaattcaggttactacctagcccatagccaacttcatcaaaatgaaccttccccctcggatcacaagtcctcaaatgcctggtggaaaattctttggacccttcctttgcctcctaaattgaaacatttcctttggcgtgtctgttatgatatcctccctactagctgaaactattcaacagaaagactctatgctccccctattgcagccgatgtcactatcacgatgagaccctagaacacgctctcttcagatgtcctgctgcccagaaggtatggaaattaactgattttaatacttttatcactgcacactcttcacttaactgtatggacttattatatcttgttgccactgaatttattactggacattatcatctctttgtttgtttgctgtggaagctctggaactgcaggaacatt

SEQ ID NO: 339361 - DNA, 515 bp, Cannabis indica
tagcataggctcaaaaccaattgggtaaaactttaaagatcttgcgaattgataggggtggagagtatatggatatgcagttaaagatcatttaattgaacttgcaattgaatcccaattaactgcccctaccactccacatcacaatggagttgcagaaagaagaaatcacatgcttttggtaatggttaattcgatgcttagctactcaactctacctacgtccttctggggatatgctattcagatggcaactgacatttcaaaggttgttccatttaaatcagtcactaagatacctttagaattatggaatggtcgtatacctaatggaggaacgttcattatcaatttaacgctgtagaatcacgaaagataagtattatttgtaagtattttacttttagtatggatcaccctaatggtggccactattagtaagacttacaaaagtatgaaacaatagtagaagctcataagatagaatggccttgactcaagccttaatgggacaa

SEQ ID NO: 339362 - DNA, 680 bp, Cannabis indica
accatgaagggacactaacctgaactggttgttcctccctatgggtattcaagaagcctgttttaaagggatattcagactcgttaaagataacatttctcgaaatgtagagtcgacctgtgctgcttaagcatctataacccttgtggctatcactgtagccaaggttaacgcatttggttgagtgaaactgaaatttatgtgtttggtaaggccttagacacgggtaacaagctgaaccaaacgccttaagaaatttataatcaggctttctagagtacaccatttcatagggagacacattgtttaacacaggtgtagggagacgatttatgagatacacggtagtttggaaagcgtcccaccaatattttagtggcatgctggcttgtgcaagtattgtgaggcccatttcgacaatatgtcgatgttttctttcagctctaccgttttgagctgaagtatgaggacacggatgagtgaattcaataccattttgaatgacaaaatcagacaggggttggtattctcctccccaatctgtttgaagtcttttaatcttcctattgaactgattttcgactagagctttaaactgaacaaaagcattggtagcatcggatttggctttcattggataaatccatgtgaaccgtgtgtgatcatcaatgaagtgaatg

SEQ ID NO: 339363 - DNA, 1251 bp, Cannabis indica
gtcgcacctagggcaaatttgcctacccctcaagcataactataatggcccaatttttgtattggacattccatcagcctttaacgtcatattaggccgaccagctttgtatgacttaaaggctattacgttgatattccattcatgccttaagttcctgaaaaagaatgaggtagggtgtctaagaggaaaccagcagtttgcttgggaatgttataacgttgccatagccaaggataagaaggaagtatcctctagccagagctcggataagggaaaaaacatttctaagtacggaacttcccaaggcggggataaagatgtggatcctcgacttggggactcaagcagtaatgttggacctgtggaagaactagaagagattgagatcgacccagatattctggccaaaaagcttaaattttgaaaagttttgttggtcgaagtaaaattagcactgataaaatttctgagagcaaacgtggaaattttttcctggtcacataaggatatggtcagaattgatccttctataatttcgcacatcctaaatattgatcccaactatcgaccagttcaaaaaaagcgaaggctgttggacaaggagcgagctctagccctgaaggaagaggtagagaagctatgaaataacaacttcataattgaatctttctacccgaattcggttgctaatcccgtactggcacccaagaggtttgtgtattgatttcacagacctcaagaaggggtgccccaaagactgttttccacttccaagaatcgatcagcttgtggacgcaacaacagggcacgaaatattgagcttcatggacgcctattcagggtacaaccaattcaaaatgcatccaccggaccaagatcatacaagtttccaaacagctttgggtctatattgctataaagtcatgcgatttggtctcaaaaacgttggggcgacattccaaagattggtaaaagaccagatcagacgaaacatggaagtatatgtggatgacatgctcgtcgaatccaggaaggttggggggcacatagatgacctggacgaatgcttcaaagtcctcaagaaatacaacatgaaactcaatcccttaaagtgctcctttggagtcaactctggtaagtttctagtctttattgtcaacgcccgaggatttgaagccaatccagagaagattcaagcccttctggatatgaaattgccaacaagaatgaaggaagtgcaaagcttaa

SEQ ID NO: 339364 - DNA, 583 bp, Cannabis indica
tttaaatttgaaaaaattacacttatataaaattttaaatttttttatgataaatatagcatatttaagtttaactaatttatatggtatttttatttttatttttaagtatttttgtagtatttgatatattatatatatgtaaattagattttcaaatcctatatttaatatttttatttgtttaggtagttttatttgtcactgatgccagaaaaatcactggagtttgctatcggtgccagaaaaatcatcggagtagtggtcagtgctggaaaattcgtcggagttactgtcgacgccgaaaaattcatcagaattggtattgtcggcgaaaaaaattactgaaaaaatcaccaagaaacatgtttcctttcttgaagaagaaatcagtttcttgatgaaagaaccagtttcttgatgaaaaaaaccactttcttagtattttttcggtgataatgccaattctgacgacttttctaacactggcagctactccggcgacttttccagcaccgacaacaaactttagaaaagtcatcataattggtatagtcgccgaaaaaattacaaagaaactggt

SEQ ID NO: 339365 - DNA, 698 bp, Cannabis indica
tttagaaagttcatatttaggttgttaaacaacatacttgtgagtagatctaagatcctggtaaaataatttccaacacaaaagtctatttagaaaatatctatctagataattcataaactaattactaattttccaattaaaataatatattttagtctgtttattttaaataaatcattaatgaaaattacttgatttcagttgatctaaaattaatttaaattaattttcaactcaatctaatttttcaaaatatctacatttaaaataaataaatgcaattcgaaattaggtgggaaatatgattattaaaataaaatcaatgttattttgaaaattattttaatttaagttgagcagaaattgaaaaaaattccaacttgaatgaattttctatttaattaaattcattaaaatagaaataattaagtatgtagaataatttcaacttaattattaattctaatttaatatctatgaaaatattctaatttaagttgatctgaaattgaaaaatttccagcttaaatatagttttgtatttaattcaattcattaaaatataaataattaagtattttgaataaaatcgacttaattattaattctaatttcatatctaagaaaaatatctaatttaagttagtccaaaattaattgacaaattaattttcaacttaaatatattttctaaa

SEQ ID NO: 339366 - DNA, 539 bp, Cannabis indica
caaagcttcctggaagactaccactccactcagcagactattgcgccttcctcctgccctggtcagattctggtccaaccgtcttggtcccccccagctgcaggtcatctcaagctaaatgtggatgcagcagtctccaaggtcaaccggaaagcgggcttcggtggtatcattagaaacagcgaaggcttggtggtagctgccctggcccagcctcacttcggaggaggatcggtctctactctggaagcaaaatccctcctctctatgcttcattggtgccttacagagcattttttggtccacgaggtggaaacggactgcaaagccatcactgatgccctttctcgccatatagaagacatttcggtgtttggtgaccttattcgtcaaatcaagattactttgtctcagttccctgctgctcggctgtctcacgtccgtcgcgaggctaacaccctggctgataaacttgcgcatcgagctctagggttagatgaagtagccatttggattggagatgacccctgtaatcttat

SEQ ID NO: 339367 - DNA, 1485 bp, Cannabis indica
ttttcaactcattctaactcaactttgatcctatggtcttgaatatgtcatagaaaattaattggttctaaatcccagctcgaatctatatcacctgacctatccagcatggtcccataatactcggctatcctatagtaggagttagtacaactaatttgaatgtgggattctgggtaccgactatcgaacctatgtgcaatgcaatctatgaggaagggattccaagtgtagaagttatattggctatctcggaaagacactaatgtggtacgctcaaccttaagcactgtgggtgaccatccacattgattacctcgggatctccttcttcagcttcttgagggactgcattctggaggtagtgcgctcgagccatatagtcctgagattcctcgtcagctgggaccgaaacctgctgccacgacgtatacttgggatatttataatcactagtatacttgttctcagcgaggagacccacacacctcaggttggcctcgttcaaaaggaactcaactgattgaagaccgtagggaagacccatcaagagcctgcgtcgctcggccatttcaggagtaggagttggtcttttcgagaccgctgtcaaaataataaaattacaagtcagcgaggctaaaattaaagacatggaataatttaaaaccaagtttcaggcaaatagtcacttacgtataatacgaaaggcggttgtattgattggggagaggccattcgtccagaagaagtcctctttgaaaggagtcttgtttggcaacccaataatgatcttacgatctcttgtgtgagttccaagataatagaagcctcctgtagcattcttcctcgtagggtctgccttgaccaagtagagatacactatttccaggagagtagggcactcccatcctaaaattttgtagaaaacctttaaacttgcaaggattctatgggaaacaggaaccaactggaatgggacaattttgagatggttaaggaagtccttaaagtaatctcgcaggggaagaattggttcaaccctaatatgctcctatccctgtcaagccgcttgtactcgcctcaccactggtcccctcgggcgcctcgcgagtgagttgttttggtgggtaataactaaactcgctagggctacagatctaacccgacattttcatttttggtcaatgccacaagtccttagaatgctacctacataatctctgatggctcataccctcgactttggaagtcatgatttcaaagtccaggtcacctggtgaaaaagcaattgtgattctgggtaaaataaagggttagccaaaggaatagatgataaactgggaggttcaggccaagtaacatctcgcaagaaatgacatttaccctttgttatttcttgcaagaaacgcctatgacaacaacaatatcatcttggtgggtttttattaggtggtccctaatttttgcatcatttatctctaattt

SEQ ID NO: 339368 - DNA, 576 bp, Cannabis indica
aaggcatatatctggtaccttcaataatcagctccaaacatctttctatgagctccactgctacgtcgcgtcagctctctcagaagaagctgagattcaaatgatgttggctactgaagtttaccttgttaccaagaactgcgattgtcagatggagtgttatgtccttgcacgcagaaatgacgagatttacattatcaacctcggaaagacatgggaaaagctccagctcgctgccagggttattgttgctattgagtgttcaagcacctagcgagatgcccaagcaagatacactttgcagtgtattaatccacatcagcgttgactcattaaaagttgtttaaatcacagatgtaagatattcaaataataactgtatttatttacgtggagtgtaattaaggcccaccattttggggaaatattgttgtggaattcgtatctgaatgtatttaactgccactctatgtcattataaatagaggtagaatgtacagaaagagggacaaaagatccttgagagaaaagaaccctagtttgtataaaaaaaactaaataagattgacttgtgga

SEQ ID NO: 339369 - DNA, 521 bp, Cannabis indica
ttggtagatccgtgtggtttccaagttttctccgcggttataatgtagacactgatcctcaaaaacccttttaatagaaaagaacacttgtctcaatttaatcataatttttggaccttttgtgttgacatgttgttggtgatcaatttcaggagagttggcttctctatcgtccttcttaatgctgcttggggtatatttaaactgttcatgttgtgaatagggaataacaactgattctgctttaatttccatcttggttttttctactacaaattgtggattgggagaagccattaaattggattaacttgacaacctatagtaatgtaccagaacatatgttctttcaatcttttccttggaaaaccgtaaaagcggttactctggcgccaaatgatcgaacaaagggaaaaaggaaaagcggttactaactggactctatcatgggctggcctctggctttggagcctaaagtgcccaccgttttgaagcccaaaacatatagagagatttttttt

SEQ ID NO: 339370 - DNA, 707 bp, Cannabis indica
ttggaggagatttaaagagcttggagagagatgttatccaaccttctcaagtgagtattttacgtggctcttttataactgttaggctatttttagtactaattttaaattaagtttagtatatttttaatttagttctactctgtttggagcaattttacgctttttatcttttattcttggatatttaaaatagaagaagattagaatatatcataggaataagatgaaaaaaaagataaaaaaaaatctcacaaaaagattatatataaaatagagaaaattgtgcaagaaaataaaactgaaacttcaagcctgaattccactatattctaattagattttgaaaaaagtcaaaacataaaagttctagatccctcttttatcttttcgaaacatcttgaatcgtccaattctgagtaatatcgagagagttatggctaaaatactatcagtcgacgcaacagaaagctcacttttcttttctaatcctagacagaataggttttctaatcctaagcagttttttcttcagcaatattttattttattttatcattttttggctataaaataagtggacttcaatagttttacggaaggcaattcagagggaaaaaggagtacgaatttcagagatagaagtcaatactggaagcattctgcagagggttttcaacattatattattctctatcttcttctct

SEQ ID NO: 339371 - DNA, 507 bp, Cannabis indica
tgaaacctcaagaatcatattaatcattggatttaacaaaaaattattgtttttgaaatccaatggataacatttgtccaagtagaaaaagggctacttgttgtcacttttcttttgggattttttcatgtatatattaaagggaaacttataaaaatactgacttttgctccaattttaataaaaatactgtcacacggcaaaaataacttttaaactgtccaggcccattcgtttttcttttatactgtgaatagtaaaatcggacaaacgacgcctccttcttcatcggggacggacagagcaacaccgaaaacctaaaatacactaggaaaaacacccataaattctggcaaagaagaaaaaagagtaaatcgacgacaaatcaagacccaacaactacatttaagccatattcaaaaggaaacaaaagaggtaaatacacctaaaactacaatatttcaattaaaaaaaacaaaaacacacccagatttagatcttgaattc

SEQ ID NO: 339372 - DNA, 631 bp, Cannabis indica
caggcgcggtccgctcatagaggggaatcctgacccactctgtgagaagctccgggtgctccactgctcagaacccggaggagaagaagaagcggtggcgatactccttaacgtgagtttgcctattataagggaccaccccatcattggaagggtgggcccggaatccgtaaaaaccatctttaaatttgtcccccttcttggggacaaaacaagttcataaaaatacaaaatctccgccggactgggagagccccgtccccgggcggagtaaaaaataaataagcctgagagcaggcggtatgcttgtggaatcagttggtatggcgcaaggccgacaaaaactaaaaaattaataaagtagtcttgaagaggaagcaaggcgacatcaggtgcgtctggctccaagcctcgaagccgccgtagttgtggttgggcgtctccgcatctcggggcggccggtgatacgtcccggatgttgagggttggattccgggccacctctatgatgttctccagctggtgggggcaggttagggtggaatgaagctcagccgcctcccttccggtggcccgtgacttatacccctcctggggcaacacgaccccagtgagacatcttcaagggtag

SEQ ID NO: 339373 - DNA, 531 bp, Cannabis indica
ggaccccgatctgggtctaggtttagatccaggtccacgttcgggtcccgagtgcgggtccaagtttgtgtctggctcaggatctcgatccagatctagctcgaatgtggatccctatctaggtccaagtctatgtttgggatccctatctaggtccaagtctatgtttgggatctcgtcctagatttaggtccaagtccgggtctcaattccggtctgggtacacgaccgtgtccgggaaaaagttccagtctcagtttgggtctgaggcgaggtctttgttcggttctacttctgggtcaaagtcctggtcacggtcctagtcttgttttattgtcctggttcggcgatgctaattcaggttctaattttgggtcccacgtctaggtctgggtttgagtttggttcttcgtctaggttctggtcctagtctcagtcccagaatctagataccgaatactggtgtgttcgagcttctgttacccgaatcccgagtcaagatctggatcactgtcacgggtctcggtctgg

SEQ ID NO: 339374 - DNA, 1093 bp, Cannabis indica
tgaaaccgcggatagattttctacttatcgtttgctgatcgggcaatgatagtgacatatgtagcttggtggttaacgagtggtaagagttacttatgaattaccgaaattgtgtggttacgatgttgtaaaatgaatcaagagtgttattatgtgataagttgttattgagtacattttgttaaggtatgattgaatgaatgttatattgcttgtgaagttggtcacttttcttgtaatcttagtggcctagggatgtaagaatacatgattataatgatccatgattagagttgtttatgaagctctaaaattgaatggatatgctaatgtgtgaactagagtgctttatgaagcattgaaagtaagtgtttacaatactatatgattagggtgttttatgaaacactgaggttgatggttatgtataactataaatactcttaattttgtaacaagtttgctcgtatagacgctgaattgtatatgtatgttgaaagagaaggatctcttggtatgtataatctgtggtactataatttgttatcattttccataatttgctttatctagtagcttttcttgctaagtcactgtgactcacaggtgcttcttggtgcaggtaagaagattagcaattttgttcggccatgggtcagaggtctcccagcaatgtacatatcaaccgtgttgtcttggctttcgtgaagcaggatcaacccttttctatgaaataacgtataacctattcttgtactaatggatttgtaattagttaagaattttattaagcaagggatcgccatattacgacagtattttaaaatgaaagtcttatgttgaatttaattaaaggttttaattataccacacttttccaaaatttattgatttgtaataataagtttataaaagcacacacgtggcgtcccggaaagtcagggcgttacatatagccagcccaaaacaactcctggcaactcagcacgcaggccggtgaggtgaacatgtacattgctggagaagattgccacctcatggtggatctagcttttctttgcctttacctgcaccacatagcacccgtgagtca

SEQ ID NO: 339375 - DNA, 698 bp, Cannabis indica
aagttccttatggaacaaacggttaggtcacatctttagaaatacagttgagcgacttgtgtttgatggaatcttggattcaattaatttttcagactttgatgtttgcattgaatgcatgaaaggaaacaagccaaaataaagaaattgggttcgaaaagagctatatggatgtcttagaattgatacatttggacatttgcaggctatttcctacaccttcttagaatggtcaacaataatttgtatcattcgtagatgattactcaggatatgcataactatttctactcactactacaaattaggcttttagtgacactatatagtgacatgcataaaagtgtgggtcactaaaaaattaagagtaagttttagtgacacacactgttagactctaaatatttggtacttatcactcgaaatgtgggtcactaaaaatatagtgtcactaaatattaaaacccaaaatttataattttataaaaataaaaaaaaaacatggccaatatagacgtgccacgcgtgtgagcaaatctatttaccaatgcgttatgcgtgtcactaaaaccacgtgatttttcacgtggctttagcgacacgcaaaacgcattggcaaacagatttgctcacacgcatagcgtgtcaccatacacccttttattttaaaaaataataattaataaccagccctaatt

SEQ ID NO: 339376 - DNA, 811 bp, Cannabis indica
atgtcgtcgataaatacaataacgcaaatatcgaggaaatccttgaataccctattcatcaaatccataaaagatgcatgagcattgataagtccaaaagacataacccgaaattcataatgtccatactagtgcagaaagctgtctttgggatattctcctctcggattctcagctgatgatagcctgatcggagatcaatctttgaaaagacagtcttcccttgaagttgatcaaaaagatcgtcgatcctaggtaaaggatatttattcttgattgttagcttatttaattctcggtagtcaatgcgcaaagatccatccttcttcttaacaaacaatactggagctccccagggtgacacactgggccgagaaaaccctatgtcaagcaacccctggagtgtaattttcaattctttaagttctactggagccattatataaggcgctttagaaattgattctgctccaggtgctaagttaatttcaaaatcaatctctctctgaggtgataaacccggaagttcgtcgggaaaaatatctagaaattctcgaaccaccttgatgtcttctggccgaagaaagtcaggccgaatggtatccaataccacggccaggaaccctaagcattcctctcgtaacaattgtctagttgttagtactgaaattattgggatccgagatcccagaaccgaaccgacgaagacaaacggttcttcaccttcaggctggaagattaccatcttcctcttatagtcaatattggctgagtacttggacaaaaaatccattcccagtataatatcaaa

SEQ ID NO: 339377 - DNA, 503 bp, Cannabis indica
ttttcttgattccaaattgttctatcatcttattctaaataggatggtctcacagcctctgttgtcttgacacaacagaagaggacaataccattagtgttcttagacagaaagtcagggtaccttgtcgtagtaagatggtttcaaggaactcaccctcttatgacttggaagacacttgtgataaaatccattgttagtttaaataagtaatggattgtcagaataaagaactacgaagcaaagccaagagaactatagttaaaccatttatatggagttaataaaatttttctattacaatgacaagaaaagaaattttgataattaagtctaatcaatggacttaacaaaacttccttttccaagtattataggtttaacattatctaaacatatggcttatggtatacctggttatttaattactctagtgcaagcaacatactttagtaagatgctagagcatttttctaatggcaatctatagaagcttctcgact

SEQ ID NO: 339378 - DNA, 792 bp, Cannabis indica
cttttttggcaatttagatgccaaaatatttttattttatggtgagatttatttgcattcgtaactgattttctcacctttaatatttagttttattgctcttttctttcttacgaaagactgattttcagccgttctcttgtatggaaacttcttgtaagagaagaaattctcttatgaaaagttggtttttaaaggaaactttgactattattattttccttaatattttcgattatgtcttgatacaatcagattatacacactgtttatggtaggtatcaagacccaatacaagatcggactcgtttatgacaagttttcttttctggtctgatttgttgcatcagaatccgtttttgatgcagcaaatcatgtttttcttaggaatgtttagtacagctgcagatttgaccttgtggctatctctaaggtttctatgttctataaatagaacctagagagcagccattcgaatcaactcttctatttttcaattcttgcatttttcttatttgtgagaagagagttctttttgtgagaacctagttgttcatctaggttctagtgtttttcatatctgttcttactctgtcttagggttgttagaacaacttgactgaacaatagagtggtcttcggtaaaagacttgttcaagccttacttcgggaggaagtaagcacgcacacttcaaagacgaagggagttcgctgttggaggtgtttcaaaatcagattcatgaagtgcattacaaaggattgcgacaataatttagagggagtctaaacttg

SEQ ID NO: 339379 - DNA, 771 bp, Cannabis indica
gtgcgaaaagagggtaagcaccagcaacctaattactatgtaagtaaaaagatactaggggtagaatccaggtatccccttctagaaaaactcgccttatgcctagtccatgcgtgtcgcaaactacatccatatttccaggctcagccataagagtgttaacctatcagccttgagacaagttttatcaaaaccaaatgcttctggaaaattgataaaatggtcgattgaactggagcagttcgatataacatacttgttggaatttattttaacaagatctagatttactaacaagtatgtttttaacatcctaaacatgaacttctgaaacgatatgaaataaacacatataaagtttcagaaaccttacagtgggtgcagcaaaattataatggctcattccgctcagatctctaactcttgtatcatttctgtagcagagtatcaccaagatttcagtccgattctccttctcttgaatttgcattattcacagccttacacactatgattgagtaccactttatgtgtgtgggcacttactctaattactctagggtttctcttttgaagagagaaagagagagaggatttcaaaataggtatagaagagttggctcaaattttactgaaggaaagtgttggcatcatcttttcctttaaggccatcactacctatttataggaaaccacctagggttaggttagatttatttgacattaaaataatgaaaaaaataaaataaaatggtaaattgctccttaagt

SEQ ID NO: 339380 - DNA, 488 bp, Cannabis indica
aattaataaataaaccccaaaacctcttttcttcacaattaagcccttacttagtaaaaattcataaataagacatagtctaattttagaattataattgattaactgagcctgcaagcaatattatctcaactagtgaggagagcatgacctatataaccgagctttcaataagtagatctagaattcaccaagtaaattccgtaacttattaattaatttcgccttgcaccattatagatttggaattgaatagcactctcaattatatagaatgctctatatgcaccatgatatatagatacgttatgattatccattgttacaatcctgatagtcaaagatcctctatagatgatctacactgaatagggataaatatactgttctacccttcaatgtattttatccttaaaacacttagccacctataaatgatacttcagtaaactaatataattactgttgctccagaattcgcccaaaat

SEQ ID NO: 339381 - DNA, 712 bp, Cannabis indica
ccaatctgagtcaggattcagttacgggtctaagtccttggctctgaacctggtttgggttcgagttttggtccgggtccgggtctagctttgggtctgattctatgtgtgggtttgagttcgggtccgagtttgtgtccgggtttgtgtccaggtctgcacccaaatttgtctgggtcttggtccgagtccagcttcatatctgaatccctatctaggtccaagtctgtgttttggatcaggtccctgatttacgtccaggtatggtctcagcttcggtctgggtacacgaccgtgtccgagctcgagttccagtcacagtttaggtctgagacaaggtttgtgttcggttctaggtcttcgtcaaggtcctggtcacggtcctcttctttttctagggtcctggtttggcgattcttgtttaggttcttattttgtgtcccaggtctaggtctgggttcgggttttgttttttgtttgggttcttgtccgagcctaactcccagatcgagacaccgactactgaactgttccaggccccgttacccaaatcttgagtcaagatctgggccactgtcacgggctttggtatggttcttgttaaggtcccaagtcccatttctgagtttgggtacgggatcgagactggggcgcagttctaggtcccgacactggttttgtgtccgtagtctggtgccatgtttgggtctga

SEQ ID NO: 339382 - DNA, 870 bp, Cannabis indica
taattaaagagagagacaaagggagaaaataccatatacaaatagatatagcttattaatgctaatcatgattgataaaagagaatcatgcagtcgtaacaagtgatcctattagtaaagcctcattctttccactaaactaaacaagattttccacataatatcgtgaacaaagacaaatatgcaatgaaataagtaaatgtgaactaaaatgggctcactgtcatatttattggcatgcactctatatcgcaagcatggtcaaatattacccaaatcaaatcaaaatcatgtttgacgacttcaatggcagaggaagatggagatcgtagacgaccggaagcaacagacccaaaacaaatttgctcttttttttttatatgtgtatatatatcttctatgaataggtttcaatacaatgggttttgggggattttaatgggttgttctagtttagttttgggccttgttcttgaatttttttaattttgcatttttttttccctttattcacttcttgctgccttgttcttgaattgttattactattttatcaagtcttgcatgcctcaaaagtgttaagaggacacattgctcatattcagcaaaggtcgatgttctttcggaaaaaaaaaatagaggtcgatggtttgagagactataaggaacgacaacaacaatggtagatatatctttttaaattttttcatatttgtaaagattataaatctaaacttttaattttcttgatttgagattttgaattgttctgatttatttgtttatgaatttattgaaatacttgaatatttatttgttctgattttgaattgttctgatttattcatacttgaatatttatattgatga

SEQ ID NO: 339383 - DNA, 1376 bp, Cannabis indica
gtggtaaccaaacccgaaggagagaaagaaatccaggttcagatcttgataatgctctactacagaaaggaatcaagggctagagatcttgaactgaaggagtcatattcttccactgcaatcaatgtaagattttcttaacccttatgtgtttattttattattttagagaatttatatttaggatgttagttcaacatacttgttagtaaatctagatcctagtaaaatattcccaacaaaggcctccgttcaacgcgtgaatttctattcaggttgaccgacacacttgaatcaggaaacgagataagattagtagagaacatattatatatatgaatatgtgtatgtatgtaattgcataaagttatgaattgatattatagcggcacaaccatcgtgtcgggtcagtagtacgagcatagtaataggtttgactgacattcaattttagaaagtattaattggcgctatcatagcagtatgagtatagtactaggtcggcagtataggtatagtacttgttaagagtgatattatggctaattgtacttttgggtatttttgatgctatcatcacggtataaacataatacttggcttgcagtgcaatcatagtgctggtagcgactgatatcatggacaatagtaccaaatgttaagaatgttcttacttatctgataagtcttgtggatatgtgtataggtggctagatacaagtcggtaatatattttatgttacatgtttttcttactgagtctgttgactcacagattctactttcgtgtgtaggtaaaggaaaggcgaaggctgaataagtgtgagttctgagctcagatgatgattgtatatgtcgagatggtgtgacctggagtgttcggtctcaagacatcttgggctgtattttatagtcactgtgcgacaaggttgtcaaagtattttgatatagattgtaaaagttcaaacacgagattccgatttatgtaattatgtatatatatttataaagtttaatagttttaaattaaatttaatttgatatactttctgagaaaaccctttgattagcaaaggtgacacattaattagaaaatcactatagcgcgcctaagtatcagggtgttacatagaaagtcaatgaagttactaatgcatctggaaaattctctgaaattggcatcgtccccagaaaaagttaccaaaaagtcgtcagaattatcatcgtcaccggagtttgatgctagagtcgccaccggagttagacgttggaatctgtctcacagaaatcaattacagttattagctaattagaaatctgaacaatgaaaccaatttcttaaaataactaaaaaaacttaaacctcaattatattt

SEQ ID NO: 339384 - DNA, 1226 bp, Cannabis indica
gattccttgtgaaaaattaagaaactttggtttttacggaactagattccaataaaaattgagaaagttattgtgttttataaaaccgggtctaaggtgtcgagcatggctcaatcgcacgcacaggagcactcggacaaggtgctcgtgcacgagcgtttgggagacaaaaccttgtctgaaactcgggtgcacctgcctttggacacaaccaggctgcatcctacccgtgtaaaccttgcaagtgtcgatgtttgccacacaaaggaccctgcaaagtccttctcccgcacgcgtcctggctgcatgcagcctgtcttgggcagccttggtgctttgcaccaaaattcgatttttgggggattttttccaccaattttgaatttttttgattttcaaaccacaaatatcaatataaaatattatttttaatatttaaatctaaataccaatattttaaattaatagtttttaattttaatagattattattaatttttgatatttcaaggtttaaatttaaaagtgattattttatattttaaattatggtcagattttaaaaaatttgttcatttgttaatatttatatattatttaattataagattaaatattttaatattggatatattttaaattaaaagataacattatcaatattatattaaaattattttatatgacaacttaaataattaaattaacctagatattttttttatagatatcttaaccataatatttttaaattcataaatttgttatttagtgaatattttattatttatgaattataagtttgaaaaataatattttatatcattttacttatcaaaaatttataaataatgctataaataattaaacaacctagaaacttttgtagaaatttaaaaaaggctatttaagatattttgacatataatttggaatattatcattttttattattttattcttaatataataattgtttaacaatatttattttaaaattagcttattttgttattttaattttattaaattataagattagaaaacgatattgtttacccaaattttagcgacgatgacatgtcaagagtagcaacacgtggcacaaaaataccgagactaaattaatgaagaatatgtaaagtcatgaccattaatcatgaagagtggtctgagcgtacagtcacccttacccctagcttaagtaaggtgggcatctccgagaa

SEQ ID NO: 339385 - DNA, 1150 bp, Cannabis indica
agtagagacacctctgcttggattgaggctaggcttgatcggacgatggttaattttgcatggttgactcgctatcctgaagctaagttatttaatttggaggtttatccttcaaatcatactccattgttttttaatatcttgcaccatcttaaagctgctggggggaaaaatttttgtttcgaaaattattagattcggttccaagagtgcgaggcagtcattagagacagttggagccgttcgtgtggggttcaaatgcatcagaaaattcaccaatgtggtcaggatttgcaagtttgggggactggcattactggtaatttttcggcaagaattaagcaatgtaacaaagagcttaaagtgcttaaacgaaggcgtgacagagaggggaaacaaatgtatgcggataccaagcagcagctttttgaaactctaaaccagcgggaaatcttttagcgacaacgttcgaagcaattgtggctccaaaatggtgatcagaacagtaagtttttccattccaaggcatcgtctcgtaggtgtaataataatattgtttgtctgaaagatgctatgggaacttctaagtattgggataccagtttgggggatttaatgcttgattatttctccaatattttttttggtcgaacttggtagttgggaagaagtgttgagttgtgttactcccaaggttaatgaggagcaaaataattttttaatcagaccaattgaagatcaagaagttaaagatcctttgttccaaatgcatccggataaatcaccggggcctgatggaatgaaccaaaagttttttcaaaaatactggcacattgttggttcagatgtgatagcttgtgtacagaatttctttacgactgaagagatgcctgatggtttgaacgacactaatattgtgttaatcccaaagaagaaaaaccctgatcaaatgagtgagttaagacctatttctctctgtaatattgttgctaaagttatcactaaagtgctggctaatagattaaaaggtttactcactggtatcatttttctgaaccaaagtgcttttattccacgaaggttgatcacagataatattatggtgtcttttgagatccttcatgtggtttatgtgcttatttgatgatag

SEQ ID NO: 339386 - DNA, 759 bp, Cannabis indica
caagggatgtactttaagatgcccaagtgatattttgacatcacttagtaagtttttgtgttttggcgaagctggttatcagttctcggagatgttgttgttctacaaaaatgagagacttgaaactctttattttcgagtgagttggaaataagaaatgcaaagttgtgaattttacttctctgacttcatagatctttgttattgtgaaaaaccagaattgaataagcagaacccagcacatcaggttatttgtaaccttaggggctaggtacttactcccgagctcccaggattttgtttttcgtacttccaaggcttctaaacttgagacaagcctatcccatttttgaccattccaaagtcaatggttgcatcagatttggtatttgagcaattgaaggcagcgttgtaggctgattgtcacccttgtcactaggcccaacaccaggtcaacctgggcactgggccctatttccaagggctcaggattgtggtttttttctcgagcttgcttgaatctttattattttttatgacagaaaaaatgctcggaagattttttgctgaacttggtcagaaacagcctaggttgacaatatgtcaacctgggcgctgggtcccccttttggcctttggaaaatttcatttgctccccaaaaatagttgaatctcaatactttttaaaaacaaagaagatgcttgggagtgttctaaaaaaactttaattaaaatggcccaggttgacgaaatgtcaac

SEQ ID NO: 339387 - DNA, 475 bp, Cannabis indica
gataaagcaaatcacagattgaaattaataaaccaaaaaaaaaaaagaaaaagaaaaacaaaacaaaaagctcaccttgactactacgctagattccatgagttgaagggtgatcctatgaatgcacagaaaataagtgatgatgatatataataatatatagtacagataacctttgttataattttgaatatgttgtaacaataatatccttcatttgtgcttttttgaatttaaaataatatgtaatgttattttaatagcaattatcgtttttttttttttttggataatatagcaaattatatttttctttaataaataacaaactaatttttttatatatattttgctagcaattttttttaatatgaattaacaaattaatctttattatttgaaaatcaacgagagtttgtaatcctcaactgctcgtacatttttttcttcttcatttgatcgacaagtggaggta

SEQ ID NO: 339388 - DNA, 747 bp, Cannabis indica
ataagtgggagcgctaatcatagatacataatttatagcttctataatgacatagaagtggaatgatgatttcctttgagcttagcttaacagagataaatggaagagctcttatttcatgaataatattagtttactaaaatatcatttataggaagttaagtgttttaaggataaagtacattgaagggtagaacgatagatttgtccccactcgatgtaaattatctatagaagatctttgattatttggattataacaatagataattaatagcgtatctatatttggaacatgtagagcgttatatgtaattaggagtacaattccgaatccatagtggagtaagagagttgtagtatctcggaaaataatatagtatttaattgggcatattttattgttcttgttgttaacatgtagcaaacatcagatttatacggccccactgtcggttgattaatttttgaggtcaacaatgtacattatgatttaaaatgacatagtttctcgtaaacttttatatttatatgaatctagtcattctgttatattctgtctcattattccatttatatgttgacaagtctttgtaaattagctactttgctctcctaaactttgataactatcgaatcgaacctcctcaaaacgaaaataaaaaaaaaaattagtattttttagtaaattttaaaatgttaatttagatcttaaaaatcatttgaatcattaagaaaattaaaaaa

SEQ ID NO: 339389 - DNA, 697 bp, Cannabis indica
tattttcaggtttggcgaccctagaaacccgattggaggccaaaaatgtcataacgattttagttagaaatattgatgagattatttggataagttgattttagaaatatcgggatattttgtggtacacgaagttggccaaataccctaaaactagaagtttcttaatggctacgaaataataagataactattaataataaagtgtttattaatattattattaatattatattattattattatattatttatatatataagttaatgttaagtttatttatatatattgttgacctcgcttttagccaatgacactgtgtctaattttgtaagcaacaagtagtttaatacgaatgaaatgtaataaaacgaacaaagacacaagaattttatagaggttcagccccgagcagttcgataataggctaatcctcgttatttgtattgacttaagagcaaggaaaaaggttccttttcttagagctcttacaacagtatctctgaatatgaattcttagacaaaatctctcgaccccttgtctagtgaatatgaatcactatttatagggctataagcttaaagaggaagtatttcccgtctagttacaattgatataagcagaaagattgcatagtaaatacagaatacactaaatcgtgggatttggatagcttgccatatctttgtaatct

SEQ ID NO: 339390 - DNA, 1482 bp, Cannabis indica
caaccatataatcaaatttggccgccattgaaaaaaatattatcaaataaacttacacacatctaagactcatgtatgcatcactacatataatatttttttaaaaagaaaagaatatcacaaaatactcaattttgattctattatatcaaatatattgattattattgatttctctccaagagtagaattgatattaattaaattatttgtgatctttattcttttgaatataaattattttttgaatttttatattatttgtggctttgatatcacaactaggggtaggcaacatccaatccaatccaattaatttttattgatttttttgttgaattcataacacttggttattttgtgtatttatttccatgatgttttgttctattttattacttagaaatattgttattttaattatttgaaatttttcgttgcattacattgtaacgatagtatgtttgtggagtattgaactttaataaagggtgatatttaattttttatgtatttttcttgatatttttatgttaatattaaattttaggtgtgtaattgaatatcgaatcaaaaaaatcgatctaatccaattagtaattgttaacacaaatttttgttaaccaataatgagccttttgtgtaataaatataacacagatatatatatatatgaagattaataaagtataataattataataataacattaggtattttacgtggttttgcagttaaatttgcatactccacgagtctatcttatttcaaatatttctgagtatttgatacaatatacaattagtaatcttttttctcaaagtttttctgtccccattttttgtagatactgctcctatttataggaatataggttggtaggtatttacatttaaatttgaaatacataactgttttctgaaacgtgggaattgatcacatttcatttaaccacgtgtggataacaattgataaacgcataacttcttatcattcttatctttacaaagggttgatgctaatttggacaacactatgtcgctttgcctatagatgatcaatgctgacttggttgatcatatgccttccagcaatggcatgagcaccagtgtactgagcaaacttaagaactgctctttgaccataaggcatcgcagattggacaatcatgtcctgcatatttccaagttgatacacttagttattataatgtggaaaatacactaagtgtttaacaatagattcgtcttgttaatattctctaatgtatagcgaggtggatgcccgctatatattgttcgtgatttattcggataacttcacttattcttttggattttgtccttgaatctgcgtcttctgagacaggatggtgtctcatcaatacatgaattaataatttgtgtatccttgtctcgcctaagactatacagtcagcgagttatgaatatactctaataattctatatttaatgagttat

SEQ ID NO: 339391 - DNA, 616 bp, Cannabis indica
attaaaaaaatgttaccaaacggtaccttaataattaaatattttattaagaacaatctcaaaaaatacaacctattttgttaaatatctatttcataagattcaaattttgatatattgaacattcataaaacaaattggattgatgatcgatgaatcaaaaaataaaatcaattttatttttcataatttacaactaggaaacaaaccgcgcttcgtgtgtggttattttttatttagtgataattaagttatataacgatcttagaataattttagattgttacatcactgtctcactttttcattttaaaaattaaaattgataaataaaattatttaaatattatattttgatcaatatatgtctaaaaaaatattttcaagattgtatttgatcaaaatattaaaattatttataagtaaaatttatatttattgaaaaaattgtgttttaaataaaaaatttaactattttgaatcctaatttttagcccttattcttttagagtctttattttatacatatatatatatactagcaaaaaactacgtgcgaggcacatatactaaattaattatgctagttttttttatgttatttgaaagtgataca

SEQ ID NO: 339392 - DNA, 798 bp, Cannabis indica
tatgtatcataatttaaatccatattaaattattattagtgctctaataaagattatcattatgtatttgtatgctatattttatatatctgtcatcgattagatatatttcttgtatggttcgctgtccataaactgtgttcaccacttttattgggtttattttgacagctacacctatgacatctaaaaattgaatgtaatgttagttaaaactttgtaaatgatttgttatgtgttatattgtggagatctgaagttaccttgtggtttgttggagtatttgtcagatgacaagttcttaaacgcaacgaattcatggactggtttagaaatttatttgccttcttcttggacttcaacaagttgtgagcgtctagccataatggtaatttgtgtcagttttaaggtattttgtaagtgttttgttgacacgggcatcactgatgtagtaggtgtgtaactcatgcaaagtgtcttccaaagcatcaatatcttctgcgaaaaattactgcatcgactctcatttcctgtgtaaagtttatcattaagacatgcaacaagattttgaattagataaatattaaattaaaaattgtctagcactgtgtaactaatattattgttaaaaagaggaatgagtctacatttggatcaaataaaaatagcttttgatatacttgttcgtggtggagatttatgttgaattgttatttttattttccatccaatagtggttggagtgatgtcatctactgattagtgtagagtcggcatctgatatgctcatttaataat

SEQ ID NO: 339393 - DNA, 1143 bp, Cannabis indica
gattgaatattataattacaatatttagtttgattttcaagaaaatttctttgattaacaaagatagcactgtaattaaaaaatcactatagcgcgcctaagtattacagcgttacaactttggtatcatagccgctaagtttgtttaccaaagatctccaagacatatacaatcatcatcagagaaaagctcggctcacagttcagtaagcctttacttgtttagtattgtatttgattattaaagtatattaggaagcatagtagtttataattgctcattttaatgtgttgccttaaaattcataagatcggcattaagttttgtgatcgctgtttgacttttctaacttatggtttgcagactaagtcctattaaatagatgctcagtgaaatacaaggagtcagggtaatagggtcgagacaggaggcaatcaaggaaatcaaattccctagaatccccgtggatgcggcagaggccgtggaaggttccagggtggtcgacataaaaatccacctcaagctcctctagattgggagtagagatttgtggaaatgcaagatcatatccgctagcaagatgaagaaattttgagattaaggcagcagggtcctcctgcagtgcctccaccgcgagctcatcccgctttggttcctgtgttgccagcagaacaacctgttgctgacaaccgtatggagccactgtacgagaggttttgcaagcaggcacctccagtttttctggaaggtccggatgtaatgaaggttgagcagtggctcacggtggtagagagaatttttaatttcatgggggtcattggaaatgatagggtgacctgtgctacttttcagttccaggaagacgcgcttgtgtgataggaattagtgtccctcacccgagacatcactatcatgacctggaaagagttccgagatttattcaactccaagtgttacaacgaggcagtgtgtagtgctaagcggaaacaatttaccgagctggtgcagagtgagggtatgtcagtaacatagtacacaacaaaatttgatggtctggccaagttggctttgggtattgtgcctacggactttagcaagaaggagaaatatctggcaggtttaaatgcaaaaattagacacga

SEQ ID NO: 339394 - DNA, 1062 bp, Cannabis indica
gtccgggcagtcctcccgctgcaaagggagaggaagaggttggacccccttacttcggggagtacaatgaggctgggcagccagtcgatccagacagagatgtcttggttgagggtgtggactacgtcagtgaggagctaactgaggtggttcctcataggaggcagggtgcctccggcgccaggtgggtaagtcctccgtccaagatttcggaggcacgcccccaaactctcgaccaggacgggtacctgtgcgagctggactgctatattcccgcccaggacaaccgcgccacaaatcctgataagggaatgtgcgcctggtcgggggctcatggtcagcaagggcgctgatgcccttgcataagtactttagggatgtggcgaacttctttggcctctgcccggcccatattactccaaagagctttaagtacttgtctgtcctcttcgtcctctacgcttccaaaggatgggatgctcgttcccccaacgagattgccttgtttttcgacctgaagtctacccccaagcaaggcaggttgcggtatttctacttctcccagccaggcttcaagtggttgagcgacacggaccacaaggctagcaacaaaatagggcgttttgttgatgcgtacttcatagtgaaagatccgaacatcacccggactcggtttcagcagattccgacatatcaccgtcctcccctcacccttgctcttagggatagagctcggaaacgtaaccggttgccggaggaagataggaatatcatccagttgacctccgatgataatctggtgaagtatgggctttacccagaggacttttcttctaagtccgtggtggggaagaaggtgaagtctgatgctggccggcctgaacgagctcataaggaggatgagctcattcaacttaagcgggaggctaagttgaaaggacgtgccagggccaaacagtacgctcaggagcccttgaatcctaaagatgaagccgagactaaggctgaggctgggcaggtgaccccattgaagaggaagaagaaactcccggccacgcccag

SEQ ID NO: 339395 - DNA, 1540 bp, Cannabis indica
aaatcagtgagcaattgactatctaactgtgtgccattatctgggactatcttgtacgggagtctaactggcatattatttttttcaccacgaactctagcactttcttggatgtaattgttgccaatggctcagctttcgtccatttagtgaaataatccactgcaaccattgcatattgtactccccctttaaatttcggcaatttctgattagattaattccccaaatagccaatggccaaggactttgcatctgagttagtttgttgggcagtgcacggggtatcattaaaaatatttggcatttctcacatttcttaacataggcttttgaatcttcagtcatagttggccagaaatatccttgccttagtattttctttgataggcattgttgtgtggttgctatagaatccatcgtgtacctcagacaaaagtcatgcagcttcttcttgtgtaacacatccgagtagtggcatggagaatccccttctgtacattactccttctacgatgatataccgtgcatcctttctcctcatctatcgagcttcatttctgttacttggaagttccctagtattgaggtaggctactattggtgtcatccagtttggagttgtgtcaatcatttcaatttcttccgcacaggtgatgatgggttcttcaaggaattggattgggatatgattagccttatcagctatattgttgcttgcaagtcgggctaaggcattagcagttatattttcttcttttagaatttgcttgagattgtagctcttgaattgtgtaagtaggtcatgtattttgcttagataggctatcatttttcccccgagcctcgtactctccagacacatgatttactaccaactgtaagtgactgcagatctcgatgtgttcaacatgtagttctcgagcaagttttagatcgacaatgagggcttcgtactctgcttcattgttggatgctctgaacccaaatttggccgccctgtgtaggtgttgccccccaagcgtgacaagggcaatccatacaccagacagttgatctgtagccgacccatctacgtgtaattttcaggtaggtttgtcttaattgttgctcgactaaggttcttgtactggctttgggttaccttttgaaatgctttcttctttgcccgtacactcaactacaaagtttgctaaagcctgtcctttgattattgttcagggttgtaagattatctcgtattgacccaattccattacccaattgagtaaccgtccagaagcatcaagcttttgtaatatttggtgtaatggttggtcaatgtatactcgaataggatgagcttgaaagtaaggcctcaacttccttgttgccaagattagacagtaagtaagcttttctatcaacggatatcatccttcagcttcaacaagtcttttgctgatgtaatagacatgatgctggacattgttttcttccctcatcagcacgacactcacagcatgttctgtagcagctaggtatattcctagttcttctc

SEQ ID NO: 339396 - DNA, 522 bp, Cannabis indica
atacaatgacaacatcaccttcattggaaatgtattagtctctttctcattttcttcccttgattctactctctttttaatattctgcaatctcttattaagcgacctgacttgctacaatgataacacttgatatcttttcaagacttggatcttcttctagaacaatgctttctagaaccatgctgatttctagtctgacttcatccccgcctatcatgcttttcaattacaagagccccagatgaagaagaagattcaccttgtactttccttctggcctcttaattaagcaaacgatctttgactaaatccatagtcaaagtctctttttgcgtagaattagaaattgtcatcaccaatatttcccaactgtcaagtaaagaactaaggagtaatgatgcttgcatctcatcatccatattcatcttcatgacaactaactagtctgcaagactctgaaattgacttgtatgctcaaccatactaccaccatccttgtactttaaatttagcattctt

SEQ ID NO: 339397 - DNA, 780 bp, Cannabis indica
agaagaggcccaaatagtggcctttggggatactaccctactgggatagcggggtatgtacccggagcccagctcccgggaactttacaagcagttgctccaccgatgagcggcatacaattttctgctaccccaggatatagtcagggtcaggccttagcccctgcatcttctcattttggaatccttctgggataagtggacaagtcccgtctcactccgctccaaccggaagcttagcaagtccctctcaaggctctcggagcaagaggtcctcaaaaggcagcaaccggacagaggataagcgacagaaaagggggtacactccccagtacacccagtacacggagctaacggactcccaagagcgtgtgtatttcgctactaggcaaactacgcactaccagagaccacctcctttgcacagggatagctcctgaaggtatcccaacaaaaggtgcgagtatcacaacgacattggacatagcaccaatgaatgcaaaaacctcaaggacgagatcaaaaacttgatccgattgggacatctttacgcatggatgaagaaccagttgcctcacctcaatccggtccaggcagcaagacctttgccacaaggagcaccacggggtgtagccggagcattggcaccagtcgctcccccaggagaaacccagcaaattcctggcctgccatcgagacccaacggaagagtagccatgatctccggaggaccccacatcggaggaactacccgaaaggaactgaaacgttacgcagggg

SEQ ID NO: 339398 - DNA, 687 bp, Cannabis indica
gaccctagaacaagactaggaccgtgaccaggacccagacccagacctagtgccgaacacacacctagcctcaaacccaaactaaaactggaactcaaacccggacacgatcgtgtacccagaccggaactgagacacggacctggacctagatttggaacccggtcccaaacacagacttggacctcgatagggattcagatatgaacttggactcagaccaagacccaaactgggatggaaaggctggacctagatctggattgagatcctgacccagacccaaacttggacccgtactcgcgacccaaacttagacctcgacccgaacctagacccagatcgggattcagacctggacacaaacctggacacagtcttggacccgaactcaaacacccacaccatgaatcagacccaaagctagactcggacccggacccaaactcaaacccataccaggatcagagccaaggacttagacccagaactgaatccaaactcagatcgggattggaacttgggactcggacccaacctagacaaagagataggacgcgaacccacatcaaaatccttagctggacctagactgaaatccggaccaaaacccaaacacagaccaggactcgaactccgacccaaactcaaacctaaactcgaactcagaatcgcaaatggaactag

SEQ ID NO: 339399 - DNA, 1167 bp, Cannabis indica
atcattagacaaggatattattaaccaacaatcaacaaggacaccgatgagtttgtcaagaaatgtgataagtgttagagattttcacatataccttgcgtaccaccaacggaacttaggatgatgaccttgccttagccatttgctatatggggcattaatctaattggggcacttcccacacagcgagggggagccaagtacgcagtggtagcagtcgatttcttcactaaatggattgaagttgaacctcttgtctccataacctgcaaaatagtcctcaactttgttgtcaaaaacattgtctgcatgttcaaaattcctatcaagacagtatctgacaacgaaactcagttcgatggtaacttgttcactgagttctgcgagaggaataaaataattaaaagcttcttgtcagtgtccactcctcaggtgaatggacaagtggatgttgttaacaaaaccttgaaggctactatcaagaagaagctagatgctggcaaaagtagatgggtcgacgagctacctcaagtactttcggcccacagaactattgaaaaatcagcaacgggacacactccattcgcgctagcatttggctcagaagtaatgttacctatggaagtgaacatatcaactcatagacaagagttttatgatcaaaaagaaaaccaagaactcctcaaaatgtccttggatctgcttgaggaaaaacgaactgagtcgcaagtcgctaatgcagcgtatcaacaccgagtaacaagataattcaacaaaaggaacaagaagaggctattcaacgttggagacttggtgttaagataagtatctgctaatacgagagatgcgtctgcgagattattcaatccgaactgggagggtccttatgtgattgaagcgatagtaggaaccggggtttacaaattggctcaaccaaatggctcgctaataaaaaactactggaacgtggaacatttgcgaccctactaccagtaaattaatgattgtaactcgcattgcggaagtaatgttttgaacttcaattgtgaataaagttaatcatttcttttttcaagtaattacaaagtgttactctttaaaattacttaaggggtataggtgtatgattaaccgaaatttatctagaaatacatgatatagtgcaaa

SEQ ID NO: 339400 - DNA, 566 bp, Cannabis indica
atcatgtatgttgtagttatttagaattacttataaatttttatataaattttaaatagtttacattgtcaaaaataaggtttaaacaattatttaacacaaatataataaaagtaattacacttataataaaatatttgaactttatttttgatattatagactgttcgaaactttctagaaaatttactaaggatcctaaataattacaacacacaattacgaaataaaaaaatgattaaaaaactctcatggtgattgccaaaaaagatggagggtgtaccgtaggagctatactatatactccatgatttatttcagatgtctttgtggtaaaggtgaaaagacaataatgtaaaaaaggagaatttcaggatgtatacatcctaagtatgtacatttttgaaagagaaaaaaggattaaatggcctattcattcaaaaccccatctatctctcaagctttccccttttagggctgaacattttgagcgggtttgacccgaaccgagcaacccacccgaacccgaactggtgaacccgccaaaaaaaacgtttaaaaagttt

SEQ ID NO: 339401 - DNA, 501 bp, Cannabis indica
aagaagtgcgacaagtgccagagattttaaaagttaccaagagctctgcccaacaagctaacatagatgcaaagtccttggccctttgccatttggggaactgacctaatcgggcaattacctaaaagtaaaggtggtgtgcagtacgcagtggtagcagtcgactactttactaagtggtttgaagccgaactacttaccacaattacatcaaagaaagttcaagactttatagtgaagaacattatatgtcggttcagactaccgtacaaaatagtgtcggaaaatggcaaacagtacgacagccaatctttcactgatttttgtgcgaaccatgttatcatcaaaaattcctatggtcatatcgtacaacggaaaaaacagcaaccggtcagacaccatttgcaatggcatacggttatgaagttatgctgcccatagaactcgagccaccctcccacagaagattgacgtacgatcaaggtaccaatcacatactcc

SEQ ID NO: 339402 - DNA, 507 bp, Cannabis indica
ccgcaagtcatgtgtcatcgcttgaacattgaccccgaggtgcgaggtgtcggcaaaagcgccgcaaaatggaccccgcgaggtaccaagcgttaaaagaagaagtcgatcgcctccttgcttgcggctttatacgggagtcgttttaccccaactggtcacgaactcttgagtttcatggacgcatactcgggatataatcaaatcccgatgtatgaaccagaccaggagcatacctcgtttatacgggtgtcgttttaccccaactggtcaggaactcttgagtttcatgccttttggtttaataaacgtaggtgcgacttatcaaaggctagtgaacatgatgttcgcagatgtcattggaaaaaccatggaggtatatgttgacgatatgctcgtaaaatctcaacatgcgaaggatcatattgcccacttacagaccatgtttgatatattacgacggtataagatgcgtttaaatccactgaaatgcgtctttggagttgg

SEQ ID NO: 339403 - DNA, 717 bp, Cannabis indica
ttatatttaaattataaaaaaaataatgtgtggaattcataattaaatctccacataataaactaaatttataatataaatattataatattattaaaataatgaaaaatatttacgtgtatctgataatacacaatatatatatcgtgcattatagcatagacggtaaaatactacaaaattttatggctcgttggagttatatgcacactaaatttatctttacaattgcctttagtatttatatctagtaatgtaatttgtgcgtgtcgtgctgcctcaacttatatttttcattctttacaaaatacagattgtgttgggcagtgccataaataaatatagtttgtttcgtgttgtgccaataatttttaagggtagacccgacaaggcccatagacttgatatttttcgtgttggtctcagattcctcctcgtatctatatttaataatgtaaatttgtgcctatcataatattttttaataattttgattatagacctataatattcagttatatatataagttggctgctaaatccttccaagtatcattttaattggacattactcttaaaatttaaattttggtagtagaaaataatcatgatcatatgctacaaattatttttgggttttgtgccctaaataaaacctatttaaatataatcagatttacttattaataaatatcagaaataacattttatgttgca

SEQ ID NO: 339404 - DNA, 687 bp, Cannabis indica
atggggtgaaaaggtcctatgtagaattcccaatttgccccacatgcaataggaaacatcttggggagtgtaagatgaagtcaggggtgtgctacaattgcgggcagccaggccatctgaagaaaaattgcccaaagggacaaaagaaggagaaccaagccgctcctgctcgagtgtttgctctcaccagaggagaagcggccacaagcaacactgttgtctcaggtcaggtttctatttacggattgccttgtaatgttctctttgattctggagctactcattcttatatagctactagggtaattgatagtatagataagccatgtgacctacttagatgtggtattgtgacggaattaccctcgggagaaaccatgctatcaacaagaagaatgcgagatgtacctatcataatcgaaagcaaagaactcatgggcgacctaatagagctggaaatgaaggaatatgatgttatacttgggatggattggctatctagtcacggtgcgacaatcaattgccgaaagaaactggtcgtttttgaaacaaaggctggggatcggtttattttcaagggcgacaagctggccctgaggactccattaatctcttccctaaaagctagtcagctaatgaaggcggggtgtctggcattcttggtcagcgtagtggatcgagcaatag

SEQ ID NO: 339405 - DNA, 739 bp, Cannabis indica
tggtttgtttctacaaaactgcgtctgcagtacagaacattctgctgctacagactgttacaactatgtttttactaaaatttagcatacttattagcatttacaaaaatacggtttatcaaaatacaaacaaaataaaaatccgaaaaatagcagattttattccagttttcattgtggctttctctttgaaaacttctcccacgatcaaaaccattttttatccaaaaaaaaaagtaattttgtccatcttcctcaactgccttcctccatcatctgaccaagttttttccaattttttttttctttttactgttatgtaaatggccattactcagtcttcattccccatcaccacctgttgttgaagatgatgattcagactttgctctgtctaccaaaaaaagtgattgtcaccatgttaagaagaaattgaaggttaatgttgttggaaacatttccctctttgaagttaagaaagggtagaagcaagttgatgagagtctgaaagtttttgtctagtttatttatcgttttgccctaacattgccctaacttttcttattacttgtttctttaggaggcaataatcatatttattctatttttaaatatctctaaggattataatttttttttcttacaaaagtaccgattattttttaatttttaaatgattgattaattgtaccaccgagtgtgtggtgtaattggctggaatgctttgcataaggttcct

SEQ ID NO: 339406 - DNA, 922 bp, Cannabis indica
ttaaattaaaatttctatttagacttatctaaattggtagttttaattaaataaataaatagattaaaataaatattagatgaaaatacactttaaataatgagctttattataaggatattctgtaacgccctaatgctaaggcacgttacagtgctttttcaattacagtgttaactttgttaatcaaagattttttctcaaaaatcgggtcaaattaaaaattttataataaatattaaactttataatttacataataatttataaacatcgagatcctgattttaaacttttatacaaaatatgccaaaatataacatccaggtcgcacggcgactacaaaataaaatctccagatgccccgagaccgaacactccaggtcacgctgccacgataagtacaatcccatcctagccaggctcactcctgttcagctttcgcctttcctttacctacacatggaagcataactgtgagttgacagacttagtaagaaaagcatataacatatcacataataccgtcttgtaactaggcacccatacacctatctacaaggcttaacagatgagtaagaacgttcaatactagggtatagccactataccacatacactacgtacctcactatacgagtgttggtagggcttgtttcgtaccctgagtaccactgagtgataaaccacacacctagtacattcccatacttgtgctggtatcactgtattgtagtcatagacaatatacactataccaatacactctgtaccataacttgtactagtgttggtagtgcaactaaaccttaagcatgcatatacacataacagatacatacactcagttattaatatcacacattatatatagttcttaccttctttccaaattcaagtgtgcttgccgacctgaacggaa

SEQ ID NO: 339407 - DNA, 737 bp, Cannabis indica
ggaaacccaaccttcaactaaaagttctgccatagacaactgaaactacaataccttaagaaacagggaatcacccaaccaaggctctaaaatggacacaaattgatgaaatggattgtttgggaaaccagtcccagaaccggttaaccagttttacaggacttggcaaaccgattaacctgtttgcaccaggtttcctcaaacaatccaaaacctgctcaaaacatgtccaaatctcaccaaactttcgagaacacctgtaatacatcaaccaacatattccaagcaacagaacccaaaaaaacacatcaaatcaaaaagtgccatggatgaaccaagcttgagttttcaagctcaaacttgtgcatccatcacaccaaaaccccaaaccagcaaccaaacatcaaaaccaactcaaattaaacttagaaattgaattacacttcactcaaaccataacaaccactaaattaccaattagcatagaaaaactaaacttgagcttgaataactaagaaataaacactagggcatacctctacttaatttccccccttgattctattgggctttgtgccctaaataaaactctatttcaatgtaatcttttctattcagttatcaataaagaaacatatttaatttcattacttgtttaatgtgttatttggttcatgtgatcatttatttacttatttgattaataaattcatccaaacccttatcacattgatatt

SEQ ID NO: 339408 - DNA, 563 bp, Cannabis indica
taactgtaagttaaaatattacatcagcaatgtgagtaacatcatttatttattggttgtagggtcgtaaatgttccatgttccagtagttctttattagcaacccattaagtcaagtcaatttgtaaactttaattccaactactgcttcgataacatatcgaccctcctgcagatgcatctcttgtgtttgcaaatactcgccttagcaccaagtctccattattgaatagtctcttcttaactcttttgttgaagtatcttgtaactcggtgttgatacgctgcattcgtgatttgagactcaactcatttttcatcaagcagatccaaggacaattttagaagttattggtaatcttctttattataaaactctcgtttgtgagtcgatatgttcacttcaacaggaaacattacttccgagcaaaatgctagcaagaaagaagtatgtcccattgccattttctgggtagttctgtgagcccagagtacttgaggtaactcgtcgacccacctgcctttggcagcgtctaacttcttcttgatagtattctttaaggt

SEQ ID NO: 339409 - DNA, 842 bp, Cannabis indica
tatgtatcatttattgtacatgtgtaaatcatatttcattttgttgcagatcattgactgtttttctatactaatgaacaagtacgaacgtgatagtcgattagctgaccaacctcgtgtttggtacatgcccactcgcatctcggtaattgctttgctgtacaacttattttaaattttgtaattcttcagtttggttgtaatttctgttacttgacaagatgaacaatgcttttgcagcaaaaaactctcggttcgtttaatgtgaagaggattgcgaaagaccgggaatggtcaaaactgttttacgaagacaacttccaaaaatgcgtcaaggtacttcatcatatacacatggtcgttcttaattgtaattttgaaaactgagatatgttagcgatgcatattggtcattgtagtgtcgaatatctatatggtctgtaatttcaatttatttttgactttattgttcctctattcaattgtagatgtttgtgccggtgttgactctagaaggtgcaccacattggtttggtgccgaagttaatatgaagtccaaggttgtctcatttctggactccctacacaccgcaatgcatgagaagtatcgtgtggacgctacgaaagaaatggtaaacttgcaaagtttcattgtttgatgtgaactcattcttcattgaatctaactaattgtatacgtttgcagttgtcgacgttggaccttttgtttgaggagaataggtcgaagaatgtgactttcgtggatttcggaattgacaggaaagatcgcgggcttcctcaacaagacaatgatcgagattgcggtgtatacgtcatgaagt

SEQ ID NO: 339410 - DNA, 436 bp, Cannabis indica
tagattatcatatcagttaaatcttgtgtactgataaatctaagaatatatattcaatgacacaatcttgattactttctactgtgctgacgacacaataaacagaatatcaatgtgataagggtttggatgaatttataaatcaaataaacatatatatgataacatgaaccaaatgacacactaaataagtgatgaaaatacttctgtctctttattgataattaaatgataaagattacattgaaatagagttttatttagggcacaaagcccaacaaggtgatccccttgaccgatcaagttcaaggtctgaaggtttcgtatcggctatgccttagatcatttccctgagttggtccaattgtgcttacacagaaggatctgttgctttggggacttgattaactgaccctccttggggaggtagtagatt

SEQ ID NO: 339411 - DNA, 823 bp, Cannabis indica
tcaaagaagagctcgagaccagttgtctccaaggcattgaccttctccttcaacctgtccacctcggccgaaagctccccctccttcgcatccttctcctccttcatccgaagaagaactactcgcagagaagtcctctcatcttgaagactgatacctcagcagataagatctcgatggtctcctcaaaacggtcagcaacctcgagatcctaagtcagcacagagatcttcttctcagcagcaaacagcttcttgttggcctctcccaacaccaaccgaacaactccggcttctgccctggcttcttcaccttccttcttggccaagtccgcctccgccttcaaggtatcggacagagccgcgttcttggaagcaacagacttagcccgggagtaagtgtaggccaacttcagaccggcctgcacagagaaaaaactttagcatattgagctaagtgtggaaagttaaagggaagtatcaaaaaagacttaccctggtgagctccttcaagactccgcccaccagcacatccaaagacgagtcattgttagcaccatttcagacccagttgttggtggtccagagtccttggactttgcagttttggggatagaggggtttgcagcagttagctcctcggaaagatcaataacctccccggaagttctcctttcctttgaagaggactcctcaccgcccttagacttcttggccggaggagaggcgctagagcttccgcccaatctcttcctcagagcatcgatcatctgccgagacatgtctgcacagaacaaaaatagtatggttagaagacagccatc

SEQ ID NO: 339412 - DNA, 626 bp, Cannabis indica
ggttgccattccctacgctggggcgtccttccactatttctaccacgatcaccattattgtttctagagtttcctccaccactgcgccttagacggacattgtgggagtcatcgcgtcccatatgatggctgggtaagacttgctcatcaaccgggggtggtcgattattattgcagggaaccctgttggaggggtgaatcctagtcctttcttggttccttgggcgctcttcaggtccataaaccaccctctccctctggttccctggggtagggacctcccgagggtaggtttgaggtacctgttgattgttggcatcagtacccatcccttgagtgttttggttgaagtagcttcgtattaagtcggcagcctcttgggtgcgacgatcttggtcgtcttgatgcctcctcacctcccgagcgtgatcttccagccaagattggaattctctcctttgattagcaagactttcaatcatggcctctcgagcttggttttgctcttggtgtacagtttgaaactagccttgcatctggcatatcgcatctcgcatttgatccatctcggggtcaattccgtcgatgtcaacatggggttcattccgcggcgtaaagatgccagg

SEQ ID NO: 339413 - DNA, 729 bp, Cannabis indica
tttgaatcagtttcaatgatatttcctccatggtcacgcgccatctaatcaatcacaaagctatcattcccactaacaatagaaacatctacattgattttaatcatcttttcaacaagtaacatccaatgctcgctacttctagtagaggaagaggtagaatcccctacactagtgtcaattttttgagcatctttctattgattaagataagcaattgtagatgaaacaactctattagcaacaaaaattttactttgtcaaattaacccattacgagcacgccacaaagcccaatcattgtcacttgactagctttggccttcaaaaaaacaatcaaaacattagaaaatcaggatacattgtccttagaatcgaagcatcagagttttgagattaattgttagttggggtgttcatcaaaccgctcgcaccgcacaaaccgcccgcaccgtataaaaattacggtttgaaatcttttgcggtacggttgcggtttgtattttttccaaatcgcgcggtgcagtgcagtttgtggttttgaatttgataattgtgattcaaaccgcactgtgctatatattggaaagttaccaatttttacaatataatttttattcttttttcatattagagaaaatatatgtatacattagagacaatttaatataataactacttaatgattagtacgttaaaactttaataagatttttttttgtattgtta

SEQ ID NO: 339414 - DNA, 1202 bp, Cannabis indica
tgcccacgacttgagctttcaaccattgataaaagactttcacattttcacaccaattcattcatggcaaactaaatggaccaacaaatcagcaccactctatgaatgttagaaaacacttggacaaagcacgccacattaaatcattcgtcttgggaggaaccttaagctgccaaagcttctgccaaaaatcaaaattcgtatcagtaagactcacaccctccatacgttgtaataattgataaacactacttacttaataatcaccaattttctcataaaaccaataccaagaatcactggaagtcgtttggctcaaagacattcccgaaatcacaacaacttcatccaaattaaacaaatctctaaccacttcttcatcccaacgacgacacccaacttggaacaagctagataccataaacttaaagctctccaaccccggaacaacaaaaggacaaaacgatttctccaaaggaaaccacgagtctatagtaatactaacagaagagaataacaagtgacaaaacattttatcttttaacacttaaaactattcgaaattttctataattacaacttagataattaagaagaaaaaaaattgtactaaaaagcccactagggtatgaagagataattacataagacgttatttttttataaaaatattatattattacgtttaatgaattttttttatatatttttacagtttcccgtaaaaacaacacgaaaacaacaagaaaattacataaaagtaacataaaaataacatcaaaacaattacaaaaaataacatacctataacaaaaaatcaacaacaaattaacatgaatacaagataaaaaaactgtattttctgtaaataaaataaaaaaaaatcataaaaatgtttaaaattctcgtgaatccgtatctttgtaatttttttattatttttgtgtatttgtgaaattatcctaaaaagaaaatacaatttcaagctttgaaatcttattttcattctacacctttttgtcatgccctttttccctctctcaaacatacccttctccttttcattttctctgatatattttctctttttcattattttcctctcagccaaacataaccccaaaccaaacccaaagtaactcaagtgtcagctggtacgacttttttcgtttaacaaaaaactatagtcttataaattaata

SEQ ID NO: 339415 - DNA, 1005 bp, Cannabis indica
aaagagttttatttagggcataaaacccaacaaacatacctaattaaaaaaatttaacaattttaaaaatacatatatatcacattcaaatgacacaaagcaatagctaaaaaaaatttcttgaagatcaaaatttcaaacttcatttcaaaaattaaagaaaaaatacattacctaattaataaaattaaacataaatgtattgcacttaacatcaccttattgaacctaattaaaaagaaaattaattttacgtgcattacacgtaacatcaacctagtataataaataagtatatatagttttagtataaataaattcattatagtcttttaaaataattttttctaaaagttgggttgtgccaactttagcttttagttgtaacttttccataaattattcaaaaagttatttttttgactgcttaccaacacatttttatcataactttttaaaaaactatcttttagttttttcaaaagttgtgccaaccgggctctttgtctattccttgctattagtttgataaataagataggcttatttgatacttttctgacattggtatgtactgttaaaagtgattattgagcactgtttcgagctcggggtttgggccaagaatcagcttcttctggatcttctcgatcgtgaaagcttctttggggccttaatctctctctaaagataaaaaattttatttggaaagcaagcttgaattttttaccgtcttatgcaaatttgattcatcatctcctgaatgcttctaaggtatgtctcatttatttttgtaataattgagactactattcatgcactttagttatgctacacacttaagtcaattcgttctgaatggttattaaaatcacagttaagtgcctcaatggactgtccacgtgtacacacttgtacacgtgtcaaatttttagtggtccacgtaatattaattttaaaaataattataaatatttaaaataattaaaaaattagatttttttt

SEQ ID NO: 339416 - DNA, 940 bp, Cannabis indica
ggtttcgagagttatcaaatttgacctcacacctttacaaggctaaacttgttgcgacttgcttctctgcgacctaaccgactgagagggcgcaccttccttttaccgatccagcaattattcccacagaggatgtggtaatctcaatacccattctccgatgtggggtatcagtcccttttcatccctttattgcggccatcctcaaacgttataatgtgtcccctttccagctaacccccaacagttatcgcacaacccttgctttttatgcgatgtatatggagtatgtacatagggctcccacagtagaagagtttagctacttctatgatataaaaagcgtaggtcttcacaatggtttttactgctttagcaagtgggcgacttctgagattaacggggtagaaagcattttttcttggttttcgcagatagaccagctcgccctgcactcgacaactgtagagagacagctgaaattctcgggggccttcctgtacaagatcgcgactcgcaattattgtgtacgatggctaaactatgagaacacaaactgatccctgagaacgcgagtctctggagagagtcggtggataaggaaccttctgaaaagcaacacgagcgaattgataaacgtctttccaagcaaactcctcgaccatcatcaagtagcttatcgcatacataaactagggcgttagaatttcatccttattagtattaacccttattttttctttgtaactgcagaaatgactttcttgaagtcctctcctattcttaaccgcaagctgaagcctgggacagcagcgacttcccctatcacttctcagaagaggaaaagcgatgtggtggttactcctgtcgtagattcttccaagaggcctgctaagggcattcaagagaaagggaagaaagtcgtgatcgacccagcggt

SEQ ID NO: 339417 - DNA, 601 bp, Cannabis indica
aaaccctagcagagcctaatcattattactataactacattttattgaatttccaatttttcttcttctttttttataatatttcctctactatttatcctaattaatcctaattaagaagtgtcaactcaaaataataataatatgaaaggaattaaagtcccattattaaaaagtcccaaattttggacataattttaacttgtgttttattttacttattaagtttattatcacaatcttatagagtacgtgctatatgggcctaggttaagatgataccgggcctaagttgggctgcaagttttgggataacaatatatatgtgctttgttatggcctagattaagatgatacccactaattatagaatagaaataaatttcctaattcctatatatcatactaaacaaaagtgtatgtttatatataaaattttaaagatttaaaatgatatgatatatctatttcatgaagtggagttacatgcttatatggctttttctcaaatttatcttatttttttattttttttttacagaaattttaaattgttaatgcttttatgttttttttctttttaatttttcaattattttac

SEQ ID NO: 339418 - DNA, 545 bp, Cannabis indica
tgggtgcagcggaataatgtgtctccttccactcagatttataacccttgaatcctttctgttgcaaagtataatcaagatctgagtccgaatgtccttctctaggatttgatccttcgcagtcttccaaactatgattgaggtactgtttgctgtgtgtgggcactactctctcacaaggatttcgaaattgtatctctctagtatgtgtgttgttcaagaagaagaagagatgggcggctatatatagagaaaagggaaggctcaattttctgaaagaggcagtttcctgaattactgaacaattccttaactgccttatttggtgtgagccatcactttccatttatagataactgctaggtttatgttagtaattatttggcattaaaaaaatgaaaataataattagaaaatacacatacaagtggccggctatgggtgttattgggcctcacttggattttgcagtttccacaattttatttctattttcccaaaaatgccaattttccaattctaaccatttaaatgccaaaactaat

SEQ ID NO: 339419 - DNA, 576 bp, Cannabis indica
aacacggtggtctgccgagttcagtcgtcaatggctacatattgagcccttaacatttctatatccttgtccctccattcagcgaacatgcacctctgctcttcaaatgtgagatttactgcggcgtagagttcttcctgatcatgatgcaaggtgttggtatgaccttgcatgactctaagagcagcatggaggttttggatttcggtgtcatctccaatagttatttgaatattggttacaggcagaatgaccgtgttaggaatgccctggtttgctgctgaattggtatttccagtctcttgcacaccaggcacgattccactcacaggagttgtcacaccgtgacctacgatcgagggttgttcgggatttgtggttgacggaaccctcgtgttccccgggttctgcagtgcaggatccaccgcctgtggatttgccggatcaaccacgcctctacgagtctgtaccaccatcgtacttgtgattagatttgagaacgatctttggttcagctctcaatgaaagcaccaaaatgttgacctcgcttttagccaacgatagtgagtctaattt

SEQ ID NO: 339420 - DNA, 766 bp, Cannabis indica
ttgagaaatattaaaggccatctttaatgccactttaaaatttaaatatgatgcaatttttttagtaaaaatctttaattgaactgtaaaaatattattactttagtggaaatctacagtgtaagaattatatttttgaaaaattttaacgagtgaatcaaagaattaaatgaccacaaataggagttcatgtattcattcttagaattcagattaatttactaatgattattgttgtgatatgaataattctttcatggtaaacgacaagttaatgaaagatatttattacatatcggtgcagtcatgcataatcgaattatacacaacaacttcactatatgtccatgtacatatgcgatctgaatcaaatataatgtatagtaactcgcacttattaacagtttcatattaaagattcccattactttaattatactactgacttgttttattcatatcatataattttatttctcttgtacgttcttacaagattatacatttttcatatgaataagtaattttagtatatttaataattataccattataattatgggatattggcggctaaaccccccaaacttttgggtttgtgacagttaaccaccaaaactcaaattttggcggctaaactacctgaactccacttccgttttgttctgcacacctccgtccaagaatcacagttaagtgccacggtggactgtccacgtgtacacacttgtacacgtggcaagtttttagtggcccacgtaatatt

SEQ ID NO: 339421 - DNA, 1013 bp, Cannabis indica
catgtcctcttatgggcgttccctgacgcttttcccatgatgcattaaatgcgaggtgactgttcgaataggctcttcttctcctgaagatgccttaccatattcctagctcccgaagaggaagggcatgcttcttgtacttctctgagggctcactccccgaactacacttattcttctgtatacgactcttacctaattccgggtgaggtgtccttttgttccacatgtcttacgtagccgtggccatgtattttgggaaaaacccgaggcaacacatacaatatggagcaaaaataacaaagagaatcaaaaactaaaaactagagagaaaaaaggaaacgaaaaaattaaagagacaaaaacgcaataaaaattgttagaattttgggataagatgaatggggttccaactcaaaaccaattggcaatgggaggagtagcccattcatcttatatatgaaaatttatttccacgcattagcaatgtgggactaactctaatacaccctcctcacgtttgggcgtggaaagtgtgggtataactaacgacctttaagagaccacgaggtcgaacgtgacatttgaaagaatttctgaaggccaaatatcgagaaatttgtgggtgtacacgtcaaaaaatttgtgaattttgaaacaggtcaaagacccaacactggaaactggcaaacattggcagataggtcccaaatggaggttaaaggggagacagcggaagtgtctgtttggaccggcagcactttggctcacaacggactacaaatggatttttggaccagtggaactttgggctcacaacaaatcacaagtggctctgtaccgtgttagaatttgggatatcatgaatggggttccatctcaaaaccaattggcattaggaggagtagtccatttatcttatattggcaatattttcgtatattagtaatgtgggactaactctaataaaaattgtaaaagaataaaaaaaaataataaagagagagagagag

SEQ ID NO: 339422 - DNA, 590 bp, Cannabis indica
cttcctttttcaacctgattttcgcattgtattttttaatccactaatccaaacaaacagttaacaaaactcttccatccctttgagtctctttattcaggtataataatcgttgtcattttgtttattttacgaactacgaacactccctttcttcccaagctgctccatgttctgctgaaattcttccattgttccatataaccaagttgttgcatcaatggttatggtgatctcgtagccgatcaatctagtacttttgcatattgtgatcaatcatccatgctttgttaaggtgagcatgaacaccttatgttgtgctcaacaactatcaacacctaaacgaattttatatccaaaaccagtgggtgttaaggataggtttcttccactagctagtagggccagtgaattcatagagaaccttccatgtccaatcggacaatgaaagcccctacagtgcatacttttccatattctgatcaatcctccatacaaccgtgtccattccattgttccatataaccaagttgttgcataaatggttatggtgatctagtagtgatcaatctagtactctcgcatattgt

SEQ ID NO: 339423 - DNA, 571 bp, Cannabis indica
agcataataatgtaccatcctttaagttgtataaataagggagtaggtcctttggtggtacatggtgagttgagtgtacaagtgaagtgtgccctagtgtttttaactaagtcccaacaaaactctaaaagagtgtcccatcaaatagtgtgcaagtaaacctttaagtgtgagtgtctagtacataaaagagtgagtgcttggtgtgtattgtgatcaagttaaagtgttcaagtcttggtgtaattacttttacaaattacgttttcacgtgttgtgttgtccaacaagtggtattagagccggatcgagttcgttttgaaagattcctttgttgagtttcttcgagtgatcgtgtgtggtttagtaccacagagtttgcacaatgggtgaccttcaagtggtcagcgaaattaagaaacttaacaaccaaaattacaacacgtgatgcacatggaggcatatctccaaggccaagacttatgggagatcgttattgacaatgaagtcacacaatcggaggacacatccgctttgaagtaaagtggaagattaaagcgggcaaagccat

SEQ ID NO: 339424 - DNA, 669 bp, Cannabis indica
acatctttattcattcactggtcagaatagttttgttacagtagtaacttacattcatgaaagctattatatgatctaatccgatctttagctgaatttaaacaaaacaattgcacttataaaaagaaattgtactttcactggtggtcagtcgacctgagttcttaatcatttcatcaaaacctttgggcggggtccgactagaaggccatatacttacaagtaaatgttcttgctttttgtacttaaagtggtcatccgacctggtacattcattgataatagtttctcaaaggttccccattccaataccttggtactaggacgagcttcatgttttcgtcataccgcccaagttgtatgcccctgattccaaaactttgactacctgatacggtccttcccagtttggtccgagcacactagctgtgctatcttttgtgttcaggaatactcttttgaggaccatatctcctacaaaaattttttgtacccttacttgcttgttgaagtaccgagccaccttttattgatgggctactaactttaggttcgctgaggctcgtttttcttcagttgcgtcaagtgattctgctaggagggcatgattagcttcctgatcataggtcaatcttttgtgggacataggttctaattctacgggcaaca

SEQ ID NO: 339425 - DNA, 555 bp, Cannabis indica
gtaaatgttattttggtatttgtgattatcatatacttataaaaaaatttaataacagttacatttattataattgaatcaaatatgtgcttacgaaatttggaaagtttgaagtggataggaggtgcatggcattgttgcgacccttgcgagaagttcagggatctgtaagtgtgaaattggttactaaatatgtttcatttcttgtacatgtctaaatcatatttcatcttattgcagatcattgactgttattctcaaataatgaacaaggacgaagatcaaagccgactaccagaccaacctcgtgtttggtacatgcccacccacatctcgataatggctttgttatacaacttaatttaattttttttactaatttagtttggttggactattactagtttcggttacttgacaaaataaacaatgcatttgcagcgaaaaactctgggtttgtttaatgtgaagaggattacaaaagaacaagaatggtcaacactgttttacgaagacaacttcaaaaaatgccttaaggtacttcatcatatacac

SEQ ID NO: 339426 - DNA, 1031 bp, Cannabis indica
ataccacatacactaggtacctcactgtacgcgtgtgggtagggttgtttcataccctgagtaccactgagtgatataccacacacacactcagtactttcccgaacttgtgctggtatcattgtaatgtactctcaaataacattcactataccaatccaactctataccttaactgtacaagtgctggtagtgcaactaacactttaagcatgcatatacacataacatatacatacactcagatattgatatcacacattatatacagttcttaccttctttccagattcaagtgtgctggccgacctgaacgaaaaatctcgtgctagatggatgccctaatcacattatggaaccgggtaagttacatgattaaaaccctaatcccgggaaacccgaacccacaactctaggttctgttatacatcctaggggttacacaaagtgtaaaaatagggaaacacccaaccacggcactgaaatggacgaaaattgagaaaatgaagtgtttggggatcacgccaataccgctaggtttgggtctggtaaaaccggctagccagtttgcaccagttcaccccaagcttttcattcttttctcaattttccaccaaatgcaaccaaaccttccagagtacctaaactatgcacatacaacatattccagccagtaattcacagaaaaactcaatgaaacaaattatgccattaaagaccaaagctttgaactcaaagctcaaacttgcacaaaacctaaaccaaccatcaataccagctgttaggacctaaaaccaactcaaattaagcttagaattcgaaccctaagcatacctaaccctaacagcccccaattcacaaaatcacacattcaacctaaagaaaaagcttcaaaaacatgctcaagggttctagggttttacctttgcttgaatcctcctccaaccttgctgaaaataccaagttcagtaatgaatccccctggtttgcttcagccgaaagagagaaagagagaaagttctcttgaattt

SEQ ID NO: 339427 - DNA, 636 bp, Cannabis indica
aagttgtagttcgaattttaagcataatttgagttgattttaggtcttagcagctggtattgatggttggattaggttttgtgcaagtttaagctttggcttcaaagctttgatctccaatggcataatttgtttcattgagtttttctgtgaattactggttggaatatgttgtatatgcattgtttaggtactctcgaaggtttggctacatttggtggaaaattgagcaaagaatgaaaagtttggggtggactggtgcaaaccggctagccgattttaccagacccataaggcagggtccccaaacgcttcattttctcaatttttgtctatttcggtgccgtggttgggtgtttccctattttcagagttttagtaacctttagggagtatagcagaacctagggttatgggttcgggtttcccgggattaggattttaatctgacttacccgatttcataatgtgattaaggcatccatctagcacgagactttccgttcaggttggccaacacacttgaatttggaaagaaggtaagaactgtatataatgtgtgatatcaatatttgaatgtatgtatgtgttatgtgtatatgcatgcttaaagtgttaattgcactaccaacactt

SEQ ID NO: 339428 - DNA, 697 bp, Cannabis indica
ccggttacaaccagattaagatgcacatcgcagatcaagagtgcactagcttcaggaccgataaaggggtatactgctacttagtcatgcctttcggactaaagaatgcttgtgcaacttatcaaaggatggtgaaccggatgttcaaaggcctcctggggtgaaatatagaggtatacgtggatgacattctggtcaagtcaaaggcgtgcactagccacgcggatgacttagaagaatgcttcgaagtggttcggagatacggaatgaaactcaacccaacgaaatgcacttttgggattaagtcggggaagtttttgggcttcatcgtcagtcagaggggaattgaggcgaatccgaaaaaaatccaagccctcctgagcatgccttcccccaagaagcacaaagatgtccagagcttagccggaaaggttgccgcactgagccgttttatctcccggtccacagacaaatgcattcccttctttaacatcctgaagaaatgtcagaaattcgaatggtccaacgagtgcgaggaggcattcaaaaaactgaaagagcacatggccgagccaccaatcctatcaaagcccgttcttggagaggacttgttcctatacttagttgtctccgagaatgcgattagcgcagccctagtacgggaagaggagaaaactcaacatctcgtgtactatgt

SEQ ID NO: 339429 - DNA, 531 bp, Cannabis indica
aaataaaaagttttggcatttaagtggttaaaattagaaaaatgacatttttgagaaaataaggaaaaattattgaaaaatgacaaaattccaaagtggggcccacatcctatggccgaccacttatgagggaatttccatttaattttttcaatattttaatgcctaataaattctaacctaaacctaggtggttgcctataaataaatagtgatggctcacactaaaagatgatgaaattcaagccttcagtcaaaatttcctgaggcatctctcttgctattttcaaaccactgctctctcttcctctcttcatattttcataccctttagtgatagagtaagtgcccacacacatcaagtggtactcaatcatagtgtgtaaggctgtgaagaaacaagtctcaagagaaggagatttggactcagatcttggtgataccctgctacagacaggatacaaaggttagagatctgagtggaaggagccattaatatttcactgcacccactgtaaggtttctgaaact

SEQ ID NO: 339430 - DNA, 812 bp, Cannabis indica
tctattaaaatctcaacctacacatcttgaaaaatcttgaaatttcacagggacaaagccaagattattgtgcatcactttactatttaacacgttgagagaaacgtagttttcaagccgttatacccaaaattcggctagagggtacgtgtcaaggaaaaggaaatgtgaatcggtgcaatatctttttatggaataactcattaattgcataaatattagagtatatttgtaacccgctgactgtaaggtcttaggcgaggaattaatgtacgaactggtacttagtgtattaacgagaaaccatatgtcgctaaaggagaatagcgaggcaccagataagaggaacacataccttagcttataataagcaaactaagtgtaaaagtcagatcggctcgaagaacaagagagactcataaccctggcaagtcaaaagatttttgtatatccgcgatcgaaataagacatatcttatcgacctcagaaagaagaatggttccagctcgccattgggatcactacaatcaagtttctgtcgagacatctccagattcaacaattaaagacgtgtttaatacacgatattcatgacccaataaaagtgagaaaatcacagctatatgattttcaaaatcatacaccgcattttatattttgtgatatgtaatcagatcccacgattttaaggataatgattgtaatcatattttggtcagctttgtaattaactgccactatgcaattataaatagtggtaaacaatctcaaaaaagggacgaaaaaactcttatgaaagaggccttaaaaaa

SEQ ID NO: 339431 - DNA, 654 bp, Cannabis indica
gagcgtgtttgtcactaaaaattcagccagctggatgatgtggagaagaagactaaacctagtggactaagattgcagaggattgggctactatttttagggtgtcattttgtacccttttacccaacaacaaaaacacatctaagtacaccttcttcatgaggatgatagcagctgccattttttgaaagagaagtaattgcaaaaagtacagagaggaaggaaagacaagggggacccaagtgcaagaaaaagagaaggacaaatgacctatttgtttgcatttcttttcccttttcttttatatttttttctttgctttcatgtctttaagtactagaaacttgttaaatagtaaacaaggcagcagccatggatgaaccattttgaatttggattttattttttgaattgaatatgagctaattttcttaaggctatggctatgaactcctatgttgggtatgattaatttttaagcatattttagcatttttgcctttgttcattcaagtgagcttgtcattatgttttgattgttatttcttggacatgagtaacaatttgttaagctagatctcatttcagaagggctagatctagtgtaaaacttgaatggagcaagaaatcttagatttagatttttctttgtaa

SEQ ID NO: 339432 - DNA, 666 bp, Cannabis indica
atcacaacaactatattgaacaatgtattgagcaaaaatcccaaaaatccaacaaaaattccaaaattctccaacaatcctcaaatttttcaataaaaattgtatagagagtcttagaattattacctcaatgagaatccacctttagtcaacctccattgtaggaaaacttgtcttgagaaggaagaagatgaatagtggtttttgaaatttgggtgaggttctagggatttggggttgattttgagagggaatgagtgattgatgagaggaataatggtttagaatgatttgggatgaagatttatggttagatttgaaggaaaagggtttaggatgggatttgaagaaaaaatatggtggagaagaagtattttcggtgtggaggttagggttgagaatgagggagttgtttttgaaattatgtggtgattgcagctttataaacgcgtctgaactcctcaccgcggccaaaatacgactcggcgcggccagataaccccaaaaaaacacctctctgcccaggagatatggccgcggcggcactctccctcactgtggccagataacctcgaaaaataggccattctgtaagacccaaatggccgcggcggcactacatctggccgcggccactgggccgaactcgaaaaaaccttttttttt

SEQ ID NO: 339433 - DNA, 693 bp, Cannabis indica
gcttaagattggaaaaggtttgctacccaaagtagaatcagcattgataaattttctaagagcaaacataaaaatttttgcctggtcgcatgaggatatggttgggattgatccttctataatttcaaatgtcctaaatattcaacaaaagcgaagactgttggacaaggagcaaaccctagctctgaaagaagaggtagagaagctacgcaatagcaatttcataattgaagctttctacccagcttgggttgctaatcgcgtactggtacccaatccgaacaagaaatgacgagtttgtattgatttcaccgacctcaacaaggcatgccccaaagactattttccatttccaagaatagatcaacttgtggacgcaacagtagggcacgaaatattgagctttatggatgcctattcgcggtataatcaaattaaaatgcatccaccagacctagaacatacaagtttccaaacagatatgggtatgtattgttatagagtcatgccatttggtctcaaaaatgttggagctacataccaaggattggtaaacaagatgttataagaccaaatcgggcgaaacatggaagtatacgtggatgacatgctcgtcaaatccaggaaggctggggggcatatagatgacctggacgaatgcttcaaagtcctcaggaagttcaacatgaaact

SEQ ID NO: 339434 - DNA, 693 bp, Cannabis indica
ataaaatagattacattgaaatggagttttatttagggcataaaacccaacaaaagttgtgttagaggaaatgctttcagatataactccttccaatgttccatcctcttccactcaagaagaggataatcccactccctcagtcgaaacaactgagaaaactaccactaaagttcctgtttagaagatcaccgctcctcgtcgtagtgggagggtttctactaaaccgtctcgttatggcttggatggtgaaatcaatatggtcgttggtgacggtattgaagacaacccattaacctacaaacatgcaatggtagtctagaatggaaacgatggtcggccggcatggattcagaaatggattccgtgaaaaagaacaaagtttgggaaaatgtagacgcacccgatgaatatcgtccaatcggatgtaactgggtctacaagaagaaaagaggcacaggaggcgaagtcgaaactttcgaagctagactggttgccaagggttaaagtaaaagagacggtgtggactatgaggaaacttttagtctggtcgccatgctcaaattcatccgaattcttctctccatcgcagctgctttcgattatgaaatctagcaaatggatgtcaagaaagccttccttaatggaattcttgaagaaaccatctatatggagcaaccagaaggctatgtt

SEQ ID NO: 339435 - DNA, 781 bp, Cannabis indica
tttttttcttttttcttttctatgcagtacaaacaaaatttaaagaaaacgaaaattgttttaccagttttctaaacaaaactagaaagaacagaaaaagaaaataacaactaaaacatgaaagagttcaactaaaacataaagaaaacttgggttgcctcccaattagcgctgtctttatcgtcgcacagctagacgttgatcgagttgaccgttaactttagagctttaacaggtgcccgttaactttgaaagtattggggccttcaccttacagttccaccgctccataaggaaacactttgaccactgtaaatggccctggccaccttgactttaacttaccaggaaacaacttcaaccttgaattgaaaagtagaacttgttgcccaggttgaaactccttcctgactaagcttcggtcatgccaccttttagttctctccttgtagatcttagcgttctcataagcctcattccgaaattcctccaactcatccaactgcagtaatcttttctgtccagcagcctttaaatccatgttcagagtcttcattgcccagtacgccttgtgttctaattccaccggtagatgacaagcctttccaaacaccaaccgatatggtgacatcccgattggcgtcttgaacgctgttctataggcccacagtgcgtcatctaactttcttgaccaatctttccttgatctctgcaccgttttctccaaaatcatctttatttcccggttagaaatttcagcttggccattactttgcggatg

SEQ ID NO: 339436 - DNA, 1371 bp, Cannabis indica
gaagtaacactaaccaatcctaatttagaaaatccaaagacagaaacttggaagataatgcaccatcaaaaacacccgtagagatctaatacaacgagaaataatcaatccaattcaaatcattacttccaaaatcaattactacttaagtttaacagggattaaggctagttctcaagaattcacaactaaaccaattgcacaccagttaaaattccttgataggaagtatggttaaaaacctaaatgaggatcgtatggttgaaaatatgcatgaaaaacagctaaaaccaagtgatcattgcagcagtttatatcgccagagttatttgagctaatgtaaccagaaattataaatgttttaacctgagacaaacgggcacacgccgcctgggatcgtgctaattcagcttcgctttcgcttactcgagcctccttttcggaggcaatgtcagtcaaattaaccttcaagatcatcaaacaagacaagaaatcgtcactcaaccaaaaccaaacacgttaataacctcaaacgtaacccaagaaaatacttacaatcttatcaagatagctcttgatgttggcgttcttctcactaatctctgaatcttttagttccaccaactcgagtaactgccttttagacttatgcagctctgaaacatcagtctttagcctctcaatttccccatctttttcaatctgcaacccaaaaacaaaccaaatcacctctataagaacatgcatagcataataaatgaagagaataaaaccctaatctacttacggcttgcaagtggagctggtgcttctgggcctggacttgggcgagttcagagaggcgttggtcgagagaggattgtagctggtcattgtgggactgaagctgagagaagtcggaggagagagataggtatttctgctcgaggagagaacaggtctgctctgcggtaatggaggaggcatcagcctgagccctcacagtatcgagctctttccgtaggtcacggatgacggagtcagccttttccgccaccgaatcgacgtcatggcggagacgagagaactcctcgtcggagaggaaaagcggcatcgttttgaggtgtgacgatgcgagagtgagtgtagtgagaaagaaatggtaacaggagagagggaagggtacgggaatttgaaagagatggaaatgggaaattttgaagtttgatttacaaattgagtaaattgcaaacaccacccccctccaaagttttatttagaaattaaattaaattgtcctaaatttagaaattaaattaagaaatatggttttttataaatatttattttttttgaaaacaagcgtagaattatattataataagaaagcta

SEQ ID NO: 339437 - DNA, 659 bp, Cannabis indica
aaatgcattttctaggcaggcccaatgcattgttgatgaaaaaattggatctgggttgaagagaaagagggaataagtttaaaaattaatcaaaaataccttcaaattaaatttcattaaaatctacccacttttatgagtgggttactcaatatatcttcaccctcaacttaaatttagcacataatttacattaacttaatgggtataatgaggacattatctataaaagtaggtatatcgtaaataatatgaaaataaagataaaaattaaacaaataaagtatatagaaagtgggtacacaatgtaatggataagttgagaaataccttaattttttgttgggttgctcaatatactctcactttctacttaaatctagcatatattaacctaaggggttaacgggaacaacacctataaaagtgagtatatctttaagaatatgaaaatggatgtaaaagttaaaacaagtaaagtaaagtatgtatacaatgtaatttcctcatataaagaaataaaaattacactacatatctcttttaaattgatacctaaggtggcgtttggttgaaggtaatgaaatgaaatggaatggaaaggaaacaatttttattccattcatttgtttggttgcattttaaagtattggaatggc

SEQ ID NO: 339438 - DNA, 552 bp, Cannabis indica
agagaacataactcaaatgccgacgccttggcgaaactagcctcgcaaaatgaacttgataacttaaatttggtaccggtggaagtgttaagcgaaccaagtatatgtgaaaaggaagaatttgagatgattaatgcctctcttacatggatgatgcccatagttaactatctactcaatggaaaacttccattagacaaaaacgagacacaaaaactcttatattcaatacctcgctacacaatagtagaacgtaaattgtataggaggggttattcaatgcctctcctacggtgtgtgctccccacagaagcaagcgagataatcaaagagattcacgatggcttttgtggagaccatgcatgttgtcaaagcttgtcaaagaagataatctgacaaggatactattggccaacaataaataaagagacacatgaatttgtcaaaaggtgcaataaatattagagattttcacatatacctcgcgtaccatctacagaactaagaatgatgcctcgccgtacccatttgcaatatggggaatcattttga

SEQ ID NO: 339439 - DNA, 504 bp, Cannabis indica
caaaatggtcattttgccaagtttatgttttgtcctttagtggacattagtagaattattatgctgaatactagatgctattagttttaataaaactattttattaatttcattcatacaaaatatcaaaattagcaaaaaaggaattctttctctttttcaactctctctctcttttcgaaccattagaactagctagggttttgatttttgttcttcaattgctgtgatttccagcaactctaagtgaatccaagtcaaggtaaatgttgagttttatgccctaaataaaattctatttcaatgtaatctctatcatttaaatatcaataagaaatagaagtattttcatcacttattgtgtcatttggttcatgttatcatttatttgtttatttgaataataaattcatccaaatcattatcacatttatgttcttgtttattgtgtcgtcagcacagtggaaagtaatcaagattgtgtgattaaatatatattcctag

SEQ ID NO: 339440 - DNA, 604 bp, Cannabis indica
acacctaactcataaaattttcaagcagcaaatacccagtaaaacacatgaatttagacctaaataataccccataatctcatccaataatcaacaatatattcacaactaaaacttacaatttcacaaccaaaaccaaccaagacaagagctaaatctgctaccatgacaaactaaaaacaacatcacttttccataaataatttcagtagtaaacaaagatcaaaacccataaaaattacctcaaactcaaaccaagagcaagcttaagattcaacaataacaaagctccaaaacaatccaagaatcaaacttttcttcccaaaaatcaagttgaataagaagagggttttgagagagagaagggtcgggtgagagggagattaattttcctttccattatctcaaaatttaacttttattaaaataaatcaattaaggtcaaaagaccattttgcccctaggccaactttcacctattcatacatccaagggtattcatgtcatttcatactcataaatttccaaataaaattcaaatttcacattatcaaataaaatgtcaaataattcaattcaacttgcatttcgggcccgaactcgg

SEQ ID NO: 339441 - DNA, 777 bp, Cannabis indica
aagtcgggtgcaaagatctcacagatggtgacattgcgcataaagaaaagaagaggaagggcagaaaactgagaaagacgaagtcttctctatgcccttgaaggccatcacacgaagagtatatggtcatttacaaaaaataataatagtgcgtaacaagagtaattctaacactagagaagggaaatctagacatattacgtgaaaactcaagggaatacattcccagaaacttcaaacactaacccagaaaaacaagtaaataataaagcatgcatgaacacaacagtaaagtaaggggtgcgagaaacttacatgaagtgttggaactggggtttgctgttgatcaaacaaagaaatgcagactcacagtgatgagcaaaggttagcgaagaaatctgtaaagtgtttgaaggttttctagtctaaggatttgttttctctctggaaaactcgaagaaagttggcgaaataaggaacgtaaccaaatgaaggaaaggtggtggcttttataggccaaagtgcatgaggaacaggcgtaatcacctaccaatcgaacggctggggaggcgcacgattcgaattcccaagaatcaacgggtggattaattcgtaattaaggcggtggaaacgtttgagtatccgtctgacaccattaatgcgccgtatcaatcaaggggcatgaaacgaatcaacgcctgcaaaaagtgaatcgctgcattaatggcgatcattaaatgcaccttcacgcgcccaaagcacgtgccaggaaaccga

SEQ ID NO: 339442 - DNA, 556 bp, Cannabis indica
gactttgtctttttcatggaatccatttctgaatccatgccgactgaccattgtttctgtgccggacttgccattgtctatttataggttaatggatcgtcatcaatactgtcaccaacgaccatattgatttcaccattcaagccataacgagatggttttgtggaaaccctcctactacgacgaggagccctgatcttctgaaaaggaacattagtggtagatttctcggttgtatcaacttgcaaaggttcaaccgaggaagtgggattgccctctacttgagtagaagaggatggaacattagaaggagttatatctaaaagtatttcctccaatactactttactttgtggcttgaaattcttaatacagtcatcttcaatgaaaggggcgttcgtggaaacaaacactttatcatccttgtgactataaaatagtccacccctagtctctttagaatttccaacaaacatgcaaacatcagttccttttcaagtttgccatctttctttcttaagacatgagcagggcacccccagattctgtaatggcg

SEQ ID NO: 339443 - DNA, 708 bp, Cannabis indica
aagatatggcttgattgtgaagaaagagactttatggagtttaattaataaatattataaatgactaattttgtttgataattattttaattattaaataaatagttttcacatttatagggttgaaagtgcaaaaagtggcatttgtgaaaaatagataaaatagttgagaaaaatggtaaaaatctaactagtgtagggtcactaagtggccgaccactaggtgctatttttgctcatttttattatttttctttccaaataaatcaactataaccctaagtgaaattagtataaaaggaaagctatgatctcattatccaactaatgcttctaaagctaaaagcctagttttctctctttggcaactaggtttatgagacttcatcttcttccttcttcttctaattttgaaatcatatagccatcttcacaaatcaaatccaagccttagtgattgagtgcatgcccacacatatcaagtgagtcctcaatcataatgtgtaagactgtaaagaatccaaacaagagaaggagtttcgggcttagatcttagtgatactctactacaaaaaggatacaagggttaaagatctgagtggaaggagtcatttaattccgcagcagccaatgtaaggtttctcagaccttttatgtgtttattttatatcattttagaagttcatgtttaggatgttaaaaacatac

SEQ ID NO: 339444 - DNA, 558 bp, Cannabis indica
agcattcctcataggctaacatttagacaagaataacacttaaaattagcattttcaacacacaaaccaaggcactccacaaatggaggaaaatgaatatttttcatcatcgaacgctaccctaaaccaagctgataatacatgcactattttcctcattcgcaagcgaaaacagaacataacaaacatgacaaaataacatgatgaatacacatctaatccacacaatgtttattacacacaataccaaagtcaacaacaaaagtagactcacaaagtaacaaacacaaacagtaggaacacttaaactaacacacttatttcagcacacacaagcacaataacatttaaactaggttaactaactaaggaaaaagagatacgccctcaagattcgaactcttccccactagagagtccctgcttgaaaatgctgaagcgatgctgatgcaatgttgtaacaactgggacttactgcttcagcacacaaatttgcttcacaccatattgcaccaacctatttttctgtcattccctgctttgcaccagcaataaaga

SEQ ID NO: 339445 - DNA, 858 bp, Cannabis indica
ttcatcaggaggagtcatacctgatggctccaaccagatcaacggtgccattccacccgtaaaccaagcgaatcaatcattaaggcaagttcaaaaggttaggaacaacccatgacctaaggaatgatctaaacagaaggaggggaacagatgatcagaatgttacggcaatcgtgcaactcggagctcgtattcaaatccccgctcagaaagatgctgacgtaatccaagttgaccagaatgccgagcaggtcagcgcaaccgtacaagttcagctagatgaacaaaaaaatatgtttcacgacatggctggacaaagaaataatgatcttgagttagaccgagcacgcggaactcctttctcatcagagatcaatctcctgcaactgccccacaagtttaaaatgccgacgtggaaaatgtacacggggagagaagatcccctttcccatctcaagtactttgaaatgcaaatggatttgcaaggggtacgaggagatgtagaatctttcctgctactctgtcggaagccgctcagtaatggtatttcaagttggctcctggaaagtttagttcatggaaaaccttctcttcggaattccatgcgcaattctcctcctcttgccaactcccattgcatttgggagacttggtcaaagttaagcaacgactaggtgagccactatgggcatacattagcagattcatgacggaggcgaccaaagtttcacgggtaaccgaggatggaaagttatccgcgatactggagggcatcgaagtcctcggtgaacttttgaaggatataaggaagaatgggccggtagactcaatgagtgatttccttgactgagccgaagg

SEQ ID NO: 339446 - DNA, 1551 bp, Cannabis indica
attagggtgatctatactaaaataaacacttacaaaaaaatatttatctttcgagattctacggtgttaatttgctaatgaacgtcctccattagggaagattactcactgtagagggtgaaatctacaattacggaatttgggcaccagcaacctatcaagaacaaagagagagacaaaagttcaattgggagcaccggtggggtgttagccaaagggactccgacactcaagtcagtgcgattatagtaaaaaataataataatggaaaataaatgtaatataaatggtagccggacggatgagtggacaagcggacaaacggactaaaagagtaactccgatggtgaggcttaatagaaaagcttagaaaaggcgactgtctgcttgagtcagtgagtagtgtgagtctcgaatgtgtcctctcgagcgtctatcgtatggttccttttatcgtgtgttctcagtgtcattgccctctatccacgtcacccgtttgactcgttcaaattggttacttccataattattagggagtagtaaccgtcttcctgactggttccatatttacttgatttcatccatttggctgactggctgggctcggacccagttgcgggacgatctggcttgtggcccataggctcactcgttagtctatttcaaggcctagtgagtccgtctgactgtcttattgggcccaatattgttggatccattattgatgggctcgtttgacttgcatattggacttctcaaaaatatcacaaatatcaagcaaatttttacctctacagtttgtcgctcactctctagctagaatttattttagctggagagttattaataccaaattagctgtcttccaagagttttgtctaagtaagcgttgtacgcttgtcttgctatttgagacaaaaaaaataggctgaacggttcgagcatggtggttgggtagtccttgtcgcatgcgtgtatgtggtgtaagaaaatagacatttatatgcatatatattgtaaggagatggatatatatatgaatgagaggaggtagacagacataatatataggcatgtatgtagataatgggaggagatagacatgtatataaataatagaaggaggtagacagacataatatataggcatgtatgtagataatgggaggagatagacatgtatataaataatagaaggaggtagacagacataatatataggcatgtatgtagataatgggaggagatagacatgtatataaataatagaaggaggtagacatttaaatgtgtaaagagataaatatatatacatatgttgtaaggagacatatatagatatgtgctataaggaggtagacatatatatatggtgtagggagatagacatatatatggtgtaggaagatagacatatatatatgtagggagatagacatatatatgttgtaaggagatagacatatatatatatggtgtagggggatagacatatatatggtgtagggagatagacatatatataaaaaatgacaggaggtagacagacat

SEQ ID NO: 339447 - DNA, 670 bp, Cannabis indica
tagccactatttaggctgatttacaataaagaaaaaaatatatgaaaaaacataatttaaaacctaataatctaacatagataaataaaataatatataaaatattaaacaaaataaataaatatataaaattataaatattaaatataattggatggacattggatgatattgaattggatcggttcggttatccaatggattagatgtctcatccaacatccgatccaatccaattggattttaaaaatttgcatccgatccgatccaattatgattggatatccgattctattagatcggttgagattggatcagtcggttgggattggattggatgactttctgcacacccctatctgtagctaatctctccctctcatgtactttgctatgttttttattgcacaaatatagtttctttagcaactatacggttttttcctcttctccactttgttgacagagaaaaaaaaccagagctcgagaaacggttactttttttttcttcatattaaccttcatagtaactagattttaaaagccaaaccagatttatggctcgggagatcgacgataaagatttagttctttcaatctcactcaaattaataatttctttgagagggctagtagctagtagtggggcttggacttaataccaggtatg

SEQ ID NO: 339448 - DNA, 1024 bp, Cannabis indica
taaattaaaaacataaattattcttaaaaaaatattttcaaattttactttatttataaacacataattgaaaatttaataaataatttaaacaaactaaaatttgtgaagagaaagatcaagcttatttgtgtttataaattcatatcctaaaaattaataaaaaaaattagaaactaaaaaaatatataaaattataagaaaataggaattaaactaattttttttttatgtttatttaaacaaattaagatttttggagaaaaatatagactcaaatttgtttccgtaaaatttagttttaacaaaaaatcaaatttttattatacttttttatatctaaatagatgttttaataaaaaataattaattttttaaatcgcttaatttattttttgatttcttttttaattttcttaatcattcaaaatgatttttttaagatctaaatttattttttaagatttactgaaaaaaaaaaaaaatgttgaatctttctaatttttattaagagggagtacaatttgatagttgtcaaagtttaggggacaaaatttctaatttacaaagacatgtcagcatataaacaaaataataggaagaaacctaacagattgagtaaattttagtaaatgtaaaagttcatggggagttcttaagaagtatattttaggagacaagatcagtagtgtcgaaagttcaggggctagaattgctaattattcgttattatattaatgcttaaattaacctcattgtattgcattatatagcattttattgtatgcattgtatgtattgtagtctactgtataatattgtgttgtatattgtattatagtattatttaatacaatataattttttatattgacttgtattgttatccacgtattaacgtagattttcattaacgattaggagcctaatttcgtgataggtttagaacaaaaaaattatagaaaataaaagaaacaaaaataacacccatttttttacgtggttttgtagttaactctgcata

SEQ ID NO: 339449 - DNA, 805 bp, Cannabis indica
tagacccgatttggctcatagcatgagtgttgtgagtaggtttattagtgatcctggtgaagaacattggaaaggattaaaatggatactgaggtatctaaagggcacactcaaaactggtttactgctgggaaatgacagcaagtataatgataatgttactggttttgtagattcagattatgcaggaaacttagatactaggaggtctctatcaggctttgttttcactgtgtttgggggctgtgttagttggaaagcaaacctacaaaaggttgttgctttgtcctccactgaagccgagtatatggctgcaacagaggctgtgaaagaagctatttggttgaagggtttgacatctgaactgggaattgattctgacaatttgttcatacattgtgacaaccaaagtgccattcatctcatgaagaatcccatgtaccatgagaggtcaaaacacattgacatcaaactacacttcattagagacattattgctagcaaattggtcaaagtaaagaagatatgtactcatgaaaaccctgctgatatgttcaccaaggcagtcactagtgagaaattcaggctatgcctgaaattgttgaacattggagattgttgatccttcacttgtgaaggaaaactttattgatggaacagttttgcctatgttatttttagctcagtttccttacttgcaaatgtagataaaccaggtggaatttgtggggtttatgtacagttgcaagtattagtttagttagttatttttcggttgtaaactagacagttatttctgttattt

SEQ ID NO: 339450 - DNA, 1322 bp, Cannabis indica
agctaaaacaccaattgacaagagatttctcttgagttcaggaacatacctgacatcagtgatgattctttgagcaccatcattcatctgcatcacaatagatccagtcccttgaattgtgcatgccttgttgtcaccaataaaacagtaccccctgttttcttctcaagattgcagaacatttcttcacaaggacacatgtgaaaagaacaaccagaatcgagtatccattcttgtccagaatctgtgtttgacaccaccagaacaccagctgagtcataaccatcagcaacatcagcttgtcccttttctttgttcttttctttcttcaatttgttcttcaaagcaagacattcatccctgaaatgtccttctttcttgcaatagaaacacttcttgtcagttgtgtttcttgaacctgtctttgctttctggttccctcgatcaccaccatgtttgtagttcttgtgccctttcttgtcatgtcttcctttgacaaatagaccttctccattgtgctctgttttgtcatctgatttgctttgaatttccttagaattcaaggctgctttcacctcagacattgtaagagtatctttgccataaagaattgtatcaacaaagtgttcatacaattttggcaaagaactcagtaggattatagcttggtcctcttcatctagcttcacaccaatattgttcaagtcaagaacaatcttgttaaagtcatctaggtgtcttctaagctccttgccatcttccatcctcaaggtgtacagtttcttcttcaagtacagcttgtttgcaagggacttcttcatgtagatcgtagcaagcttttcccacagtccaagagctttctcctcatctgcaacttctctcagcacttcatctccaagactgagaagaattacagaatgtgccttggtctcgatttcttgtttcttcctcacatcttcaattgctttcaatgcatccacattaatggcttctgcaatgccttgatgtaccaacaaggctctcatcttgattctccaaaggctgaagtcattagctcctgtgaacttgtcaacctcatacttagttgatgccatttcttgatttcaatcttgctgcagtaagactttaatcaaacacttcttgatctcctcgattgaacctcagctctgataccatttgatgtgatcaaaccgatcacaatatccaaatatcaagaacaacttaattgatcaaagtctataacagattagcaatactcaacacaaagaagattgcaaataaaaacagtaaaacaaactaaatttaactagagagaatgaaat

SEQ ID NO: 339451 - DNA, 659 bp, Cannabis indica
ctcggtcggtccctgaggtgaacaagcagctggctaggggggcaacaacctttctctagagctggtggtgggaggagtcctgaaaaagcttttgagggtaagtcttttctgacagtttctttttttgtccttcttcaattactttagattttaatgtttttccctgtacagaccggtttgaagatggcttatgcttattcccgagctaagtcgtctgctgctaagaacaccgccatttccaacacaatgcggacggaagtggacttggccaagaaggacgccgaggaggccatggttcaacttgaggctgtccagatagctgggaaaagtcaatatgaaacttcttgctgctaagaacaagctggccaaactgaccaaggatctacaagccatgccatccaccgaacagcttgaagctgatattgcttatttatccaaggaactgaccagccttcaagaagagagagaggttctccgaactcttttccgcaagttgaaggaaagaagaaagccaaggaggaggagcttagagccgaggttgagaagtataagtcagaggtcgggcagcagaaatccaaagtggaaaggctcggagggaaagtgaatgccctagagacagctggtcttgagattttttatgacttctggaaggccaatcc

SEQ ID NO: 339452 - DNA, 710 bp, Cannabis indica
ctctataatacatcatacgagatgtatcctcaaaacaataaatgaatctgacttctatagtggaaataacaatcaagattctctacaatataacttactggtaatcttaaggacgtaataaaatattgatttacgtgaatcaatacaaccagtgaagtacgttagaatctaattggttaactatatttccagatggtcaattcatcttaacaaaatatgtatgaatataatttttagtatcttaaagacacctcatcactttgtatgaaaaataaagtggtcttaactttagttattctgatactacttaacgatcctgaaacaaatgtaatgcaaagtcttattcagactcttaggcatacattaggcttctaaaatagaagcaaatgaatgttcttaatttattctcactccagatcatttttcagatgctggttcgagttgaatttatcacacttaaagataaaagttatatcagatgaataatacataattttatttaatcagagatgctgtggctactctctaattaattaaaattatatatattatttatattccttatctcaaaataataatttgagatatgaattatttcaacttatatagaaaacttttatcatcatttgcaagtaacatattgtctacgtataaaacaaatattactcccactaaccttctggtatataattatttccataattctcttt

SEQ ID NO: 339453 - DNA, 516 bp, Cannabis indica
tataaaaaaaaaaaaacacagtaaaaaataccgcctggcagtattttcgtaaaaaaaatgacaaaaattagtataccatgtaaatttctctagtattattagctccacacatgggcgagtgtacttcttctacaacaagtaccacgtcaaacccattgtccccccactccgcctgatgcaaacgggacattttctcccccattttctcagctttttgtgtcatttatcccactaaagggcacacgaaaataccatatttgaggagcaaatttgcactttaaagaagacccaaatccaatgtaaaagacatcagattttagctggagttattataccaaaattttatctttttctttccttcttaattttactttattaattttggtgtaaagacaatatttttttaggctaatttatttgacaagactcaagtgtaagttcatgcaatttttatttttctaatatattgattctctttgttcttcattttcatatttgttatattaaatttttctt

SEQ ID NO: 339454 - DNA, 458 bp, Cannabis indica
tttgaaacttttataagtacctacttaactaataaatatcaaattattatttacgtgtcatttttttattggtatatttaaattaatttttaaataaaaaataaaaatttaatgacatgaaccaaccagagactgttacgtggttattgacttgacactttatggccaggtacttatggaaatttcagaaatataacttaaatatattataatcgttaaaaatgaaatatatgtattaatctacaattgagagttaaacttattataccgcaaattactctttttgtaaatacaaaaattactaacaaatcatctaaattatgggtaacttattggatccttagttgaagtttgttattatagtttttttctatgttattctaaacggcttgatatgtctatttttaatgattttgttcttttagggctcgtttggaacgccgtattaggtcgtattg

SEQ ID NO: 339455 - DNA, 579 bp, Cannabis indica
gtggcatgtccgggttgacattgaggacatgggtggtgactttgggacttataccagtcatgtcttcttgtcaacatgcgaagatgtcaatgtcacccctcaatgtctttattattttttcattttcctccggttctaggctctttcgtagccggaggactttggtggagtcgaggtcgcacagtgacacttcctcgacgtcctccattggttctacaattttctcggatcccatacggggatccaactcatcttctttcgccatctctggctcaataatttctcggaccatcaacgcgggtaggtgggcagcaacgttataacactgcctagcctccccttggtttccccttacggttcctatcccagcctcttgggttgggaatttcaggcacaagtgccgtattgacgtgactgcaccaaagtccaccaaggccgatcggctaaggattgcgttacaagctgttgggcagtccaccaccacaaatgtgcagtatttgaaagtgctctggggtgtgtccgggcacaaggtgactgggagcctcacttttcccatagggataagtgttgttccattaa

SEQ ID NO: 339456 - DNA, 732 bp, Cannabis indica
aagtgtgaattctggttgtccaatgtatcttttctagggcatattgtcggaaagaatggaattatgggtgatccaagcaagatcgagtcagtgaagaattgggcgagcccaaaatctgtgacagaagtttgaagttttctcggtttagcagggtattatcgacgtttcgtcgagggattctctaaaatttctatgccactaaccgaggtaactaagaaaaatcagctattcgtgtggtcagacaaatgtgaagcaagttttctggagttgaagcagcgtttgataacagcttcggtgttagctttgccatcagatcgagaaaagttcgttgtttactgtgatgcatccagacagggtctgtgatgtgttctgatgcaagctgacaaagtcatagcctatgcctctcgtcaactgaaggattatgagtagcgctacccaactcatgacctagagcttgctgctgtggtttttgctctaaagatatggcggcattatctttacggtgaaaaatgtgagatttatactaatcataaaagtctcaagtactttttcacccagagagatttaaatatgaggcaaaggaagtggctagcactgtttaacgactacgaccgtcagattctgtatcaccccaggaaagccaatgttgtggctgatgcgttgagtagaacaggtcccaggcagatttccactactgttatgatagcccctcaactagcttctgagatggtt

SEQ ID NO: 339457 - DNA, 539 bp, Cannabis indica
cttactcgtgaaagctccttcaagactcctcccatgaccagctccaaagacaagtaattatctgccccagccaactgttctttcacctccagaatggaccgggacacatagtggttaagcatgtctttacctctcttggtcttcgtgcacaataacaaaggtggggcaggggccctaacttgttcagatccgcgccttaccagctcagatccagacttagcttactcaggtccatccgaactccctcctcgagaacctttggacttggcgaccttcaaggtggaagggtccacagcaggtagctcctcagagagatcaatgaccttttcaaccggtgccttctccttggacgaagtctcactgcctttagacttcttggtgggaggggacaagcccgagctcccccccactctcttcttcaaagccttgataatcttctgagacatctctgcacggaaaaaacaatacagtcagaagaagacattaaagatatgaaggcataaaaatcaagaaaagtaagtgcaagttgaagtactctg

SEQ ID NO: 339458 - DNA, 429 bp, Cannabis indica
gtttataaattatgtttgtttatttattttttgatgtaagaattgtatttcaataaaaaatttgttccctaactctagaaaataatcaatatatagaagcaatagaaagaaaatatatttaatattttagtatagtcactacaaaacatcttacttttagtcacaacaaaacttatgactaacagtaaaaaaatcatgactaattataaattattatttttatgttgtgactaaaacgtccgtggctaaatgtattagtcacaaaaattacaatttgttgcaactaaatgtagttttagtcacaatacttgttgtgactaaaactaaattagtgataacttgtaactaaatactatgttagtcacaaaaattacaatttgttgcaactaaatgtagttttagtcacaatacttgttgtgactaaaacta

SEQ ID NO: 339459 - DNA, 557 bp, Cannabis indica
caaacaacaaggggttgcaacctcttattgtggaaggagaggacatcccggttatttcgggagggccgcatattacaggagaaagcaattacactcagaagagatatgtaaaagaaataaagaatgatcagttggtctttgcccagaaccttccaaaaaggtgaaaactaaggaaccccccattacattcatagaggaacaccagaagaacgtgagataccctcacgtcgatctgctggtcataatcatccaactcgccaataagaggatcaagagagtgttaatcgataatgggagctcagtaaatatcattgataaggagactctaaggaaaatggggctcgaaaaggccaagttaaggccttgtatggtgaatctctgcggattcactgaagataacatcgccagccttggcataatcgagctcgtattaactgtaggcgaggcacctttaaatgctactattatgcaagacttcttggttgtcaacttgcccttgagttacaacatattgttgggtcacccaacactgatcgaactgttggaattattttacc

SEQ ID NO: 339460 - DNA, 1062 bp, Cannabis indica
caacaaccgaggcaccacgccttctttaataatttcatcaattggagggcaaccctctgcataaaatacaaaccaaagtaagaactaaatggatatgctcttgatggttcaagcttagagattatgaccagattccctaccaatcgataatagctttctaaactaagtagttgcctctaattgtacaataattgaataatcataccatactccttgaaccatcccaagaatactttccaactgcttagaaaacacacattaaaaacattgaatataatgatccaataaaaaattaaagattcaactttttgaagacttctcaaagtggatgttattagccaattgtttgccaaaccatttatttctcaatcagacaaaaaacgaatgcttaacatatacttggaataaacattggatggtaacaatttttatggcatactcaaacaagtgtacgagttcacttaattgaacgattgtagtgttattatttttaggtgcaagtggtgggacacaaacggtaacatgacagaaagtgatggttttttcactagtgtttgcattgcccgtgaatggtaccaaaatgaaccattgatacatgcatcccaagcaaaattaatatattacattcttgacttgaagaatggagttgattggaaccttgtcaatttttacacccttcgcaatgtctgggacttttcggatgaggatgatgatgagatcacgattatacaagaaagaaactcttcaagaatttctttagtcgttcaactttcacagttggatggtgttcaatatgttcgtgatgatgttgacccaattcaagtgaccaacatgggtcatcatgagcagtctaaccgtgaagatttagatggcttcattgtttatagtgatgatgaagacactagtgatagtgataataaaaataatgtagacgttaatgatgatgatgatgatgatgatgatgattatgatgacttgtagactttcaagtattgtaatatagacgccattgttgattaaatgaaatacatgcctctttcatcaatagtaagattaattaat

SEQ ID NO: 339461 - DNA, 705 bp, Cannabis indica
caaagacgaggatggtcctcgtgcaaaagttgaagcaggtcctggtctattcgatgcccattttcccaaaactcacccgagttcatctacaaaagacaacacacaagatgagtgtttggtcggaatatcgaacgaaaaataagcaaatatgccgaccaggagtactcaacatattaaagaataagaatgttcaaagaaaagtcaaaactcaagaagttcgaaattttctcgagttagggcaaaaatttcatgaagcttagaagaaggaagatgaaagacaagcataatgcagttcagaaagcaagaattatggactataaaattgcatgaaaccatgacaaagaagagtcgcagggtttatgaacctagggtttcctatgaatgttctacagcaaagtcgaaggtgcattcaaaaaataaacatgcaaaaataagcataaaggaaatcgagaacttactcaagagtcagatatctgggttcaagcaacgtcaatccaacgagcagtttcgatgaaggcacttcagcaaacttgataccagaaaaaacctcccttttcactctgagctcacttagcaaagaagaatagtgaaaatgagtttatgcgccaaagctccttggtatttatatgcaagtaacgaaaaaggggtaatcatttcaaagaaacctcggacgcctcggttcccccttaaaagcgaatatgggaa

SEQ ID NO: 339462 - DNA, 545 bp, Cannabis indica
ttttatttcaatctggaattattttttctagaaagcacacgaaaaattaataaatttaagctgttacataacctaatttagattttttatgaattagttatgattttttgaagttgaatgaaaatatctgaaatcgggttgcacacacgcgcgcacacgaagggaattctcagaatttccacgcggtttcagacagcttgaccgaggaaactcggacatgggctgtctagagacgcatcccaccgagctcccccggtcaagaaggctgcatgtagcctcatggctcggccgtccccttgattccgcgcgcgcaggggtatgcaatgcatacccctgtgcaccaattttattttcttcatatcttttgattcaaaaatcgtttttcattgaaacaaaagccaatttttggtagaattttgtgtagaatctgaatgttcaatcaaaaatctaattgtcagaataaaattaattttattaatttttttaatttaattaaaattagtttctgatattagtaaactttgaattttgaaaatttgatttct

SEQ ID NO: 339463 - DNA, 1008 bp, Cannabis indica
ataacataaaacactattttttgtaaaaaaaaaaatacatttttacattcaaatatatagttttttacatatttacagtgttttataaaaacaacaagaagactacataaaaatatttaaaaaataacattcaaacaacaacaaaaaaataacatgcaaaataacaaaaaattaacaagagtacagcataaaaatacgtatagaataggggattgattgggttatcaaatgatacatagtacgatacagtccaaacaataatgtattataataagaaaagtatatacctcgaaaaaaaaggtaagaccatatttttagtaaataaaattataagtctttaaaatttcgtataactgtatttttgtaatttttttcgttatttttgtttaaaaagttattatacatatatgacacacaaacttaattgcaccaaatatgatatttgaaaaaaaaaaaaaaaaaaaaaaacttaaaaaactaatatagatataccataatgtttaaataatttgcttctaattctaaaaaaataaagaaaaaattaatgattttgaaatgaggacatttactaacatagtcttatgaattagggttatttgttatattttttttgaaatgaggacataaactaacatagtcttatgatttgaggccatttactataatttctcaaaactattaggcacaatagtagaggtggtggaggcaaagctttgaggaaaattttgataaaatatgtcattgtcactaatgcaaatatttatttgttagtttttgtaggtagtattaattttttttttctttttttgtagaattaaagtcccaaagaaggaaagaaatgggttaggctcaataaacttactcacttaaaataaaataaaatgatttttttttttaaaaaaaccatataattggctttctcccaagcaaataacaactatcaaaatcctttaaataactcatataattaagcaaaagtttccaataccatattaagaaaatatggtc

SEQ ID NO: 339464 - DNA, 950 bp, Cannabis indica
ggatgaaatcttggccactcttgctcgagcccatagtcctggtgcttcccctcctcctacttcttctcagttggtcactcccggatgggcttctccagtgcccctccgcgcactattgacttagtggacgagggggaggtacttcttgaggaagctgaagaaggcgaagaagagcaagagatcgctcttgtgcgcaagcgcaagggcaagatggtggaggaggagccttctaagcgccccaggagggtggacactccggccccaagtaatgactctgggattccctccgaggcggaggaatacacagtgcctcatggcattgtgttgactccgatccccgaatatgaggagaggcaaaatcttcggatggccaaacacaactacgcccttgactagtacacccgagggcatgctgaggtggaggccttgaaaagggtcttacgagaggagctgcaaaacactctcaacgaggaggacttccggaatccatgggacctgaacatgggccccctgacggactggttcaaccatttcctcgggcccaccttggccccttttgcctcggagatgaccagcgagtaagtctcccatctgactcaattcccgcccaaacggtacgctgcttgtgcatccttgaactccgtgtaccaggttcaggacatcagcaacgccatggctgcggtaagtacttgtgatttatttctttcctcgatatattacctaaggcttttattctcactcttatctccttttcgagattactgcaaagaccagccgcctttccaagaccatagttaatcatggcttcaacctgtccgaatttcggggcatagacgaggtcgtgaggatcctgtgggacctgtccgctgagaggcgggctatccaagaggaggtgagcgaagggaggcccttgctaaggcgaagcttgaggaggaggccaagcagaggga

SEQ ID NO: 339465 - DNA, 572 bp, Cannabis indica
acaatgggtagcaccccaagaaagtcctaggtaaggtctgtgaaacttagtgaatagcaagtgaccaagacacctaagtctctgcatgcacggttacttggggggcacccacactatacaatgcatcgaactaggacaaagaacttatgtagagaaattttaatgcatagaataagctactaaacctgcctttaagtcgtgcaaccatacttcggcttgacaagtaaatctggtcacttacatgttaaggccataaaaagatagcaaggatgattgtatgttcgtcgtaaaagtctttaaggctaaataatagtggtgttcgaaaataaagggcctataagccaaagcaagaagatgaaagccttgaggttgaatatgaaatcagttctcaagcatgaggccaaggccctacaagaactgtatagccagaaaagaaccaaacagagctcctataggggccacgtactggactacaactaaggtagagttccttacatgttccacgccatgttgagtcttaagttgaacatttgactataataaactcaccattaagttttatacagagtttc

SEQ ID NO: 339466 - DNA, 623 bp, Cannabis indica
aatcatagtgtggaagattgtgaaggatcaaatccaagagaaggacattcaggctcagatcttgattatactctacaacagaaaggattcaagggttagagatctgagtggaagaagacatattattcccctgcagtcaatgtaaggttttcttaactttatatgtgcttattatcgttttagaagttcatatttaggatgttagtcaacatacttgtgagtagatctaagatcctggtaaaattaattccaacagtggctttataagtccaccaatttccttccttcacatacacattatgtacccacttcacccacaaattatcttctttcttagcaatggcccaaacatacttgaacatggctgccaaattccaatttgaaatactcctaaagcccattcttcccgaagatttggagaggcaaagggtgtgttgacctcgcttttagccaatgacaatgagtttatttttataagcgataagtgatttatagcagcaaatatatgataaagcaatataaagacacaagaattttatagaggttgagcctcgagcagttcggtaatagcctaatcctcgttatttgtatttacttaagatcaaggagaaagattccttttc

SEQ ID NO: 339467 - DNA, 551 bp, Cannabis indica
ttaatttaaaatatagctaatatataaatattaaaaagattaacaaatttttaaaatctgaccataatttaaaaataaaataatcaatttttaaatttaaacctcaaaatatcaaagaattaataataatatattaaaaattaaatattattaatttaaaattgatatttaggtttaaatttattaaaaataataatttattttgaaattagggtttgaaaattgaaaaaaattcgaaattgggaaaaatcccacaaaattcgaattttttgggtgtgctgcccaggagggctgcacgtgcagccaaaagaggctgcaaatggcccaatcgcgcacgcgcagagacgaagattgcaggatccctgcaccgaggtttctcggcgtgtgcagggtcctgctgggcgtgatgcagcctgggcgaagcacgtgcgagcgcttcagacaggggttttgtccctgtcacgtgcacgaatgccctccttgttcgagggcctggtgcatgcgatgcaccccactcgacaccattcaaacccgattttcaaaccttcata

SEQ ID NO: 339468 - DNA, 779 bp, Cannabis indica
cacaatcacattccactgtattgacaatactgtaattgtgaatgaatatatgttctggatttaacttattttgtgcatatattaaatatgtatattaaaccataaacatgtaacatacatgtaaacataaatcacttcaaaactctatattgataactaatcagattgtaatggattttatttagggcacaaaacccaacacaaaataccacttagatgccttcaatgagatcatgaaaatgaagagggtggcaagcaaggcaaggtgtcaatgctttgctatgatgctcaaaggtgcagcgtataagttgtataagaggttggctcccagattaagtgcctcgtggaaacaattcattgatgaattattggcccaacaccatgcctcgcgagactacatcgtcccaaggaaagcttggccaacatcaaattgttaggctaaaattagtctaagtttcgggtcgtattttcgattagttttcaatctttgtttctagttttagggctattttatgcttgattcttttgtttcaggtccttgggtgtttaaagagagtatgtacaagaattgaggacaagtggtgaaagaatcgagaagaaaaaccaagattggtgtctctgcctgttccagtcgcgacgggaactggcaacgaaaatctcaaagtttcaaagtttaatcccgtcgcgacgggggctttgccagtcgcgacggggacccagagacgggatttttgggcagttttgtaatttcaagattttaaagatgagacttggtttaa

SEQ ID NO: 339469 - DNA, 544 bp, Cannabis indica
taaagaggaatagagaaagaaactgttggcggaatgattctagatcttcactctgatttcctctgttcttcatgccgctttctattgtgttttaggattccaaatcgcctcctcttacttccaatcgcagttttatatttatatctaatttttagggtttgtcagacaaaaaatacccctgatcgtacagacgctcgccgcggccacagggtatctcgccgtggccagatgagcttttgaaaaccacgtttctgttctcgagttatggccgcagccatggtgatctcgccgcggcgactggaatttttctgcttcgatctcttttagtaaaatgagcataactttctgatacaaactgcaaatgagctgattcaagatgcgttggaaagataaaaaagagatattaaacttttatgttttgactttatccaatatctgatcataatatagtcgaattcaggcttaaagttttagctttattttcttttaaaattttctttattttatcgatcactgttttccgaaatttatccaatttatacat

SEQ ID NO: 339470 - DNA, 680 bp, Cannabis indica
agacattttacaatggtctcaatgtggcatctaagatggtgttggatgcttccgctaatggagccattctttccaagtcttacaatgaagcttttgagattttggaaaggatagctagcaacaactatcaatggtcaactaatagagctcccacaagtcgaaaggtagcgggtattcttgaggtagatgctttgaccgctctaaccgctcaaatggccgcaatgaccgacattttgaagaatatgaatatgggaggaagtgtacaaccagccgcagccattcaaagggcaaaaatttcttgtgtgtattgtggtgatgggcatacttttgaaaattgaccttcaaatccagcttcggtttcctatgtgagtaatcaaaacttcaaccgcaacaacaatccatactcaaactcctacaatccgacatggaagcatcatccaaacttttcatgtggaggtcaaggggcaagttcatttggagcacaagcacaaggaaaacaatcatttccaccgggattttctcaacaaccaagacctcaacaaccacaccaacctcaaggctctcaaataagttctttggagagtttaatgagagattatatggccaagaatgacgctgtaattcaaagccaggcagcatctcttcggaatcttgaaattcaattggggcaattagccaat

SEQ ID NO: 339471 - DNA, 441 bp, Cannabis indica
aggggcctgtaattcgccgagcagttgttccactcaggttggctggcacacctgaattcggaaacaaagtaagattagtataatgttaggcatatgtaattacatgtttaacagtttatgcctgttaaaatacattgatagcagtaatagtatacatagagttgtactgattactaataaaatgtatgttgggtaagataccgatcgatgttgtcacatcaatatggctagagtatgactggcatattgagtataagctgatattatggtcgatagtattgtcgtggctaaggctgagcagtcgtgagagcgagtagatggaggttgtacatgttggggaggttaagcttagagcgtacgatctttgggacatcaggactttgttgtgtagtcgctaggcgaaaatttttgtacttgtataattaaactttgtaaatgttt

SEQ ID NO: 339472 - DNA, 550 bp, Cannabis indica
tctagctcccaggtggcttcctccaccttgctatttctccagagtaccttgaccaatgctatggtcttattccgaaggactttatcctttctatccaggatctgcactggctgttcttcgtaagtcatatctggctgcagttcaaggctctcataactgagtatatgagaaggatctgaaacgtattttctcaacatagagacatggaatacgttggtccgctgcactgattccagacctaggtactttctctcccctgtctcatcccagtggatggaagacctacatttcccatcgtataacaactcatagggagccatccctatcgtactctgataactgttgttataagaaaattctatcaacggtagatatttactccaagagccttcaaaatccataacacaggctcgcaacatgtcctccaatatttgaattgtcctttcagactgcccatctatctaaggatgcaatgttatattgaatttcagttttgtacccattgctcgttggaaactctgccaaaacttggaggtgaacttcggatccc

SEQ ID NO: 339473 - DNA, 304 bp, Cannabis indica
ttcgcttctcttcgatttcatcaagttattcggccaggagtacaagattggtatcttggttgtacgttaatcttttgtgggatggtggctcgagttttacaggcagcatagcttcatatccatatgccatggcaaatggagtctatccggctgctgttttctcagttgttcgatatgaccataaaacttccaaaagttcttctagaaaatttcctttggcatcttccagtcttttctttagtgtatccttcaaggtcttgttaactgcttcaacttgaccattcgcttgaggatgtgccactgc

SEQ ID NO: 339474 - DNA, 1000 bp, Cannabis indica
ttgtgttgagcttaaccaattctgagtaagctctctttgttgtaaatcttccatcttgagcattcttccaaataagcatatcgttgtaatcacacgggagacgtttaattttacaaatcctatctcccatttgttggccaaaaatctggtgaaggatatcacaattccattcattcccattcaatgatagatcagccactgtttgcaaagtaggaaaacgatcccgacatccctccaacaagtctctaaattcattgtaagatagccatggaatccacggctgggtccatatatcaattgactccccttttgctgggattgatgttgaagacgaccccaaaattcctcttgattggagaatgcctttccatattgtagaatcattccctcgtggttcaatgctccagaaggattgatctttgcaatacttagcctttagacattggacccataacttgttgctattgctagccacatgccaagcaagtttggagatgagggcttggttcgtgtcttcaagtcttctaaaccacaaaccaccatccactttcggtttgcacagcttatcccaactgatcactgcatggtatctatccttcgtagcatcccctgtccaccaatacttccgaatcaaagcgtctagttcccggcaagtagataaaggtaccttgcaagaactcatagtgtagattggaagactcaaagcgactgattgaataagggtggccctaccagcaaaggatagaagcttgagcttccaaccctctagtctcttcatcagactctctttcaatcgtttgtactcctcccttttccgtctcttgaaaacaaaagggttccccaaatgcatctcattccccgaacactcttggacttgaagagccttcagaattgctgctttcctcggagcctccatatttgaggagaataagacactagttttaggcttactacacttttgccccgaccaagtttcgtacatctccaaacatctcataat

SEQ ID NO: 339475 - DNA, 911 bp, Cannabis indica
tgatgaacaaataattatagatttttcaatattcaacatcttcggggatttgcttttggttgttttcttgttgctttatggttgtttctgctgtcaaagtcccagtatcaaccaaaataacatcttttaaaacaaatcccctccttgaagcagataaaagttgtttaattgttgttgttttgttgttgtcaggttgctgcatatgtgagtatactgagtgattgtcactttctatcattatcacattgttgcactccgttgtttgggtagcttccaaaaaagattgtataaaacaacagacttttgtcatccttaatttagagtggttggctaagaagcaactaggattttgaagtatggtaaataaaatatgttcatgtaattttcttaacttgtgaacttacttgatgagttcttctagagattaattggcacgatataatgttatgaatttcgttcgtactaattttagcgaacttggtacaagcatttttcccttttattttagtgtcaaatttagcacctgcaaaacaaagagatcgaatttcaccaaagatgccatactattattaggtatattaattctcagcagacatcaaaacaaactaatgaaatatcattttcatagaaaaaccacaaacaattaaacattgcaaatgttagttttgtttacatatgagtctatatttactttttcaagagaaattattgaagcttatactcttaaaagctatggaaatgtcacatcaaactaacctctgttgtgctctttccttcctgtgcattatagtttatacgggcttctacaactttcttaaaaaataacaaattaattaaataatcatatcaatatttaatggaccatggaattatctttatatattaaaagtgcctatctaacggcatttctt

SEQ ID NO: 339476 - DNA, 1093 bp, Cannabis indica
aaggattggctgtcaaactgcttgccattatccgaaactgttttgtatggaaattcgaaccggcagattatgttcttcacaataaagtcttgaactttctttgatgtaatagttgtgagtggttcgacttccgtccacttagtgaagtaatcaaccgctaccactgcatactgcactcctcctttgcctttgggtaattgttcgattaggtcaattcccaaaaatggcaaaaggcgacggactttgcatctgagttaactcgttgggcgaagctcgaggtatctttgaaaatctctggcatttgtcacatttcttaacataggcctttgaatcttcaatcatcattggccagaaataaaccttgccttagaatttgcttagataaactttgcccagcagcatgatttccacaaaatccatcgtgcacctcagatagaagtcgtgcagcttcttcttgagtaacacatctgagtaacggcatagaaaatcctcttctgtacataattccctctgctatgatataccgtgcaaccttcattctcaccgttcgagcttcattctgattatctgggagttccccagtgttgggataggcagctatcggtgtcatccagtttggggaagtatcaatcatttcgatctcttcgtgccagtgatgttaggttcttcgaggaatgggataggaaccaagttcaccttatcacttagattactgcttgccaatcaagccaacgcatctgcagtcgtgttatcttccattggaatttgtctgagatcgtagcttttgaattgtgcaagcaagtcatgaatttttctcagatatgctatcatcttttctccttgagcctcgtattcttcggatacatgatttaccaccagctgtgaatcactacagatttcaatgtgttcgactttcatctcctaggctaactttaggccagcgattagagcctcatactcggcttcgttattagatgccttgaatctgaacttgactgtagcgtgcaggtgttgccccccaagtgtgacaagggcaattcctgcaccagataattgatctgtagctgacacatccacgtgtagtttccaagtc

SEQ ID NO: 339477 - DNA, 705 bp, Cannabis indica
tcattaccatgctgtgaggcaactgtggaatatgttttaccaggatccagattttactatcatgtatgttatttaacatcccaaaatatgaaattttctaaaaataaatagtaaaataaacacatataaagtttgagaaatcttacagtcggtgcagcggaattataatgactccttccacttagatctctaacccttgtatcttgtgtggagcagagtatcaccaagatctgagcccgaatctccttctcttgaaactggattcatcacagccttacacactatgattgagtaccacttgatgtgtgtgggcacttattctatcactataggcttggaaaatatgaagagaggaagagaggagggtggttcgaaataggcagaagagatggctcaaactttttactgaaggcttgaatttcatcatcttttgatatgaggcatcactatctatttataggcaaccacctaggtttaggttagaattgtttggcattaaaatattgaaaaaattaaatggaaaattcccttcaagtggccggccataggatgtgggcccccactttacaattttgccatttttcaacaatttttccttatttcttcaaaaatgccatttttccaattcaacaacttaaatgctagaactatttatttaataattaaaattaattatcaaataaaattaccatttaatatatttat

SEQ ID NO: 339478 - DNA, 799 bp, Cannabis indica
ttaggcttttttttaaagagagagaagcagtacatatactgcctttttttttatttttttattttattgcttttctttaaagaaagaaactgccttgttttctttaaatatttccttttattatttcttatttatttttttatttacatattaataatatttttacttttcattaaaaaaaaagtaagattatgatatagtcacgcgccaggtgcgttgggaaatatttacccaattacgtttggcaggtcactatagagtaatatttttttaagtaataaaaattaagtacttttgggttttactctatagtggcactccatatttttagtgactcacattacaagagactaaccccacatatttagagtctgattgtgcatgtcactaaaaattactcttaactgtttagtgacccacacttttgtgcatgtcactaaaaggctatattgtagtagtgtatgttaacgcaaatttttgttaactatattaaagcctatttcgtgatggatttgcatagaaataataataataatagtaaaagaaaaatgaaataacacaaagctcttttacgtggttttgcagttaaaatttcacatagtccacgagtctatcttattagaatttttctgatacagtagtagggtcttttgtctaagaatttttttccttttttcaatgtatcctgcccctattgatagtttcataggagggtagttaattacaatcaaattgatatcccacaacaataatctcctaaaattgttggatttgattacgacccacgtaaaataaatgc

SEQ ID NO: 339479 - DNA, 812 bp, Cannabis indica
tccagtgcactgatgaatcagggacattatcttttgaagcatataatcacaatcacattctactatgttgacatcactgtaattgtgaatgactatatgaactggacttaacagattttgtatatattaaaccataaacatgaaaaccacatgtaaacataaatcacatctaatcttttattgataacaaatcagattaaaaagaaatgggttttatttagggcataaaatcccaacaataagatcttgatgcatcttggtagtgccaggatgcagtgaatatggagtggtatgagcttcctcgagaatgtcacttctaagttccacactacttggaacacaaaccctggtcttatacaataacatcttattatctgacatcgtaaaatctttagcttgacccgagaaaacctcttctcagatcttcactaattccagatcagttaattgagcagctttaattcgttctaacagatcagattgcaacatcaaattatgaagttttcctacaacaaactcaatgcttgacctgaccatgtcttccactagctgaggtgaaatcttaatcatactagttactttcccgggacccttccttctaagggcatcaaccaccacattggccttctcgggatggtaaaggatttcacagttataatcttaaccaactccaaccaacgtgtaacgccctgatacttaggcgcgctacagtgatttttcaattacattgccatcttttctaatcaaagaagtttcctttaaaatcttgtctaattaaaattttagatttaattattaaactttataaactt

SEQ ID NO: 339480 - DNA, 1125 bp, Cannabis indica
aaatctcacatttttgatagtggtacccctttgtgaaatgtggcccagacccatctcagaatatttttcccattattcacattgaatttgtactaataagacgtgaatataaaaattggtttcgcgttaaatttggttaatatgcccataatttaaaaattgaaaatattttcttttcagggtaaatttttacaagtttttttcttactcttacactcgttagcattcgcttaaaaactcacactacacatcttgaaaaatcattaaattttacagggacgaagccaagacttttgtgcaacacttttctattggatatgttgcgagaaaaaatagtttttaagcactaacgatcgttttagtcgaaatagtgaaaatctcacattttttatagtaatacccttttatgaaatttggcagagacccatctcattatatttttctccactagtcacaatgaattcgtactactaagatgtgaatatgaagattggttttgcatcaaatttggttaaagtgtccccctaattacaaaattaaaaaatattcttcttttcaggataaaatttaacaagcttttccctcactcatacactcgttagtgttcccttaaaatctcaccaaacacatctcaaaatattattcaatttcacaaggacaaagccaagacagttgtgcattatttttctattagacacgttgagagaaaaagtaattttcaatcactaataatcatttaaatcgacatagtaaaaatttcacatttctgatagtcgtatccctttgtgaaatgtggcccagacccctctcagaatattttttcccactactcacattgaattcgtactactaagacgtgaatataaagattggttttgcgttaaattcgcttaaaatgaccccgtaattcagaaattaaaaatatttttctgtttaaggtaaattttaacaaattttttccttactcttaaactcgttaccgttctcttaaaaactcaaactacacatcttgaaaaaacatcaaattttacgactgttgtgcatcacttttctattggacacgttgagagaaaaagtaattttcaagcactaaaaattattttaatcgaaatagtgaaaatctca

SEQ ID NO: 339481 - DNA, 761 bp, Cannabis indica
tagctcatcatcgtctaaccgtagagcatgctttgccaaaccatgggccgctaaatatccaaagcgagccacataggacaaaactgcccccggaaatttagacaataaagctataacatcttcaaacaccgctcctagctcattgaaatacacctgaaaaaagcacaaaaccagaataaaacttttattagaaaattatcaaattgaccagaatttatcaaacaacaagaactaagcaaccagaaccccactaaaaattattagaactagccaaagggattacctttggctagtagcaactgaattatagcactctacttcataaccttcttaaagtcaccatcctttactaagatcatatcatctaaaataaattttagtatgtaatttagtaaaaataatgaacctaaatcctactatatatataatgaaactataatttgatccatttctatttatatcaattataaaagttgactgccatatttgaaaaagatcttccaaaaacaaccttggaaaatctaagctttttgattgacatttccaacaggataaaactattatttgactctattggaattaactactttttaaataaattataatatactactagtagtattaagatgtatatctaatactttcctaatactatatatagctattttttattattatctttcaatacaataaaataaaactcaaacttattaagcttaattgtccatttatttcagcatcttataggataaaacaaaatt

SEQ ID NO: 339482 - DNA, 538 bp, Cannabis indica
cttgaatccgattggactcctcgacagatcctatacccgtgggggtagggaatttcatcgtgagatgatagatagaggtcactatcttcatttctttcagaatggggcgatctattactgcattgtatgccaaatattgatcgatgactgcaaaatcggccatcgctttggcagtgacaggagcggttcctagggtgattggcagcttaatcattccttcaatgcaatcgtattcccagtgaacccatagatacttgataccacaggtcgcaaatcttttttctgtaaccccatttgtttaaaggcttggaagttgagaaggttaactgaactcccattgcccactaagattcggtggacattatctcctccaatattagcgacgattacaagcgcgtctgcgtgtgggtgatgaacccacctagcgtcactctccatgaagattatgtcgtcgcattccttcttgaaaagcttctcaggtcgctcacttaaattgttcacgttggtgagcggtttctcttttgtttccttagcatat

SEQ ID NO: 339483 - DNA, 654 bp, Cannabis indica
gttaattttgttatgtatatatatatatttgaaaaatattgtaaattttgagatattttctttttttttttttgtttattaattgagttaaaagtaattataaataatttgttggaaaaatatatattatataaaataaattatttataatttaatataaaaataaagaaaagaaattaattttacaatatttaatttagaaaaataaaataaaaaaatcaagtttcaagtccaacttagctggactagaaaggggttcacgctttttaagtctagcattgttggactagaaatttttttctagtccaacaattaagtttcatgttgtgggactgctttttaagtccaacaatgttggactagaaatactttttattattggactataaatgtttttctagtccaacattattggactagaaatgtttttctagtccaacaatgttagactagaaaaatactcctgttatgtcccaggctattatgtccaacataaaatggactcaaaaaatttatctagtccaactttgatagacttaaaaggggtttttgtagtagtgacatgtcagaacttgaaaaaatagacaaaagaatcagaccttatcttcaaagaataagatacaaatattgtagtagatgccactgcccgaccag

SEQ ID NO: 339484 - DNA, 1166 bp, Cannabis indica
gagaccttgctcgaggcatcacaataaacaacaaacttttccttatctgaaggaagagttagcactggagcattaattaagcgctgctttaactcaagaaaacttttctcacaccgatttgtccaaacaaacttcaaattctttcgggttagctccgttaagggtacaacaatctttgagaaaccctcaacaaatcgacaataaacccagctaagcctaaaaagcttctaacttcagtggttgattttggtgttggccgatcccgaactgcttcaatcttggccggatccaccatgattccatccttatctactatgtgcctcaagaaagagacacgagataaccaaaattcacactttttgaatttggcatacagcttgaggtctcgtaaccgttgcaaaatcgatttgagatgcaactcatgttcctcttctgattccgaatacaccaagatgtcatcgataaacacgatcacacatctatccaggtaatccttaaatacctgattcataagatccatgaatgtcgccgggccattggtgagtccaaaagacatcacaaggaattcataatgtccataccaagtatggaacgcagtcttcgggatatcttcctcttgaattctcaactaatgatagccggagcgaagatcgatcttggaaaagaccatcttccctttcagttgatcaaaaagatcatccattcgaggtaaaggatacttgttattaatggtaagcttgtgttgcaatatgttttaccaggatctagatttactaccatgtatgttatttaacatcctaaatatgaatatctaaaacaatgtaaataaacacatataaagtttcagaaaaccttacattgggtgcagcagaatattaatggctccttccgctcagatctctaacgcttgtatcctgtctgtcgtagagtatcaccaagatttgagcacgaatatcgttctcttgattctgcattcttcacagccttacacactatgattgagataccacttgatgtgtgtgggcactcaatctatcactcaaggtatgaaaaatatgaagagaagaagaaggtggctggttcgaaaattgggtaatgaaatagatggctcaactttcctgaagcaagaaatttcatcatctttagtgtgagccatcactatctat

SEQ ID NO: 339485 - DNA, 609 bp, Cannabis indica
cacctcgaagaggcacgataagctacctctataaataggaaaagaaggcgtctagtcccatcaagcttgtcttattaaacttgaaagaaattatccttgctttctcttcctctacacaggttgcttgtaagcgtcaaagcataacaacatgcttgtatacaaactccattgaatctttcacctcaaatctttcagaaaagataaacttcaaacaagggtgtttatatgcacactctttgtttattttatcttttcttttcttttttatcttatctctctctacataagcaaaatctgcgttaataccgcttctattcactaaaataccaatttatacacaactgagaccattattaagaataatttcttaaaatctatagatctccattttattaataaaacataatcatagcttaaatgctaccgtaaacgtaagtaaataatattatgtcgaactatttaaatttgtgtgttacgtattctatatatgtatatttatacttactagaagaaagttacgtgcaaggcacgtatacttagttttatgttaggtgctctataatttaattgagaaagattcaataaataatcatataatttaaaatagtt

SEQ ID NO: 339486 - DNA, 1428 bp, Cannabis indica
cttatttcttacagttgttatgttgtaatctgggtgtaattaccaatttattggtctgcatcgttgtcatctcatttggttttagcaatttttagggctgaactgtatctgggtaaatgttagggtttagacagtaactaagttttctagattctccaatttaccaacttctggtttgctaaatttcttccagtaattgggattgctttctccttgtagcaatgtcccaatccagttcagaagtttatcgtgcagaaaatttagaaattgagcatcctactgaatttgccatcccctacaaatcaaagatttcaaaacccaaatccaaattagaggtaaatgatgccagaattagggatcatctagtgaaaattcaccaagaagacattgctagttgccacagacgcttcttgcaagagattactgaaggcaaatgccgtttcttgcgtgaagctgcttggcccgaacctcccagtgtgtcctctattcctttggctgagcctcaatttttacccaaggtcataattacttttgaactaggtgacttagattttgaaataatgtctcctaagccactgaaatcatagactccccaagaccccaatgtcacttttgaggcacagttaatagagtcgaaggtgcgagccatcgcaggttatgtaggtgactaactgcggacttgtggtattaaatacaagcgagacttctgggttaggtcaatgcggccggaaatttcagttgttacccaccagtgcgacttactcgcgaaacctctgagggaaccagtataagtggctcgactggtataggcgcttagagccttgagcacatcagggctggagctaaaatccccctacaagattactttaaggacttcataaataaccttgggcttgccccgtttcaactaaatcccttgtcctacaaaatccttgtaagtttgaaggttctatacaaaatcctgaattgggagtgtcccaccccctagaaatagaatatctctattttgataaggctgttccagcgaggaagaatgcggcagggggtttctactatcttgggactcacacatgcaatcgcaagatcatcgtggatttgcccaataaaacttttttcaaggatgaattcttctagacggtcgacctttctcccatcggcacaatcaccttccgtataattcgtaagtaattatttgcattagacttgggtaaattaatccatgccttttattctagtttttctgactgcaattttactttgtttttgatagctgtctcgaaaagacctgcccctactcctgagatggccaagcgatgcaggctcttgttgactctcccgtttggccttaggtcatacgacttccttctgaatgaggtcaaccagaggtatgtggatctcctagctgacaaggagtttacttgtgattat

SEQ ID NO: 339487 - DNA, 778 bp, Cannabis indica
acttcttcttgctcatgctgtgctgtccgggcatacctctctctagctttgcccgaatctccggcaatgtgcgggcctccgataatgacttgtaagtgtccatctactggtggaggtagcaaatctttgttattctgacctttgtcggtcttgacatactgctgcaggtgcggattgtttttctttattagaaattcaatttcccgcttcaggttgtaacattcgttagtgtcgtggccgtagtctccgtggaaccgacaaaactttgtcatgtcccttttgttggtatctttcttcatgggcccgggcttcttgtacgggatcaacgattgagttgccatgtatacactttctatatcttcagtctgttcagaatagtgaatgcagtgtattttgcatgattctctcggggagtctgttcggatttatcaatgaactttcctttcttcccgtttccttgcttgtggttgttacttgaacgtttgccacttgtgcttgaattattagaatagttgggaagtttggcggatgtcccagtgggaggagccttcgacttgcctggcttttttttcaccttctactcgttgaatggcttcttcgagcttgatgaagccttcggctcggtcaagaaaatcactcattgagtctaccatcccgttcttccttatatctttccaaagtttgctgaggacttcaatgcccccccagcatcgcggataactttccatcctcggtaaccggcaaaactttggtcgctttcgtcatgaatttgctgatg

SEQ ID NO: 339488 - DNA, 681 bp, Cannabis indica
aagtctatattaccttttatttaaatattatataattataaaaaataaaaaccatagggatattttggtcaatatacattttattccattacatttccacaccaaaccaaacacaataattttaattacaatactcattccaaccacaaaccaaacattataactttttttttgaataaaagatggtgtttattcaataactttcggtagctacaatagaccttaacttaaaaggaacagtagtcccactgaaaatacaatctgactttaaactagaccctcttgcaatgcaatgagcagccttgtttgtagatcgttttacaaacattaaagaaaatttatttaaagtagaaagaaactctcgacagtctctagcaatcagaccaaattgtgatggcatacttatcgaacttttaattgcctgaacaaccatcaatgcatcggtctcgatcaccacatttaaccacttctttcttttaatccaacttaatgcctctttaaccccaattatctctgcaacttcagattgaaccaagccaattcggcttccagaaatagcttcaataagctgtccattatgatcccttgctgtacaaccaaagccgaacttgttctccgcttgaaaaaggcaccatcaacattaaccttaaccctatttaacattggtttctgccagtgctc

SEQ ID NO: 339489 - DNA, 515 bp, Cannabis indica
ttaatctaaaattaatactaaaaataacctaacacattgatatacataaggtatctttactttcccttagtccttttctaattttatatataagtataagatctaaggctttcccaattttatacatttcaggataagaaactatgttttttattttttgtagtagctgaattaagtttaatgatggaaaaatcatacaaagtttggatttttaaattttctttttctttagggtatttttatttgtttggattggaattaaaagtaccatatttgttgttcttttaatattatgttgcatttttctaggtttgcggttataggggttgtggtggtggtgttgtggcgtgcggtggtgtgttctcccgtctctaaaaaaatttgagattgttgtaaatttgaggtgttagatttgcttatgtgaaactgaaaaaattcgtgtggcattgatttggttataattactagatttttttacattttttaaaaaaattgcttcagtttatgaccgaagc

SEQ ID NO: 339490 - DNA, 506 bp, Cannabis indica
attagcttcggtgcactaattttttgcatttgttatgaaccgaagcaaaaaaaattttttgcttcggttatgataattaattagcgtcagttcataactgaaacataattaattagcgtcgcttcataactgaagcaaaaaagatcactatttacgtctacagttatagcattgggtacaccaactgaagtaaattctttatatgtcacttaaaaaccgaaccaaaaagccttttttgtagtagtgattggggcatccctcttgtatcaaacttcattcattgaataaagaattgcgatttcaaaatcagtcccaactttcattgttcaatttgtcattatgctaaacaaaaaaattaccctttgtttcaaaccataacattgccaaagagtgttttgatctcattcacatatacagtagaacctctatttaagaatactctattcaagaataacctctaatttgttataaaaaatcaagtcccgatttaggccagttataaataa

SEQ ID NO: 339491 - DNA, 650 bp, Cannabis indica
atgatggtcctttatgtttaaagtcaatacaatttttttgcgcctttccaattcttgccccataaatgaggcgattcgcctgaaatgtatcgacttaactcattatcaatcatgtcagggttagatttgaagttgatggtcaccaattgaggaaatttttcatctaaaatgattgcatcttgtgcgatcacatcttgatacaaatgttgtcgctttctaatcccaaacagagcatcatcaacatgctgtaaaaaaataatagcattgtacacgtataagcaaatgtaagtcttaaatatataagagatcataaaatcatatgtcacatacctcactaaatagccattcatgcttcttgataatttgttggaaatacattatagttcattcaccaagactacaattaatactttctccactttttaaatgttcatcaaacctcaatatttctcaaaagatcaaattggatatgatcacctcgacgagctttagtataatgaaaagggtccgtatatggtggctccaagtagtgtgaacgctttggtaccctctttggattttctcgcacaactagatgagattcaccttcaacatcgtcctgtagaggttgctcttcataataaggagtatattgctcttcaacatgagtg

SEQ ID NO: 339492 - DNA, 555 bp, Cannabis indica
gggcacaaaacccaacagatcctccatggggttcgctattcaaaataagtagaaggttagaatgacaccaaagaattacaaatgcaagtatagtgcagcgagactaatcctaccccggcgatctattttgtcctagcaaattcataaattaaaaagttggtgtcgtcatctcctaataagctatcaaaagggagaaaccaactcgaggtcaggtagaaggggatgggaaaaaagggacacaaacaaacattctttgtaaaaaaaattacccccttattaataacagagactcgtggactacttctcattaatgtttgaaccacgtaaaaattattcgcattaattatccgtaagctctcattattacattagatatttggttgccgaaaacctcagtcaaaaaacccaatataaatatcgggttgtaaatatttaatcgtaactcgcccaattaaaaattattaaaagttcaacccgcccaatgatttcgtcgatttggctaggttaacctgtccaaaccgttcttcatttttttttataattattattgttatt

SEQ ID NO: 339493 - DNA, 1149 bp, Cannabis indica
tggttaatggcatccaccaccaccttgcaatccgaccaaatttcaactttgtgagggttttccaattgcaaaaattttaaagcttccagcactgcttgcgcctcaaccacttcgatctatagcaccctggaatgaagatcatgttagcagaacataacagcccttgccaatctctcagcacaacccccattcgaatcccttccaccccacttgtaagagctagggtgccagaagcaaggcctagcgctcaggttgacacccggggctggtccagtgcccaagttgacacctagggcccagcgcccagattaacattttgtcaacttggaccgattctgataatattttttgagaatacttccaagcatctttttcattttatttagaaaatattgagattcaactattgtcttaacaattattgtgttgacaaattttgtctttaacaacttttgtttttttttctatttaattaatttgaaaattatttatttattataattattattttgcgaattcaaaatagatttttccgaacaacattatacaactctttattcatacccttgacagtgatttaacttttatggtggcaattcagagatcatggaactataattttaagctccaataaactagaaatttaatgagtctcattaaccaaataatcatgttaatttattaattccatgattactccactataaatatggaattgaactcttagtaattatagaattatatttattgagttttgctgcagtgtctatggatctaattaattcgagtaattagccctccttatgtcggttcgtaattagttttggtcaaattatttttttacccttctaataacttatttatcatttagtaccattaatttactaatggaagtataatttagatcccatctaaatttatgtgcaacattccggttctagaattaacacataaaggaaaccaagattcaatccgtttggaaagtcaaaattctataattgtagatcatgttcacagccatccacattattagattctcaaaacagaagttataagaatcatcttctctgaaaaacttgaacgagtgaatcaaagacactaataacatgaacataagttcatgattactcagaatttaggtcgatctac

SEQ ID NO: 339494 - DNA, 1021 bp, Cannabis indica
ttgagatagtgcataacctcaaatgatatcataatattatcagtaataaggcgtcccagaatgaaagcagattggttcgaggatatgatctgaggcaacacttcttttagacgattcgcaagcaccttagacactatcttatacaagacattgcacaaggatataggtcgaaggtcacccatcgaagtaggctgtttcttcttcggaatcagtacaatattcgtgtcattcaggaatacagccattcgcaaagaattgaaaaacttggttcacaacatcgatcttcactatttctcagtattttcggaaaaaacttggggccataccatcgggactaggagatttatcaagatgcatgttaaacagagctcttctaacttcttcttccaaaaccggcctaagtaaagacaaattctaatccacagtgatcaaaggagtaatctcatctaccacagttgagtaatcgcccacatttggagtaaataagttagtgaaataatcaaccataacattcggcaactcatcctcccaagtaaccctgtttcccacatcattcataagtcgagttatagtattgtgtttctttctagaagtagctttagtatgaaaatacttattgttactatcaccttcttgaagccacaactatttagaccgttggcgccagaacacttctcgttggttcataacttcacataattaacaacaaaataaatcactctaacaataatttaaaataaataaacaaaaaataacaaatttaaaataagaaaaaaaattgtatataagaaaatgttaattttattttagtttatatttttcttattaataataatagaatatatacatttaatttactatattttaaaatatatttgtatcatatgtattaaatttttaaataatatttttttacattaaaataatcattgtatatatacataattttttaaagagcaatttacagcgaaacccccttatgtttaaattttaatacacttaactcccttatctttttttt

SEQ ID NO: 339495 - DNA, 609 bp, Cannabis indica
aaaaacctaaaactggttacaaacttgtctttacaaaaatgccactagggaaaaaccatgaagtcatcttcctaagtcaaggatgattggggaggccgatgaactcgagatagatcgggtacatatagagagccttgatctctgcacagaccttattcccctcatcatcagaagatcccctttcctgaagtcgagatctttttccttgcctcaagatattcctcgataccaaaaggaggttgacgcaaagatcttctggcacaggttaaggtcttaggttggttggattctctgatagaaaccacgccaacttccttcccagattcatctgcaaccatgccaaccttcctctagaattctttatcagcctgagggggacctttaagatcgctcacaagatctataccctcagggatcacttgtgaggattggccatgacaggctgaggggttcccctaatttggattggttggaagctcctcaaccctagaatccatcatttcttgctccggttgaggcttgaagtctgtacgaacaagtggaaaacggttggtgcatctaggtattatgagggacattttggcaggaaagagatgatccattctaaaa

SEQ ID NO: 339496 - DNA, 640 bp, Cannabis indica
ggttgatatgtacattgctggaatacctctaactcatggctaaaccatagtttctttcccctttacctgcaccacgaagcacccatgagtgacaaagacgcagtaagaaaagcaagtaaatagaaaacacatatattacgcattatgagaaaatcatagcaattcatagccaacaacttcatcatcataataaatagatattcaccctatacataatcatacattacacaataaattaattgtcttataagataacccaacttttatgcttcatcaaacatccttaccactcgttttccatgagctatgtatgtcactatcgttacctgataaagaacccgataagtaagaaacttatctatagtttcaagggagtaattactcattttcattaatagtaatgaccgtatctttatttctaaataatggtaatgacaacatatttccctcgatcataatcgagtcacaaatgataataattgatacatcgatcataatcaagtcacaaactataataatcgtttctcacattatatacttagcagtgcatataggttttcttacctcagtccaaaaatcaggtgtgcgcgccaacgtaaatggaaacaaagcttgacgatcccgggtcctatatcatgac

SEQ ID NO: 339497 - DNA, 1235 bp, Cannabis indica
agtattaaactagtttataaaatcacacacgtggcatccctgtagattagagcgttacaacttggtatcagagcagccacagtcttaaaggtcctgaatactggtcgaatatggacatttgttgcaaggacaggtcgactcatggtatagtaagtgtttatattatttgctattggattacctgcctaggctattataaagtatgttaggaaaagtagcatagtgatgattgtgataagaatatgtgtatggtatctacatattgatattgatatccatctgagttctaaatggttagaagatgtggactaaatgtgtgataagttaagtagtaagggcaatcaaatatctgagctcaaggcaaatagtatggaagagaattctttattgctataatgttgggaacatgtaaattctgctatgcaggatatgattatacaataagggaaaacagatccgagatctgaaagagcaatagactcatcttgtgtctattcatgtattaccgacacttcttattgtaccactagatgtggtagaatatatgaagctaacttactagtagatcatgaggcgaaaactaaatgaaccaccaattatgggacagcacaaaaaggttccagggtggtcaggatagcggtcaaggtgagaataagaaatggtgaccttatcttgttttggtagcccaccgtgaaggaactccatggttgagtgtccttaacttagggtgatttcatttaggaaatttctcgataaagcgtgcgagtcagagcaaagcacgttagaaacacttggattggtccgtggggccagttgtcagtccgagaagcagctagagtgatacactcgtgtataagagccatcattctgtgaccataaagatctaatagaggcttgaagtggggacgttaccaaggtaacatataaaagaacgtcaggaagagtagtgatatcactaaggggtaaaaaaaattatctaaattacttaaggtgaaatggtaatgatagagagtacttcataattgactggatagtcaatatggtatataaggagaccattgagattctgggaaaagattactttattaagcaattatagaaaggcatacttacccagaatggggaaaagcttataaattgagatgcaattaaatgaacatgtatttgagtgattgctgaatgttggattacaaagtaggttgtttattaaacaacgagctatataattgagtgta

SEQ ID NO: 339498 - DNA, 794 bp, Cannabis indica
agccgtatcacccagatattatgaatacctatttccttgattcaaaaacccgcatgtctcatcctatgacggaaccacagatccggtctcgtatttgaataactttaacacgataatgcgagcgagtaacatgacgaataatttacgctgtattttgttccccacctcacttgttggagcagcgagtagctggtttaacaagtttactcgtcattcaataatttcctgggagcagctgtccagggatttcaagccgttagggataggcgacctgaagcggcctcgctaaccaatataaggcagtagcctgacgaaacacttaaggcgtacttaagtcattttagcacggctaccgctagggttagaaacttggatgacagcacacaacttacaactcttcaggcggggatctccactaatccattaacagccgggggtgagttgtgggatgatttacaaggatgtccggtaagaagcatcactgagttcaacgagagggctcaggtatttttctgaaaggaagaagcccgaaaggaaatgaacttgttgaaaacaagctcaggaggtaaacctagcaatgtttcaacagagattgcttccacgagaattgataactcgggggcttctagtccaaaatgaaaggacggaattagggaaccctcgaaggatagaaagaaacaaaagaagcatgaaaaatacgtgacattgtatactatttataccgagcttaatgaaactcgggaaagtatttacctcgcacatgagcagaaggtagcctttggcaaacccgagcc

SEQ ID NO: 339499 - DNA, 630 bp, Cannabis indica
ctctctctctctctctcacgcataacctatctctatcacttgagatttgccaattctggttctcacattgtaatcttaagagagccatttcaaatcccaatactatattgatctaagtggtattatctctggtatcaatacaactaaaatgggagtaggtcgttacttgctaactaagggggtctaacctctataaaatctcatgtctatttactttttttgttctaattgtgtaacacgtggcaagcattagcattaaatacgacttcgctgtctgttggccaaatctgagatcaacagtttggtgctatcattgagaacgagttgttaatttatctgataaaaatcatggtgaacacaaggagaactccggctatgacatctgcctcctcgggtcttcctcaagatcttatggcggttgaccctaatatccgtgctccagtcacaactagaatctccacaaacgcgacagatgtggtgtgacagttagtagtcctgtgatctataaggtgatatatcatgtaagttgtgcaatctcacatcgcttcgagaaattcaagtgtggtgattctgagactgtgtaggtatgggactacacaattgaggatggcttaaatggattgattgata

SEQ ID NO: 339500 - DNA, 1068 bp, Cannabis indica
ctattactctggtaaagatgagacatagtaaagaaaattcttgtcattagttgcggaaggcgctattgggatatttgattaccttcttattttgccacccaacatttcatggaatttcttaagccttcacttgtattggatttattggatttgcttcatgatctatatgcatgttgtggcatgtttgtacagatttacatgttgtgtttaatactatgctttatgttaaaataatctctcatagatggagctcaaagcacaggataatctcaatttgaatagcaaaaaaaaaaaaagaaaaaaactacaagttctacttcataaattgttgaatcttctcatcttttctaatttccattattaaatgcctcaaaaatgttaatttggttttctagcaataacttcttaaactcaaattgttcccaacataattagtttgcatcaatattgggatttaaaataaaaataatatgtttttttttaaagtaaaaaaaatgtatgattattggagtgttataaaagtggagtggtgcattgcatttgcaatgttttagcaaaacaaactttaatggtgatacaaaatgtttggtataggataaattttttaaatttagctcataatgaatgtctcatttcctacttactcttttccctgttttttattttttacatgagaaagggaagattggaacttaagacttacttttggtgaagatatatgtagttcctttgagttatatggccataaaattaaaattctatcaacaattttaatttaattatagtggaaaatttatgagtatttatacaatgtatgtaaaaatatgatttagataagaaaaagaaatatgataaaaacaatttaggataacaaattatcccttatggagtgtttggtataagagcagctccaataccacattgtcaactgttgcccatcaggttgtgctaggggaaggactcttcaaaaaaattaacaaaccacctaaactaaaccaaataaattgacaaaaaatacaattcgaataattttacaaaaaattcaaaccgcccaatgaatatattgag

SEQ ID NO: 339501 - DNA, 630 bp, Cannabis indica
tgtactatgtatttccagatcaatttcggttaatcatacatatatgcggctcaagtaatttttaaaggatttatgctttgtaattacttgtttgaaagagatgattattttattcacaactaaaattcaaaatatttcatcaacaatgtgatttacaatcattaatcttaaaagaactttcccaattcaatttcttattttatcaatcctacaagagcgcctagttttgataaaatgggttttaatttttaaggtcaatccttgacatactcccccaattttttcaatatccagggtcaatccctgacatatcctggagttcgaggtgaagtaatcctagttttagttctatcttcgactgccactggttgtcgtccagttatggcacccatagcgagccaatatctacttaggtcgcaattcttttacaaatttgttttaccggagtaactgccccttgtattcttatgaatcgctcctttttgagataactgaggtgtcccttcctcttaaagagaagggttataaccccaggttgctcgagtggttactaggcagatcgagctaatcatggacatcatcctgcccctttatatattgttgaaagctccttgtgatatgagaccttct

SEQ ID NO: 339502 - DNA, 592 bp, Cannabis indica
acacaaattttcgttaaccaaatttgagcctcacgaatatgattcaacacagaaaaactatacaaatgtgagcaccggatttttacgtggttttgcagttaaaattctgcatagtccacgagtcaatcttattcaaatttctgagtaaaaaattttcagggcctctcgcataagagtcctttttctccccttttcttgagattgtctgccactatttataattgcatagtgacagttattacaaagctgacccaaatgtaattacagttatcatcccttaaatcgtgggatttgattacatattacaaaatgtaaacgcggtgcatgattttgaaagttatacatctgtgtttttcccgcttttactaggtcagaaatatcgtgtattaaacacgtcattaattgttgattctggagatgtctcggcagaaacttgattgtagtgaccccaacgacaagctggaaccattcttatatccgagatcaacaagatatgttttatgtcgattgtagatataaggaaatctgttgacttgccaggattacgagccttgctcctattagatgggtggactgttggaattattttacc

SEQ ID NO: 339503 - DNA, 1084 bp, Cannabis indica
cgtgagggttgtagggaaaatttgacacctaacgtcatccctgattccttgaaggtccatttggattttgaagttctccacatgagttagtgggtcttcactacccgtgtacttgcaagtgggcatcttgaactttgctggaatagggaggtcattaatcatttgggagaaggcaaaccctctcctcctttccaggtccaaatcagtgggttttggtgcggtaaggtccttgaccaatcaggttaactcgtccaaccgagcctggatcaccggatctgtggctgcttgaggttgagcaatattggacccaacattcgcttggtccccttggtctggctcaggtgggttcactatgttggtaccacgattgtctctatttcaggttgatgttgcctattagtggcataaggccctctggcttgataaccccccagctcaggatttggctggttgttagcccgactttcagcttcatcatcaccatgaccgtcagggtaatttggatggtagtcactgttgacctcagggtcttctcttctccctctggacctactatttcttgggcgatcattgccatctcgtggttggccacgttgattgcggggttgccactccctacgctggggcatccttccactatttctgccacgatcaccattattgtttctagagtttcctccaccactccaccttagacggacattgtgggagtcatcgcgtcccatatgatgaccgagtaggacttgctcatcggccaggggtggtcgattattattgcggggaaccctgttggaggggtgactcatagtactctcttggttccttgggcgctcttcaggttcatagaccaccctctccctctggttccttggggtagggacctcccgaggataggtttgaggtatctgttgattgttggcatcagtacccatcccttgagtgttttagttgaagtagcttcgtattaagtcggcagcctcttgggtgcgacgatcttggtcgtcttggcgcctccttatctcacgagcatgatcttccaaccaagattggaattctcccctttgattagcaagactttcagtca

SEQ ID NO: 339504 - DNA, 672 bp, Cannabis indica
taactttgctttttattttatctgatgctcgtacttttatgtttgaactttgacatatgcttgtttgcttgcattttatccacaatttaaacactcatattttgatcatagacaaagtattttcagtgtttacattactcgtatttctctctgacgctaagtagttaataacctactttacgcgcgagcatcttttctacactgccttcgatccacgagaaatcattgattctgcctcgtgatgatcttatttcaagcaaactcaaatatatttttaatgaccttgtcattttgtatatatctttatttcttacatgggtagttagatcttctactcatgttttaggtttaagtattttttcaagacacttttatgtctcgtttaatactttcctttagcgcgagctgttaatattcaactttatacgctagttataacttttgtttttcctttctcgttagataggttttaaatcaaaaattataactgtttgatccctttcccgtcagaaaggtttgataaaggcgttataacgattcgacccctctctcgtcaaaaaggtttgatcagggagttataacagttcgacccctctttcgtcaaaaacgtttggtcgaggaccttttaaaaagttttcaaaaatttttatttttgaagtaatgggtttgcat

SEQ ID NO: 339505 - DNA, 719 bp, Cannabis indica
gtttccttaagccatgtgatatttatgcttcggggtttggaaccctgttaccctcgggagaccttattgtatccactaggtggattcggtctttgttcttttggattgacggttgtgagtggaccgccaatctaattgaattgcaattgtataattttgacataatcctgggaatggattttctatctaagtaaggagctacgattgattgtaagcagaacatggtagtgtttgagcccgatagtgctaatccagcggtattcgtgggtaaggttccgggggcacgcataccaagaataacattgttgaaagctaaggacttgatgagaaaaggttgtctgggattcatagtcactgcattggataccagtcaacctgtgacatcagggcctgagaatacaagattggtatgcgagttccttgatgtctttccagaagatttgcagggattgccacctactcgggaaattgaatttgttattgaattggttccaggagtggatccagtatctaaggaactctaccgaatggctccagctgagttgaaggaattgaagatacaattgcaagagttgctgaatctgggattcatcagaccgagccactcaccttgaggtgctctggtttccgtttataattaaagtttaattttagtgctgatcttattagtaatctcaattaggggattaggatctcgtaagtatcttgggtagcgtgcc

SEQ ID NO: 339506 - DNA, 673 bp, Cannabis indica
tcatcaaataccacgtctctaccaatgaaattctttagatggtcaccaggttcaatgatccacattttgtatcctttaacaccttcaggataaccaatgaagatacactttccagccctaggctcaagcttgtcttgtctaacatgagcataggctatgcacccaaaaattctaagatgatcatacctaacattattccctgttctagcttctattggtgtcttgaaaccaatagctgaagatggactcctgttgatgagataacaggctgtggtgacagcttcaacccaaaatttcttgggtaaaccagaatgaatcaacatgcatctcaccctttccataatggtcctattcatcctctctcctaggccattttgctggggtgtttttggtactgtcttgtgcctagaaatgccaacttgtttacaatgttgattgaatatatccacacagaattcaagtccattgtcagttataagcttcttgattctcttaccagtttgattctcaatcaaagttttccattccaaaaacactttaaatgagtcattcttattttttaaaatatgaacccaaacatatctggtaaaatcatcaatgaaggattgaaaatacctggctccacctatggattcagtccttgaaggtccccataggtctgaatgaatgtagt

SEQ ID NO: 339507 - DNA, 619 bp, Cannabis indica
gtactaaaataaaaatttaacattatattgatagtatatatcattgaattttatttaggtcaaaaaatgactgcttttttatatatataaaatagttagttaaaaactaaaaaaaaaaaaaaaagagagaactccttttatatttatatgtatatattaatgtgtttgttttcttttgactttatgttaatgggttttgttattttaattttttttattaaaaaaagtaaataatgtttaaaaaaatacataattaaaaaaaatgagaaaaaatatatattagaataaaaattacattatgtttataagaaagtgatatctggtgtactttatgacatttgactaaattgaaatttgtatataaataagaaaaagtgtatgaatcggaattgtataaagatggtagcattaaagaaagcttcaaaaatatacataattttgtacacgaaaggaagttgtctagcatagttgtctagcatagataaaatattcttaaactgtaaatgagttgtcatttctattttgaaggggaatccccttgtggatgtaattcactcggtttgataaatagaaatgatctttcttgataaaaaaaaaaaacaaaggactttttcgtttt

SEQ ID NO: 339508 - DNA, 859 bp, Cannabis indica
tttaaaaagttttcaaaaatttttatttttgaagtaatgggtttgcattgtattatgtatttccagattagttccggttgatcatacatatatgcccctgaagtaattttaaagggtttacgctttataattacttgttgaaagaaatgattactttattcacaattaaagtttaaaatataacatcaacgatgtgatttacaatcattaatctcataagaactttcccagttcaattgtttgttttatcaatcttccagaagcatctgattttgatagaacgggttttgatgctcagggtcagtccctaacatactccaacaaatattgtttcaatatccagggttgatccttgacatatcccggggttctaggtgaatcaatcctggttttagttgtttgtctttaactgctactggttgacgaccagccttacacgtagcagcttgatatcgcaaccctagcgggttggtatttactcaattctctaacgtaattactttaccgggttaactgccctttgtcttattttgacacgttccctctcgagataactgaggtatcacttcctcctgccggggagggttattatccttggttgctcgagttactggacagatcgagttgattatgggcattatcctgcccttttatatattgttgaaagcgtcctcgtgctataagacattctatctcatccttgaactgacgacactcttccgtggtatgacaaatatccccatgatattcacaccatttagttaggttccttttacatctcgcatgtctcataggcttttgttgttggatatatttaaccaggatctagatttactaacaagtatgtttcattaacatc

SEQ ID NO: 339509 - DNA, 703 bp, Cannabis indica
tatatcattggtttaaacatttttagctatatatataaacattcatttgatgaaagatgaaatattgaaccataaaaagatggctttttgacaatatgagcttctggatttaatctattatttgttcaggttagtctctaatagatttatggaagtgctaactagtgaggaggaacatgatccatctagttaaaatatggatgcttaagactttgatgagcagaatggtatatatgcatgagtgggtggggcaatgatggtcttaaatatttgacatttgttcatattattattatgcggtccttcaaaataaataggaaagccaggtgcctatggttattgtttttgcagtataaaagatcatttgtataaatgacacagtttgtcatgtgtgcttccagaacaacaaattgattatcaactgaatgatcgtttcagtttatgtactatgtatatcagctaatttagttattcacagtacaagttacaactatattttaagaagaaacctgttgcttgtagaaagacccaaaattccatcatacatgatgtgtaaaacttacattcttgattgttttttttttcctaatacgtatggattattattatgtttcgctaatcaaaatgatcgaaatcactaattagaaattgttattatttgtaaacaagtgaaaaggtctagtgcaggctgtgctctggattt

SEQ ID NO: 339510 - DNA, 1073 bp, Cannabis indica
agatattgctatggacttcgtggtaggtttgcctagaaccacgggatagtttgactctatgtgggtcatagtgcacaggtttacaaagtcagtgtacttcttacctgttcggatgaatttctccattgaccagttggttgagttatatgtcagagaaattgttcgtgttcatggtgtcttaaagtctattatttcggatagagatccgaagtttacatcaagattatgggagagtctacatcgacctattacgactccttactcagtttatccacggtcaacaaagatgtatcaaaacttaaaagtcattttttggtggccagccatgaagaatgacattgtcgagtatgttgctaagtgtcttaccttccagcgaataaaggatgaaaatcagaggcctgcacggttattgacgctattgaacataccagagttgatatgggaagatattgctatggacttcgtggtaggttcgcttagaaccacgagatagtttgtgtctatgtgggtcatagtggacaggtttacaaagtcagcgcacttcctacctgttcaaacgaatttctccattgactaattggctgagttatatgtcagagaaattgttcgtcttcatggtgtctcaaagtctattatttcggatagagatctgaagtttacatcaatattcgaggagagtctacatcgagctattacgactccttactcagttcatccagggtcaacaaagatatcaagacctaaaagccatgttttggtggccaggcatgaagaatgacattgctgagtatgttgctaacgttcttactagtcagggaataaaggctgaatatcagaggcctgcagggttactgcagccattgaacataccagagttgaaatgagaagatatttctatggacttcgtggtaggtttgcctagaaccacgggacagtttcactctgtgtggatcattgtggacagatttacaaaggtagcgcacttcctacatgttcggacaaatttctccattgactagttggctgggctaatgaagcatgggaatcctattggaattgggatccaaaggaga

SEQ ID NO: 339511 - DNA, 910 bp, Cannabis indica
caattcagcccgtgcaccagtgatttcaatgagcatcaactggcgatccatagacattatggcatttggtacatcttctggcagttgcaaggcttgggaaataggaaaaccattgtcctctaacaaacacttttcgaaaaagtctagaattctcatcaagaaaatcatcagacaagttagcatagaattctttgataatgttttcaatgtacccttcgaaaccagtgagattgttctcccattgatggtattgaatgaacttaacaataccgtataccctatgagcatgcaaatcataattcctttcactctcaaactttcgggtagcatacaaattccaatcatgctcattatcacgatagtagaaacgagaacaatatgagagagatgtagggatattaccaggagatgattccttcatgggctgcttgcctttggcaatagcagaagccttggctgctgaagatgtacgagaaggcgctagagtagatttggtcagaggaggatctggttcgagttcagtttcctcactgtccaaggaaactccaatgtcttcatgaatctcctttttcagaatggagagacacggatttattcgaggaatcaacagagggatcctccatgggttcttcttcttcagaacttgaagaaaccgaaggggattcatcttaagcttcttggctggaggagctggtttgtcatggcttcgtttcgtgcaaagttccttctcgatagatgcttgttgggcacgagttcgagtggaaggacctgttggagttgatgcaggaactccattctctgttgcagcaagaggagatacagtaggaggtggaggagatcccttcgaagatgaagacgatgaagtccaacatttgtagggtcgcactgattttcgaaccacttgtttagg

SEQ ID NO: 339512 - DNA, 676 bp, Cannabis indica
tgatctttcataagattagtggagacaagaaaacatgaggtatatccattggtatatttgcttattaaattggcattaacactgccagttgcaacaacttcagttgaaagggcattttcagctatgaacattgtgaaaaatcaaatgcgcaacaaaatggaagatcaatggctaaatgatagcttgactgtgtatctcgaaaaggatgtattcaatactattaccaatgaatctatcattcatcgctttcaaaatatgaaaactcgaactttaaatatatgagtttgatttattttgttaaatgttttgggatattgagtatattttattttttaaatatcaaattgaattaatgacttggtgtttaatatttatattttttcaatacacaattttttttggcattgtgatattttttattagaattttttttatgccccctacaatcaaagtctgggtccgccactgatgggacccgatacttagttggaccaatagcgatattaacacgtaagagtatactaaacactacttgtggcatttcttagaaagagcattgctattaggcaccagtggtgcctagcacattctcgacatgtcgcgttgccattggttagcgacactccctaaaaactattatattaaattatatgggacccgatacttagttaaacca

SEQ ID NO: 339513 - DNA, 223 bp, Cannabis indica
gaagaacatcaaagacgaaggcaactctagggttctctgctagggttttaaaagtggaggctgtgtgtttgaatgaaaagaagcttatatatgtctaaaggtgttttagggtttctgaaaaataaataaacgacttctagctcaaagaagggagctgtcggttttttttgggggttataatatcagaaagtcaaaagctttcttagactgggtaaattgtcag

SEQ ID NO: 339514 - DNA, 582 bp, Cannabis indica
gggagaaggtcctcttgcatggcagacaagttatgggacattggtttcaatattcagagaaaatggggtagtttttggatgtgagagataacaatttttgtagtaaaaagtgttttggtaggagatcaagcaaatcacaagctatatttatatagttttacttgtgactaagacaatgtaaacagattaatacaatttttttaacttgttcaccttttggattaaaggtcctccattggctgtttttcttagttttgataaatgctaacattttttattccaatacgcatgcctttttattactaaagttgcagtatgcatttatttttttatttttttattcaatgtttttgcatccgagtcccttcagttacttaaacatgataagatatatatttttttaaaagaaatttcttttactaatctctgccatgatccataaaagtatcttttcataagatagtagtctactaagctataaaatgcttcattggaaccataaaagtgccttttcatttgccataaatttttgacaaaaaaacaaaaaaaaaaaaaaactaaaaataaaaaaaagaaaaaaaa

SEQ ID NO: 339515 - DNA, 768 bp, Cannabis indica
actctctagggattacactaaatcaggaaacaatggaagacccaactaaggcactgaaacgaacgagaattgagaaaatgggacattcggggaaccctacaaaaaccggctaaccggttttacaggtactggtaaaactggctagccgatttatactagttcacccaaaaatcccatattttgctcaaaactccaccaaatgcaaccaaaccttccaaagtccctaattagggtatacataatatattccaaccaataattcccagaaaaaccactaaatcacaatatgccattaaagacctaaacttgagtttcaaagctcaagcttgctcaccatagctcaaaactaacatccagaacctaaaatcaacctaaataaagctcacaaattgaattaaacacagaccaaaccctagtagtccttaaaacccaaaattacaattttaagtcaacaccaaagcttggaaaaataagaacaataggtataggagttacctcaacttgatttccccttgaattccctactgaaaacaccaaaaatcagcaaccaattcccctgttctaggctggttcaaagagagaggaaagggaagagagagcttttcttcaatttggtcttttcttgatttttctctaattgactaaaggattttctaattaatcctttgtcaaaaaaggaaagggcaggtgtcatcaacctaggtagccaccaaatcacacatttggttaattactaaaatgcccttttaacttaaaacttaggcattt

SEQ ID NO: 339516 - DNA, 621 bp, Cannabis indica
gttggtcttcttctaatcgaaattctcatggtattagttggatggggtgagaccgatcgaatgtgtatacaaaagcatgtcggtggctttggccttggttggaggttgctgctacatgaatatcaactagttggccaaatttattataaggctagatattatctgcaggggtcagttgggctagacattgtccttttgtgatgtctagtcatccaggcttggagaattgttagtccagctagtgttgctctagagattgtttatattccatgtgtttggtgggatgttctggaaccggtctggtatgttggccgaggaggctgtgatgtgttgtggaagaacaaaggtagttcagcagctaatgtggctctctatgctcgagttgttcttgatcatggaagcatgatcaaataaggaaatttgaactattattagttcagcatgagctaataatggagatgatcattgaactaagccaattgttctttctatggaagttgatcttgaagaaaatctgcatcacctttcctttctaggcatttgaagcccatgtgttcaaaaactgtaaaagcagattatcgagcagagcagataatgctgtcgaaaaactcgaatgactca

SEQ ID NO: 339517 - DNA, 515 bp, Cannabis indica
cgggttagaagtacctttatatttgagggactcggatagacgaaacccttttggaagttgagcctgccgcacttctttagtgaaaggcgaggtaccatgcaacttatacataggcttccattgctgctcgagcattttcaaagcctgcagaagcatgctttggtcaatccctccatccgcaggagccggggctgctacaactgcggggctcgcaactactgcggcaagatttgctgggacattaatcctagtggtcgcgatcggcgcggtaggcgggttattataagtattggcaccctgatcgtccgcatggggatcacggagtgtctcagtattatgtgggacgcgagagcgtgcactgaaaactgcgttgagatgatcacgcagatcacctcggtgtacctgataacgtcctccctgttgtgtctgtacagagccggaccttgtgtacctgcttggagtgcgaccatgcgatgacgaagaggctaactctgcgtcgttgtctcttgatggtc

SEQ ID NO: 339518 - DNA, 815 bp, Cannabis indica
tgtggtaaacttgatcaaccaagaggtattgtcatttttaccttcaaaagtgtgatgaaagccagagtgaacctccctgtccttacactattctcttgcgtggtaaggaaaaaattgtggataagtctatgccatttcaataccctcatcctcctgctattactgttgttgatcatgctcctgttaaccttaatcttcctactaggaattttttggataacattatttctttcccttcatttctggctgcaactggtatttctgggcctaacttcttaagtccttatacctcatctactgtcatgattcctactcctcttaatcctaatagtgctcatgttttccctgctggtcataacccatttggaagccactcttcgaggctgtcagcattcacctcctactccacatattctttggtgattgctaccactgcttgtacggatgtcgtggcatctgttgttatgggtacttcgattcattctactgttgaggctgtctctgctagccctgctgctgttgttgaggcccaggctgaagctggccaacctgattctttggttcgtgggaaagggctggcctctacttctggagttaaacgcccatctttcactcctcagcaggtgattattggtggctctgtcaggtcacaattgaagagagctcgagctggtgatagggaggaggagtcttcatttgcttctacggacatggaacaggcgggtgatgctttgcacacccgcccagaaaaaatgagtcttatgtgttggaatgcatgtggtttggggagtacacgtgcattccgaaggctctcc

SEQ ID NO: 339519 - DNA, 765 bp, Cannabis indica
ccgcagccagggcagcgctgatgcctgaacctagtaaacagagttcactgaggcacaagccgcgtatctcttggctgggaattgagtcagatgggagacaaactggatggtcatctcagaggcgaagggggcgagagtaggaccgacaaagcgattgaaccagtccgtcaggggatccgtgttcaggttccagggatttgaaggcgtcctcacgcaaggtgttctgttgctcctcccgcaagatcttcttcagggcttccacctcagcatgtccttcgttgaactcgtccagggcatagttatgtttggcaattcggagcatttgcctctctttgtctgcgaggaccggggtgagaacaatgccatgcaacatggtgtactcctccgcttcggaagggatccctgagtcagcgctaacagccaaaatgtccctcctcttgggcctctgggaagactcagcttcaaccatcttacccttccgcttatgctcaagggaagccgcaatctcgccctcctcctccttgactcccccttcctcgtctatcaagactattgtgcctaagggggcactggacgacgacttcctgggggtcaccagttgggatgaggccggaggcagagaaggatccgggctgtaggcctcggcaagggtcgtcaggagatcttccattggcttggctgctgtaacaaagaaataaacaaagtgttagaataactataagaaggcatgcgcccaacaacaaagcgataaagctaatcctaccc

SEQ ID NO: 339520 - DNA, 992 bp, Cannabis indica
ggcataaaacccaacactaaacaccctagtttatatatgcgataagctacctgatgatggtcgaggagtttgcttggaaagacgtttatcaattcgctcttgttgcttttcagaaggttccttatacaccggctctctccagagactcgcgttctcagggatcagtttgtgttctcgcagtttagcagtcgtacacaataatcgccagtcgcgatcttgtacaggaaggctcccaagaatttcagctgtctctctgcgagtcgcgtcgagtgcagggcgagctggtctatctgcgaaaacaaaaagagcgagttagcttaagatctcaaagtaactcaaaaaatgactaagtcaggaaacatgcgacatactaggtcgacggttaaagtcagttctaatccctgggactttgaatatgtaaaaccactttgatttccaatctcccatattggaaaccatgccttctaccccgttaatctcagaagtggcccacttgctgaagcagtagaaaccattgtgaaggcctacgctttttatatcatagaagtagctaaactcttctaccgtgggagccctatgtacgtactccatatacatcgcataaaaagcaagggctgtgcgataactgttgggggttagttggaaaggagacacatcgtaacgtttgaggatggccgcaataaagggatggaaagggaccgataccccacatcgaagaatgggtattgagattaccacatcctctgtgggaataatcgctggattggtaaaagaaagatgcgccctctgagtcggtttaggtcgcaaagaagcaagtcgcagcaagttcagtcttgtaaaggtggtgaggtccgatttggtaaccctcgaaaccaagtcctcgcacgagaagggctcgttcagctgagtgtcgtccaccgaatcagtcccactcccttctgcctcttcttcttcctcgcctgactcgcgagctaggaccgtccaatcgtcat

SEQ ID NO: 339521 - DNA, 361 bp, Cannabis indica
gagtcattatattccgctacagccaatgtaaggttttcgaaacttcatatgtgtttatttcattgttttagaattcatattaggatgttaatgaaacatacttgttagtaaatatagatcctggtaaaatatatccaacattcataacttcaacaatcctactgcttcaagctcagttgagaaaattagagaaagtgattccacttcctcagattatacttcacaacagattgaaccagcaataacaacaattccacaatcttgattcttgattttggatctacaaaccatgtaagttgttcattgcaattgctagaaaagtggaattatttgaaatccggagagttgaaacttaaagttg

SEQ ID NO: 339522 - DNA, 1387 bp, Cannabis indica
ataagtgaaaaaaagataagatttttccttttttttcttaattaatttttgaaattcgtaagcaatatgaaaaagtgttcaaagtcctaatataattgggaattcttgaagaacagatacaagtgtctaagtatgtcaaaatggatgcccatttggtagtttcaagcgaaacgggctcggttcacgtcatcatgtcaactccacacaagtgtaaagttaacttgtggggcaaatgttaacccaaaagctttccctggtgatgggaacatcaatgtttggcacgtggcatgaaggatgacgtcacagagttgagtagactcgagttatagcagtcaacctgggaagggaccctagccttgcgcccaggttaacttcaggatctccgagatggaaatttagacttcaataacttgaatcaaaactactatcttttagtattctgtaccatgaagacatgaagcaacctaatccaagccctgagagctgaaattacatgaacttgcaacttggaagtgaacttgggcacctagggtttcacccgacgcctaggtcgacatcctcaactagggtttcagttttcgggaccgtcttagtgcaaagttgtcaaaacctacattgaaacatcaattagacatgccactgacatatttgaggcatcagaatcaaaattggagaatctgtcaatctaggcgccttccaagtgtttgatcagagatctgactattgcatcatattttttttatcaaaaatggggaaagaagtccttttggagtaaaagcaacaattcttgagcacaaataacagggctcagcgccaaggttgacacttggggctggccttgcgcctaggttaatattttgtcaacctaggccatttaaaatggagtttttaaagaattctttcaagaatcttctccatcttcaaaaaatattgagattctactatttttggggaccaaacagaatttttgaaggggcgaaagcgaggcctagtgcccaagttgacattttgtcagtctgggctattttcattcaagttcagcaaaaagtgttctgtgatatttttctaccattagaaataatgaagattcaagtaaacctcggaagaaaataacaatctcgagtccctgtaaacagggcccagtgcccaagttgacctaggactgggcctagcgcccaagttaacaatcaacttgggatgctgccttaaattgctcaaatgccaaattcaatgcgactgttgaatccaaaattgtcaaaaaccgggtatgagaccacgttctcaagttcggaagccttggaagtatcaaaaataaaatcttaggagctcgagagaaagggcccaacacccaggtcaataaatgcttggtgcgttgggttttgcttat

SEQ ID NO: 339523 - DNA, 759 bp, Cannabis indica
attttaactacaaaaccacgtaaaaaacactatgttcatatattatatttctatagcttttattttttctgtgtgaaatcaatattgtgaggctcaagtttggttaacgaaaaatctgcgttaaccgtttgatgctttcattgagagcctctgtgaaaaacctcagaaaaaaccctcccttcttttgaagaaagacaacctcccacatggctgaaaaatccagaaaatgttaacaccccacatgaggaagccaacaattgttctggaaaagagcccatgggctctagaagacctaccaatccgcattctagaaggaccactcgttctaggagggctcaacctgagagtgtccctagtgctcggaccacacgttcccagagaactcaacccgacattggtcctagtgcgcggacaacacgctcgagcagaactcatcgtgggaatggtcaaaatccttgggtgagggatgaagagcttaatcgtggaggtgcccaatctgtgggagaaagaacttatgaaacggaaagtcatcacctgagacgccgtttggaagaggtgtagcgtacgaacgatgagttagaacgtgagacagcctcgaccagggtggcacaggggaagaacgctcaaaatcaactgaacctagagtgagaagaccgtgaaacagacctcgtggctcacgaactaggagactaaaaaaggctcgggaagaacaacttggggaaaatgagacaccccctgaaaatcaggatgaacagccag

SEQ ID NO: 339524 - DNA, 721 bp, Cannabis indica
aattcttctttattgattgagcaagaataggtacaatacagtcgagacgtctatgttgagttctcacagtgtttcaactctcacacttacaccaaagaatctttttcatctacagaagattcttcttataaaactcaaaccaaatctctctcttttctctgcacctctctctacctctcagtcttttttctctcaaactttcaatctcatctgaacagagttttgaatctggtgtctcgaaataacaagtcaagatagtatttataggcttgggatcaagatcctaaagttggtggctgtaagaaacgaggttgttaagttagttagaaataacaaacttaaccaactcctctttgagcgaattctccatgtcaacttaagtatcagagcctctaataacatatatgagcttttagactcacggaccaaggatactcgctgatgacgcttccgtagaggattgggcctgctagagtcgactatccagaactaccattctaggagggaaaactagccaacacgaactctatcccagaatgaggctagctttcctaaagactaaaaccgaagtggacatgatagtcatccgggtgttggaaattattttaccaggatcttagatctactcacaagtatgttgattaacaccaaaatatgaacttctaaaacgattataaattaaacacatataaagtatgacaaaccttacattgggtgcagc

SEQ ID NO: 339525 - DNA, 1463 bp, Cannabis indica
agccatccattatatacatccataatcttgtggttaagaaagtgtatggaaataattcccaacaaataataacataaggccagctaacaatgctattggttctaaacatcaactttttttttgaataatgcaattattttatttttaaataataaaatatcaacttctgaaaatattcgtttctacaatttattttaatctatattttatttcaaattttcaactcattatatagctaatcaattataaacgtctttttttttaaaaaaaaaatcattatataactagatgaataaaccattccaataaatgccaaaaacataatgcacaaataatactgaaacccaaatttaacattatatttagtttctcatatataaataaatatatatatatatataatacaatttcttagtcaattgtgaccaaaaatatatgtcaaaatatattttttttaatttttttaatgtcggtattcattatagttagaacattatttttataaattttttaaaatttttaaataatttacagtattgaaaataagtttgatattttttgaacacgcgtagtaaactggaatatcaaaattttattttcagtattataaattatatataattttttaaaaatttactgagaattatagcgaataccggtatataaagaaatttttaaaaaaaaaatattcccatatgtgatttcagaagtaaaaattaactaagaggttgtaatataaaattgtacttagcactcctcaaacaaattatacccctcttgagaatgaaatcattaaaattaatttttgaaataataaaattcactcccaaaatttaattttatattcttacagaaaaactaatataatggtcataaaattcactcaacatgtttacgacatacttcatgcaaggcatatcattttaaatggatctatatttattttcattgaacaactatcattttattttatttggaaaaatattttttaaaaaataaaaccggtataaaccttctaattttatatgtaattatgataatctcacttatttaaaattttttttaatcattgtcaatatttatattattttacaacaatttcaacaaaatttaaatatataattaattaatctaaagaagaattttacggttacacagatgagactgaaaaatatgcaatttcacaacaccgcacaagtgtctagaataggagattgaaatctaaaaaaagagagtttgaactccttacactcaacgacatcacaagcacaattaataattattagcgcctacctgttgcccctgatttcacccaatatacgtggaccaatcgaacagggacacgtggatcagataacttgtaaatatttgctaagtctttgtatgccacaaggaagcaccctgggcataggtcccggaggaggcacccggagtgcaaggtgctcccggaagctcgcatagca

SEQ ID NO: 339526 - DNA, 1022 bp, Cannabis indica
gtgtatcgggtctcagtgccactttggcgatcgcctcgaccctagttccccctgaacctcttattctgacccgagccactggttgcagtggattccttccttttctggtctggtccatggccgaaccactacctcccctgctaaaacctgatgcaggaggggtaggagccccgccaacagctggagttccaccagactctatcatgcatcccactgcgccctcagctcgcagtgccttatccaccatttcagcataggtggttctgttgtcagtagtaatcattaaatcgtgttggatttttgcatttaacccatctaggtacttctcttttttctgaaatcggttggcacaattcccgaggccaacctcaccaagcgatcaaactgagtcgtatactcagtaacactcatgttttccttctgggtcaagtgggtgaattcttttctcttggcacttctgactgcctcattatagtacttggcattgaataactcctggaatttctcccaggtcattgtagtaacgtcatgtatcatggacaccatgtcccaccaaactaaagcatcttcttgaaatcaaaaagtggcacagaccactctatcattttcagtaacgcccatgaaattcaatatcctggtgatcacagttagccattgctcggctttcataacatttggacctcccaggaagactggaggtgcctgcttacggaacctttcatacagaggttccatccggtttgttgcagcaaccagttcggcctgcacagcaggggcaggagctactggtatttctggaacaggcactgcaggagcaccctgctgtcttaatcacttcctcttgatcattgattctagtttgcattcctgcaaacctgttttcccaattctaggtatcctgagcagcttggggagcttgggcaacctgtggcgggtatcaccccatccacgtgccctgcccctgggacctctacctcggccccaaacatttgggggaatctgagctccctgaccttcatttg

SEQ ID NO: 339527 - DNA, 878 bp, Cannabis indica
ttttttttaatgccacataattcaaacctaaacctaggtggttccctataaatagatagtgatggcctcaaattgaaagatgatgaacacacttgccttctgtcaaaaatttgagcattcttccctgtgctattcgaacctttgttctctcttcctctcttcataatttcgaatcctatggtgatagagtaattgcccacacacatcaagtggttgtcaatcatagtgtgtaagactttgaagaatccaaacacaaggaaggaatttcaggctcaaatcttggtgatactctgctacagactagatacaagggttagagatctgagcggaaggagtcatttaattccgctgcaaccactgtaaggtttctcaaactttatatgtgtttaaattacattattatagaaattcatatttaggatgttaaataacatacatggtagtaaatctagatcctagtaaaatataatccaacagcctcttgtccctgtctcttgtcagttggtagtcatggatagcagtggccccttgatccatttcttcttctagttcttcttgtagtgcttgtatgtcatctgcttgtgcatgtactgcatgttctggtgttgaattgtctgatagttccacctcaaactgcatactttcttccttgctgacagtggcattgttgtgttgagttttgagtgtgtccgtgtacactttgtcttcctcaaaaatcacatctctgctgataatgaacctgttttggcttcctggttcaaggctccaaagtttgtaccctttaactccatctggatagcctatgaacacacacttcaaggctctgttggaatttattttaccaggatcttagatctactcacaagtattttgattaa

SEQ ID NO: 339528 - DNA, 761 bp, Cannabis indica
aactcatacacataatcatttgaaatatatatgtataaacactctgcatggttttatacatatttatatatgtatgtgcagcttctgttctgtccattccagctagaatatttccaatctacttcccaatgggtaacatggcaactggttttttcataattttctcactccttgctggtgttgtgggctttactacatcactcactggactccataacatttttcaatggaatggcccaaacatgcacactgcttcagcctcttctcttctatcatgggctctcactcttcttgcaatggggtaactaactcaacataataaacaatacttaatataaaaatatcacatgttttcttgagaaagataaaaaaatggcaataaaatctttgatttaaaaaagtaacaattttattttcctaatggtatatttttttttttgatcaagaaggaagaacttcattaatcaactgaacaaatacagccaccaataaacaaaacaggacccaaacacaaactcctaacaaggagcaacagacccaactacactagcactaactactctgcaactttaacatatatcttttttcaagagtagttagctttctagtgttcacaatttgtaatctatattttactgtattctttacatcattcactacactaccaacagttttagagaagccattaaagatacatctgtttctattgagccaaacattataaaccacagctgccaaaatagaagcattgatcctgtgca

SEQ ID NO: 339529 - DNA, 747 bp, Cannabis indica
actctcaaaacctctagatggagaagaactggggatatacttagttgtcacggaacatgacgtgagtaccgtgctaatcagagaagaaaacagtatagagcacccagtctattacatcaataaaagctaaggccttatttccaagcgcatcctgttaatagaaaaactcgcttactgcctaattctggcaagaagaaagttaaggcattatttccaagctcatcctgttcgggtatacactaaccagccactacgccaaatactgcaaaaaccagatgcttctagacggctactcaagtgggcggtagagttgggccagtatgaaatcactttccaaccccgaacagcaatcaaaggccaagccttagcagattttgtggtagaatgcacaggcaagaaagaaagcataccataaaccaaccccgagccggtacaaacacctcagccaaataacaatgaagataagccgacctggaaactacatgtagatggatcagctacagatcagctatctggtgcaggaattgcccttgtcacacctggggggcaacacctgcacgctgcagtcaagttcagattcaaagaatctaacaacgaagccgagtacgaagctctaattactgggctgagactaccccaggagatgaaggccgaacacattgaaatctgcagtgattcacaactggtggtaaatcatgtattcggagaatacgaagctcgggggagaaaagatgatagcgtatctaa

SEQ ID NO: 339530 - DNA, 564 bp, Cannabis indica
ctaatccaccttttgaagataactaattccccgccagacagtagggttccaaaccctgattcataaatatcgtgtggtctatccaatttactaaaaattatggctgtcacataggattgagtggccccagagtcaaacaacacagagaaataagagttgttgactgagagctgacctgtaaccattgaagggctgacttctgcatcagcctgagttatcgcgaacacccttgctggagtgggttttaccataggtgcttcagtcttgagttagggacaatcccttttgtaatgccccgacataccacattggaaacacccctgccctttacactcccctagatgatgctttttacatctggagcactctgggtaagtgtatcgggtttcgaagccaccctggcgattacctcgaccctggttcccacagaacctcttgttctgacctgagctactggatgcagtaggtgcctttcttttctgatcaatggccgagccactacctcccctaccaaagcctaatgtatgaggactaggagccccaccaacaaccggagtccctcga

SEQ ID NO: 339531 - DNA, 748 bp, Cannabis indica
cagtagacctattatagggcattaacatgctattaagaaggtcatgagataccttaaaagaaccatgaatcttggattatattatcagaagtttccagctgtcctaaaaggatacaacgatactgactggaatactttatcaaatggctccaaagcaactagtggctatatttttagtatgactggtggagctgtttcttggaaatcaaagaaacaactattttggcacagtccaccacgaagtttgaaatgatagcactagcaactactagtgaagaagcaggttggttgaggagcctgctagctgagatccctttatgggaaagaccgataccagcagtgttgatccactgcgatagtaccgtgactattgcaaaagttcagaaccgttattacaacgataagagacaacaaatatgtcgtaaacatagtactgttagagagttcctctctattggagcagtaagagtggatcatgtacgcagtaatgaaaacttagccgattgacgaaaggattagctacgagaaagttcttaaaacctcaaaaggtatgggactattgtccatagaataaaagactcactcataatggtaacccgacctataagactggagatcctaagaaataggttcattgggttataacaagttatgatgtgataaggaatgagatcatgctatgtaaaacatgaaatcctgaagcgatataaggtcgagataatagaaactcttaatgagatctatactc

SEQ ID NO: 339532 - DNA, 851 bp, Cannabis indica
aaggcttaaaaatggcgaaatatttagagaaagttcaaaagaacttggaaagattcaattactttaagatcaaacaaatttcgagagaacagaactccaacgccgattccttggcaaaactggccttgtagagcgacttggatgaattgaacttggattcagtagaggtactaagcgagccaagcatatgtgaaatggaagacgtcaagatgatagacaactctcctacatggatgactcctatcatcaattacttactcgacgggcaacttccaaatgacaaaaatgtggcatgaaaattattgtattcagtgcctcataacacaataatcaaaggtaaactatatagaagagggtattcgatgcccctacttcggtgttctccctgcagaagcgaataatatcatcagagagattcatgaaagctttttatggggatcatgcgggttggcaaagtctatccaaaaagatcattagacaaagatattactggccaataatcaataaggacacccatgagtttgtcaaaaaatgtgataattgtcagaggttttcacatatactttgcgtgctgcgaacaaaactaagaatgatgacgtcaccctacccattttctatatggggaattgacttaattggggtattacccactaggcgaggaggagccaagtatgcggttgtaacagttgacatcttcactaaatggacgggggccgagccccttgtttccataacctataagaaagtcctcgactttgtcatcaagaacattgtctgtaggtttggaattcccatgaagatagtacccgataatggaacccactttaatggcaacttgttcactgaattct

SEQ ID NO: 339533 - DNA, 772 bp, Cannabis indica
attaagatcatttgatttaggatcaactaggtgatactgaattgaatagatattacgataagattaccatatctaatcaaaatttaatatcggtccctttcgatgcatactccatatatccaacccaagcttactttaaccaatgccctggaaaggacatagtagttatcgaatatgcaagtaaactacgttgtagattatcatatcagttaaaccctgtatactgacaaatctaggaatacatttaatatcacaatcttgattactttccaatgtgttgacaacacaataaacaaaaatatcaatgcgttaaggatttggatgaatttattaatcaaataagtaaataaatgatcacatgaaccaaataacacattaaacaagtaatgtaattaaatctgtttctttattgataattgaatagaaaagattacattgaaatagagttttatttagggcacaaagcccaacatctacatcgttcaatttcataagaaaaattagagtgacatcataagcaaataatttataaaccattcatccaataatatactatttaagcaaattcgaatgaataagctaagaggaaaaattagaataattttcattaaaataagaatccaacaatgtcccggtaggtgatagtcaaagttattctaattttacacgaaatttacaactacaattaataacagaagataacatggttcaatataaattcacacacaattcagaaatattaagtgtaacaccctaactaacttaggcgtat

SEQ ID NO: 339534 - DNA, 867 bp, Cannabis indica
cgatgcaagtgttgaagttgctaagtgttagtacattgttccaattgtccactgctcggctaggaggactgccaccgtgcaggtgtatgtggtgttctgttcagaatatctcctttgggtagatatggggagtcaattccacatcactagcgtgtgatgcgacgtcagagtggaaaaattgggataacactaaccatctcaggattgagatcatttgatctaggatcaactacgtgatattgaattgaatagatattacggtaagtttatcatatctagttcaagttcaatattggtcccttctgatgcatactccatgcatccaatccaagcttactttaaccaattattgataattgaatagaaaaattactttgaaatagagttttatttagggcacaaattccaacaaacttcaacttgcactaacataaaacaatcagtacatttcaattaatcctaaattcagtttgtgcttttcaaatgtagtttcagtcaaaactttggtgaatggatcaacttagttgttttcagtatttacatactccactagtacatcccctcttgccacatattctctgatgatgtgatatttcctctctatgtgttttcttctcttgtggcttcgaggctctttacttttggctatggctccactgttatcacaaagtaaaaatagtggcttttcccttccaagaacaacaccaagtcatgtcaagaactttctaaacccgacgacaagttccttagcagcctcgacggcagctatgtactcggccgccatggtagagtctgatgatgtggcttgtttaacacttctccaaacaactgctccacccccaagagtaaacaccatgccagatgtag

SEQ ID NO: 339535 - DNA, 645 bp, Cannabis indica
gtatcctcgaaacttctcgtatgttgtatcccttaatccagttgatgagaaaattgcaattgaactcacaccagtgtcttctaaatcagtccaccacacacaaggaatgttatattatttattatataatataatgtttaagattaaaattgtgatatgttatatatattattacatataatataattgggaattatatgcatgtaataatcacaatattatgtgattgggagttacatatagttgtaacatataagaggtggagttaatattttgtaacttccacatgatcactaattaagtgtgtaaagagtggttacacaacttaatttttgaaattcaaaaactataattcaaatatagttgttggggattgaattttatcatttataatgtgtataagtgatataaaataaagtgggaatggtttggaatatgttggagtgttatttgcaaaagctgaaaaatttagtaactagtaactagttactatttttttcagcattaatagtagaacgttttttgctattgggatggctttgaacaactcccataacctccaaatcacccatttaatcccatttacaccccattaagaaatggtaacagccattgggtgtgtgatgtttgaatttcaaagtttgt

SEQ ID NO: 339536 - DNA, 1243 bp, Cannabis indica
ctatcactatagggtttgaaattacgaagagagaaagagagaagagagtttcgaatggcatagaatatattatatgaatgtggaatcaggggttaacccttagtgtaaaatctcggtatttgtgactacgattaccggcacctagttcggagcacccggggatttggaatctctgttattgcgcgatatttggtaagacagtagttagcacgtagaggtatgcatggtggcacttatattggaaatgatatttttgagtaatcagtaatcgggattagggctattacccttacttgagcggtttaattgcctagggttattaccctagtaatatatgttgtacgaatgctatgccatgatatatatatatatgagttaatgaatatgtaagatttagggttatgtgttcaaggcataaccaggttggactcggtaattagaaccgagtggaaccgttctaaggccttttgtaattagacatgtgagtgcaacacgcaggtctacgctacgtagacataaatatgcatgtgagcgtaacatgtaggtctatgtcgtacaggcatatgtgaatggcattcctggttatatagtgtgataaatgtgtttatcattattttatactgtgttgctgggcttggctcatgggtcctctactgtatatttatatatatataaaaaatatttagaaaaatttacatgaaaaatacaataagctacttttattataattttaccccacaaaaccatgagtgtaagagctggacgaagaatgtacatgttcgggccatactagaccaagcgggttgggttctaccaatgatgtgtttttgaaactctgttttgttgcttaggtcagttgaaagaaaaggcttgtaataatgttttgtaaatattttggggatcccagcttttgtgacttttggattataaagtttaaagtattacaagtttatttttattccaattgttattaatgtttaaattccacgcccttttgttagtaatcccatttagaggattagggtttcttaagtatattgggcagcgtgcctaattatttaaggtgttacaacttggtatcagagcgccaaagtttttcaacttcttgtagaccggccgaacatgtacattcatcgtcagagataagctcgactcatggtgcagtaaatattgtgggtaaatacttactgtttatgtgatcatctgtttaccgctttctattttaggcagtatgcaagcatct

SEQ ID NO: 339537 - DNA, 500 bp, Cannabis indica
aaaatgcagatatctcaaaaagttgaactagagttctcaaacaatccaactcaagtataataaaaaaaaattacatcaatactatagtaaaatatttatcctactgtatttttgttattttctaattttcaaatgatgaatatgttcatattaaatcatgaagagacatgtagatagtgttacgtacgtggaaacactgttttgctttttaatgtttcataatagttgcataaatattttgctaacagttatttcgtccgattgaaacttttgtctaatgcaaccttcaactaaccacctagtaacattcgtctgatgtaatcttcggccaaccacccaacaacttttgtctaattgaaaccttcgtttgatgtaagtttcagtcaaccaaccaacaaccatcatctaattgtgtaagtaatagtataagaggtattttggtaactaaaagtacataaatattatccaaatgtatttttgtaaataaaatattaatttat

SEQ ID NO: 339538 - DNA, 667 bp, Cannabis indica
agaacaatttctagaaaatgaaatagaaaattctggggttttctttcagccatagccgaacccccttctctctcttatatccatattttttaatttatgaagtgttgaaaaattgatcttgaagcttggattctagatgggtttttgggcttagcttggtgttgtgattgacgtagttcttaacccctttttcatgttgaatttgtagtggaaatagaagttgaaatttgtgttttgagcttcgaaattcttgaattgcatgtttctgtaaattgggttgattttgatgatatgaacttgtggtgtcttaaactcttgatgtttgctttgggtaagctttgggtgtgatgaattgagtgatattttgtgtttataatatgatttatagctctgaattttttttgcttgaagcttgagattttgacttgggtgtgcaagtctttattgttggagttttatggatttgagctcttggtttggagcttagtttagatgttgttaaatctgaactttgaggggtatatggttggattttgattcatgttttatgtgttttaatgccctatttagaacttgctagttggtggtacatgaattatatgaaaatttggcttgaattaggtgtgtttggggtaattttatgttgctggtttttggtgttgttgga

SEQ ID NO: 339539 - DNA, 721 bp, Cannabis indica
aagtatacaaaagtattgcccagtgagaatcaaaataaatatgagcccatgttgtactaaagatcgaaacacttcaggtttaatcatctcaatatgtacaatcttcatctggctctaaactcactgttgctcaacctttgccttgccttacctaaacatggaaacataactattagtcgacaaactcagtaagaaaacaatgaagcataaatatacaacatacctgtaactaggcgcccatacacctactcataagtttaaaactaggtcacaaaggttcttcacaaaagtcgataatatatctgtcggtatctcagtgaaactctatgtacactacagcaataccctgatatgctaatctaaggactttacaattttcctaacatatatctatcggtatctcagtgcaactctatgtacattttaccaataccctaatatgttattctgatggcagttgaacatggataaacatgtatatatctatatgcatctactatactaatattgttgggttttatgccctaaataaaactctatttcaatgtaatctccattatttaaatatcaataaagagacagaagtattttcatcacttagttaatgtgtcgtttggttcatgttatcatttatatgtttatttaaattaaaaattcatccaaacccttatcacattaatattcttttttattgtgtcgtcagtgttggaaatattttacc

SEQ ID NO: 339540 - DNA, 574 bp, Cannabis indica
catatgagagacaacaaccacatatcacacgagccacaagtttgagaaagaatattttgttaagtaatagtatattttgttaaagttaatacagagaatttaaaatactctaaaactaagaattttatacatacttatattttatataaaatagatatttaatataatttttttatatagttttaacataaatttaatatcttttagttgattttttttacaatttctaattaaaaaaaaattaattttagctgttgtacattagaacaaaattataaaatttaagcaaaatataatattaactttattttattctacaaaatttacgtgtcttacgatattactattgtggccaacatcgataacatataactattgtgggtaggtcataggtgatgtatgtgcgtcagaaagtcttgtgttgatctagtcctgatcaggttccctcctgttgcatcctataattagcaccttttcagtttcacttatgaggtaaatgatcgtagacaataaatataaaaactaaatttggttcatgttcgatttgttgttgtatctgactcctatttatttg

SEQ ID NO: 339541 - DNA, 1445 bp, Cannabis indica
ttttttacatttatatggatttttttatgccataattttgtaaaaaaaaaaagtggaaatcccatatgtgcaaaacaacaataagttttgccggaaaagtcaatatcgtcagaaaagtcgccggaattttcaccgacgccgaaaaagtcattggaaaagtcagcagaagtaaatgtctcagatataactaaaaatataaccggttctatgaataaaaactaataactcaaaccagttataattgaaatataaccagttctgtaacataataaataaatataaataatattaaataactcaaaccagtgataattaaaatagaatcggttctataatagtgttataatgaataaaaagaaataacacgaaataactcaaaccggttataactaaaatagaaccggttaacataatgaatgcaaacaagtaacacgcaataactcaaaccgattacaattagaaacaaagattaaatcagttcctaaaatactgaaacataaattaaaagcaaaactagttccacaataaaatacttcataacacataatacttcataaaactgattataattttttttaaaagaaaagtggggatcaaatgtcttagatataataaaaatagaaccaattctataacgtaatgaataaaaataaataacacaaaataactcaaacttattataattaaaatataattggttctgcaatataatgaataaaaacaaataacacaaaatgactcaaatcagttattaaaatagaacaggttctataacagtgttacgatgaataaaaataaataacatgaaataacttaaactggttataactaaataataatcagttatctaacataatgaataaaaataaataactcaaaccgatcataattgaaatataacttgttctgtaacataatgaataaaaataaataacacaaaataacttaaattagttataattaaaatagaaccacttctataacagtgctataatgaataaaaataaataacacgaaatggttcaaactagttataactaaaatagaactggttatataacttaatgaataaaaacaagtaacatgtaataaatcaaactagttataattcaaaatagaatcggttcttgataactctatgttatagagttaatttttatgcttttaaactaaagtattgtgaggagagtagtgaaaatatgtttatatattttgcttaattttaattagttttagtgttattttctatttagtaatctaacctttaagtttggtaaatattgatattgttggttgtgtttttccaattaactgtgcttattttgttgaaaaatgaggaattaaattgataggtaagagacaaagaagcaaggaagaaaaggagcacaagctgaaactgggctgattgctgaagcaatgctaaagcaatgctgaagtgaattcag

SEQ ID NO: 339542 - DNA, 552 bp, Cannabis indica
tacaatacaatagctatcatctgcaaagagcatatgtgatataatcggagctccattacacaccctgcatccatgtaactctccctgagcctcgaaggacttaattagagatgaaaatccttcagcacaaatcaagaacaaataaggtgaaagaggatcaccttgtcgaataccacgggaaggagtgaatggatccaatgcatgaccaccatgagtgaccgaataagtgaccgtggaaatacattgatagataagatgaaccacacggctatcaaaacccatcttaagcatcatatcacacagaaaagaccactcaactcgatcatatgccttactcatatcaagcttaaccgccatgtaaccatcctttcccatccttttccttttcaagtaatgcattacttcaaaggaaatcatgatattatcagtgatgagccttccaggaataaaagcactctgattatcagaaatgaccagaggaagagcaacttttaaccggttagctaacaccttagaacatactttataaaggacattacataaggcaatcgg

SEQ ID NO: 339543 - DNA, 788 bp, Cannabis indica
cgttcaacccttcaatgtattttatcctttaaacacttagctacctataaatgatacttcagtaaactaatataatcactgaaatgaggcgtcaatcatttatttttatttagccaatcttgaaggaaattatcgtttcacttctaaatacttatagaagttatagattccatatctatgattagcgctcccactcaattgaactaccatgtttccaagatgtaaatatctaccataaccattggttagcttccacgaataatgtgaagaacataaataatacagctaagttgaacctaaccatatcaaaattaagatctatagacttaaaatcaactagtgatattgacttagaaagataccatggtaagtttctgatatgttatccaagatcaatattcgtcccatccaatgcatattccgtacatctgatactggtaaactttgccaataccctggaaatgacacaaaacttatccaaggtgtaaatataccttatcgtcgattatcatgtcagtcttaccagtgaacttacaaattatgggcattaaacttttgcacatataaccatgattatattccactgttatgatgataatataatcaggaacaaataaatatatgtagatgttctggacttaatagaatttatacattaagtataatcataaaataaatcacgtgaaccatgcaacatagaatgatttctaatcttttattaattagtaaatcttattattttgaaaaaagttttatttagggcagacatcccaacaaactcccacttg

SEQ ID NO: 339544 - DNA, 1172 bp, Cannabis indica
gaaaagcatataacatatcatataataccaacttgtatctaggcacccatacacctatttataaggctgaacaaatgagtaagaacgttccatactagggtacgactattatatcacatacactacgtacctcactatacgagtgttggtagggtttgtttcgtaccctgagtaccactaagtgatatacaacagacaccctatactttcccgtacttgtgctgatatcactgtaatgtgctctttaacaatacacactataccaatgcactctgtaccataactgtacaagtgttggtagtgtaacaaacacataagcatgcatatacacttaacatgtacatccacttgcatattgatatcacacattatatacagttcttacctccttttcagattcaagtgtgttggctgacctgaatggaaagtctcgtgctagattgatgcccaaatcacacaatgaaactgggtaaatcacatgttagaaaccctaatctgcgaaactcgaacctataactctaggctttgctatattcattagggaatacactatctcaggaaacaaaaaaacacccaactacgatactgaaatgcacgagagttgagaaaataggacattcggggaaccctgccaaaaccagtttaccggttttacgagtacttgtaaaccggtaaaccagtttataccagtcctccctaaatactccccaatttgcttaaaactccaccaaatgcaaccaaaccttctagagtacctaaatagggtatacacaacataatccaaccagtaattctcagaaaaactcactgaattcaaatatgccattaaagatcaaagtttgggtttcaaaacccaaacttgtgcaattccattacaactcaacaaaaccaatatccagaacttagattcaacctaaaattaacttagaaaaccattttcaacaccactaaacccaaacagccgtcatttcacaaaatcacaaactcaaccaaagtaaaagcttcaaaaatacaagactatagaatctagggttaccttagctccaagaactcttgaattcctagctgaattctagaaaaatgatgatgagaagcttggtttccttcagttttgggttggccgaataaggagggagagagagagagagagagagagagagaaatggaatttt

SEQ ID NO: 339545 - DNA, 590 bp, Cannabis indica
ttatttggctgagaaatgaaactactgctggtttgacagagtgtttgctgctgcaaaccgtgagagttgagagtgggttgtgggctggaatgaataggtccaagttgagattgatcaaaagtatataggccattcttgtgtgtccccatcagcaaggtggtatgactcactttgtccttgacaaaacataaatcagcatgaaattcaaaataaacatcattatctttggcaaattttgcaacactaatgaggttttttgtaatttcagggacatgaagtaaattgtttagaacaagtgagtgggaagcatgctgaggagtaaaaaaagattgaccaatatgcttaattgacaaacctgaaccgtctccaacatacatttgatcttgtccttcgtagtcaaagcaatttgcaagattttgagcttgtggagtgcaatggtttgtagcccccgagtcaggataccaattggaatcacaagaggtactgtttgtggtgagattggcctgtgtttgttgagtcttttgtggtccaactccctgtgaactagaacctgcctgagtgcctgagaaggacttatcaaaacggtaaaa

SEQ ID NO: 339546 - DNA, 815 bp, Cannabis indica
aatcaccatcgtgatcttgaatcaataaatcttgctacaaatcgttcctcacgcaacaagaatttttcctcttctgcatctgaatcaagaaacaacactcaatcctcttttatgtctcctggccgtggccgtggccagtggaatccttatgcagtagcccctcgtggcacaggacaacagcctggtccacctcaaagtcgtcccccaaacatgaactcctcagttccctcatctttctctcccaacactggttccacaggatctaaaccagtgtgccaattatgtgcaaggactggtcatattgctgctagatgctatcaacgcttcaatttcgatttccctggtgttggagcggccaatgttgatcaattctcagcaaacatagcaacagctgactccattctcgatcctgcttggtatcctgactccggtgccactactcattgcactcccactgagaccaactttactcaaaaggagccttactttggtcctgaacagatccatatgggtgatggagcaggtataaacattcaaggtattggtaagaaactctttcatactccctacacttctaaagaacttgctcttaatcaccttttacatgttcctcaactcaccaaaaatctaatcagtgtgtctcagtttgctagggacaacaatgcttattttgttttctatcctgactcctgttttgttaaggatcaggtaaccaagaccactctcatggcagggcagcttaaagatggtctttatgtcattcatccatctcagctacagtctgaagcctcttcttcattttccatatccacaca

SEQ ID NO: 339547 - DNA, 563 bp, Cannabis indica
atgagaaaactgaaaaaaaatctcaaaaaaaaataaataaaaagaaaatagctcatctaataatacaatacattatatgaatacatacatatacttctcctaacaaatttgtaataataataataataataataataataataataataataataataataataataataataaatcgatactttaaaaacaaaagtaatgaatcaatccaaccttacgacctccgtccatagcgccttcagtcaacgtcacggtagattcgccattgccagcactctccaatcctctaggatgccacgggacctacttctcactgccatcaacattatcgcgctgccacgttctcttctccgatcaaacctcgaccggtatcgaacagagaacagttctatattttgacccaacagttcagagctgtgtagtattgggtaggcagcgtcgccggttcaagaacacaacccactagattaaacacatctccggcaatccaagtgaggagaaaagcaagagagacgtcgtggtatacacaatagccataaaacgattttgcaactattaccaaa

SEQ ID NO: 339548 - DNA, 734 bp, Cannabis indica
tttttttaatgaagtagttaaattaagtttagatattaaaatttttcttttattatattggttattagatcaaaatataaaaattaatatttatgattaaatgtgtttactaaatacctaattgagccatatatatatgcatttatattaatttatatagtacttgtgttgtgtatatatcatttagcaaatttatgataacgtaattattatttaaaatttcaatcttacttttgtgtatattatattgtggaggagcttttttatattatgcactatggtcacatcactaacatggaaacgtgatccatatataattccttttaatgaaaaattcagagtatatatatcatacgctataacgtgatgaagaatttgtttttatggatacatatgggtatcataatgaggaattatgtgattatatgtgcagtgatgtaaagtattaaagaataattaacaaagagtactgtgagcaaaaccccacgagattataaccttttccttccgcaagtggaacatgatcaggattgtaactctttctctttgtaaaagtcttaggtaaaaataatgctattaaacacacgtataagaatttaatggatagctttggtcgggggtagaagaatggaatgaactgagaatcgaatcccatttccttgaaattacaccattttggtggaactattttacagaaataagatatatatatatgtatgttatatatatatata

SEQ ID NO: 339549 - DNA, 972 bp, Cannabis indica
ctggcctctccgttccctcttacggttcctatcccaccctcctgagtaggaaatttcagacacaagtgcctaatcgaggtaactgcaccgaaatctactagggccggtcggccgaggattgcattgtaagccgttgggaagtccaccaccataaatgtgcagtatttgaaagtgctttggggtgtgtccgggcacaaggtgactgggagcctcacttttcctattaggataagtgttgttccattgaaccccgtgagttgggaaccgcttggtgaaagatcccggtccgtgaggcctattgctgtgaaggcttctttgaataatacattcacagaactcccgttgtcaattaagattctagccacaatcttgttggcaatgggagtctctatgactagggggtcatgatgagggaagcgcactgtcttagcatcctcttctgtgaacgtaatgggctgatccattaggcggggcctttgagctgggagctgagtaacctcccaaacctcattgtgcttcacggccccggcttaacgtttcagttccttttgggtagttcctctgatgtggggtcctccggagatcatggctactcttccgttgggtcttggcagcaggccaggaatttgctgggtttcatctgggggagcgactcgggccaatgctccggctgcaccccctggtgctccttggggcaaaagtcctgctgcctgaaccggattgaggtgaggcaaccgggtttttgatccactcgtaaagatgtcccaatcggatcaagttttcgatctcgtccttgaggtttttgcattcattggtgctatgcccaatgtcgttgtgatactcgcatcttttgttgggatccctccgggagctatccctgtacagaggaggcggtctccggtagtgcgtattttgcctggtagcaaaatacacacgctcttgggagtccgttagctccgtgtactgggtata

SEQ ID NO: 339550 - DNA, 1764 bp, Cannabis indica
cctacttctggttatggtagggatggtggtgatccaatagtgattaagaaaagaaaatttaacacccttatacttaggcgcgctacaataatttttcaattataatgccaccttctactttttaaagggtattttactttaaaaatcgtgtacaaattaaaactttagatttgattgctaaactttataaaattttatacatttatttacgaaagtcgggatctcgtatttaaactttttacaatgttatcaaaatatatttttaatctggtcgcacagcgactacaaaataaaatctcagatgtcccaagaccgaacactccaggtcgcgtcgccatggcatgtacaaacaccatcctagattagagctcactcatgttcaacctttgccttttctttacctacacatgaaagtagcaattgtgagtcgacagactccgtaagaaaggcatataacaaatcatataatatcgacttgtatctaggtgcccatacacccatctacaaggctcaacaaatgagtaagaatgttctttactagggtacagccactgtaccacatacactacgtaccatcactgtacgagagttggtagggtttatcttgtaccccgagtaccactaagtgttgtaccacacacacctcgtacctttttgtacttgtgctagtaacatcgtaacatactctttaaacattttacactataccaatgcactctatactgctactgtacaagtattggtagtgtatgaatcacaacaagcatgcatatatatatatatcacacatacatacatttgcatatatacaatatgctctatgctattcttacctcgtttctgaattcaagtgagttggctgacctaaacggaaaatctcgtgttggatggatgccctagtcacattacataaacgggtaaacaacatgccaaaatcctaatctgagaaacctaaaattaattaaaatttattttttaacacaaatatcgttttcttatttaattaaatatcacaaattatctaatatttaagtatcttgattttaataaaaatataacttaaatataaattttatatttaattaaatacttgaaaaaatacaaattatttacttagaaatcaattatatagaattatttcttaaattaaatataatttttttaaattcatataaaattaattttgttgctaataaattaataaactaatgtaattagcctaatacaattatctaaataaggcaaatgagcctttacaattggaattgtccatgtgaggtgagaaagggttgagtttagtatgtcgtacccactactaatgatcccctaactctcacacaaggcccaaaaggagatgaatttcaccttcatttaaataattgtaatctgaataagtccaatactaattgaaccaaataaaatctatcattgtgtgattactttatttagattcttagtcaatttaaatattagaattaggtgggctcctatatcatctaagccaaaagtaagcatataggctcacataaacattaatttggatgtgccttatcatgttactaagatagatgaaagaaaattacaaaattaattgttataaattattgagtaaattgcggcataaatacttaatgtttcagattttatacacttaaataccttatcattatttctagaggcaaaaatacccaatgttacaattctcttacatctcttactaccacttccgttaactcataaatatggacacgtggagggcctaaa

SEQ ID NO: 339551 - DNA, 549 bp, Cannabis indica
aaataagaactacctcaccactgaattcgtaccttattcttcattacaatcatatatcagtaacaaaaaccacatgaaaattatgctatcgttttgatcaattcttcaaccccatatcgatttcaatggctacttttcaaaccaaaccacgccaaagcatcatgcattcacataaataacaactaacagacttcaagaactgaaatttccccaccaaaatgtggtaaagcagccctaattctatataaattaagcagtacaaacaaattaaagaaagaaactcatagcatagagagtaggaaggtgcgtaccacaaaaatcaaatgcaagtaggcgaagcaaaaccctagaaattacagagagttgtcgtagaaaaacgaaaggaagggctggaattttgattagaaaatatgaaagtgaaatacgagggaaaccaaataaagatttgtgtgaaccctaaaacccctctttcacaaaaggacacgtggataatcttggtcggctttgtttcagtggcgttaaaccaattgaattccataaataaataaa

SEQ ID NO: 339552 - DNA, 507 bp, Cannabis indica
aaaatattaagatatagtgacactttatgtgtgttgctgttaccatttcagtctgacaaagcctgactttataagcctatagtgacgcgcataaagtgaatgtaaaagggttcagtgacatgtatgaagtgtcactaaaaattgcctttccagtcaccctcattagtgacgcacgttgaagtgtcactaaagagttttagagttactcaaggtggctcactaaaacccatttttctagtagtgcaatgagtccacaaagttgttgactaattacttctctcctgtaggtgttaaaaatgttgttgttttctgtgcctttttcctgtttgtgtatgttcattgttgtatcaaagctctcaatgactccatcaatgttgtgattggtagctctctagttgctaagtttgttgcatttagagattcagcaatgtttgaagtcatagttgaatacctgttgtttttgtagtggtatcttgaccatttatggtatccaacttgttgtaaata

SEQ ID NO: 339553 - DNA, 2223 bp, Cannabis indica
ccaaacattgaacatgactcgggtcctagaacttggatcgtgacccagaactggaccctagtcttggtcctacccaaacccaaaccgggacctaggacatgaatcgaaaccagactcggacctaaaccaaaacacgaacctagacccagaataggactcggacctagacccacacccaaaccttaaatcataccctatgacccaaaatgtgaactggaactagaagaagacccttaaaccctaaatcctaaactctgtacacttacccttaaaccctaagccctaaaccctaaacattaaatccctaaacactaacccaaaaccataaacccaaaaccctaacatggacatgggcctagacccatacccataccgagatcggaacccaggacctagacccaaacataaatatagacccgaacctagacccagagtcatgacttgaacctggatccaaacacagaccagaacctggttcgagacctagaccttgactgggacccagatcgggaccccgacttggaccagaatagggacctagactcagatcgcgacccggtcccaaactcaaacttgaacccgtactgggacctagattcagacccaaactcgggatccaaacgggaacctgaactaggacctacaccgagacctagagtggggggacctgggccccgaacccgaacctagacccagacctagaccaaggattcagacctagatatgagacttggacccgatactgggccttggaacaggaactaagacccaaaactcgaccctcaactcgagacacaggacccgaccctggacccagaacccaagacctgactacggtgacataaccccaaacacggacccaaacccaaacttaggacccagcgctagacctagggtcgaattggaaaaagactgagatccaagacaaagatccgaatcggaacctgaggcttcgacctaacctgtactcagtgtttgaatccatgacccatacccggatccatacccagacctagacccagacccaaactgggatccagacctgatcccgaacccgaaattggaatcgaaccaagcctaggactagaacccagacctggcacagtaacatgacccaaacctaaacccaaactcagaccagaacccataccgggacttggacctagaccgggacctgcgacttaggacgtaaacagagaccgagaccttgacccaaccgggactcgaacctagacctagacccaaacaaaaaaactggggccggacccaagacctaagaaccagactcagaatagggacccgaacctcagactcgcactaggactgggacccaaactgggaccataacccaaactgggacatggactcagatcgggactcgagacccgaacctgaaccggaacacgaacatggacccggaccaggacctaggacttgaacatagattggggacccagaccttggaattgggcccacaaactaggaacagaactgtggcctcagaacttggatcgagatccatgacctgacctcgaaccgagacccacactcgggaaccaaaatcaaaacttgaactggagccggactgggatcttggaataggaccgagacctagacgcggacctaaacccggcactggacccaaccgcgaaccctaaccgagaccgaaacctagacctgaatatcgccctagacaaaaattatgacccgaacctagactcaaacccaaactcgacctgaacccataccctgtgacttgaaactagaaccgaaaccagaagcggatcaggacttaggaacaagaccaggacctggacccatagcttagactataaccggaccaggacccacactcagacacaaacccgaatccaaacccgaacagggatgcgggaccaaaaccaagacctaaacttagacccgaacatggaacaggactcgggacccaaaattgggatcgagaccaagaattgcatgcaagtctcggtctcggacctagactaagacccagatcgcgacctgggacatgaaccgaaaccagactgtgacccgtgattaggattcagatcttgtcctgggattcggaaaccagggcttggacaagacccatagtaggtgtccttatttgggactcagagaaggacccgaagctggaccaggacatggacccaaacccagacctgggacccaaaactgaaacttgaaccagaatgtgaccaggac

SEQ ID NO: 339554 - DNA, 510 bp, Cannabis indica
tgttatatgtgaatttatacataatatgtgtggttaatgtttcatataagatatttattggcttaatcaacatagatgtaacttgttcatacttaattcgacatgatcattaattaatatcatactgtacctcattttgtaactgttaatagataaaaattattttagctataaatacatagagtacatcgactcttaaatccaccttgaattcccttttactttaattctttattttcctccatgtgagatctcactggctattaattacatcttagccaattgatataaaacttaatctgtcatagatactaaattaatattacatggaatatacttatccttatttatatttttaatttttattttaattaaggatatatttaattataattaatttttttttaatgttattcaataaacaatataattctttattaaaagaaatttaactgaaatgtgttataaatattaataatatgtagatgtccaaatcttttatttattacc

SEQ ID NO: 339555 - DNA, 732 bp, Cannabis indica
aatgagatcacgacaaagtgcaggtcaatctctatgtgcttttgacctagcatgaaatactggatttgctgcaatagcagtagcactttgattgcctaccaataatattgggcagtgagtttgtgagacatgaagttcagatagtagggaaaccagccacttaatctctgctgctgcatttgctagagctctaaactcactttcagagcttgaacgggccaccacattttgctttttagcagaccatgacactagatttcctccaaagaacattacataaccaccagtacttttcctatcatcaatacatgatgcccaatccgcatcagagtacccatgaattgttaaagaagaagctggtgagatgtgtaagccgtgagtaatggttcccttgagatatcgcataagtcttttacatgcttcttagtgaattgtagtggaagcatgagtgaattgacttagcttattgataatgtatgcaacatcaggtcttgtgagagtaagatattgaagggcaccaagtgtacttctgtataaagttttgtcagcaaatggttctccttcagttaaggacaacttggtactggcacttgtgggattcgaacatggctttgctccttccatctttaacttcacaaaaagatcagttatatattttgagaaaggtacatcccagttgttgttaggttttatgccctaaaaaaaactccatttcaatgtaatctattttat

SEQ ID NO: 339556 - DNA, 829 bp, Cannabis indica
gcggttattatttgaaaatcacagagctgtgatttttgcgcttttactgggccaaaatgatcgtgtgtttaaacacgcctttaattatatttttctgggttgtctcgacgggaacttggttcaaataatgaccttgacagggagctagaacttttcttctctatctttccgaggtcgattatgtacaccctgctacctctttgtatgaagacttaatgattcatcctgactcggtttatctcgtcaagattagaagtctcgctgaaagatgtttgaagttaaactggtgggagttataggaatgcgccttcctatagcgagttaggtctcgagtccacctgactgttatacttagtttgtgcattatatgctaagtgttttcacagtcgatatgcgtcgctttagccttcccagatgtattgaggttgatgcatcgctttatgcatccaatgatatatggtttctcgttaatatgctaaacaacagtttgtatatctttttctcgcataagaccttatagtcagtgagttgcaagtatactctactacttatgcgattaacgagttattccattaaaagtgattttgtcgatccatattccctttatcttgacatgtgtcctctactgaaatggtagctgaatttcgggtataataatttattgttgtagtctaaaattggccgtttgctttaggatttctaaaaaactgtttttggtaaaatatatgtatctcttacgttataagtccaattctaaggattttagtgtcatttgaaaggaaattcaattttctaaaacttttataaagagattattctctgatttaga

SEQ ID NO: 339557 - DNA, 1481 bp, Cannabis indica
cgtggccgtggcagagctcagggtggtcgtcctataaatccaccacaagctcctccagattgggggcagaggtttacataaatgcaagatcgaatccgctagcaagatgaagaaattcagagattaaggcagtagggtcttcctgtcgtgcctccacaccaagctgctcaggccgttgcagttctagcggtgccagcagaacaacctattgctggcaaccgtatggagccattatacgaaatattttgcaagcagacacctccagtgtttctgggaggtccaaatgtgatgaaggctgagcagtggctcacagtgattgagcgaattctaaattttatgtgggttgttggaaatgatcggttgaccagcgccatatttcagttctaggaggatgttctcgtgtggtgggagttgataaccctcacttgcgacgtcattattatgacctgggaagaattccgggagttgttcaactccaaatattataatgaagccatctgtagtgttaaacggaaagagttcaacgaattagtgcaaaccgaggggatgtcggttactgaatatactacaaaatttgtccgtctggccaagctcgctgtgggtattgtgccaacagattttagtaagaaagaaaagtacatggtcggtttgaatatgaagattagacatgatctggtgatcactaccaatgaagcaaccacttatgctgaaacggttgaaaaagctctgagagctgagggtgcagttaaattccatcaggagcgccaagtgactccgaatgttggtggaacccccagttttcctactcctgtatatggtagggatggaggtaattccaccactgatcagaagaggaaagctaccccggcatttgatggttcgaggcagagtaagcggttccgtgggaaccaaggcagtggtggatgccagggttattcttatcctgagtttccacattgtaagaaacatcatccgggagaatgcaattggaagacatgctttctgtatggcatggtggggcattttaagaaagatttccctgaggcaaagaaagaagatctgaagtcagagctaaaacctgtacctgctcgggtatttaccattacccaagctgatgttgcagccagttcttctgtggtgataggtcagatccttgtcaacaactccttatatactatattatttgattcaggagctacacgctcatatgtagctacacgggtaattgatcttttgggtcggccctgtgatatacttgaaagagggttttgaaccctaatccctagtggggagttggttatctccaataggtgcattaggtctatgccagttaggatcgaggatagggagttgagtgttgaccttatcgaactgcaattaacggaatttgacatcatacttgggatggattttctctccaagtattcgaccagcagaaattgtaagcgaaaaatggtgactttccagccagagggtgaaga

SEQ ID NO: 339558 - DNA, 500 bp, Cannabis indica
caaataggtttacaagattaagcgtgactcaagtgggcaaatagtaaggtataaggctagacttgttactaaagggtataactaaagagaaggtattgatttcaaagaaacattctcacctgtctctaccaaagattctttgcgggtcatcatggctatggttgctcattttgattttgaacttgaacaaatggatgttaaaaattccttgctaaatgaagatctgtatgaagatgtctacatgactcaacctgttggttttgaggagcctggcaacgaacatatggtttgcaagctcaataagtctatttatggacttaaacaagcatcgagacagtggtatctcaagttggatgttgttgtcaacgcaaatgatttcatggagaataaagttgatcaatgtatatatatgaatgtcagtgggagcagctttattttcttagtactatatgttgatgatattctgcttgcttctaatgataaaaatatgttatctgaga

SEQ ID NO: 339559 - DNA, 426 bp, Cannabis indica
tttatgcggtacaggtactcgcaccttgtacttagaccaatttatattttcgtttattctgaactactttatatcctcgcggggatttctgttttctgtattttcgcagtacacgggtactcgcgtttattttatctataatattttgactttaattacaacttggtgtaataagtagaaaatttcataaaacttgaaagattttaaacttgaagcatttcctttatacaatcaatagtacatcatcgtatataccccctatacttaggattttttataaaaaaaatcactaagtataaatacaaggcgaatacaaattggacaatgggagtactattgataatagaattttaggctttcgccattccaagcccgtggaatcgtagtaccatcgagttctgctagtcggtatgtagcgtcaccaat

SEQ ID NO: 339560 - DNA, 457 bp, Cannabis indica
aaaaaattaatcaccattattactgtaacaagtattttctctaaattaaataaaaaaaatataaatttttaaaaaaataccaatactgagagagtaaggtgaggttcatcgcctaacgtcttcaacaattggtgaccaaagatggggatttgttgcccactacccttttttgtcaaatagatagatagacaagagagaagagtgagcgcgagagagaccgagagagaatcggggtagggtttttgggtcttggggttttctgggtatagggattggttgttaatttgggtattggggttgggggttcgttgatggctaatagagaaggagagggagagctggaatatagagagaaagagagagattagaatttgaagaagaagaagaagaaagaagaagaagaagaaaagaaaaaggaaaagtaaaaaatataattttttaatttttttttgtgatt

SEQ ID NO: 339561 - DNA, 875 bp, Cannabis indica
tcacttcatggttaaagaagggatagtgttggggcataaaatttcaaaaagtggtattgaggccgataaagctaaggatccacgattgaaacttaccacctccaatttcagtaagggagttcgaagcttcttgggtcatgtcgggttctatagaacatttatcaaagacttttccaaagttgccaagccgttatctaatctgctcgctaatggagtgtcttttgagtttggaaaggattgtcttgaagcctttcaaattctcaaaaagaagttaatctcggcgccaattgtgactacaccagattgagagttgccttttgaaatcatgtgtgacgccagtgattatgctattggagcagtgctgggacaaagggttgacaaggtattcagaactatctattacgcaagcagaaccttgaatgatgctcaattgaattatgcagctacagaaaaggagatgttggccatagtttttgcatgtgataaattccgaccgtacttgattggcaataaagtcattgtgtatacggaccattcagcaatcaagtatttgatgactaagaaagatgccaagccaagactaatacgatgggttcttcaacaagaatttgatttggaaataaaggataagaagggcacggagaatttagtggcagatcatctatcgaggttggaacttcaagagagtcagaataaaaaggaggttcaaatcaacgaagacttccctgatgagcaactgtttctcttggattctactgtaatgtggtttgcagattatgttggaattattttaccaggatctagatttagtaacaagtatgtttgattaacatccaaatatgaattctaaaacaatgaaataaacacataagagt

SEQ ID NO: 339562 - DNA, 477 bp, Cannabis indica
tcatcaaaaaatttaatattattatcaataataatatcaaacatgtttgctctcttgtttttcaaaatatttatttttttcatattaattgtacgtaattgggttaataatgtgaagacatactctctcgatcgctcgtattttttcatgtttgctctcaaattttaaactccaatatccatgttgtgatttttttttagtcttatcaatgcatttattctttttcttccaaataaataaagcttgataataatttaaacatttaaaacgtgattaacaataaaattctttcttgaattgtttaaaaaatttcccttctatatcatggaaaatttgtctttctttgactgatccagctaattaattaattactgcataaatatatttatattagcaaatattagatctcatgatcagatctctctaggctattcaaatagtgcatatatataaatggaatctacgtatgattatata

SEQ ID NO: 339563 - DNA, 559 bp, Cannabis indica
aggaaagactggctcagagttcgctcaagagtttggagccgcttgctggcgccaactcaaggctctcctccccatgattgggatttaatcaatcatggggatttggaaggaatgcttacgagaggcttgtctcataccctcttggtaagtttctttgccctaatatgcttacgtcattattaattttcttcttcccccttgttttttatacatccttgtttgtgaatctctaggcttctttcatctcttttgcctcccagcaacgaggcagagaaaagataaaatacttagagagtgatgtccaaaactcacttagccaatgtgaggtcgtagtcaagaaatggaacgatgctcaacaggaaattaatcgcctcaccaaagaagccgagaggatgaagaagagtattgaagatgttgagaaagcaacaaaggccaaaactgatgaatgcgagaagctcaaaggggtactcgaggggaaagaggctgaaaccaaatatcgatgcaacaaggttggaatttttaccatttatcgagccttgatggcgaatccggacatgga

SEQ ID NO: 339564 - DNA, 679 bp, Cannabis indica
tcgatatgttcacttcaacaggaagtattgcttcggagccaaatgctagcaagaaaggagtgtttcccgtcattgtcttctcggtagctctgtgggcccagagtacctgaggtagctcgccaacccatctgcctttggcagtgtttagcttcttcttgatagtatccttttaggttttattaacagcttccacttgtccatttgccagagtcctagatactgacgagaagcttttgataattttgttcctctcgcagaattcagtgaacaagtcgccatcaaattgggtttcattatcggatagcgtcttcatgggaattccaaacctacggataatgttcttaacgacaaagtcaaggattttcttgcaggttatggaaacaaggggctcgaactccgtccatttagtgaagaagtgaaccgctactaccgcatacttagctcctcctcgcccagtgggtaatgcctcaattaagtaaattccccatatagcaaacggatagggcgaggtcatcattcttagttctgttggcggcatgcgaggtatatgtgaaaacctctgacatttatcacatttcttgacaaactcatgggtgtccttattgatcgttggccagtaatatccttgtctaatgatcttttcaaacaagctttgccaacccgcatgatccccacaaaa

SEQ ID NO: 339565 - DNA, 512 bp, Cannabis indica
ggtaagaacgctattgcaatggaggatcatcgtgtttctcaacctattccagaagcatcaacttcaaagaaaaggccattgccatataaggttgaaaatggaaaagcaaaaaaaaaaagtgaaaataatgcaaatgctagtgtaagtaatgtcatgtataaataccctatttttatgttttatttataattttacggcctaaagtttttatttacaaaaatacgcttttaaaattacaaaaatactcttttctcaacaaaaagtaagaaaacaactaaaaaacaacgtgaaattaacatcatgacaactatgaaacaatcataaagaaattacaaaacaaccaaaaataccccaaataaataaccttgtggcagctacaatacaactttaaataaactataaaacaataaaaaaaataatttattagttttactgaagtacgtatttttgtaaataaaaaaattcaaagcgtaaaaataaaaaaaaaacattcgtgttaatgtatttttata

SEQ ID NO: 339566 - DNA, 650 bp, Cannabis indica
cccacaaaagccttcatgaatctgtttaatgatttcattcacttctgcacggagaacacaccgaactatgggcatcgagtaccctcttctatgtagtttgccttcaattattgtgtagcgaggcactgaatacaatagtttttgcaccttgtttttgtcatttggaagttgttcgtcgagtaagtaattgataataggagtcatccatgtaggagagacatctatcatctcgacgtcttccgtttcacgtatacttgtgtaaggccctaattaattaggcccgctacccaagatacttatgaaaccctaatccactaactgggattactaataaaattagtgcggaaattaaactttatttataaacgaaattaaaataaaatttgtaataatttaaactttacaatctaaaagttacagaagttgggatcccaaaaacatttacaaaataataattacaagtccttttctttcagcccccctaagcggcaaaacagagtctaaaaaaatacaacattggtagaccccaacccgcttggtctgatatggctcggacatgtacattcttcttccaactcctacactcatggctgatcagcaatagtcttaccctttcgtgcacagtggagcacccgtgagccaagcccagc

SEQ ID NO: 339567 - DNA, 495 bp, Cannabis indica
ttagaaggctcctcttccaccatctttccctttcgcttatgctcgagggcggccggctcctcttcttcaccttcttcaacttgctcaagaacctcctcctcgtccaccatgagaatagtgcccgaaggggcactggaggaagacctcccgggagtgaccaactgagaagaagcagaaggtggggaagcattaggactgtaggctccagcaagagtggccaagagttcatccatgggtctggctgctgcacaataaaataagtggtagaacattcgcgagaacagtatacacttagccaaaaaaggcaataaagctaatcctaccctgactctctaatttggccctagcaaagtcccgaatcatagcactggcttcatcgtccccgagaaagcttcccgagggaaggaaccaactagaggacaaatgggctgaatggtccaagggaatgggcgccggaggtccagaacccatccgggaccgacctaaataatggcc

SEQ ID NO: 339568 - DNA, 611 bp, Cannabis indica
ggcaagtcacacgccttacctttcaatactaatcctagccatgctaaaagtcccttagaactgatacataccgacctttggggtcctgcaccaatcatgtccaacacaaattacaaattctacattcactttgttgatgaccatactcgatatacttggatatacccacttaaaaccaaaaatgaggctctttcagccttcattcagttcaaaactttggttgaaaatcagtttgagagaaagatcaaagctctcaaaactgattggggtggtgaattccaatctttttctgagtgtgttgtgcaaaatggaatagagtttcaacactcttgtcctcatacctcggctcaaaatggtcgagccgagagaaagcatcgacacatcgtcgaaatgggattgacattacttgcccaagctcatatgcccttgaagttttggtgggactcatttcaaacggctgtgtatctaatcaatagattaccaacaccggttttgaaaaatcagtccccctttgaggttgttcatggtaagaaaccggattacaagtttctcaaagtctttggagttgcttgttatccgtgtattcgaccctatcaaacacataaattcca

SEQ ID NO: 339569 - DNA, 747 bp, Cannabis indica
cattagtcttgttgccattatgattcaaattttcattaagaggaatattcccatcatccaccaaatctggaatatcatcaaccacctttgactggggattattctcaaactccaaacaaggtaacttcccagtttgcatggctggccgatcatcctcctcctcatgtcgcaccggggatgcatggtcaaactgctcatcggcctccgtacccgtacgcaaatactgagagctcaatagataatttttccttcgtggttgcgcacgcataaagctcccataaggtttaacaatctcatcctcaggtgtatcaaataacttaggacaaaagttttccgaatgacctatcaaaccacagataaagcaaaatgtcggagcaaattcgtatttaaaattagcataaaaccactcaccacccgttttcttaagcttcattcgtcttttcaatgggacatcaatgttcaccgtcactcttactcggagataatcccgccaaagaccattatagttcttaggatccgattcaacaaaggagccaatgtagtttgcagcggtaacgacaattttctccgtcataaatcccgtagaaaggccatgaatctgtacccacatatcaagttgattaagctttacagacttcggatctccacctcgtggaactctaccaaatatcaatggtagcctattgaaagtccaaggactgccattaataacacgcttaatgtcgatctcatggtaaaactgaaata

SEQ ID NO: 339570 - DNA, 650 bp, Cannabis indica
gggtttggaaccttaatgcctagtggggagttgcttatctccaataggcatattaggtttatgccagttaagatcgaaagatagggagttgagtgctgaccttatagaactggaattaacagaatttgacaccatacgtgggatggattttctgtccaagtattcggctagtatagactgcaagcggaaaatggtgacttttcagccagaaggtgaagatccatttgtttatgttggatcggttcaagggtttcatatcctggttatttcagtattaagggctagggatctactacacaatggatgtgtaggatttttagcagtggtgattgactccagcagacccgaaacatttgggcctgaggtagtcagagttattaaagactttctcgatatttttcccgaggagttgtagagattgccgccacaacgagaaatatactttgtgattgattaggcacctagagccgaacctgtttctaaagctctgtgccggatggctccaacagaactcaaggagcttaagtaatagcttcaagggatgcttgatattgggtttacccgacccagtgtatcgccctgaggagctccggttctatttgtgaaaaagaaagacggttcccttaggatgtgtatgttggaaatatttt

SEQ ID NO: 339571 - DNA, 649 bp, Cannabis indica
atgattctgttcaatcatctactgctcccttgacctcagataattcctccagtagacacactacaccattacaccagaccctgtcaccctcaaatgctgctagtatttccactggttcatcatctgttccatcttatcctagcagtgcttcctctgtatctcatcacactgcctcacctgaacctatacaaagtatgcctccttcaactgctgcacctcaaaggacacatgccatgacaacaagatcttaacatggcatctataaacccaaggcatacatggcaacaaagcataaatttctcgaatctcttctccctcgagaacctaagtctcttaaatctgctctttatgatcctgcttagaatgcagctatgcataaggaagttactgctcttaagaaaaatcgtacatggacacttgtaccttatcaacctcatatgcatctcgtagatactaaatgggttcatcgaatcaaattgaactcaaatggcagtgtggacatgttcaaatctcgactagttgccaagggttatcaaaaagcaccagagatagattatgctgaaactttcagccctgttagaatggtgctaactcttgctatttcatttcaatgggaagccaagcaattagatgtctctaatgcttttct

SEQ ID NO: 339572 - DNA, 1013 bp, Cannabis indica
agtgttctgtgcccgttctaaacatatcgaaatagatttgcacttcattcaagaccaaataattgccatacaatttgaagttcgatatgttccatcttgtgatcaaatagcagacatactcacgaagcccctgtcgactgaaagatttcaatacctcaagcacaagcttcaagttgttcaacaccctttcgcttgaggggggatgatacaactcactttgtaactaaaattagttaaatacgttattttagtttactgtaacagtttttcaattttctggtttctttttgttatttcagtttttttacccttctcttcgattgtatcttcctctatataaatgaaactcttttccaaggcctgtagcttttgcaagtcttgaattgcaatctcatatattgaattctcttagttcttagcataaacaagctcttacatcatgaataataatatgtttgagatttaacagaatttgtataataaacatataattacgaaatgagtaacatgtgaacaaaaataatttctgatcttctattggtcagtaaataagattactttttaaatgagttttatttagcatatgaaaccgcaacatttaatccatttaacttcgacccaataagatcgaaaaggagtgttttggcttaaaaaaggttggattggcttgtttagctagcctaacgggttaaatgctcaactctactgacaaaatatttgtttgtttgtagaatatggctatgtaagaattgctagcgcaactcaaatgagaatattttaaagaagacttcatgagatagacatacttttgacatcttttaatagatgtttattattagagtgaaaaataatgtcaagtaaaaatacttaaaattggtatccttactatcttttttaggctaattagcaatttttccccccgaactttgacatgtactaaatcatgccccctgaacttttttgcccgttaaaaattctccctgaactattaagattgttaaatttaaggactt

SEQ ID NO: 339573 - DNA, 1626 bp, Cannabis indica
aataacattcaaacactttaatacgcaaccaaacaaaataatggaatggagattgttttctttcctttccattccatttcattacctccaaccaaacgccacctatattcttatggccacaacacacacgtataatgtaaaatcttatatgaagtatcagataacaagattgctttagacacttgaagttcaaagtggtaatcaataatgcaaaaaaattattggcaagggacagaaaattacctgaaatttctggtttgagatatagctatctagattccctttcaacaagcccgtaccgtttctcttattcatgtacttggattttacaaatttatccttcatgacatcctacatataccaaatctaaaattaaacataataataaaggacaatgataatgagaaaactacagtaatgtttttagttacttttgaagaaaaattcaacttgctcatcacaaacctctctcaagatagaaaaatggacctcatgggatgctagagcaagcatgataagatctgcatcctatatcaaattcaaatgttaacatcattagatatcccatattgactaaaatggctacgctctaaatgaaaggaatcatcaaattaccaatccatatagacaatgccttgtatttggatcaaatccaggcaggtttctttgcaaacgaatgtaagacattatcttatgctccccctcgcccggtacactggcatccgaaagtatgacctgcaaaaccatcatgtcaataagttagaatccatatgctataaagaaagagagaattgaataaacaggtaaatatcacgacagttaccttgattccctgccagtttggatcctcattcattctcaagtaaatgtaatagcgaagggctgaagacaacaatgccatgaattcagacccaggtgtgatgacatttgaatcaagtttacaagaatcttctattgactgatttttaagcttcactttccaagcagcctgaaagaaacattattaaaaacagttatgtttgatacagagattttgtgtttttaattctatttgttcatgtaatctatctttgattgtgttcctaataatgaatattgggtcataacagatatcaatggcaagtttcagagatcaaagacaacaaaaacccacctcctcagccgcatccttagcagtcctgaatcgtcgcgacctttgttggttcatcttagctcgaggagcaacaccatctacagaaaaaattaatccaaaacacaaactttcaaacacatttacagtttttttgcagaatgttttgtgaaaaatagtcattattaaatttttaattatgaaaataactttctaaaaaaatactataagcaaaataaacatattttgttgcaagaagaaccaaaaattacactatatggtcatacaacaagcaaaagtccgtttggtacaccgtataaaatcatattatattgtataatattatattaaattgtatgatatatcatactttttagggtaaatagcggcataagtaccaaaagtttaaatttataaacagtataagtcccatgtttatttttttcagcaacataagtacctaatgcttgtaaaactataatttttctccaatttca

SEQ ID NO: 339574 - DNA, 529 bp, Cannabis indica
tgcttcaccccatttaaatgcaacatcatttttgataacttttgtaagcggtgttgtgatggtgctgaaatccttcacaaacatcctgtaaaaactagcaaggctatgaaaactttgaatatgacctatagtttaggggattggccactcttagatggctttgatcttttcttcatcaacctcaatacctgtagcactcacaataaatcctaggaaaacaatcttatcggtgcaaaaagttcatttattaaggttagtatatagtttatgttttcgaaggacatccaaaactgattgtaaatgtgaagcatgatcatgcaaactcttactataaattagaatattgtcaaaatacacaacaacgaattttccaatgatagcacgcaaaatatgattcattaatcgcatgaaagtgctaggtgcattagttaatccaaaaggcatgactaaccattcataccgtccatgtttatttttaaatgcaattttccactcatctccttctttcatacgtatttgatgataccca

SEQ ID NO: 339575 - DNA, 1855 bp, Cannabis indica
atcatccttaccaagatcacccaaaagagggacactaagaatgtcatcaaccaaaggattagaaaaacagcttgtaagtttagaaacatcccaattcccatgttcagtaataaaataggacaaaaaaggggaaggaggcctattatcagaaaaaaatttaaccctgttatgaggaagccaatgatcctcaatggttctaatatgactaccatcacccactttccatagaagacccaaattcaataactctctaccccaaagaatacttctttaataagtgaaagaaggcctgtgaccaggtttagcatcgagaaacgcactgcgagggaagtatctagccttaaggacagaagcaaggagagaagaaggattcttaaaaattcgccaagcttgcttggccaacatagcttgattaaaatgaataagagaacgaaaacccaaccctcccaaaaatttagatttgcacaaggatttccaagacttccaatgaattttatgagaactccctgaagatccccaccagaatctggccatcacagcttcaatacctttacacagcttaacaggcaaacgaaaacaagacatggcataaggagggatagcctgaataacagccttcaacagaacctccttaccagctcgtgaaaaacacttagaagaccaactcctaagaacagaattaaccttatcttttaaaaaaagcaaaggagtgatatttagaacgagttaagcattgaggaaggcccaaatatttacatataaagggcctatcttcaagattaaaagtagtgaagaaaacaatacgaatatcaggttgagtattggggggaaaaagaatagaggacttggaaaaattaatagcctgacccgaagccctagaatagacatcaaaaacattctgaagagctaaacaggaagtacgattagcagtgcaaaagataaggctatcatcagcaaaaaataggtgggataatgaaggagcactcctagagatagcaatgccagttagtaaaccagcatcttgttttgccctaagaagagcagaaaggccctcagcacaaagaataaaaagatagggtgagagaggatcaccctgcctaagtcccctagaaggctgaatagatccatgaacataaccgttaatcagaaaagaaagagaagtagttgaaatgcacttcataatgagagaaacaaatttaaaaggaaagttaaaatgaaacatgatactctctaagtagtcccaattaactcgatcaaatgccttagccatatccaacttaagagcagcccaacctattttccaattttttctagaattgatagcataaacaacttcttgggcaataagaatattatcaaagattactctaccagagacaaaagcactttgaaaaggagatatgatcttatctaaaacaacctttaacggttggctaagaccttagatataaccttataaaaggtagagcaaaggctaatgggcctgaaatccttaagagtgtgagcatgctgcttcttaggaataagagagataagagtagtgttaacaacagaaaaatcaaccccttcattaagacaagaaaggacagccttagcaaaatcagcccctaaggttgaccaatttttttcgataaaaataagcatttagccatcaaggccaggggccttatccccagaaagattaaaaagggctttccttacttctttaagagaaaagggttcatccaagaaagcataatccaactcttccaacggaggacccaagcaatcaagaataaggctaatggcatcagcatcactaccatcagagctaaataagtcagagaaataagaaactactaaatttcccatatcc

SEQ ID NO: 339576 - DNA, 1343 bp, Cannabis indica
gtattcctctaagagagaagttcttcctaagctgaagtgggggagcccactaattcatatgtttgaagaatcaagatacttgctcatttttggtgtgtgaatctagagggaaacactacaacagatgggttgttcagtgcgaagacttgcatgattgctgcaagctgtatataggtattatgcatgggtgtaggctgagatcaagactgagctagtttgaggcatgttatgggtgtgttttgtgtttatggaaacactggtattgtatggaacactgttagtcgaatggttcagagagcatatgccgatgggagataacatattggaatggcttcaagtcttaatagtaaggcttcgtgttatcaagtttgtcaaaaattagtgagtcattaaaggatacaggattgattttaggagataaaattatattaggtcaatattaaatatttttggaatcaaacctgctgcaatagaaattttgttagtgttaagtcaatattcaaattttctttattcattatgtactatataatttaagtagaaatattgacctcaatcttcttatttaattataatgtgtatacatatggttttgggtttgaagtcgaggactaatataaattaggagactagaaaacagacgcactcatatggttggagtattgtggagttgtatataagctggtctccttattcgctttcttaaattttgacattttcttgtcttattttaattgtttatggttcaggaatattagattacataattttgaattttgtaagtgaggtttaccaattaacagttaataagtcgtatgagcagtatgagaaaaattagagagaaaacagaagaaaattagagcttttggtattattattgctgaactgattttacagaatggaaaaagaactttatatagctcaatacaatcaagaaatggttagttgagactaaccaatgctgtaacagaaatgtacagctgtaatgttaatttgtaacaaacaaaacaacccttaactaacctaatccaaagcttaactaacttaatccaaaactaatcctaagagcccccctcaagatggagtgtagatgttgattaagcccatcttggatataatgttggagaagtgagttggtaagagcgctttggtgaaaacgttagcgaggttgttttgtgagaagacatgaagtagcttgatcgagccttgttggaccttctctcgaatgaaattgcagtcaatttccacatgctttgtgtgttcatggtaaactggattttcactaatgtgaatggcagcagtgttgtcacaataaagcagtgctggagtagcaaggttgacgc

SEQ ID NO: 339577 - DNA, 378 bp, Cannabis indica
ccattatgttgttgatggctcgataacacatcctcatgttccatccttcttaggaataagaattactagaacaacataacggctcatgctttctctcatatgccctgtggtcatcaatccttcaacttacctttgtatttccttggtttcatccgggttagttctatatgctgggtggtttgggattgaagcacctaaaataaaatcaatttgatgttctattcctcaaataggtggcacaccatatggtacctcctcgggaaacacatccttgaattcttgcaaaatagaaacaacaacactaggcaacgaagaatcaagttggttagtgcttaattttctctctattttaatctcattaattgacctcttctcttt

SEQ ID NO: 339578 - DNA, 569 bp, Cannabis indica
aaaaacaagagatgccttccagggctttttgcatatcctcttcaacaggctgggaggaagagaagagttgggcaaaatgagattcgatctcccgagtaatatcctcctcattagaaagaacaccaccatttggtaagtggagcttgtggatagagttgatctttttcctatgggatgcaaatctgtgaaaaaattttgtgttcttatccccctgagccagccaatgagtccttgctcgttgcttccagtaagtttcctccttgtacaggagggtttcgagattggcttgaagatctttgatttttgctatggtgctgtcatcccacacaggagaggagcgggccctttccaactctttctcaatcttagaaatgtgctttttgaaattgaaatctttcttatggttccagttgctaaggctcgtagcacatctgtcgagagaagtaaccagattggggatcgcgtcattatgggccgagcagccagtccaggatttatcgaaagccaggctccagttcgggtcctttaaccaagcattttcgaagaaaaagcgttttcttgtatccttt

SEQ ID NO: 339579 - DNA, 608 bp, Cannabis indica
ttgtatgtgaaagttatgcatattaaactgaaagatgctgaagttgtcaatttgttttagtagtcacgaccaccattttccatgcccgcgaccctttttcatggtagccactatagtcgcgactaatgattttgggtggaaagcttgtttttcgaaattaccctatggtcgcgactaggctttaggtagtcgcgactatgggctaaagatgagattttagggcagttttgtaatttccccattcgaagatatcttcattatttctatataagggttttgtgttttagaggcaaaggaggcagaaattaaaccctagagctgaagaaggaggcaaagaaggcaattatggcgacccggagcaagatcaccaactagttctttcttcccctgtttatgtctttatgttaatttttgtttcaatttttattaatatgaacatgagttttttaaactaaattcccaatttagtaatatgatgaatgtcagatgatgtttcttcaatttagttaatgtgattattagtttttctttcctatattgtgtgatttgttcttatttgttttaattacatattttagactggtcatcttgaatgtgatttatgatcc

SEQ ID NO: 339580 - DNA, 1162 bp, Cannabis indica
tgatgccaaaagtacacttcttcagattaagctatcccatacctccggaccacttcgaagcattctgtgaggtcgtctgcgtggtccatgcatgtcttggatttgactagcatgtcgtcaacgtacacctccatatttcttcctaggaggcctttaaacatccagttcaccattctttgataagttgcacaagtgctttttaatctgaagagcataaccaagtaagagtatacccctttgtcggtcctgaagctagtacattcttgatctgcgacatgcatcttgatctggttgtatctagagtaggagtccatgaaggacatcagcttgaatcctgaggtggcgtccaccatttggtcaattcgaggtaaagggaagaattcttttgggcaagccttgttaagatcggtgaagtctatacaaacctgccatgtcacattcggcttgggtactagtaccagattggccagccattccgggtagttaacatcccggatcaggccattggttagtagcttatctacctctttctctaaggcgttcgcttttaccggatcaagaggacgttgcttttactgtaccgacgtcatgtttgggttaacatttaagacatgggtaatcacgtgggggcttatgctggtcatatccccttggcaccacgcgaaaacatatattgcttcctttaatgctttgataattttgcttctttcctccggctctaggttttttcctaaacagaggaccttgctggagtcgaggtcgcacacttttacttcctcactgtcctccacaggttccacaattatttctgtccccacgcggggatccaactcatcttcttccatcaatcttggttcatgtccccgcgcactcccagtactgacaagtgtgttgcgatgttgtagcattgccttgtctctccttggtttcccctcactgtccccactctggcttcctgagtagggaacttgaggcataagtgtcgaatggaagagattgctccaaaatcgaccaaggcagaccgaccaaggatgccattgtacgctgttgggcaatccactactacgaaggtgtagtatttaaaagtgctctgtggggtatccaggcacagggtgacagggaatctcactttccccattgggataagtgttgtcccgttaaa

SEQ ID NO: 339581 - DNA, 657 bp, Cannabis indica
gttttaaaccaaaaacctatctacatcaatttaatatgacaataccctaaactagcagggaattaaccaaccaaagctctgaaactaactcaaattgaaaacacgaaaaagtgcaggaaaccggcatctgatccagttaaccagttttacaaggcttgtaaaaccgattaaccggttttacaccaggtaacctaaaaattttgaaaacctaatcaattcaactccaaaccttaccaaaccttccagaccttcatatgataccccaataaacataaccaaggccataaaacacctcaacaagcacaaaatcaagattcaccattagagactaaagtttgagttttaaaactcaaaccatgtctaaacaccaaattaactcatcaattaactttcaatcagctcaaacaaccataatatatcattaaaatacaaaatccaacaactctaacaactcataacccaacatctcaaaaatcatgcaagagaagctacataaactaaagaaaccatagaaaagaactagaaagcttacccaagcttgaaacctcacaaaagatgctaaataatctctgaattgctaaagaaaaaccatggttccttcctggtttctagagttcacgagagacagaaagactagagagaaagggtttctttttt

SEQ ID NO: 339582 - DNA, 612 bp, Cannabis indica
aaattgtcaatgaaagtgacaaagtactcataacctcctctggctttgacatttagaggtctacacacatatgaatgtactaacccaagaggttctttagcacgctctccctttgtagagaaagaacgcttggtcatttttccttctaggcaagattcacactggtaattcacccaagacaatatttttcaatggaccgtctttggttaacctatgaagtctatcatagcctatatgacctaatcgtaaatgccatagatatgtttcatcattattatcgatctcttttcttttttggtttctaggtttagcaaaattgaaaggttccttgttaagcaagatttgtattttcggtctcaaaacataaagccattgttccatgtgagcaatacataattgaaatccattacgagaaatagtgcaaatagaactcaaaaaattcaattgataaaattctatttgtaaacataaaacactaatcaagtttctactaaaattcagaataaacaaaacattgtctaaaactaaaaatttcttctgcagcttgaggcaggcttttccttcagcttggaccgatactaattcgccatttccaactttgagctttaactc

SEQ ID NO: 339583 - DNA, 668 bp, Cannabis indica
ttcatgaagcttagaataagcaagatgaaagacagacgttacgcatttcagaaagcaagcattattgaccgtaaaattgcatgaagccatgacaaagaagaatcgcagagtttgtgaacctagggtttcgtaaatattttctacagcaaagtcgaaggtgcattcaaaatgtaaacatgcaagaataagcataaaggacatcaaaaacttactcaagagtcagatatctgggttcgagcaacatcaatccaacaagtagatttgatgaaggcacttcagcaaacttgaagccaagaacctttcttttcgctctgaactcacttagcaaagagggatggtgaaaatgagtttatgtgccaatgctggttgatatttataagcaagtcacgaaaagaggtaatcatttcagaggaacctcagacgcttcggttccctccttaaaagcaaatatgggaaatcaaaaataatcaagtatagccgtcagccgtggtgagagaaaatcgaatttcgaaatattcattgtcagagcatttattagccgaacaccaaagggacgcccaatcagcctcacatcgagtctcggacagtcgcgctcgacaggtgtccccatcaaaggcagaagcagctcggatgaagtctgcacgcaacttcagaagtcccgtacagac

SEQ ID NO: 339584 - DNA, 758 bp, Cannabis indica
caaaaattgagaaaacgaagtgttcgggaatcctgccaaaaccggctagccggttttacaggcctggcaaaccggctagccggtttgcaccagtattcccaaaacacttcatccattgctcaattttccaccaaatgttaccaaactttccagagcacctaaacaatgcatacacaataaaacccagccagtatttcacagaaaaacacaccaaatcaatttatgccattaaagctcaaagctttgaactcaaagctcaaaattgcatacaacctaatccaaccatcaaaaccagccacaagaagctaataccaactcaattaaaccctatgattcgaaccttaagcaagcctaaacctaacagccactaaatctcaaaattacaagttcaaactaacttttaaagcttcaaaacataacactatagttctagggttacctttgattgctcctccttgaatccctagcttaaattcagagaatttggaaggaaaaattgatccttgctctggttttgtctcagccgaaagagagaaagagagagtgttcaagagaaatgcaatttcctttaattttgactttttccttcaaatgaaaagaattaacctaatctaatagcttgctgaataaaatggacaggtgtccccaccctaggcagccaccaaatcacttagcaacaaattaccaatttgccctttaagttaaccacttaggtgtttcaaaagctaggggtaaaatggtcaaattccataaccccg

SEQ ID NO: 339585 - DNA, 812 bp, Cannabis indica
acatgtagtaaaggtgatgtttataattccattatgcatgactagaccaatatgtaataaatatctttcattaacgtatcgtttaccatgaaagagttattcatatcacaacgatgatcattagtagatcatcctaaattctgagtatacatgaactcctatttgtcttcattgatttctttgattcactcgttaaagtttctcagagatgatgattctttcaacttctgttttgggagctgttattgagcaaatttttcgcctagaaactcgagaccaagctcccataagaatgacacgacacatcccttgaggattactgagctgtcaagaagggactccttgagaagttaacctcgcctgaaccaaacttgcgagatgatgtgaccgtgacagagtctagtcgcattattacgcctcacataatataaagtaaaaccaggaccaagaaggaagtatacaagtcgcacatataccgagatatatgcgatgactaagtagtcttcttctgcgacttagtaaagatcatttctttacataaggaattggtccaaatgaccaagcatattcgatgactcgataaggactcgcatgtcctatgttattaatgctgataaggtatccacatacgcaactcgattaggacgcaaataccttaatgcaaggtcccttagcctcctttgttgtaataaaacgcaccctaagcatgcgagcttgtgagagaaaatgaataggaaactcgcgctatgaaagtcgcatacattgctgtatttagtgaaacagatttaaactgttcttcatttattccttta

SEQ ID NO: 339586 - DNA, 824 bp, Cannabis indica
tatttagtgtgaaacagatttaaactgttcttcatttattcctttacgttcattttaatttaatgttagtatttaatgtaaaacggttctataactgattaagttctgtgtaactaaaaggacacttgctttgtatataaaggagtgatccaacatgaataagacaagacataaaatccttgcaacagtggactaagcagatcgtgatctgactgaaccactatacttccttgtgttcattgttttcattatatttctatttgtctaggcagtttcgtttgaatacttgttgttttaggttgagtactcgctattttttagttaagtatcaaatcattattttacatttggtgttgtccaaattcctccgaaaacatttggtgtcgtatgtgggaagttcatctattgattttggaggaaaataaacatggctgcaaaccagacaaacggaaacactagatcttcttatgttggaacaatgcctgtcccactccaaggtgatggagctaatccgactgacataatcaatgggggtatgggacgaaccaacgtcacccctctcaatttgctcccaaaaattgttgggatttgtgtcctaaataaaactctatttcaatgtaaacttttctattcaattatcaataaagaaacagatttattttcattgtttatttaatgtgttatttcgttcatgtgatcatttatttgtttatttgatttataaattcatccaaattcttatcacactgatattcttgtttattatgttgtcaacatagtagaaaataatcaagattgtgtgattaaatgtattcctatgattt

SEQ ID NO: 339587 - DNA, 1428 bp, Cannabis indica
aaataggcatccataaagctcaggatttcatgtccggctgttacatccacgaggtcagtgaaatcaatacatacatgccatttgttgtgtggcttgggcactagtacggggttcgcaacccaagctgcgtagaaagcttcattgatgaacttgtttatgtgcagtctttctacctcttctttcagtgcatgtgcccgctctttgtccattagtcttcttttatgctggacgggacaaaagtttgggtcaatgttcagggcgtgagacatgatagtgggatcaataccgaccatatcctcatgtgaccaagcaaaaacatccaggatttctctcaaaatttttattaaagctaattttatttcgggcagcaaacttttactgattttgagtttcctaaccaagatatctgggtcaatttctacttcttctagttcttctattggcccaacatttgtatttgtttccccaagtcaaggatccatgtcttcgtccccaccttggctgggatacctggcttgcttcataaaaattcaacatgactctcgcgtgcacgtgttttttgtgcgtggaagatcactgaaagtgcgacacgtcttcaaccttccttcccagaatggaaggagtacttgaagtctgtctcactcatagtgatgttttcaccctttcatcttttcaagcaaagttatcgcctgaatttttatgcaactttagccttcctttgcataaactaaaggttgcttgataaaaattcaacacgattctcgcgtgaacattatttttcatgcaagaaaggtcactgggagtacgatacgtcttcaaacctccttcccggaatagaaggaatgcttgaagtatgtctcactcctagtgtgtttttaccctttgatcttttcaagcgaagtcatcgcttgaatttttatgcaactttagccttccttcgcagaagtcgaagcttgcttcataaaaatttaacatgactctcgtgtgcacgttgtttttcgtggaagaaagatcactgggagtacgacacgtcttcaactctccttaccagaatggaaggactacttgaagtctatctcactcctagtgatgttttcatcctttgatcttttcaagcgaagtgatcgcttgagttcttatgcaactttagccttacttcgcggaagccgaagcttgcttcattaaaattcaacatgactctcgtgtgcatgattgtttttcgtgcgtggaagttcactggggctgcaacacatcttcaacctccttcccggaatggaaggactgcttgaagtctgtctcattcctagtgatgttttcaccccttgatcctttcaagcgaattcatcgctttaatttttatgcaacttcagccttccttcgcagaagccgaagcttgcttcataaaaattcaacatgattctcgcaagc

SEQ ID NO: 339588 - DNA, 598 bp, Cannabis indica
taatttaatgattagtatatatatgttaggacgttaaaatttaataattttttttgtattgttaaaactttattagatcatcatttttaaatttttattatgatgtttgataatgatgatagtgttaaccgctcaaatggcactacaccatactacctttttcgcagtgtgattttcacagttttaagatctcgtagtgcgattgtagtttgaaaaattacaaaaattgtatgtggtttggtttgaaaaaattgatataacaagcatattatataaaataaaagaataaaggtaaataagaatgtacatataagacctaaaagtacctttgatgcaagaacgattttcgtaaattacaatacagccagagataaaaacaaataaaaacatatctttcaaaattcatgaatatctaattttgctcaattatgcggtagtcacacaattaatgattatatttatcaatttaaataaagtaaaatgaaagaatattataagttagtatgaggttcaggataaacataggaaaattctacaatacaccctttaaaatagatatattgatgcacccttatctgttttagcatccgaaataatt

SEQ ID NO: 339589 - DNA, 615 bp, Cannabis indica
atattaataaacaaatctgattatattgaaatgagttttatttagggcataaaacccaacagcataaacacttggtgtcattgctgaccctcatgactgtcatgactcggttgaaccgtgacaggtgatcgctcggatcggagttcccggtgtaagctgccatttcgggcatcttaaaatttttggggagctatgcttccaggatgtgtttagcacacggctcccggtcctcacaatgagaatcaaagttgtcgcctttctgtctccgggagactcgggcgatgtcttttcagagtatggcaaattctgccatgattccttcgtttaaccttcccgtggagaccgctggtccgtatttcttttggtccaggtgattccggagatcaccttagttcccgttaatctgatttctcaaatcaaggggaggacatttctggccccttcttcctctccctccgggttcttggtgcacggaaacgttctttcggtcctctcggtcccgagggccaagactccctttttggagtttgccactctgcggacctttccctttcaggaaatccgagcggacttttcgcggatcctgcacctttttctttttcctaggagtggaag

SEQ ID NO: 339590 - DNA, 576 bp, Cannabis indica
aataaaataataatataggaattgaattctaactgcctattttccatctttttgaaaagaagtggaaatatttatatgatcacgtattgagtaagcttcaattgtagccacattaaaagatctaagaaccttcaacaaattatattccaaaaaagagttcataaattcttacaatgagttacataatttttaatttattttatctcgaatttaaatttttaaccaaagttactttctataataacaaattgcaagtatttctttgctgcaaattctaactccattagacaagaggatgctttcccacacaaagcattagcagaaggcagctgcttggtgctagctcacaacaacgtccctacatgatcacgagccataacaatgtccctacatgttcacgagccattactgttagtattattttctcctccctaattgtcacattgcacttaattttggtccagtctacgggtggagtcctttcagtggcaacatgactttgagtgtcttttttttaggttactgcgattagtcttgtttctgtgacatgattttattttgttttatttcgttgtt

SEQ ID NO: 339591 - DNA, 1152 bp, Cannabis indica
accacttcataagcaaacttttgtttcttaattctaacctcccaattcctaggcctccctcatgtcgaggcctacaaacctcatcccaagccaattcctaggcctccttcttccagtctttttcaccttgttttgcttgcatatactcttggaaattcctctgtttcattcttctaagcgggaaatcattttttggtctgaaacttccatttgctttaggtaaaaaatcccaggatcccaaccctttaatcttccagttagaaaatttcacaggggccttattagcggtaacaaactttttgacagcaccattctccacctgagaattctgattggtcattggtttccatggctccttcactacatttgcccacgatcgctggttcaacaatcttccattacttgtgtctgctttctgctgaactctattctcgttatcaattgcttgctctctcttcatagtgctgttgagacaccttaaaaattccgaccaaccatttgccttctcttcttctggtattatgactgttttcatcatgttgttcttaagcactgaaatcttcaaaaagcttccttttgtattcgagaagtactccacgagatagcagctagaactatttcgaaacgatctttttgaagctgacccttcgcctttcctctttctgctggacttccttcactgtctcgatgatccaatccacagcatcaatcgttacagcaacttcatacccaaaatgtctagttctttcacaaatgcggacagagccgccaccacaagtcaaagtgatcatgaacaccttgtgtttagtgtggaaactccaatattttcggattttcggattataattcgaagcaatacaatttttccagtcaaaaccagtggggtagtgaccttttttcttcccaaaaccagtggggttttggtgctttccatggccagaaggaccatggaaccccctcgtgtgcatggcacagttctcagtcaaaggagagagaagagagaaaaaagaacttttcgactcatcagttttgtcaaaacttccctaagttagacactaaagttagtaacatgcatgtttacaaaatccagtcttatagcataagatattaaactaaaatttgctcatattagttattatgccaaatacaaaa

SEQ ID NO: 339592 - DNA, 632 bp, Cannabis indica
atggtggtcatccgacctgtactttttcttttttgttgaaacctttgagcgtagtccgcccagcaggccattcacttaaaagtaaatgttatttcagtacttagtatggtcgtccgacctggtactttattggtagtattttcttaaatgttccctattccaataccgtggtactagaacaagttgcattttttcatcatacttacccaatttgtatgctccggattcgagaactttgaccacctgatatggtccttaccagttagctccgagtacacacgccgtacagtctttggtgtttagaaatacccttcttaggaccatatctcccacgaagaatttctgagccttcacttgtttattgaaatactgagctactttttgttgatgggctatcaactttaagtttgctgtggttcgcttctcttcgatttcagcgagtgattcgcccaggagtacgtgattggtatcttggttgtacgtcaatctcctatgggatggtggctcgatttctacaggcagtatagcttcgtatccatatgccatagaaaacggagtctgtccggttaccgttttctcagttgttcgatatgaccatagaacttcaggaagttcttccggccaatttcctt

SEQ ID NO: 339593 - DNA, 537 bp, Cannabis indica
taattatttgttgttgtttggttgatttacatatatttttactattttttatgattttcgaaaatctggaagaaaactgctactgcatttaatttctgggaaatataaaaagaacagtgagtgtgtgttaaaatttcaatataaaaatatgttgcgtttacgttgtttttaagttttatttacgttgttttttcatcttcccaaaattaaaagttaaatgtacaggcaatacaataataacacaaatataactgaatgtgacaagaagatattgcaaatatgtagaaaatttatgcatactgatgcaataacaacattagtagttgttttgtgtgtttgctataattatttgttcatcaatcgatattgttttggtcgaaagcaacaaaaactacacaatatctacaaaagaataattaagttgttttcatattattgtgaagtttttttttgtgttgtttttgcaacatgaaaatattacataaaatcaagttattttcgtgttattttaaaatttgttatgaattactatacact

SEQ ID NO: 339594 - DNA, 1061 bp, Cannabis indica
gtacgatcctcgggacaacagttcttttgtagttagtcgctaggcgacaaatattttgtattgagtagtaaacttttgtaaagtattttgtagacaggatcccgaaatattttgtatgtaatattataagttttaattaaatagcaaaattttaattaatcacgattttcattaacctcgttgattagcaaggagctgcacaatacgtttaaaatcacttcaacacgcctatgctagttagggtgttacactagccccatggtgctatctagaggctagctaggggtggccgaccatcttctatgaggaagcttgtctgtcatttgatgcttgtttgagtgttggggtccttgtttgagtgttggggtccttgtttgcttaggtccttattggtgagttttactaccacgtggcactaattttatccacgtatgcactgccacgtcaggaggacaaaaatcgggataacatttgccccccaagtctctgtctggatgttttacgaataaggacttaccagctatgttggtgcgatcgggactactatagcctttgctgaataaaagttgttgcatttttatcggtttaatatactttgtcttggctgtctgatcttatttgctatagaaaaataactactttcattgtccctttgttgtgtaggtgaagtaagtagaaagggtctcacatgtactatataagtgctttcggagggaaaaactttttccacttttcactttttacattttactttctctcactacaattttgtatttgaaaaagctcctccttctctctagacggtcaaacccatcaagcaccattctcttgggattttcatattgttttgatgatccaagcttcccacattcttcctcaacggtttcttgtagtgggtaagctttctatttctgctatttcacttgattaggttgattttgccatgaatgcatgaacattatttcttaatttgaacattctttgattcctgcgttagattgttgtctttttggtatttttaaccgcatgatagccttaggatacataatgtgtgatttcta

SEQ ID NO: 339595 - DNA, 596 bp, Cannabis indica
aactttaatgtaaatttgttatgaattaccactataaacaaccagtaataataaacagaaaaccggaataattccgaaaaaatgaaaaactggaataatttcgtattgtgtacatatagttataatttagagtatataaatcattaatcccacaattatcgaaatattgaaataacacatgccataatatgaatgatatccttttgtagtggaagaggtatgggatctcttcttattttgaggcaaagccttagcaagctagctcatctcttcttattttaatccaggaggtcaatcatacacaagttgtagcatttattttaatttagctaaactattttttacaattactataactatatacaaaaattattgtcattattggaatttgaatatttatttttaaatatttgaatttttatatcacactttataattaaattgatatattattagtaaaaaaatagagaaaatgaaatgtaatgatactattgttggaaattattttactagcatcttagatctattcacaagtatgttgattaacattctaaatatgaacttctaaaacgattataaataaacacatataaagt

SEQ ID NO: 339596 - DNA, 1161 bp, Cannabis indica
tcatagaaagagtgggaatagtaaaagagaagttaactaaggtcttctgcctgactctttattgtttgttatttaatgtactgtataatatatatttaaataatatgtttataagattcatgttatttatgtatgtttacagtattagagcatggccattgctaaaggtatatatttaaataatatgtttataagattcatgttatttaagtatgtatgtaaatagtgtgtttataagattcacattatttagttatgattgttatgttatttaaataatgtatagtagtttgacattatttaaattaggtagattataatttatgtgacatgatttgaccgagaagataatggttaaatacttgactgttgggtctatatggtagatagggggccatttagtagtgggtacgattttactgaacccagccctccgccatttagtccaatagctcgggtttatttgccaaagtcggactcgggcgtaatcattttatgtgatttagcttagaacctagttattagctactagtgatatgattaagtttatgttttgctagttgtctatatatgtgcatgtgcatttttagttaagttttatttttatttatgtgactacctgacacacatttccttactgagtttagtagctcacccttattaaattaccatgtgcagaccaaagtaactgaaagtctagaatgccggtggcgagtggaactttggacgcttgtgtgtgtgaactcgctgagggccatataactgcgggcggtctagggcgctctatttatttatttacgttattaaatttatgtcgcaattattttagttattatttattatgtcttttgtacgaaaactggccagttgtgaacattttcaagtattaaataaaaatgcgacattatgattttccgcgtttaacgcttgtaaataaaattaatatttttataaaagtacgggcgttacagtttggtatcagagccacagttatatcggtcccgaacttctcacgagttacacacatcggctaaaaagtcttcgcttgttaccaagtaagtctcattttgtatgcttgcattttatgtgtatttgtgttatttccaaatttacattttacttccaaaaaaaaaaaaatccttagtaccaatatccaagttt

SEQ ID NO: 339597 - DNA, 643 bp, Cannabis indica
ttaaaattaaaataataatttggaccaataatattttaacacgtggtaatttaaaaaaagtacatggctcggttaaaattatgactaactgacaaataaaaagtgtgaccgtgaggactattgcagttattttaggaggttggggactgcatcaaagtgaccttttcaggacttctgctgcaaattttcctaatttaaaagtagtgctgaacaacaatttgttttgtagaatttaatagttttatattttatatattttatttaaatttattatgtaaaaaatataaaaacatttcaataatttaaactaaatttatgaaaaaaaaaacattttgtagaaatagttgttttatatattctaaaattaaaatagtaaaaaacataacgaaaattaaaaaattattaaaacacataaatatatatatagtattttttgtaatctaaaaatgcttgtgtaagattaaattaatcacccatataataaaaaaaaatatactatttttggcacaaattaaagtaagcaaattgaaatgtattatttaccgttataacatattacttacattaattcctaaatccatatgaagtagttttttttaaaaaaaatatatatatatatggtgttatggaatcatgtcattct

SEQ ID NO: 339598 - DNA, 890 bp, Cannabis indica
cactttgtgggatttcctaggtcgagagtaacatcttccgattcctcaatttgtttcaataggtttctctcatcttaaactcgggggtcaagatcttcgtctttctattcattttctcttgccaagatcaccattaattgatgacctgctttcctatgctacaactcgatgtgatagaaatagcgagccagcatctggtctccatgcaccagtcccacgccttcaggtttttagaatttaaaggataggtgcttgatcgaactgactacccctagtcggatcagtgctggatgatcccacaatatgttgtaagccaatggtaggtcgacaactaagaagtcttgcataacggtggcagatagaagtgcctcacccaaggttaatgcgagctcaattatgctaagactggcaatgttgtctctggtgaatccgcaataattcaccatacaaggcctcaatttagctttttcgagccccatatttcttagagtttccttataaaggatatttatcgagctcccattgtctattacactctcttgatccttctattggagagtttaatggtaatcaccaatagatcaacgtgaggatatctcacaattttctcgtcttcctccgtgaatataattggaggttcttcggatttcactttcttggaaggttttgggcaaatgccgaccgctcgttctatagctctttcacatatcttttctgggcattattgctttcccctgcgataagtggccctcccgaaataaccaggatgtcctctccttcaacaggaagaggttgtaacccctggttgtttgggttattgggcagactgggttggttgtctccatggccctgtcttttcacgtactgtttaaagtggcctcgagcgatga

SEQ ID NO: 339599 - DNA, 509 bp, Cannabis indica
attgggcagactgggttggttgtctccatggccctgtcttttcacgtactgtttaaagtggcctcgagcgatgagactctctatctcatctttcaattggcaacattcgtcggtcgtatgcctaatatccttatggaatttacaatacctgttaggatctcttttgctcctcgcattcctcatgggctcgggcttaccgaaggcaaccttttgctcatgtgcgaggtaaatagagtcttattaagctcagtgtaaatagtatacactggcacgtacttatcgtccttcttctgtttctttttatctttcgaaggttccttagaacagtcctttctcttcgaaccagaagcccccaagttatcgattcttgtggaaatcatacttgttgaaacattgctaggtttgcttcccgagctttttctcaacaaatttatttcctttctggcttcttccttctgacgaatacctgagcccttttgttgaacacaatgatgtttcttactagacga

SEQ ID NO: 339600 - DNA, 545 bp, Cannabis indica
gttatctccgatgatgattcatcttcctcagcttcctcatcggataagtctcgtggtcctttctctaatctcttcagatttcgttttagggctggttgggttcataaacaagatgaacaagaaaaaaaaagagaaaaatatataaagtaaattaaattaatgaggatctgttaacttggagaccaacggacaaataaagaacatgaccttgaagactattgtcgctatttttagaggttggggatttatctgtatcaaactgaacgtttttggggacttttgccgacaaactttcccttttgaataaatattattttgaatcttgcgttttgacaaaaattaccaattaaacaatctgttttgttaaataatatataaaatagacttgtatttttaaaaaaaagtacaaataagactctgaactgattttttgttaaaataaaattcaataataatccgatcgaaatgtgttagaacaaaactatttatattttctgtatctgttcgtgttaggaataattatctttaagttggttatattaaaa

SEQ ID NO: 339601 - DNA, 1482 bp, Cannabis indica
gtgaaggagaaaaagaggaaatcaagtgctggccgagctgagggagctcattaggacaatgaactcatttaagacaatgaactcattcaactcaagcgtgaggctaagttgaagggaggtgcatgggccaagcagtatgctcaggagcattttgagcaggaagacgaggttgaggaggagcaggtgactccactcaagaggaagaagaaacttctaaccaagcacaagcctgttgaacatgcaattcagatcagggagcccagtctgcctgctcggccagccactcctataataggaaagggaaagtcgtctcggaggagataagagactagtcaggtgatgatgagccattaggtcttgctcgggcaaacacttctttcgaagagcaagatactccatcttgcctttaacttcattgattattatgctttcatacttctagtgcttttctctaaccatgttgcctttatttcgtgcagacatgtctcaaaagatgctcaaacctttgaggaatagagtgggaggaagcccaggcttatcccctctggccaagaagtctaggggcggcgagacgaccccgtccagggaaaaggcatcggccgaagcagttatcgatcttttccgaggagctaaccgtcgtggacccttctaccccaaaagttgctaagtttaaagactctcgaggaggaagctcggacagtcaaagggcggattcgaactggtgaagagcatatctaagcagatctgggctcctaccccacctccatcactacatccagagactaagagaggcaaagatatgctcacccactacatgaatcggtcagtccctgaggtgaatgagcagctggccacagctgacaacgagccttccctggagctgttgataggaggagtcctgaaggagtttacgacggtgagtcttccggaatagtttcctttaatcctctttacttggctcagattctaatgtttttcctctgtgcactgatttgaagatggcttatgtttattcccgagctaagtcatctgaccttaaatttaaaaaacgaagaaaacgaaaaaaattgaaagtggtacggacaatatgcattgcatactgtgcacacgcacgagcagggaggcttgaccgaggtccctcggcgcaagaggctgcatacagcctcttcgcgcgcacaagggacgatttcagacaggatcttgtcctgaccgaggaagctcgatcgagcatcttgtctgagcgcgtgcagccgagggttgcaccctcatccgcgcgcgtagggtgggtgacaccatcccgatattttctgattttcaaaaaatcataactaagtcaaataaaaaaaaattgagttctgtaaaaaagtaaattgctaattttttccaaactatccaataaaaaaaataccagaaacagaatttcaatatttttctacaaaattacacaaacatcaatcaatcatcatataacacatagatcaa

SEQ ID NO: 339602 - DNA, 594 bp, Cannabis indica
aatgccatagatatattaaactgatggttgtggtcgatgacttaggtctagtaacaataaagagttcttacaagtggatcctagtcacagaatgcaaaactcattttccatacattaacatacagtttcaatccattgatagaaaattgatattaacaacttgtgaaagtcatactgtattgtccaatgtattctaggaaactgaaataaaaatttctatttagaatctaaaatttaaagtgaaagacataaatttataccaaatatacaatgagtgattattctctcttggaccaccactactaatctaactctaggtctaatttgcctaaagtaagcatacacaagtaggttactttctaagattgaggatttataccatttcaggacagaatatcgggaatatattcatctgtcactactatacaaaatgacattagtgaccctcgttgagagactctaaaatgttttagtgacacttcactacgtgtcactaatgtgggtgactgaaacgataatatttagtgacactgcagtgtgtatcactaaacctttttagaaaccctcactttgcgtcactgtaggcttttagag

SEQ ID NO: 339603 - DNA, 543 bp, Cannabis indica
gtactcggtatggacactatgaatttctggtgatgtcttttggactcactaatgccccggcggcattcatggatttgatgaaccgggtgtttaaagattacctggataggttcgtgattgtgtttattgacgacatcttggtgtactctgagaccgaagaagagcatgagttacatctcagagcggttttgcaaaggttacgggatcacaagctttatgctaagttcaaaaagtgtgaattctggttatcccgtgtctcatttctggggcacatagtggataaagatgggatcatggtggatccggccaaaattgaagctgttcgggattggccagcaccgaagtcagctacagaggtcagaagttttctgggtttggctggttattatcgtcggttcgttgagggtttctcaaagattgctgtacccttaacggagctgacccgaaagaaccagaagtttgtttggactgatcggtgtgagaaaagtttcctggagttaaagcaaagcttgattaccgctcctgtactaactcttccttcag

SEQ ID NO: 339604 - DNA, 1048 bp, Cannabis indica
agacccgtaccccagaccagggtatgagtctgagtctaggtttgaatccgggaactagaatctgactaggacccagaccctgacccggattgggacacggacccggatcaggacgcggatctgaatcaaaactcagatcgagactcgggatacgaactcaaaccggacacggacttggacctagacccaaacccaggacccagacccagatgggagactcagacctgcaccaaggacccagacctagattgggacccaaactcaaaattagatacaaaatcaagactcaagactaggactgaaaccaaagacccaaccgtggtctttgtcccagagccagacacggacatagactgggacccaagatccgaaatgaaatgagactaggacccaagattgggatctgcatcttgacccacgacatgatgcttggacccgacccgtagttggtgtctagatcttgcaatcgtaccaagacccgaacttggaacaatttttagaccaggacccaaacccaaactcagagcctgagactcgaaataggaacaagaaccagaataagaaccctggaataggaattggacctcgatcgaaaatcggatcaagacaagtaaccgaacacagactcggacccagactggaatgaataccaagacccaagcccgaacgcggacccagactttcgcgatgacgttggacctaggacccatgacctgagacctggaccagaaccaattctcgtaccagagcccgaacatagacccagacccagatcaagacccggacacaaacacggactgaaaactgggcctagaccaaaacccagacctagacctggaaccagacccgaactcgtaccaaaactcagactcaaactcaggactcagacccgaacatagatcaggactcggacttagacctagactaggaccgagacctgaacttggactaggactagaactcagactgggaccggaaccgggactcgatactccaacgcaggacctcaaaaccgaaccgttaaataaaccaagaccaggccaagaac

SEQ ID NO: 339605 - DNA, 548 bp, Cannabis indica
ttaattattttattttatatacaatatattatttttatttatgacttaattaatagtgttaattttgggcatttatttcttattcttgctaggtatataatatttgatttatacaggtaatattaattatatcaagttactatttatgttttaattacttttaagttaattaattttgattttatatatttccaacttttttaagttgtgttgttgatttattctgatttattttttttttaaaataagtgaaagacatttagattttagtacttttgtttgaatgttagtgtgatgaagtgttttaagttaaaattttaattttagtttcatcgtgggtgatttcgttcagtttggtgttgggttgactgctgaaatggtggttagttgaatatatcttgttgtttgtttttggttttgttctataatgttgagttgttataatgggatatattgtaatctttttgttattggtttgttctatatttgcgccatttttatggctttggcgccttacaaggctacaacgcctattatatggctggccc

SEQ ID NO: 339606 - DNA, 569 bp, Cannabis indica
gctatccctcaagcatgaaggcttaatcccttcttgacatccagtccaatcaaatatatcattccagggatgtggtctttcgtgaaaccatctttctctttcttcatcatacacatcagcaagacatagaaaccttattttcttctcccacccccacatctcgccctgttcaatcttccacatcccatgacacatttttcacccctaccattacttcgagaacaagtcgccccatcaaaacaccatctcaccttgttgattatgtatataacactaccaccacacaagaccctttgtcttatacttgtgggaaaaattctcattacaagagaaaatatgatgattacaatcaaaatactcaaaataaaaataaaagtatttcatcaagattacaagaaagctaaagaagaagaagaagaagaagaataacacacacaaagcttgaccaaggctcaaggacctttgttctaaaagtcatttcctccctcatatggacacttagagaaactctaaaaatgctcttaaggatttatcaagcctcatatgctcagcctagtgtctaaggatga

SEQ ID NO: 339607 - DNA, 757 bp, Cannabis indica
atataatacttgtcattgaaagaatagtacaaatttaaaaagtttgggcttattatagttattatttccaagttaggttagaggataagctttttaaaatagattagtttttagaactaattgagttcccatacgtccgcgcgtggctgattatatatgcttacttttgtccaaaataatcatataaattcaaatcttttttaacctatctaatatttgtaaaattatgtatatatatatttttaattttatcaatacaaattttattgttttaaacatgatatatatgaggtctaaattttagatcattaagtctaaacaaaaacatgtagtatcagttatttgtaaattttcttttaataaatttaaaacagaatcgataataatgaaattagaagacagttttataaatatttagtacttataccgctaaaaataaaattaaatttatattgcttactaatttaaaatttaaatacttatacctctatttatcttaacgactttgaccattaagaattttttttcttattataaatagagtatccatactcacacattaatcactctatcaaaactcaataattgtatgctaaacaatggtttttaattgtaaataatgttccttaaaaaacattgctttaccaactatctcaatccatcccaagagacatatttgcatcataaagagttaaagactgcattaaatattgagaaatgctaaaaaacaccagtggtgtcaaacaccctcctacgt

SEQ ID NO: 339608 - DNA, 586 bp, Cannabis indica
aaagattcttgactcatggttatccaaatgcctctacctattacctacaccacatagcacccgtgagtcacaaggactcatcaagaaaagtaataacaacaatcatataatatattattcaaatatcatcatttatactcagacaatcaaaataggaacgatcactcattcctcataagatgaaatccaaattactattaacatctatcacaattaaacgtcaatatagatattcagtaatacaaaatcatcatactaataatagaagtcatattcatttaataatataatttacatctgttacctcataaaaaaaactagctttattacatcacattgcctaatcaggcaagtcgatactttaatatgataattatgtattacattacctaatcaggtaagcccatgtcatagcctagcacccatatattgcaccactgtatcacctaatcaggtgagctcgtgccaacacctggcacccatgtatcgcattgcctaattaggcaagcccataccatatcctggcaccaatattataaaccctaagttcttgtctaacctatctttttcatatttagattgattt

SEQ ID NO: 339609 - DNA, 518 bp, Cannabis indica
aaaaaaaaaaggataaggaatcctctactctctcggttcttgcagctctctctgagctggtgccatggctaaaacaaggtctaagatgcaggggaagattccatcgacggtgaaatcgaatgcgaaaaagaagaaaaaaggcccttcgtcgtccatttatgtaaggaaaacaaagtcaatggatgaggttttgggaattgaaccaattgatttctcggatgaggaagaaaattgtactttggaatctcaacaagccaaatcgacttcgcagggttgtattcaagaggctctatcgccctgaacctctctgaaaacaattctgcaaaacgaagaggttgtgcgggacttcaatttcttcatggaggctaatcgtaggtgttctgaagagatgacaagaggagttcatgtaactcccccagctctgcgatctgggaacgtcgtaagaaacctctcaacaacctttgagcataccaacactagcagtcaggtgaaaattactctagatgatattcatgagg

SEQ ID NO: 339610 - DNA, 550 bp, Cannabis indica
cacactgatatttcctcgacatcctccaatggttccacaattttttcggaccccacttggggatccaactcatcttcttcagccatttctggctcaatggtttcccagaccatcagtacgggcaggtgggttgcaacattgtaacattgccttgcttccccttgatttcctctcaccgtccctattccagcttcctgggtagggaactttaagcacaggtgccaaatggatgtgactgcaccaaagtctaccagggctggtcagtcgaggatcgcgttgtaagcagtcgggcagtccaccaccacaaaagtacagtacttgaatgtgctctaggggggtgtccgacacaaggtgactggaagtctcacttttcccattgggataagcgtcgttccattaaaccccgtgagttgggaaccactgggtgagaggtctcggtccgttaggcctccttgcagagtagattcacggaacttccgttgtcaatcaagactctggccaccactttattagcaatgggggtctcgatgaccaacggatcatggtgagg

SEQ ID NO: 339611 - DNA, 550 bp, Cannabis indica
catccatggaaactgacaaccaagccgaaggacaagagaccgatgataatggaggatatgctactgttgaggaaggaattactcctatgatgcagaccaatcacaaccagcaaaggaatcctcttgaagatccttcaaatccttactatttacaccatggagataacccaggtaacattcttgtatctcaacctttaactgggcaagacaattacatgtcttggagtcgtgccatgcaactggccatatcggttaaaaacaagattggattcttgaatggtacaattcctaaaccccttccatctaattctgtcatgtataatgcttggtatagaaacaacaacattgtcatttcttggatcctaaactctgtttctaaagacatctcttctagtcttttatatgacgagtcagctgctgctatttgggaagatctgaaagtgagattccatcagaaaaatggtcctcacatatacaatttgaggaagaatttgatgaatctcaaacaagatagccaatcggtcagtatgtatttcactagacttaagac

SEQ ID NO: 339612 - DNA, 1687 bp, Cannabis indica
gaagatgcctatgatcagttcaatctgtctaataactcgagcgactgaggattataaccctcttccgtgagaagaacgcacactttagttatctctagaggaagcgggtcacaagaatacaaagggcagttactccagtagagcaattgtgtaaaaacaattgcaacgtgagtagataacggcccaatctggttgccttatcaagttgtcgcgaggaaagctcgacgtcaactagtagcagtcgaagacaaacaactaaaacatggattactttacctagaaccccggtatatgtcagggattgaccctgaatatcgaaacaattgtgggagtatgttggagattcaccctagagatcaaaaactgttttatcaaaaccagattctcctagaagattgataaaataagcaattgaactggggaagttcttttgagaataatgattgtaaaatcacattactgatgaaatattttgaattccagttgtgaataaaataatcatttctttcaaacaagtaattataaagtgtaaaccctttaaattacttgaggggcatatatgtatgattaaccggaactgatctagaaatacataatgcaaacccattgtttaaaaaaaaaatggcctcgaccaaacctttttgacgaaagaggggtcgaattgttataactccctgaccaaacctttttgacggaataggggtcgaatcgttataacgccttgatcaaacctttctaacgagaaagggatcaaacaagtgtaattttttatttataacctatctgacgaggaagaaaaatcaaaagttatgactagcacataaagctaaatactaacggcttgcgtacgggaaagtattaaacgagacatccaaatgtcttgaaaaaatacttaaacccaatacgtgggtagaaattttaactactcatgaaagaaatgaaaaaaatatataagatgacaagttcattaagaatatatttgaatgtgcttaaaataagatcattttcgatgatcgcgagatggaattgatgatggcttacagattgaggaacgggcagataagatgctcgcacataaagtaggaaattaactacttaacgtcggaggaaaggacaatcaatggaaacccctaataaaatttatgcatgtgataatttatattgtaaataaaacgcaagcaaacatccacataataaagtttacacttaaaagtgcaaggcattaaaaagaaaagttggtcctccaaccttgcaaatttgtctttacaaaaaaaaagtgccactaggggccaaaccattatctcggccaaagggccatttcctaaaagaaaaataggagataaataaaccaagtatacatgttgggagacttggacagatcttcttcttcttcctcgacctcgccatcttcttcctccatcttggtcatcttgtgaagagctaaagtttcctcttccttctcctccaagaagctggtatccatgttagggttccaaagccaggcccgatatacagcacgaaaaccaactttattgcaccgttctacggtctcaatttctttatgagcaagtttttcagcaaacgtctcctcaaactcatcagcttggacttttatggtcttctcggtcatcttctttgtcttcttggcttcctctttagccttctcggcttccttctttgctttctc

SEQ ID NO: 339613 - DNA, 1246 bp, Cannabis indica
cgttgctaatcaatgaggttattaaaaatcgtgattaattaaaattttcttatttatttagaaacttaaagtattacgtatataaaatctcaggatcccgtttagaaaataaatttataaaagtttgctattcatatacaaaagttttgtggccaaacgactatacagcaaaagcctcaatgtctcaaagattgtacgctccaggcctaaccgccgccacatgtacaatcttcacgtgctcgctctcacagctccacagcttttgccttgcccttacctacacatggaaatagcacagtgagtcgacagacttagtaagaaaagcttaacatataacatactaagatcctgggttataacctggcgcccatacacccgatcataaccctatccccgtgtcccacacggtactgagtctagaacgttcatacgacaatactatcgaccataataccaacctatactcaatatgccagtgatactctagccatattgatgtgacatcatcgatcagtatttcagccaacatacatttatcagtaatcagtacaaatctatgtatactattactactatcaatgtaatctaacaggcataatacgctaaacatgtaataacatatgtatgacattatactaatcttacctcaatttcgaattcaagtgtgccagtcaacctgagtggaacaactgctcgacgaattacaggctcctaaatcacattgataacaacatggataagtgacacctaaatcacaaccgcgacttaggtatcaaacgcaaaacctatccacagtaacttaatataacaatacactaaactagcagggaattaaccaaccaaaaacttgaaactaacacgaatcgaaaacctaaatttttcgggaaccctgctgcaaaatccggtttcccaattttacagggacctgtaaaaccggttggccagttttccctagaaaaaccaaacaattttaaaccttaaccaaattgtttccaaaccttaccaaaccttccagacttgcataatatacctcaatagacataaaccaagcaatacaactagtacccaagcttagaatctaattttaccattaaagctccatgtttgagtttgaaaactcaaaacttgattaaacttactaacaaccattaaaccaagcttaaatcaacatttctaaacataatttaacttctaatatcaataacaaacactaacaacaactacaacaactataaactcaaaaaca

SEQ ID NO: 339614 - DNA, 980 bp, Cannabis indica
gctgggaatatatgttgggtatgaatctctgcctatcattaaatatctcgaacccacaactggagatatatttacagcatgttttgttgattatcattttaatgagacaagtttaccagctttagtgggaggggaaaaagccagttggaaaaaaaaagtatatggaatgcacaatcattatctcaatttgatcctcgtacaaatcaatgtgaatttaaatttcaaataataattcatttgcaaaatattgcaaatcaattaccagatgcattcactgacccaaacaaaattataaaattacatattccagttgaaaatactccagttcgaattgaagtcccagaaggacaatttatctaatgattctaaagctcgcttgaaacatgctagaccagttgattccaaagataaaaatcctcaaaagagaataggagcaaataatcaagatggccctaatgaagaggttaaaaattttaaggaagatgttgacataaaataaatctcttaaagagattcaagtacctaaaaatattaaaaaataataagatctcaataaactatgtcaatacaggaaaagaatgggaccgactcgaagtaattgtgataatatttttgcttataatataaagatagaaattgtaaatgaaaacgagaatcttgaacctaagtctgtcaaaaaaatgttaaaatagaaaagattggccaaaatagaaagaagcaattcaagtagaattgaattcacttgctaaagacaaactatttggacctatagtccaaacacctgaaggtgtaaaactcgttggatacaaatagatatgtttacataaaagaaatgagaaaagtaaagttgtgagatacaaagcaagacttgtagcacaaggttcttctcaaagatcgggcattgattacggagagacatattctcctgtgttggatgcaataacattaggatatttagttagcctggctgtgagtaaaaa

SEQ ID NO: 339615 - DNA, 1097 bp, Cannabis indica
atgcagagttgtatgtaaaagaaataattcgcctccatggagttccaaatctattgtttcaaacagggatcacacgttcacatcaaaattttaggtgagtctgcaaaaagccatgggtaccaacctgaagttttgtacaacttttcatcctcaaataaatgggcaatctgagcgaacaattcaaatacttgaagatttgttacaagcttgtgtcatggactttgggggttcatggagtaaatatttgcctctagttgaattctcttgcaataatagttaccagagtactataaggatggctccctatgagttgcttttatggcagaaaatgttgttccccaattcattaggacaaaacttgagaataaaagtatataggccctgaattagttcagaggacaaatgaggcaatagacaagattaaagctcgaatgcttgcttcacaaagcaggcagaaaagttatgccgaccccaagcgcagagatattgcattttaagcaggagagcatgttttcctccgggtttcaccaatgaaaggtattagacgctttgggaagaaaggcaagctaagccctaggtttatagggcctttcgaaatacttgtgaaggtcggccaggtggcatttcggttggccttgccattagcattatcagctgtggataacatattccatatgtcaatgttgaggaaatatgtatcagacccaatacatattctgagttatgaagccctagaactacagccagatctatcttatgatgagcagccagtgcaaatcctggatagaaaggaaaaagttcttcaaaataaaaccatagtgttggttaaggtgctctgaaataatagtaaagtggaagaagccacttgggagttggagtccaacataagaactcaatatccagagctattcaggttagatttcgaggacaaaatccttttaacgggggaataattgtaaagaccacttaattttaatatgatggattagcaaataatttatgtttaattatgaattagattattaaccatgatttatgcatttatgacgatttatttgagttatggatgcgttattcatgatatatatgaaatttct

SEQ ID NO: 339616 - DNA, 713 bp, Cannabis indica
actcagtttacctcagcctactggtgttcaaccagatcagtctctcgagttacaggttccagctgcatctgatacttcagcttctcctaccagtcagtctctcctggtatggttctccctactgctgacagcaattttggttcccctgctgttcccacacacacagatgcccctcagccaagcacttcaggttctcatccacacaatgctcaccctatgaaaaccagatctaagtctggtattcacaagccaaaggccttcctagtcaccagggaaccgtgctctcttcaagaagctcttagccaacttgtttggaataaagccatgagtgatgaagttttggctttagtgagaaacaaaacctacacccttgtgagattaccaccagggagaaaggccattgggtgtaagtgggtgtacaaaaagaaagaaaatcctgatggttctgttctcaaacataaggctcggcttgttgctaaggggtttcatcaagagtatgggtttgattttactgagacttttagtccagttgtcaaaccagttactataagggttgtcttaaccttggcattgtccaaaggttggcttattcgacaattggatgtcaataatgccttcctaaatggagatttacaagaagaagtgtatatgttgcaacccccaggttttgaggttcctggccagccagatttggtttgcaagctacacaaggc

SEQ ID NO: 339617 - DNA, 1239 bp, Cannabis indica
aaactttagtaccctaattggggagcaacaagagaagaaggatagaatagaaaggtggctgcactttgagaaaagggctggtacgaaaaattacagcagaaaaaagaaatctaagtacagataaagaaagaaaaagaagagagtacaaagaagagaagaagaagactaagaagaaggagaagaaggcaacctacaaagagaggatttgagcttcaaactcatttctcttgctctcctcttcattttgtatcattttctactctctagttttctctttaactccatgaacatttcattttctggttttgagtttttaatttcagctatgaactaaactctttgagatttgggtggttatgaacccttgtatggactagtattttgattttgcaatgattaagtaatcttgtcttagttcaattagttgtgatgaaatgttgattgaatgttaatttttggccatctttaacatttagcaagctagatcttacttggaaaagtaagacctagttgaacccctctaattgatgcatgatttttaccttttcttttaggtattaattagtagtgaaataggcatattttgctaccatgcataactaaagatttgatgctttattggactatttgtgatctaatctgatgtaggaatgcattgttgagattatgaatggtttattgcaagttttggaaaaagcttgctggttttttttgaaatctgttaactctgccaggattgctgagtcattgctgggtcattgctgtatcaactgggacatacaagtggaaattaatcacccaagtctattttccaaatctgaaattatcaccactttaatcacttttagcttcttatttttagtttatttagtttaaaatattatttctcaagtttagaattaaggttataaatttttctcttgaattaatttgttactttattttatttttatttgaaattcttggaattgctcttagttgattttgcattatttagtaaaaagtccctgtggagacgaactttgattacttatcattgtattacttgtttgtgattgtgtacacttgcgcaattataaatcaatataaattttcacaacaagcttgttaaatagagataaatgattgagatctcattttagtgattattttatttcactaaaatatcatttataagtggccagtgttttaaggataacatacattgaaagggtgtaacggtaattttatccctatgca

SEQ ID NO: 339618 - DNA, 701 bp, Cannabis indica
tagcgagtcacttatgcgtgttattatcgatgcgatttgagggcctataatttgtcgagcagttgttccagtcaggtggaccgccacacctgaattctcaattgaggtaagattagtataatatcatgcatatgttattacatgtttagcgtacatgttgttatttcctgttagattacattgatagcagtaatagtatacatagagttgtactgattactgatatatgtatgttggctaaaatactgattgatgttgtcacattaatatgggtagagtatgactagcatattgagtataggatgacattatggtcgatagtattatcgtatgaacgttctagactcagtaccgtgtgggacacggggattagggttatgatcgggtgtatgggcgccaggttataacccaggttagttgtatgtttatgttatgcttttcttactgggtttgtcgactcaaaatgctatttccatgtgtagttaagggcaaggctaaagctgaggaatcttgaggacgagcagatgaagattgtacatgttggggcggttaggcctgaaacgtaggatctttgggacttcgaggcttttgctgcatcgtcgctaggcgaaaaacttttgtatatgtgtatagcaaacttttgcaaagtattttgtaaacgggatcccaaaatatttgtatgtaatacttttaagttttta

SEQ ID NO: 339619 - DNA, 571 bp, Cannabis indica
ttatttatttacatataaaaaagcgtgttatataggggtggtggggcctttggttggaaggaaagaaatggaatgtaaatgaaacattttttattctattattttgtttggttgcattttagggggtgtttggaataggttaatgttagcaagggaatggtaatgttaaacattaccttgtttgtttggaaggtttaatcttaaaaagtcattcacttggtaatataaatacctttgaggagggtaatgttgatacattaaaaaatggtgggattagttattcccttccattattaatttgaataacatttttaaattaatcaataaatttaaataccattaatattatgatttattataaataaaatattataatttatatatttagtctgtaaaattgatttttttataactgagttatttttatgttattagcaataacatatatatgcattatacataaattttatgagaatggtgtacataaatgacatagcgaacaaaaataaataacatagtgatatatagaaatatttattttaattaataaaaaataaaataaaatttatta

SEQ ID NO: 339620 - DNA, 675 bp, Cannabis indica
taaaataatttccaacagcatccttatttgattgtatcctgaatacgcatccataaagcttagaatctcatgatcggtcgtagcatctacaagatggttgagtctcaaaagtggaaaataatcttttggacactccttgttgaggtctgtgaaatcaatgcatacacgccatttttagttccgtttaggcactagggtaggatttgctacgcaggttggatagaaagctttgatgattactatgtttgtgcggagcttttcaacctcttcctttcatgcctgtgattgttctttgtcaaataaccttcttttttgctgtataggacgagcattgagatctattattgggatttaatgccataaatgaaacccaattttattgtaatcttatttatgatagttgtttccatttcacatatatgaagttaaatgctagttgtttctattttacaaactatagtttccttcgtgattaaattgttttcattttttgacattaaacgctagttgtttccatttcccaaactatagtttttatttcaaagttaaatgatttttttttttttgagattaaatgctagttgattctattttacaaattatagtttccagtttgagattaaatgctagttgtttccatttaacataaatgaggttaaatgctagttgtttcca

SEQ ID NO: 339621 - DNA, 986 bp, Cannabis indica
aaataaagaattttaaagtttttgtaatcatatatttctctaataaagctagctactattgccctcttcaatcaacacaaagaactcatacttaaaaaataaatttaaaatatgcatcaattgttaattgacatgtttaattgagactaatcaattcacacaaattttgtatcatattacataaactaatctaattaaataataagataccgagtatgagatcactcggagaaccactgacaaaaaaggaggagtttattggacgatcgagaaaatcaattaactccttaaaaattaaacattactaattaattaaaataaataataataataataatagaactttcaaaaatattacatacatataataaataaaaatatgcaaaatagattacactactatactgaacattctttacatataacattaatacattaacttaaattaaatcacataatataaatttttcacctaaactgtaaaaaaatacacttataaaactaattattcttttcataaataaattaaacaaatcatttctttacctaattctaaaaataaaatatacatatttatatatatatatacttaaatttctacaaatatacaatagacttaaaaaaattatttataaattaatttaaaaaatttttattctcaaattaatttgtatattaatttatcaatacatattctttaaattctaaatatttaaataaataaattcattcaaaaaaattaaataatctaaaataataaataaataaataaatgtaactaaaaatatataaatactactacaaaaaagggctttaatcctgattgttatgggcattttatcccgattttcgttaaaataaaaattgggatatatgcgaatgggataaaaagtttatataaaaattgggataaaatattcacctttaatctcctttttttaaaaaaaaattaaggataaaaaggtaccttttatcccttttttttt

SEQ ID NO: 339622 - DNA, 711 bp, Cannabis indica
actggctacctccactcgccagccggctgggaatcaagttggtttacctttccataatgaacgccacgtcgagggcgtttatgataccaccctcgaaaactgcttgtagtaattatcgcaacaaaccaaaggattttacagtggttcctaagtggtggaaggatatcccttacagcgttgcatttaagttgcacgaaatggaaaatcactggaactgcatggactcagatgtgtctgattttcagcgggtgattgaggtggttaagggttgtcatatcatgctcatccgaacttgccctgagttcgaacctgaatcgttgagtcttctcaagactcttcacaataaaccggttctaccaattgggctgttgccaccgtctgaaccacgtgacgatgaagatcacgagagatgggaagctctgaaactgtggctagattgcaaaaaagacacgtccgtagtttatattgcgcttggttcggagtttagcctgagtcaagattgatgcatgagttagcttttggaatagaaaaatctgggttgccgtttgtttgggtgataaacaatcgcccaatggtggaaggcaaattgggttcggacataattccatctgggttcgaaaccagggtttctgatcggggtttggtatggcggggttgggcgccccaattgaaaatcttgggtcacccttcggttggcggatttttgactca

SEQ ID NO: 339623 - DNA, 473 bp, Cannabis indica
taaaaaatataaaagaaatacgagtttagatacctagttaaaatgggtttttttttttcaaaaatactagattttagacaaaagtacacaattttactataacacgatttttttttttacaaaaatactatttttttataaaacaaccataaaacaacaaaatagaataattaaaacaacagtggaacaactaaaaaacaaccgtaaaaacttaacacaatacacagtatttttgaaaaaaaaattctacctcacagtaaaacaataaaaaaattataaatttcagtatgttgtgtaaaaactcttaaaaataaatccataagaaattaaaacaaaagtccctaaaaaatataaaagaaatacaattttaaattccttgttaaaaattgggaaacttacaaaaatactgtaatttggattaacttttacaaaaatactgttacacggaaatcttttcaaaaatactgtgtttt

SEQ ID NO: 339624 - DNA, 1327 bp, Cannabis indica
tcggttttctttagttccaataccagggaggacaatcgaagacagatttgtgcagtattaggaatgattgaagctgatgctaatagtacttatttgggtctcccaagtacgattggtagaaataagaacgctgtgttgggatttctgaaagagaaggttcttaagcgcatcaaaagttgggatactaagttcttgtctcgcgcgggtaaggaggtgctgatcaaaacggtggtgcaatcgttgcctacctacgctatgagcgtattcttactaccggttggggtgtgcaaggagatagagagtttgatggcaagattttggtggaaatcttcttggaaccaaaacaagggaattagttggatgagttggtcccgcttagcgaagcataaatttgaaggaggaatgggatttaggagtcttcgtgattttaatattgctatgcttggtaagcaagggtggcgattacttatcaatcctaattctttggtgagccgagttttcaaagctagatattatgctcatggtgactttttgaatgctgagttaggctccaatccaagtttcatatggaggagtttggtggaggctcaaggtgtattgaagactggacttagaatgagagttggggatggacgttctattcggtttgcactagacccgtggctgcctagagaggagtttccaactcctacgtctgacctctcgatgttcaatgataatagagttcatagtctttttaagacggggtgccgagaatgggatgaagaaattgttcaggatgtgtttaatgaagatgatgcagctgttatcttgggcattcctcttgctgttgaagaggctcgtgactcttggtactggtttaaagaaagggatggaatttattcggttaagtctgcataccagctgcgtatgaatcaagtgactaacgcagaggtgagtgattcggattcgaagttttggaaggatctttggagtctaaaagtcccgccgaccgttaaagatgttctttggagagctgcttcgaattgtttgcctacaaggaagagactctttgatagaaaggttcctttggactatagttgtcccttttgtttggtttcgagtgaaaccatagcccattgcttgttacattgtgattttgctgctggttgttggttgaggatggggctgggcgttggtacacgggtgtgggaatcttttaaagagtggctacaagaactaatgggcagagttgatgagattaagattgctcaagcagggacattgtgttgggcaatttggaaggcaaggaacgagttagtttgggaccaaaagaatcggtctgttg

SEQ ID NO: 339625 - DNA, 1148 bp, Cannabis indica
agtgaaaattcataaataagacatagtctaatttagaattttaattgattaattaaaaccaattaattgagtctacaagccagtattaactcaactagtgcagggaccatgggcctatataatcaagcttccaataagtagttctagaatttacttggtaaattatttgactgattaattcatcctgactccactattgattgggaatcacactcttaattatatagaacgctctatatgtttcaaatatagatacactattaattatacatagtttcaatccaaataatcaatgctcctctatagatgatctacatcgagtagggacaaatttactgttcttttttcaatgtattttatccttaaacacttagctacctataaatgaaatttaagtaaactaatataattactaaaatgagtactctaccatttatctctattaggccatgctcgaaggaaatcatcgcttcacttctatatatttatagaagctaatgattccgtatctatgattagcgctcccacttaattgaactaccatgttctcaagatgtaagtatcgggaagatccaagtggtcaactttaacgaacaaatcaaagaacacaaataaaataattgaactagaacttaaccatcacaggattgagatcattgatctaagatcaactaagtgatattaacttagaaagatattacagttagtttatgatatcttatccaagttcaatattggtccaatctgatgtataacaatatatccaatctaagcttacttttccaatgccctagaaaggtcataacatttatccaaggtgtaagtaaactacattgttcattatcatattagtggacatcctgtgtactgataaatcgtaggacatatttaatcacataatcttttttactttccactgtgtagataacacagtaattatgaataaaaatatgataaggatttagatgaatttataaatgaaacaaatgatcattaaatacatgtgaaccaagtaatacattaaacaagtaatgaaataattctatttctttattaataaatgaatattcaagattacaccgaaatagagttttagttagggcacaaaaacccaataaactcccacttgtactaacataaaataatca

SEQ ID NO: 339626 - DNA, 617 bp, Cannabis indica
ggctacttctacaaacaaaaaaaaaaaaaaagagaagaagaagaagattactccaatctcactattactaaaagatgcaggtacttatttgaatgtgtgatcaaattattggtataatttaatgtgagtttttatttattttactttaataacaattataaaatactattaaaaaattgtagagtactacccttagctaataatagcaatgtatattaacttttggaaatatacaatcaattttctcttaataattcaaccatttttttcaacgaggtggggattattactttagaccttataaacatcaaacaagtttattactaattagtaattgaataatatcatgtaattaattagtaattgtcttatacattgtttaataaaagttagaaggaattatttcgtgctctgtaatcaaatacttaacatatatagtgattatcataatattttatgttttaaattaataatatactataagaaatttatgtaacgtagatttttatttatttcagcatttagaaaaagaaaattaatctaattttttataagttaaagtctctttttatatctttatatattaaaagtggctatttaacggcatttcttgttta

SEQ ID NO: 339627 - DNA, 725 bp, Cannabis indica
actactgcacattaaaaaacggttatagtctttaaaaaagaaataataaatattaatttaataaaaactgctacatgtataacatgcatacatacatgtcgcttcgatattaaaagggaaatttgaatttctatgcatgcattaggggataattttttccctaaactaatacttttctacattgaaaatatatgatcactttttcgaaattccaaaaatacccctctcaaaaactcaaaccctttctctctccttccctcaaactctctctgcctctttgcctctttgcccaaaaccgcatcggaggaaaccgcccccaacccttaactatcatctcgtccgcgtcgaaccacccacgcacgacgagcaccacccacgttgaaaaccaacccacgcccatctatacccatctcgaccgaaccgccatcggcgatccaccacgcacgcacgccggtcgaacaccaccggagatcaaaggcaaacctagtccgatggatctaggttgaaggcggtggtgaatctgtgttttttgggttagaaaatgcattttttaggcaggcccgatgcacgtccgatgcaggcccgatgcatcatgatgaaaaaattgaatctgggttgaagacaaaggcccgatatagggcccgatgggcccaatggccagctcgatggccagcccgatggtcagtcaattttttgggaaaaaagaggaagagagagggacggtt

SEQ ID NO: 339628 - DNA, 1709 bp, Cannabis indica
aattcatacattatgtacataatcatgaaataaatcatgtgaaccatgcaacaataaatgttatttgtgatctttattaataagtctatctgattatatttaaatgagttttatttagggcataaaacccaacagccatgggcagcaacatgtggatcggctactggtggagcaattttttttattttttttttgataaagttcatggtttgatagtccctggtgcaaaagtgatggtggaattgcataattcaccagtgtcatgagtaacattatccaaaggaaaagtgtgacaaagccaggaggagcaatttcagccgtgttggagagagtttccattcgagatatgttatgttggtcttcatggtttgagatcaaaccagtagtttgtgtgtttaatgcctcattgttctcttgttgagaaggctctccttgaaataattgccttgggtgtggttgagatcggccattgagtaagggaactgccgagatcagagaagtcctcaccaaacgagtgagtcaaggccaagcattaccttttgcaagattccacagaaataaggaacaaatattgagagagaaaaagatcatcaattgtatcttgtatcaattatatagaaaaatatcataataaaatagactcgtggagtatgcagaattaacagcaaaaccacataaaatccctagagttatttaatagtttattacttttatgtgatatatttattacgtaaagccttattagttttagttaacaaaaatcggcactaacaactgatatgataatctacaatatagtttacttgcaccttggataactactatgtcctttttagggcattggttaaagtaagcttggattgaatgtatggagtatgcataggaagggaccgatattgaacttggataagatataataaacttactgtaatatctatctaaattcaatatcacatagttgatcttagatcaaatgatctcaatcgtaagatggttaggttctagttcagttgtattattcatgttcttcaatttgtttgttaaattcgaccattggatcttctcgtgacatacaaattaaggacatggtagtttaattgagttgtagcgctaatcatagctaaaaatctatagcttttatctggatatagaagtgaaatgatgatttccttcgagcttgacttaatagagataaatggttgagtattcatttcaataattataatagtttactaaaatataatttataggtagctaagtgttttaaggataaaatacattgaacggtgtaacgataaatttgtccctactcgatgcaggccatctatagaggatcattgattattaggattataaaaataaataattcatagcgtatctatatcgtggaacataaagagtgttctatatatttaagggtgcaattctgaatctttagtggtgtaaggaggaatgaagaagttagagaatttacttggtgaattttagagctacttattggaagcttgattacataggcccatggtgcccacactagttgagacaatactatttgtaagactcagttaattggttttaattaatcaattataattctaaaattagactatgtcttatttatgaattttcactaagtaatgtcttatttgtgaagaaaagaggttttagggtttatttgttaattaagagactttgtaaagtctaattaa

SEQ ID NO: 339629 - DNA, 876 bp, Cannabis indica
atgccaacttatctgaagttcataaaagatatcctataagaaaagaaagttggaagaatttgagatggtggcactttctgaagagtgcagtgcggtcctgtaaaataaactaccacccaagctaaaagatccgggtagtttcaacattccatgctcaatagggggttcgatacaaacaaaagctttatatgacttgggagccagtatcaacttaatgcccttatctatgtttaaaagattaaaattaggggaagccaagcccacaacagtgactttacagatggcagatcgttctttgactcatcctcggggttaattgaagatgttttggtaaaactatcagaattatactaaccatagctactcagtttgacctagaagtggaccaaatggatgtaactacaacatttataaatggagaacttgaggaagagatatacatgcatcaacctaaggaatatgaagagaaggggaaggaagacttggtttgcaaactgattaagtccctctatggacttaaacagtcaccaaggcaatggaacaaaaagtttgatgagtttatgatcaagaaagggttcactagaagctactatgatacttgtctatactacaagggcactaaaattgaagaagtcacctacctacttctgtatgtagatgacatgctcattgtgagcaaagaaagaaccagaattgaccttatgaagggttggctaagggaagagtttgaaatgaaggacttaggcaaggcagctaagatcctagggattaacattacaagagacagggaaagtggaactctaaggctacatcagaaaactacataaaaaaagtgttggaatttattttacaggatcttagatctactcacaagta

SEQ ID NO: 339630 - DNA, 1070 bp, Cannabis indica
aactcaactagtacggaagattggctcactaaacgcaagcttgaaatggatctaaactgtgtggaggaaaaaagggagatatattggaaacaacggagccgtgctctttggctaaaacacggagaccgaaatacaaagtattttcatttcaaggcttctcatagaagaaagaaaaacactattcaggggctttttgatgaaggaaaaaaatggcgaaccaatgagaaagagattgcagctatcgccattaattactttcagcgcctttttaccaaagcgaatagaggttcggatctgctggatattctccatagatgtgttcctcatcgcctaagtaatgctgaaaatgattatttgatgcagccttttactagtgatgaagtaaagacagccattttccaagtaaatccccttaaagcaccgggtaaagatggccttccaggtctatttttccagaaaaactgggaggtagtgggcgaagaggtcatttcggcctgcttggatgtactcaataatgatgccgattgcaaactgctcaacgaaactctgatctgccttataccgaaggttcaacagcccaccgtaatgtccgaattccgtcctattagcctatgtaatgtcatatacaaagtgatctcgaagtgtctagcaaatagaatgaagcaaagcatgagttctgttatttcagcaaaccaaagtgcattcattggaggtcggattattcaagataatgccgttattggatttgaaagcctccattgtatgcgaaaaggtcgatttggaaatggaaagaaaatggccgtcaagctcgacatgtcaaaggcgtacgatagagttgagtgggacttcttggaaactatgatgatttgcttggggtatgagaagaagtggattaaaaaagttatgaattgtatccaatcagtctccttttcaatacttataaacggttcaatcaaaggctatttcactcccaaaagaggtctacgacaaggtgatcctctatcgcccttccttttcctaatatgctctgaaggtctttcttgcttaatttttgaagctgaacgggctgg

SEQ ID NO: 339631 - DNA, 1052 bp, Cannabis indica
tcagggaattaaacttttgaacatataatcatgattatattccactgtgctaacaacactataatcatgaacaaatacatatgttctggacctaatagaatttataatcatgaaataaatcatgtgaaccatgcaacataaaatgatttctgatctttattaattagtaaatctgattatattgaaatggattttatttagggcacaaaacccaacacctcacgtgtcttagaatacactaagatatcatcaatgaataccaccacaaacttatccaagaaaggtctaaagcctctactcataagatccataaaggcattaggtgcattcgttaacccaaatggcattaccaacacctcaaagtgtccataacgtgtccttaaagctgtcttacggatatctccttccctaatcctcaattgatggtagcctgacctcaaatcaatctttgaaaagaactttgaacaaccaagttgatcaaataattcatcaatcctcggtagaggatatttgtttttaattgtcatctgattcagctttctattgtcgacacaaagtcgcaaagtcccatcaactttcttggcaaacaagactggagctctccatggaaaagtattatgtctaatgtaacccttatccatcaactccctatttattttttcaattcagccaactctgcaggtgccatgcgttaaggcgcaatagaaattggttgagttttaggaatcaaatcaatggaaaactcgatctccctatcaggtggtaaccctggtaaatcctttggaaacacatccagaaaaccactaaccactgatatccaagggaactagtctaaatccttagactcatcctcgatcacaaatagattcccataacactttaactttctctttccacctaagcatgcccttaagatagggttttgtctcactgccctcatgttggctcaataaacaatgaaatcaccactaggggttaaaagagtcacctttttgcgtgacaatcgacgatagcttgttatttagacaaccaatccataccaagaattacat

SEQ ID NO: 339632 - DNA, 577 bp, Cannabis indica
attaggtctatgccagtttggatcgatgacagggagttgagtgttgactttatagaattggaattaatggagtttgacatcatacttgggatggattttctgtccaagtattctgccaatatagatagtaagcggaaaatggtggtttttcagccagaaggtgaagattcattcgtttatgttggatcagttcaggggtctcggatcccagttatttttgtgctaagggctagagatctactacatagtggatgtgtaggatttttagcagtggtggttcactttagcagacccgaaacatttgggcctgaggtagtgcaagtggttaaagactttctcacgtgtttcccgaggagtttctaggattgacgccgcaacgagaaattgactttgtgattgatttggcacctggagccgaacctgtttctaaagctccatatagaatggctctggcagaactcaaggagcttaagttgcagcttcaagggattcttgatattgggtttatcggaccaagtgtatcgccttggggagctccggttctgtttgtgaaaaagaaagatggttccctcaaaat

SEQ ID NO: 339633 - DNA, 752 bp, Cannabis indica
ccccagccggtgtgggattgcacaacttacccggtatttcttcttacggatcacgtgactactgattgtcacacccagtcatgtagagtgttttaagtttgtcagtccaagctcgaggagcttgttttagaccatatatttctttgtgtaaatgacaaacatgatttggtttagtggggtcttcaaagcctttaggttggatcatgtatattgtttcttgaagagcaccatttaagaatgcatttgttatatttagctgcttaatttcccaattgaaagtgacaactaaagtgagcaccatccaaactgagacaggtttaaccataggtgtaacgccctaatctatagggacaccaagtgagtgattttataaactagtttaatactaatagaataattatttattgaaaactgtgataatattaaaaatttcactaaagtaaaacactaaaaacgaacattataacgacataaaaagcgtgttccggggatctctgttataaaaagttttgctaaagaaatatatacgacaaccatttaaacacaaaatcaaaatacacaatcgatacagccagcccaaaataatttctggcaactcggcacgcaggccagtgaggtcaatatatacattgctggagaagactgtcacctcatggctgatctagcttttctttgcctttacttgcaccatacaccacccgtgagtcacaaggactcagcaagaaaagtaataataacaatcatatagttta

SEQ ID NO: 339634 - DNA, 710 bp, Cannabis indica
gaacctgtttctaaagctccatatagaatggctctggcagaactcaaggagcttaagttgcagcttcaagggattcttgatattgggtttatcggaccaagtgtatcgccttggggagctccggttctgtttgtgaaaaagaaagatggttccctcaaaatgtgtattgactatcgggaattaaacaagttgacgatcaagaacaggatccgttacccagaattgatgatttgttcgatcaacttcaaggaaagacggtgttatcatagattgatctgcgatccaactatcatcaactcagaatacgggaagaagacataccaaagactacgttccgaaccagatatgggcactacaagtttctactaatgtcattcgaattgactaatgctcctgcggcctttatgaatctcatgaatagggtattcaaggatttcctcgataattacatcatagtgtttatcgaagacatccttgtacactctcagttagaagaggagcatgagcatcatcttcgaatggtattgtagcgacttagagatcacaagttgtatgcaaagttcaaaaactgtgaagtctagctgtttgtggtgtcttttataggacataatgttgggaagaatgggattatggttgatccaagcaagattgagtcagtgaagaacttgttggaaattattttaccaagatcttagatctactcacaagta

SEQ ID NO: 339635 - DNA, 639 bp, Cannabis indica
taaagtaaagtgggtatacaatacaatttcctcttaaatatgagagctctgggttgggctacattttatgttttttttttttttttgcttttatatgggtttaattaaggaattattttacaaaaatacacaaaaattacaaaaatatgattataccgaattttaaatatttttataatttttatgatattatttacaaaaaatacaatttttttatattgtactcttgttaatttgttgttgatttttttatagtttgtatgttattttttttgttctgatgttatttaaatgttattttttattaattttatgtagtttttttatttttttatttttataaaaaatcataaaaatataaataataaaaattaaacataaaaaaaaatatattttcttataaaaaaaatagtagtttatgtaattattcttttaagggtgtctacacatttggtaccctgtgttttatctaaatacaagtttggtaccctgtatttttaataatgcttatttagtaccttgtattttacaatcatacctatttggtaccctaaatttaaattttttttagtataaaatttaatcaatacaatcaatagtctaaaattttatgaattatgaattcaaatttatttattt

SEQ ID NO: 339636 - DNA, 542 bp, Cannabis indica
gttattgttgctaaatttacaacaaaatcagagttgcaggttcaagatccaataaagggaagtaaagaatcaagattcaatcaagaatcatctgcaaccaatcatgacaggagcaacaagattcgaacttgagaagttcaatgggacaggggattttggcctgtggagagaaagcttaaaaggaatacttgttcatcaaaaagttgccaaagctttgaaacccaaggaagaactgactgacaagttgaagaaggaacagcttaaatacatggaagaattggcatactacactatcataatgtacttgtcaaacattgtaagaaataaggttcagaacatgaagacagctcgagaattgtggagcaaacttgaagaaatcaacatgaaaccctctctaactaataagatcaatctgttagaatctttatatgattttaaaatgtcttctcatttgtctctagatgataatcttgatgcttttaatcaaattattataggattggctaacttgaagtacaatgttgatgaagaaagccaagctg

SEQ ID NO: 339637 - DNA, 720 bp, Cannabis indica
catgtcgtgacgatcttcggaagacaacctggcggctctgataccacattgtaacaccctaactagcctaggcgtgttaacgtgatttttagacttgctgtgcagctccttgctaatcaacgaggttaatgacaaaacatgattaattaaaatttgctatttaattaaaacttaaagtattacatacaaaatacttcgggatcccgttttcaaaacactttacaaaagtttactattcatttacaaaatatttgtcgcccagcgactaacaacaaaagccctgatgtcccgaggatcgtacgctccaagcctaaccgcctgacatgtacaatcttcatctgctcgtcctcacggttcctagaccttagcttcgcccttacctacacataaacatagcacggtgagtccacatactcagtaagaaaagcataaatcatataacatacatatatcccagagtatggtcagacgcccatacccctgaccataaccctaatccccgtgtcccaaatggtactgagtctcaagcgttcgtacgatggcactttagacatagtaacagcctatactcggtacgctagtcatactctagccataccgatgtgttactgtatcagcctatactcggtatgttagttgtactctgatcataccgatgtgatactgtcaaatagtacggtactatcgaccataatatccgcctatactcggtacgctagt

SEQ ID NO: 339638 - DNA, 748 bp, Cannabis indica
gccaatatcccttattattattacaaagacctctttccatgatcatcaaatctaaacttgaaaattcttgcatatccctttggtacttgacatgatatccaatgccataaatgaaatatgttcatttgtggaaaaattaaaactaatttgtagaatcaaattaactaaaactttaatcactaaacagttagcaatgagaagattaataaaacacacagtaattggagaaaaacaggaatgaatagagtatctaaaattagaatcgattaaagcaataaaataataaaatcaacaccaagatataattggttcaattcctatagatcgatatgatctatgactctactccagttcttgaacactaccaaatcctctttattgattgagcaagaataagggtacaatacaatgatattgattctctgttagattctctcaaagtgtttcaactctgatcaaactcttacccaagaaccttcttcatctacaaaagattcttcatacaaaatctaaatctcttttctctttacctttctttctctacctctcaatctctctctctctcaatctcaaaatctcctctcaaaactcgtctactctgtattgttaaaatgataagtgttggtggtatttataggctcaggataaagatcataaggttggtggctgcaattaataagttgttaagttagttactgttgggttttatgccgtaaataaaactccatttcaatgtaatctattttat

SEQ ID NO: 339639 - DNA, 568 bp, Cannabis indica
gcatgaggaaccggagacgacatcagaggcggcggaggttgcgacgcctttgtagtgttggtagaatccgacgaagtagcagatcgagcagaggatgattgcgctggtcaagaagtatagacttggaaatcttttggctctgatcaaggccaatcggccgagtcgattggattcggccattaacgccaaaaccaaagctctctaaccgattctggtcgattctttacagtcaactgagaaaaaaatatatatagagaaaaaaacagtgattgaagacgatttgtgtgtatgtatatatatagtgtgcgtgaggtgacaaattaattttccaatttattatttattagtaaatattattttaattctgtgggtttgaaaaagacgagtgaggttctaatctcaacgttgatgataacatgaaattacataatttctttattcaaaaaggtaattacttaatttctgaccaaaataacaattaattttacaccttctatatgtattttttaatatgttttttatctagttgtttcctgtccatttttatatcatcaatgggtaacaatga

SEQ ID NO: 339640 - DNA, 665 bp, Cannabis indica
tggctggaggatttcgatcattcattgcaaatacattttgatatgtttatagttttttcgcatcacataccgtttatctatatgttgtatttcatatactatattatagtctaacaagcctcactcattcgtttaaagggtggtgttaggaatagtgtgtaggtggtggtacactgtatatctgctgttgcagcagtacccaatcattatcaatgattagctgtcatatttttacattccagaatattctcttgttacaaaaggttgttatgcctcgttttctataatgccatgtggcagtgcctaaatggctattttgtattcatcttttgctatataatgaattctagtactcactctcattgagcaaatccaatttgtcctagttttctatctcatataatatattatgggtgactattcaatggttacatttttattgtaactatatggttacatttttctttaacctgtaatagcaggttaccaataggtaaactttccttttttagatttaattaattataattaactattttcttaaaataattaattaaatagacattccttttttaaaattatttaattataattaactattttcttaaaataattaattaaatagttaacaagacctcttttagcaattaatatttatatttaaa

SEQ ID NO: 339641 - DNA, 1054 bp, Cannabis indica
gtgacattacaaaaaagtaaggagagaaaagggaaaaagggtaaaaatcgagaagacgaagtctgctctaaaccctaaagtatcattatgtgggacgaagatgatttctcgacaaaaacatgatgaaaagaagtgatctaaacgcaaaagaggaggattctaacgcgttgtgcagaaactcagacaaaaaattcccagaaagttcaacatccaacccagaaaaaaaaacaaatgaacagtaaagcatgctatgtgaacaaacagtgaactagtgtgcaagatacgaggaacttacataaagtatggaagctgggtgttggtgctgatcgccagtaaaaggttgaccggcaacgacgaaggaacaggagcaggaaatctatggtgtttgaggtttcttttctctttgggaaactctgggaaaatttttgcaaaatgctgaaagtaaccaaatgaagtaggaaggttggcttttataggccagaacgtgtgtgagaaagtgtgatcagccaccatcgaacagctgggatagcaatcgattcgaattctatagatccaacggttggattaaatcgtcatcaaggcgatggaaacgtttaagtgcccgtctgacacccatttaatgcgtcgtatcaataaatggacaagaaacgaatcgatgcctgcaaaaagcgaataactgcagtaataatggtcattaatacaccaccacgcgcccaaagcacgtgccaggaagctgataaggcaaccggaggcatccaggcaagccttgttcacttcataaataaacaaggcttgggggataaatgttgtccctgattttgcccaaaatacgtggaccaaccggatgatgacatgtaggtggaaagggtttagcgtttgtataaatcagctaagtctccttaagcacaggattaccttaggcatgcctcccggagagcaaggctacaacaaaacacctccaggaggtgtcagatcctatctgaacagtcatctcacatttaatgccgcatgggaggaggcgtattgaaactgccatgcgtaataaagtctgacg

SEQ ID NO: 339642 - DNA, 825 bp, Cannabis indica
cgacctgccttgtttgggggtggtcttcaaataaaaaaaccaggcaacctcgtgaggagaaggagtacgccatccttgggaagcgtagaggacgaagagggcagacaaatacttaatgcccataggagtgaactgggccaggcagagaccgaagaagtccgccacatccttgaagtacttatgcaagggcatctacgcttcttgctgaccatgggcccccgaccaggcgcacatccccttgtcagggttcgtggcatgattattgtgggcgggaatgtagtagtccagctcgcctaggtatctgccgtggtcaaaagttcgaaggcgcgcctccgtaatcttggacggaggacttacccatctggcgcccaagacaccctgccttttatgaggaaccgccgcggcaagctcttcactgacgtagtccacgccctcgaccaggacgtctccgtcaggatcgactggctgcccagcctcattgtaccgcccgtagtttgggggttcaacctcttcctcttcctccgccttggagggactgccggcacgcacatcgtccagctcctcgacctcttggacctcagcgtccccctcacgatcctcctccatcgggacagccgaatcctgttcaatgctaggcagagtggcaagtcgaaccacttgaggatcagtgacgtcagacggacacgtagttttctttgtactagccatcatcctatggctgggtacagggtcagaagaatgtccttcaatagaaggaggactagaacgaagatgagggtgatcttcgtgcagaagttgaagcaaatcctggtcgatccgatgtcc

SEQ ID NO: 339643 - DNA, 624 bp, Cannabis indica
aaaatggtgtcgagaagagacaattgtggcaagaagagtgtctaagaatttggtaacattagttgatatctagattttcaaaccagatttgtgacctaaagatcgtacaatcaccagactcgaacctagatctttgaaaggtgtttgtcgacagcccgttttgagggcacattacaatcctgtccaaaaataagttttgaataatatttgcatctcttatttattaattattcttctctttagaaataattatcatggtattcgggacagagccctaaaagtttctacaggtggccgtacagtcattatctctacaacatccatatagttcgacattccaatttttggtattgatttcttcgagttttttcttgattcgcatagcagtacttttgggtatcgatttttgcagctcaagtttgaattttcatcaattttgtatttggaaattttttgcaatttttttttctacaatggctactaataaagatgacttccttcaagcgattagtgtgagattggatggaaagaattattcgtattgaaattatgttatgaaaaaaaattgaaaggaaaaaagaatgtgcggttatatttctggaacaaagaggaaaccagcagatg

SEQ ID NO: 339644 - DNA, 575 bp, Cannabis indica
tgcaataccacattgattttgtaatatggtcattctagggttagagtatataaatatatccataaataaacttacaaaattgaaactcctacttctttaaaacaaattattagtttctcattaatttttaaaatcaaattatctttcaaatgagaaaattaaattagaagatgaattaatcaacttctataatatttcaatgtaccttatgtccttcactttgttagctcatcaatatccatatcaaataaattagtttctagtgtaaaagtatcttctatatgaaattgtttgaataattaagggatttatttatcaatctcatgtaaactataatttctatatatatttatataatatttttgacaaaactatgatttctcatattaaaaaaggcatagggttaaattggtttgtatttattctttttttaatagaaaaatttacatgttatactttaattattatttttattacttttatattgttaaactgaaacaatataatttacttttgttaattctatttttagcatatttaattgacaaattttttttattatttattgtatattt

SEQ ID NO: 339645 - DNA, 728 bp, Cannabis indica
tcggccactgatcagaaaagaaaggcatctattgcaaccagtggctctggtcagaacaagaggtttcgaggaaaccagggtcgaggtagtcggcagggtaattctgagacccgatacacttacccagagtgccccagttgtaaaagtcaccatctgggggagtgtaaagggcaggggtgctttcagtgtggcatgtcagggcattacaagagggattgtccccaactcaaaactgaagcaacgaagactgtagcaaacccactctagcaagggtgttcgccataactaaggctgatgcagaagccagcccttctgtggtagcaggtcagctctcggtcaacaattcttatttctctgtgttgtttgactctgcggccactcattcttatgtggcagccagaatttttagtaagttggatagaccgcacgatagttatgaatcagggtttggaaccctattacctggcagagagttagttatctccaaaaggttgattaggtctatgtcgatccgaatcgaggatagggagttaagtgctgacctaatagaaatgagcttagcagattttgatattataatgggaatggatttcttgtccaaatattcagccagtattgactgtaagaggaagatggtaatcttccaagcagaaggtgaagaatcgtttgtttttgtcggttcggttcagggtaagtttagaaccttatttcttagtgggaaatatttt

SEQ ID NO: 339646 - DNA, 945 bp, Cannabis indica
gggtcaatccctatcatatctccatggctccgggaaaactgatcctaattcgcccttaagaaacttattaggtgctattttagctgtctgtctaggttcttccctatgtaaacacactttgcgagatttcttgggtcgagaacaacctcttccaattcttcaattggttttaataagtttctttcatcttgaacccgagggtcaagatcctcgtccttttttttcactttgatctgccaagaccgccattaactgatgaccaactttcttatgttgtaactctatgcaatagcaatcgcgagctagcatctgatcacctcgcaccactcccacaccttctggtgtttggaatttcagtgataggtgcttgatcgaactaactgcccctagtccgatcaaggcttgacgacccaacaatatattataagccgatggcagatcgacaactagaaagtactagcataactgtggcggataggggtacctcacccaaggttaatgcgagcttgattatgccttgactggcaatactgtcacatgtgaaagccgcaaagagtttaccatgcaagggttcaatttagcctctttgagctccatcttcttcagcgtttcctataaaggatgtttactaagctcccgttatctatcaacaccctctttatccttttattggcgagttgaatagtaatcaccaatggatcgacgtgaggatatctcatgttcttctcattttcctccgagaacatgattggaggttctttagtttttaccttcttggaaggttccagggcaaataccgaatgttcatcctttatttccttcacatatctcttttgggcattattgctttcccctccaatatgctgttgtgttttgtgccctaaataaaacccatttcaatataatcagatttacttataaagatcagaaataacattttatgtt

SEQ ID NO: 339647 - DNA, 644 bp, Cannabis indica
tctttcttctatgtttcttggaatttttgaagagaaatgataggttgcatgcttagttttggttggttgttgctgctgtgattatgtgttgttttcagaagtttaagcatgcttgattgagtgaaatgaaactggtattgatgcatgtttggttggtttttagctagtttggaattttagctcaaaaactatgatcttcaaggtaatttgatgaattttgtggctgtagttgttgtaattgtttagtgttgttttcagaggttttattatgcatgtttgagtagattcaagcaggtttgaatgcatgttagaggggtttagccaagcttgagttttgaactcaaagcttggagctttaatggcctttttcatatctgtgatttctggattgttttgatgttttggaaacgtttattggggtatttagaacaggtctggaaggtttggtatgaattcggtttgatttcagtgagaaacgaaattttgaagtttcctgctcagaattggaattccggttcagcaaccggaattccagatggtgttccaggaattccgagaaccggaattccagttgtagaaccggtctgccggttgggggatttttgggaaccctagttatttccatttttatgttgtttagggta

SEQ ID NO: 339648 - DNA, 501 bp, Cannabis indica
actatttttcttatacatgttgtaagtaactaattaaacttgatttttggcattgtaaattattcaaaatttttcagaaaatttacaagtgatcctaaatagctacaacgtaaacaatcatgtaaagaaaattgaactaattatttttctagatacctaaataggacaaaccctttagggtacgtttggaaagccacaatgtaattggatttgtgtgtaattggaggtaattacacaatttggcatgtttgtctgaccatgtaattacactgtaactgtgtaattagaagtaattgaggggttccaattacactctccaattctcatgcccccatgagaattgaatgtaattacactgtgtaattactaaaaactttccatattaaacattagctattaaaaaaatattatttttccatgtaattactaaacaacctgccaaacaagatattaggaatttatatgtattaccaccttatatccaaacacaccttgcatttt

SEQ ID NO: 339649 - DNA, 624 bp, Cannabis indica
ttttttttaaaaaaaaattaagggtaaatacctattttagatcctgttgttttgcgaaagttactaattggaccctctgttttgttaaatgataaaatagacactgtattttctaaaatggtacaaatagaacactgaactgattttttgtcaaaataaaacttaataataattcgatatagaggtgttattataacattggttatattttctgtatctgttcatattaggaattatttttaagttggttatattaaaaaaattgttaaaaattgagctcatggcccttttttttttaaataattttagaaaatacatgctttattttgtcatttaacaaaacagaaagtctaatcagtaattgttgactggagttttagccaaccgacgtggagtcgtaataaatgagatttaaatcaaaataacagtaataaatgtagttaataacaccgaaattagcgataaatgtaaataaaagacaccaaaatctaaagaggttcgaccctgaatgtcggtaatagcctattccccttgtgttttattgatctgagttacaaaagtcaagagcatgctcttgattgcaaaaagaatgataaagtgtttatttttctaagtgttcaaaat

SEQ ID NO: 339650 - DNA, 708 bp, Cannabis indica
agtgtctaaccaactaagagagaaaattgctttatcgagacgaatttctacacaatggcctgtacctcgtccacgatcccaggtgaaaggatagccgcgaaggtctagatcaataaggttgcaatcatcaataaccgactggaaaccatcaataagagaagttgggtatagatgcccgcctctcttgtcagattgggttgaaatattattaaaatcatcgatgatacaccatgggagagatgactcgttgtgcaatgaacgaagaagagtccatgtttgatcccgttgtcttctgtttggttcaccgtagaagccagttaggcgccatgtcgacatgccccttatacgaacttcaacatcaatatgatttggtgaaaaactgagtagattagcttcttcataaattttccaaaacagagccaagccgcctttccttccggaacatcgactgaaaaactgccttcaaacccatgtttgaccctcaaacgctctaccaaatcttttttacaaagtgtctcacataaaaacaagaatttgggcttcttttgactacacatgtcttgtaggaattgaacagcccgtgggttcccaagcctaggacagttccaactaattatactcatggtgattagtgggcctgagcacaagaacccaccaatttgccgttttttgaaagcccatcagaacactcagtatcattactgtctt

SEQ ID NO: 339651 - DNA, 751 bp, Cannabis indica
attagtttgaccattttgcccttgagttgtgtaattgtttatttttttatttggggggcaaggaggtctttttgcaagacttttcctttgactttttaaattaattttggctgggaatggtttattattaagtaataataaataaaagaagaagaaggttgataagggattacttaggtttgaaggaaagaaaaattgaaaacaataggaattagtttttttctctctctctctctttcgattctcttgggcagcagctgggggattgagaatttgtgttgaattgaggaattcaagtggtaattaaagcttgttcaaggtaatctttccctttaacccttacttgaaggttgttgtagtttaggttaggttttgaagtgaaattggagaaaattggtggctgtttgatttgggttttgtctaggttagttgttggtattaaattgagattgttatctttattgtaagctaagccaagtgtgtattttaatgtttgaggggaaattgagtttgtgagttcaattggagctctaatggtgaattggtttattgtttgatttgttgaattctgttggttgggtttggtttggaatagcatatgcaggtgttctggaagtttttagaagatttgggtttgatttgtgttgtgggggttggaattttggttcccagaccagaaccggaattccggttcctgggagcctgtgtcaaccggtcgaccggttggtcccaggaaccggacttccggttg

SEQ ID NO: 339652 - DNA, 830 bp, Cannabis indica
aggagcattttagtgcggttcaggggctagtagccttacaaagaatgaagctgtcatccgcaaagaaaaggtgtgtaatggatggagcatttctagtgattcaatggccttaaaaattaccaggcatttcttcatgttataatactcgggataaggcttccgaacaaataatgaaaatataaggcgataacggatcaccttgtcgaatccctctccctggaacaagatttccttgaatttccccattaaccaagaaagagtatgatgcagaattaatgcaccttatgatcagattcacaatgatgggagagaaaccaatatcaaacatcatctttttaaggaaaaaccatttaacacgatcaaatgccttggtcatgtcaagtttcatagttgcatatcccactcggccacgacgtctattttttaaagagtgtaaaagctcaaaagcaaccaatacattatcagttattagtcggtgaggaagaaaagcactctgtgtatttgatatagcacgagaaaggattggtttcagtctaagagcaattgtctttgaaatcagtttgtaaagtactatgcagagactcattggtctatattgtgacatcatagtcggctttttgatttttggaatgagtgtgatcaatgttttgttgagcaaagttggatcagctccatggttcagtgcattgagaactgagttggtgaccatttcccaaacaatgtgccaatattgacaataaaacattacagagaaaccatcaattcctaggctactatcaatcttcattgattgaagagttttgaagacattgttcgattatgtgccctaa

SEQ ID NO: 339653 - DNA, 583 bp, Cannabis indica
tctccttccccatcagagaaaatactttagaaagacaatgtattcttagaagatcaaaccttctctgcaatctccagcaatggcttcaagttagtacttttgctcatcttttatcatcttcttcttctttaatttagcaaaggttatatagaattatgatttagggtttttatattaaagcacttttaggaatatatttagatttgtgatagatatttttcttgagtgttttataaatcctaacatttctttctactaaaaagtggagtctaaatagtcttttaaaaataattacatcatcatacatactaggggtgtttatccaatccaatctgcactattttgctcatagtgcatctgatccgcactaggtgtggattccatattttggatctaatccaattcacgtagtaactcaaattcaatccgcaaaagtacggattagattggttattttgaattggttactttttaatattgaatttttttaaaatttattataaaaaatttcacataactaacaacaaaataaaataaattattattattttatgtcttcgacaataaattaaaataaatgaaa

SEQ ID NO: 339654 - DNA, 1012 bp, Cannabis indica
tattatattatttttttatagcttttattttttctgtgttgaattatcatcatgaggctcaaatttggttaactaaaatctgtgttaacagtttggtgctttcattgagagcctctgtaaacaaaagctcagattaaagcctcctgacataaaagtgatggatgacaccaaagataataatcctcaagaaggaatcaatcattgtcccagaaaagaaccaatgagtccatagggatctaccgagtaatcgcatgaacagaatgcaagccccaagaggacccagtgtggggcccctggcttgacggaccttggatgggaaacaatcagtcactgcctaaccaggttgatgaggatggcgcttacaatccaaccagatacataccaatcgtggaattagaaaaccgcaaccttaggcgtcgattagaggaagtaaaccgacgtaatgccgagttggagagtgatatagttgtggtaaaggcagccagggaagatggtacccaaaataaacctgacattgggaaaagagattcacaagaaaaacctcatggctggcagaccaaggggcggaggataacccagagatatactcagaaccctcaagaaatgcaacctgagggaactgagaaaaacctggagacacagccttagatacgtggaacatcaaacaaaaattgccaacccattattcaggctcatgagagtgaaactcgtggaaacccttataggaagaaaaaggtgagtcaaaccttgagaggaagggcaaggtccgaccacaatcatgacaagagtgatatacgagaacatctaaacttgaagaagcctgacctccgtcaatgactctgttcaaggcaaaaggattcattccatttgcaaatgagcgagttggagaataagttcagagtgcatcaagtcacaaaacccaggagacaactggggcgtgttactgttggaaaacttgatttggaggcctcgtgatcaaagaaaaagacgattccaaaaggctgctcaagga

SEQ ID NO: 339655 - DNA, 558 bp, Cannabis indica
aagtttagaaattaatttctaaaaaatgagtttagaaacaaaagtttagaaattaactctattttgtatcaatttttttttatttttaattttattcatgtgtttttatttctttagtagctagtaaatagttagttacagctacttaacaagctactaattttcattcatattcatatatttttattactaattacttactcattagaaactagttagtaactagttactcataaattatataactagtaagtagctaaataaaaaaattggtaattttgtagtatttctttatgttgtaggttgtgaggtcaatttgcaaggatccgacttattttgtgttgatcggtttctaggtagctcgaggtatacatttactaacttttattataaattaattatgaatgcttagagtttgaatatcttaaatattcatctgtagtgaagtaggttctacaatatatgttgtaggttctgcaatattcatcgatgggtgtaacaatatgcatgttagatgagttagaatatcttaaatattcatccgtagtgaagtaggtt

SEQ ID NO: 339656 - DNA, 1267 bp, Cannabis indica
ttttagcatggattatcaaatttgccctttgtaattgaatgaaattttaatttctctacatctcttttattttttatttgttattcttctcttcacaaataattataataatatcagagcaaggtttatgagagaaaatttcttaagcgtaatcacagctttcgaagatccaactcaccacggtgagttggctgggaggtcacaggcggtagcgcgtcccctgcccgaggttcgaggcagagccccaaaagttttcgcaagtgtttgtacaattgttatctgtacaacatccgtatagtttgacattctagtttttggtattgatttcttcgaattttttcttaaattgcataatagttttaggtattgattttcgcagtacaattttgaattttcatttttgtatttggaaatttttacaatttgttcttttttttctgcaatggctaccaataaagataactctcttcaagcgatcagtgtgagattggattgaaaaattattcatattggaattatgttatgaaaaaaaaattgaaaggaacaagaatgtggggttatatttctggaacaaagagaaaactagcagatggtaatgcatatgtgttagaaaattgggaagtagacaattcgaaaattctcacctggataaataactctatcgaacaatctactaatacccagttagcaaagtacgagacagcaaaagaaatttgggaccatcttgcgagactatatacacaatccaattttgtaaagcaatttcagttggaaactaatattagagctattgaacagaaatatatgagcattcaagagttctattttgtcatgaaagatctttaggatcaattggcactcaccaaatcaacagagctacgtgcttttccactgtatattgctcgtagagaggaacaaaggttggttcaatttttaatggctcttcatagtgatgagggacttcgtaattctatattacatcgttctccgcttccttcgattgatttagtagtcagtgaattgttagtagggttgtacatcagtcggtttggacggtttatcctatatattttctaacccaatctaaagttcgggttgctaaaatttaagtgcaacccgcctaatttaaaaaaaaatgtaaaccgaccaacggtttggtcggcttaacccgcccaaacccgccaaacttttttttttggtttcaaagtcaataaaaattaaaagataaattaaaaatatcaaactccaccaaagcacaacacaatat

SEQ ID NO: 339657 - DNA, 660 bp, Cannabis indica
ctcatgaaagaattggacacagacattgcctgtatccgcctcgggacaagtactcatgtcatctctgtcacctctccggagattgccagagagttcttgaagaaacacgacaaggtgttcgcttcgagacctctcacaggtgtcactcgtttaatctcccatgattacgtaaccactgtgattgcgccatgtggagaccactggaagaaaatgaggagagtacttgtgtctaatattctcaacagctctacagttgcttggcttctcgaaaagagaacccaagaagctgataatctagttcgctttgtttataaccactcgtctgctaaaggcggaggagtggttaacattagaactgcgggacaacagtacgctgttggtattatgagaaaaatgtttttcagtaaaagatattttgggaaaggaagggatgatggaggacctgggaaagaggaagaggaacatgttaaggctctgtttgctctgctttcatatagttttgccttttctgtatcggactatcttccgtggcttagatggctggacttagatggccatcaaaggattgttcgtaaagccatgaaagtgatcaacaagctccatgactgttgagaatcatggggttccatctcaaaaccaattggcaatgagtggagtagc

SEQ ID NO: 339658 - DNA, 756 bp, Cannabis indica
ctatgtgcccccagcctttctggatttgacgagcatgtcatccacgtacacttccatatttctgccgatctggtctttaaacatcttgtttaccaatctttggtacgtagctccagtgtgttttagaccaaacggtatgactttgtagtagtagagacccatatctgttcagaaacttgtatgctcttggtctggcggatgtattttgatttggttgtagcctgaataagcatccatgaagtttaaaattttgtgcccggctgttgcgtctacgagctgatcgatccttggaagtggaaaacaatctttagggcatgctttgttgaggtctgtgaaatcaatacagactcgccatttcttgttcggcttgggcacaagtacgggattcgcgacccaagccgggtaaaaagcttcaattatgaagttgttgttgcgcagcttttcaacttcatctttcagggctactgctcgttctttatccagcagtcttcgtttttgctgaactggccggatgttaggatcgatatttaggacgtgtgaaataatagaagggtcgattccgaccatatccgcatgtgaccaggaaaaaacatctaggtttgctctcagaaattttatcaactctgattttacttcgagcaacaaaccctttcaatttttagctttcttgccaggatagctggatcgatctcgatctcttctaattcttccacaggtccaacattgctgctgggtccccaagtcgaggatccacat

SEQ ID NO: 339659 - DNA, 940 bp, Cannabis indica
ttataataataaggctttacatgctatttttaatggtgttggtgaaggctttattaaattaatctcatcttgtgaatctgcaaaggaagcgtgggaaatccttcaaattcaatttgaaggtaccgctgatgtaaaaagatcacgttttaccatgttacaaactagatttgatgaattgagaatgtcagaaactgaaactttgtctgatttttatgaaagattatctgatatttctaatgagttttttgccttgggagaaaaattagatgaatctgtcttggttcggaaaattgttcgtgtgcttcctgacaggtttgacacaaaattgctagcaatggaagaggcaaaagactttggcaaaatgaaggttgaggaactcatgggttctttaagaacttttgagttaaatcaacagatcaagaaaaagagtaagcaaagtttctcgaatgagaaaagcaaaggtattgctttcaatgcttctgaaaatattgtttctgatgatgaaaatgatgatgaaatggccttgttagcaaaaaatttccaaagatacatgaaatctgttggaaataaaaagaacttttcaaagaactcaaatggtaacatttcaggtaacaatccctctaaacctttttcatctaacattaaaaaaggtattcaatgcagagagtgtgaaggttttggtcatactcaatccgaatgtgccaataccttaaagaaaaataaaaagggattaaatgttacttggagtgatgattctgaaagtagtgaagatgaaaaagaaaaggttgctctaacaagtgttttgtcaagaaatttgcaggaaaaggaaaaccatttccatgaataatatcttgatcaatcacaacaaggaagaagctagatccgaatcagatgagttagaaattgatgagaactccatggctgaattttacaaggtaat

SEQ ID NO: 339660 - DNA, 931 bp, Cannabis indica
ctcaaccagacccatcccaatccgacctaactcactcgcattcgaaacctaaaaataggcgagtatgatacacaactctcacacacccgaaaagtaagagtttaaatgggttgggtctaatctgatccagctatgatgtaacctgatctgaatcatgtaaggatccaccccgccctgccccactagaatcagatactccaatcggatcaaattcgacccgattgatttggattcgatctaatcttaccctaccttttttatttttttatctgagcttataattttatatctatatttattttgtattattattatttaatacaatactatgattggtagagacttgtattaatagattgtgtaaaattaatatattttcaataaactcgaccctaataccaactacgagtaaggtccaagtccaggtcttgcacctcaagtctaggtctaggtcctgggtctaggtcccgggtctggttataggtttgggtctagatcccgagtttgggtcgggtcttagtcctaatctcgggcccaggtctaggtctaggtttggggcccgcacccaggtttgggtccgggtctcagtcccgagtttgggccctaagtcttgactcgagctagggtcttaggtcccgagtccgggtccagggtctgagtgccagtctcgggtccagatttgagtcctaggtccgggtctcggtcatgggtgtgagttgcaatcccaagtctgggtcccgatcctgggtccgggtttggggtttgggtcccaatcctgggtctaggtccgagttcaggtttggggtccgagtctgggtgtgagttcgggtcctgatctgggtctcagtctgggtcccaaatcctaggtcctgggtagggatgcacacgaggtgggaaattgacggagagtgctccccccatccccatcccc

SEQ ID NO: 339661 - DNA, 767 bp, Cannabis indica
atctctagacaaaggaaaacgccacacattgaaacacttatccatccatctagtagaaaaggaaaagttgttcatcgagcaaccaacaagcatcccctaatcttcatccagtgttagggaaaaaccactattggatttctgtgataccccaaagaacattcctacaagcctaaaatcattaataaagtctactttcaagcttaactaggagtacatgtatgaggttccgattcctaaagatatatgtggacttgataagcagatcttgtacatttgagtaaaataccttcttgagcctgccaagtttaaggaaattagtacttctgtgatcactctttacatcaggtatgtaatatctcggaaaataaatagtatttaaatagacatattttaataaatctataattattttggtaacgaagtaagattatgatcttgcttatggtaattgttgagaatttactcaatgaaataaatagcgtaatttattaattacggagattatattgggataattattgagaatttatttaataaaatattgggcccgacgattttggttagaaatgtcacgacatttatggaagaattattttgagaatattctcgactaggttagaaattttagaatgtcgatttaatggaattagcaaaattacaaaaatgccctaggttattttaaagtttattttttttaattgggggtaaattagtcatttgccctttttacttttctagggctaagtataaaaaaaaaaaagaagaaa

SEQ ID NO: 339662 - DNA, 605 bp, Cannabis indica
ggtgcaggacatgaaacatgaggtggaggaggggggcgcctggtatacactataggaggccgagggagtggtgaggtggtttagggggtggaggtgtagacactgtgggggttatgaccgaggtaggtgaaggaacaagagactcgttagaccatgtagtaggcgcagaggatgtgacagaatataccaacaaatcatcatcctccccctgactagtaggagtagtggaagatgaaaaataaggtgtattttctacaaaggtaacatcaatagaaacaagatatttattgagatcgggacaataacacctataccctttctgaagaagagaataaccaagaaagacacactttagtgccttagggtctaatttggtgacagatgggcggacatcgcgagcaaaacaaacactgccaaatactcgaggagcaactggaaacaatgacttattaggaaaaagaattttaaatgggatttcaccattaaggacagaggatggcatgcaattaataagaaagcatgtcgtagaaactgcatcgagccgaaaaggtttaggaactttcatttgaaacaagagggcacgtgcagtttcaagaagatgtctg

SEQ ID NO: 339663 - DNA, 972 bp, Cannabis indica
gatgttaatgaaacatacttgttagtaaatctagaccctggtaaaatatatccaatagacccacacagagtcctattgtcccgaggttctaggcaatccaaccacaaagtccatggaaatgtattcccatttccactctggaagattcagtggctgcagcaaccctgcaggcctctggtgttcatttcacttgttgacaagttaaacatcttgcaacatatttagcaatatcattcttcatgcctggccaccagaacatggtcttgaggtcttggtacatcttcgttgttcccgggtgaactgagtaaggagtcgtataagactcgtttaagatttctcttttaatgttatcatccataggcacacaaacacgattcataaatcgtagcattcacgtgttatccactgtaaagtcactagtttttccagccaaaaccctatcttgggatttcactaactctggatcttgaaattgtgcttctttgatttgattaaaaagagtagattacagggtaatattagccaatttccctacaacgaacttaattttagcttgggtcatttcatctggtagttgctgggagatcttcttcactaactctggccttttctacccaaggcatcagccacaacatcggccttcccaggatgataaaggatctcacagtcgtaaatatcctttactaattcaagccaacgcctttgtctcgtgttcaggtctttctgggtgaagaagtagcttagactcttatgattagtgtatatctcacatttctcaccatataagtaatgttgtcaaatctttagcgcaaatactactactgggagtactattgtgctcgcttgcggctggctaactctttgataggtgtggatcgaaagcccgctaggagaaatattgtggacattgtcccacattgaataaatggtaaagtattgagctatatatacatggactactccactcatcac

SEQ ID NO: 339664 - DNA, 743 bp, Cannabis indica
tgagtttttcttgatggaccaagatttaaagaagcaaaattagaataagacatattattaataatttctcctaaatctatcatgcaatgatcaaacctggttttactaattgtgcatggaattgtacttgtctcaggcaacaactttctttgatgaacaacaacattctcattctcccccacacttactttctcacctccattcaactttttctcatttggacacaactccttaagaatgttagcacaatgagtctcttctttgatttcctcaagacatggaatttttacctcaatattaggaagagtctcaaggatctccttaatgggctcctctttctttgattttttcaatctacttggaaaaggtggaggagggacataagttggtacaattggtttgtatgactttttcagtgatggtggaccaactaaagtaggagattcaacctttggtggagatgactcttcaagggatgaatttctgacttcatgacttggaatcaaatcattaacttcttggtgtggtgattcaagttgtataccactttggacagtgatgccactgacattctctattggatcactctctacttgtgaaggcataatgtttgaacattgaatttcatattcacttgtagatgtttcccttgactccgcaggattctctaacttttgtagagattgttgaaagatctgcatatttttctaaaagttttgctgacactgtatcatattttgttt

SEQ ID NO: 339665 - DNA, 1030 bp, Cannabis indica
tcatgtgttgtcttttcaggtgtgttctgataggttggcgcggtatagtcacaatcggatatttcgggctgaaccgggttcaggcccgaaatgcaattataattgaattaattggcattttatttgataatgaggaatctgaattttatttggaaattaataagcatgaaatgactaatttacccttgtatgtgtgaatatgtgagaattggccctaggggcattttggtcttttgaccttatttgatttacttggatggaaaatggaattttatgaaatgaaattaggaaattcttgtttgcttcccctctcacccgacccctctctggctctaaacccacttcttctcaattttgaactttggagaaaattggtgtgattttgctaggcttggagcttggtacttggagattgtttgactttagccttgaattgagatttgaggtaactttctttggtttaatctttgtttattaactgaatttaattgtaagaagagcatgaaaagggtgtggtgttcttgattatgcatgttgttgagtttgatgtttgatcttggtaaattgggtgtgaataacttgaaattgttgtaggttttaattgttaagttgtggctgagattttagggtattctcttggttgaaatccttattattttgggtatgtggctgctgtaaaatattggtaataagttggttttaagctcaagttcaagagcattggattttatgagttaaagtcatgatttgtgtttaattgtgggatttgtttttggtaaattcagaggcgtttttagggtttcattgagtttaaagtttgattgtaaactctgattttggttgtgtaaaggaagcttgagttcatggaactcaagcttggagctttaatggcaccttttgatttttagtgaaattattgtgtttaagctatggaatatgtttaatatgtcatatgttgatgctctggaaagtttggtggtgtttggggaagatttgagtaggttatgggggcttaaagattgaaattttt

SEQ ID NO: 339666 - DNA, 1351 bp, Cannabis indica
gacattttctaccatataacatctcgtaaggagccatccctatcgtactctggtagccattgttgtaggagaattcaattagagataagtacttactccatgaaccctcaaagtccatgacacaggctcgcaacaaatcctctagtatctgaattgttctttctaattgaccatcagtctgagggtgaaaggctatgctaaacttcagcttggtacccatagccttgtgaagactcacccaaaacttagatgtaaactttggatctctatctgacacaatggatttaggagctccatggagacgaactatctcctttacatatagttcagcgtattgatccactgaatatgcaactttcactggtagaaggtgagcttattttgtgaatctgtccactatgacccatacagaatcatacattcctgtggttctaggcaaactagtttcaaaatccaacgtaatgtcctcacacttccactcaggaagggctaaaggttgcagtaaacctgtcgggctttgatattcatctttaatttactgacaagttaagcatttgggcacgtagtctatcacatctcttttcatccaatacaaccagaagtaagattttaaatcctgatacattttggtggttcccagatgcagtgaataaggtgtggtgtgagcttcatcaatgatctctttcttatgctcataaatactagaaacacacactcgagctttatacaataacattccattattcgagactgaaaagtctttaggccgaccagccatcatcccatctcgaatcttgactagctcgaaatcctctaaccgtgcctttctgattctttctaatagatcagattgaagtgtcaagttgtgcaattttccaactacaaactcaatccctgcactaaccatctctaaagctagttgaggggttatcataacagtagtggaaatctgcccaggacctcttctactcaatgcatcagccacaacattggctttctcggggtgatacagaatctcacagtcttagtctttaaccaattctagccaccttctctgtctcatatttaaatctttctgggtgaaaaagcacttgagacatttatgatcagtttaaatctcgcatttttaaccagaaagataatgtcaccatgtcattaaataaaaaaccacagtagcaagttctaggtcatgagttagatagtattactcataatccttcaattgacgagaggcataggctatgactttgtcagcttgctttagaacacatcttagaccctgtctggacgcatcacaataaacaacaaatttctcttgataagatggcaaagctaacaccggagctgttat

SEQ ID NO: 339667 - DNA, 1051 bp, Cannabis indica
aaaaaaaaagatagtaataaaaacggatgatagttcgcttaattaatacggggtggaagacgaggccccctgcgctccacaagcaaggcatcaagcctctttttttctcccagaagcgagcaaggacttcctcaggcttgggatagaagtcgagtttgaggttttggcgattagtttgccaggccatgaaaacgccgtcatcaaagcatttggtgcaatgcttgcagacgacagggactaggagctcatctcttttagccttcttcagggcttgatctttaaagtccctgagctccttcacctcaactgtcaaattggccgtcgactgcaagttcgcctgatgcagctcctccatagacttcagcctggcagtcagctcctcgacagcctccttggcctccctcagctcgtgcctcgccttgaccatggcctcgtcccgagtcttcagctcctccgccttggcctgtaaacgcctcctgatgtctcctctccgcctgtgcctccctctgttgggcctcctccctgaacgccttcctctcagctgacagatctcacagactcctcatggcctcgtccatgcccccaaactcggacatgacatacccacgatctatcaaagtctttgagaggctaccaatctctacagcgatctggaaaagaaaacaagttaaatatgagagatcacatgccatagggcagaacaaagacaaaaggggaaaaccaataacaaagactcaccgcggtcatggcagcactgatgtcctaaacctgaaaaaatagcgtttgtggaggcgcaaactgcatatcttttggccgggagttgggttagatgggaaacgaattggctcgtcagttcagaggtgaagaaagcaagggcagggccgacaaagcggttgaaccagtccgtcagggggtccatgttctgatcccaagcattcttaaaggcctcctcgctcaaagaattttgttgagcctctcgtaagaccttcttcaaggcctccacctcagcattccccctgttgtattcgtccatggcataattatgcttggc

SEQ ID NO: 339668 - DNA, 602 bp, Cannabis indica
cttgtctcagttcttccttgttttcataaaaattaccaagctcaatcacccctgcttccttactttgtaaacaagtagttagctcatgattttccattatatctgcctttgtccacataggatctttgaacttggtacaaacttcaaaagaggagaacgttgagaaggttgcatgacgagaaggagcatgttcttcagttctgccttgtcgactactgctagttccaggtgtagtgcgattttcactacggggttgtcgttatcgctgtgtaccatggttgcttggtacacactctaacctcaaggaaggtcccgctacggcttcatcgactcccaaatcatgttcatcgtccatattcaaatctaataggatcgttattgtagaaggttgtatcgaactcctcaaactgatgaaatcatgtcgcttcttgttgttgctctacattggtcagaaactctacattggtcagaacctcctcattcacaccaatcccaacatctgtttcggtaacgcaagaccctaccacactccgagggagaggattagtaggcggcgtaggctccgaattcctaacttttctcaccttggtcacgaataatgg

SEQ ID NO: 339669 - DNA, 635 bp, Cannabis indica
ttaaaacagtaaggatttcagtatcccttgatgagtaaagcatatagtaaaggatatttcatattataaagggtaactgcactactacaaaagtcagaattcgcgacggttctaaaagctatttttttggagactgtcgctaaaaaaattaagtaactatttaaaaccatcgagaaaattactattcctgatagtttataacagtaattacaagaatatgggacaattttaattggaattcgtaaaatttattcggccctcataggcaacggttttcaacaatcgggtacaagagcccaataaaaaatcattgcctacttctcgccacatttctcacgtgcccacctacttcttttctatttcccacatgcccacctacttcttcccacctatttcttctccatttcccacaccataaaacaaaaatcttaactctccaaaatcccacccacacatccgcaccatcaccctcctctctcgccgtcttcttccctctctcgatctccatttcttctcgtctctctcgtcaatcgatctccacctaccccacctcccgtcgttctccctctcctctccgttgcatacgtcggacaacctgttgggttttgtgccctaaataaaaccctttacaatct

SEQ ID NO: 339670 - DNA, 1244 bp, Cannabis indica
aaatatatgttacaatacacatatatacactatatatattacatatatatatgaaatgttggaagaacaattacaatacatgcaatataatacatatatatagcaagagaagaatatatatacactcactcacaaccttgagtactgtaaattagtgggaatcatcatgacttgaacaaggtattacatctttgtccaaagcttatttcccccatctctaagtactaagggaactcccatagaaatagctttgagaattatcaagccttagggttttttagcaatgtacttttttgataaaaaacttctcatcccaaatgagcaccaaagacttcttttatagtgtttaggtgatcacacttatatatcaaacacaccacctcatttctctcccattgttgacttcgcttttagccaacgacaatgagtctttttaataagcgataaacgatatgtcgtaaagagaatatataagaaagcaataataaggcgcaggaattttatagaggttcagccccaagcagtttggtaatagcctaatccttgttatttgtattgacttaagaacaaggaagaagttttcttttcttatagctcttacaatagtatctctgaatatataattcttagataataaaatagccttagctttagtgcgtatcggcttataatttctcgatcctttgcctagtgaacattcctcactatttatagggctagaaacttgaggaggaagagtttcctctctcgttacaatgcgcataaacaaaaagatcgtgtgatcaatgctgaacacaaggatcgtgggattgaggctgaatacactgatagtgggatcgtgtgtatgccacatccacgtaagttaatccctgagttgtaggaattgagctgatgactcatgatgcgtcaagctgaattcgttaagtgttgatcattctgcacagctcgttgaatatttcattctgaatgtgccagcaaggcgtcctgctcgtcatatcgttccgggcagatgctccaagtggagtccacgtgtccccattctcgtgatgccacgtcagagtgccaaatttgggataacatttgcccccaagttgtacgggacctctgagattgcgtgtagacgtattccgagctaactctgcctttggatggggacacgtgtcgagcatgactgtttgagactcgtgttggaaatattttaccaggatctagatttactaccaattatgtttcattaacatcct

SEQ ID NO: 339671 - DNA, 977 bp, Cannabis indica
aatctatgagattagtagtacctttatattttagcgactcagataacctaaatcccttgggaagtcgagcctgtcgcacttcttcagtaaaaggagaagtcgcagggagcttgtaaatgggctttctctgctgctcgatcattttcaatgctcgtagcaggatgctcttatcaacaccccctggcacgatggtgttgttctgagttatcacaggtgcggtcgcaatcgcagctatgtcagataggatcactacctcagtagtcgtagctggtgcgttagaggttgacaacatttgctagattattgccattgtttgtgccttgatcgcccacttggggatcacggggctcatcgcagtttcagggcatttgggaccgtgaccaattgcggaggtgatcacgaagatcaccccggtcaacttggtatctccctcctcgtggtgtctccacggagccagacctagtatagacactaggagaatgactttgtgaggatgaagaataagattcaacatcatatacctcatttcgcagttgggctctgcttcgagggttgcgtcgctcaggatcctcctcttgtggcacctcgcgattagcgtttcgtgtgacttgttccctttgtgtaggctggttcaactcgagtccttcctgtccagtctggtgttctctgcgagagggattattagtttgtcgccttgtatttgttacctgagggttatccaaacgcgtgtttggtactcgaggaggacgtcgggtcctgaaccttccattgatctcagcctacaaagcctgcatttgctcttgtagggtcgtgtactgggccgtggttagttgaatgattccttcggacaccacagctggtgtgataggtgggaactatctaacagtggctgccagtgtcgatgtttctccaacatgaccggtggtttcaagaaataagttgaggggagtaacagtggtacgtcccactcctccatt

SEQ ID NO: 339672 - DNA, 949 bp, Cannabis indica
aagaacatacaagtttctgaacatatatgggtctatcacttcaaagtaatgatgtttggtctaaaatgcttgagtaacataccaaagattggtaaacaaaatgtttaaaggccagatcggacgaaatatggaagtgtatgtgaatgatatgctcgtcaaatccaggaaggtgacctggacaaatgcttcaaagtcctcagaaaatacaacatgaaactaaatccctcaaagtgttcctttggagtcagctcaggaaagcttttgggtttcatcgtcaatgctcgaggaattgaagccaatccagaaaagattcaagcccttctggatatgaagtcgccaactaaaaccaaagaagtgaaaagtttgactggttggattgccgcactcagcaggtttgtttcaaaatcaatagataagtatatcccattcttcaatatcctgcgaggaaacaagcagttcgagtggacggaggaatgtgaaaaagctttccaagacctaaaggcacaacttgcaaaacctcccgtactctcgaaacctctagatggagaagaacttggaatatagttagctgtcacgaaacatgccgtaagtgctgtgctaatcagagaagaaaacagcatgcaacacccagtctattacatcactaaaagactcattgaggccgaaggccaatacccattaatagaaaagctcgcgtactgccttattttcaagctcatcctgtttgggtgtacattgaccaactgttatgccagatactacaaaatccagatgcctctggacggctactcaagtgggcggtggagttgggccaataagaaattactttccaaccccgaacagcaatcaaaggctaagccttagcagactttatggtagaatgcacatgcaagaaagaaagcataccagaaaggaaccccgagccggtacaaacacctcagcaaagtaa

SEQ ID NO: 339673 - DNA, 1237 bp, Cannabis indica
acatcagagctatttgatctaatctgatcttttagcttaacatgaaataaacaaattgcagacataagaaactgtactttaaagtggtcacctgacctgagtactttgtttctgaaacctttgggcgtagtccgcccagaaggccattcacttaaaagcgaatgttcatttagtacttaaaatggtcacccgacctggtactttattggtagtatttccttaaatgttctccattccagtaccgtggtactagaatgagttgcatttttttgtcatacttacctaatttgtatgctccggagttgagaacttcgaccacttgatatggtccttcccagttaggtcctagtacacttgtcgtgctgtctttggtgtttaggaatacccttctcaggaccatatctcccacgaagaatttctgagctttcacttgtttgttgaaataccgagctactttttgttgatggcctatcaactttaagtttgcatagaaatcagtgaaagattggctgtcgaactgtttgccattgtttgagactattttgtacggtagtctgaaccggcatgtgatgttcttcactataaagtcttgaactttcttttatgtaatggtcgctagtggttcggctttagtccacttagtaaagtagtcgactgctacaactgcgtacagcactccgcctttacctttaggtaattgcccgatcaggtcaattccccaaatggcaaaaggccacggactttgcatctgtgtcagctcgttgggcggagctcttggtatctttgaaaatctctggcatttgtcgcacttcttaacataggctctcgaatcttcaatcatcgttggccagaagtaaccttacctaagaattttcttggataagctctgtccggcgacgtgatttccacagaatccgtcttgaacttcagataggagtcgtgcagcttcatcttgtgtgacacatctgagtaatggcatcgagaatcctcttctatacatgaccccttctactatgatagcgtgctaccttccttctcattttccgagcttcatttcggttatctgggagttccccagagttgaggtaggctgctattgccgtcatccagtttggggatgtgtcgatcatttcgatttcttccatgccagtgaggctaggctcttcaaggaactggagggggaccaagttttccttgtcacttacattgatgcttgttaatcgagctaacgcgtctg

SEQ ID NO: 339674 - DNA, 921 bp, Cannabis indica
ataggtggtcttgtcgtctgtagtgatcattaggtcatgcttcatcttcacattaagtccatcaagatatttttccttcttactaaaatcggttggcacaattcccgaggccaacctcgccaaccgatcaaactgcgtagtgtactcagtcacactcatattttccttctgggtcaggtgagaaaactctttccttttgggacttctaacgacctcattgtagtactttgcgttgaagagttcctggaacctttcccaggtcatagttgtgacgtcgtgaatctgggataccatgtcccaccaaactagagcatcctcttaaaaactgaaaggtggcacacaccaccctgtcattccggtgacacccataaaattcaatatttttgtaatcactgttagccactgcttggctttcatgacgtccggacctcccagaaaaaccggaggtgcctgcttccgaaacctttcatataagggttccattctatttcccgctaccactatttcggcctgagcaacaggggcaggtgccacaggaacttctggcaccggcattgcaggagcaccctgctccctcaatctctgaatctcattatcttgctcctctattctggcttgcatttctgcaaacctagtttcccagttctgggcttcctgattggcttgggcagcctatggcgggttaacatcatcccgaccacgagccctatgcctgggacctctaacacgacccctaacattagggggaaactcagctccttgaccctgatttgatccgatcgagttgccctgactcctggtgttccgcctggcatccatctagtcggaacagcctgcgaaaccaagagttagcacatcaggtcatgatcaacgagagcttactaatgccgtttaatttggaaattaaaaacatgcgcctat

SEQ ID NO: 339675 - DNA, 503 bp, Cannabis indica
tcatgttgtcattgtttttctctctgttgggtgtttatgatgagctttcttataccttaccagcatttgtaaatcctactgcacctttcctattgtcaatgctgaagtacttccttaacaagtggataagtatggccttttattgtttcttttatgtttttattttgtagttttattgttatttttatatgtcttatgttgcttcttgtttttgtttttctagtgattgtggggcgtttgtttctacttgtgctgagtattttattgaggggaagaatattcctgctgactttgatgttgaagagtatcgcctaaggctttctgtgttgctatacaagtttggactaatgaaacaggttgagaatgttgaaagtgagcgagaaagcccacctaagtctccaaagaagactaaggcaaaagcaagagggaaaacgaaaacaaaactgaagtgatttaaagccaagctgcaaaatactttatgtttatcttttgttgtttagcca

SEQ ID NO: 339676 - DNA, 535 bp, Cannabis indica
ttataaatcaaatagacaagcaattgataaagtgaaccaaaacatacacaaatgaatgaaaaatacttctgtttctttattgatgttgaataaaatagattacattgaaatggagttttatttagggcataaaaccgaagagaaacgtaccctgacactcatttaatgtaccctgagacccatcaaatgtaccatggaatacattccgtgaaagtacatcacaggacaaaatcatatccctataaatatatatatatatatatatatactaatacttacttctttttacagtttggaagaaaagaagacatacgatgcaaaactaatttattactgttacaacgatattggatagaacacttgctggcgtcgattcacaaaggcttggaatgatgctgaattgtataataatttttcttcttttatttttttaatgttaacttgttattttttatctattatttttctttgtttaattagatatattaattcgttaacacttagactaattttaaaatatttgtgtaatatattt

SEQ ID NO: 339677 - DNA, 690 bp, Cannabis indica
attaagtccaaacaaaagtgccaaggtctccgcttgtaatacagagatacttcctgaagacataacaaaccagaaaacacaacaataaaaactatgagtaaaagttaaagacaaactaccacaaaagacgcaaccccaaaaacgataaaatcaacaatgctaagaaagaataaaggaaaaaaactagccaaagggataaccctttggctagtgaaagaacaccataaaacataaaataaacattttccccaaaaagaggcaaaacatgtaaatcttgatacattcaagcctgatacaagtgcactccagaactagcctaccaatgtttaactaatcagtctaaaaatacctatccacattatataatcaccaccaagtactgctcaatcacttagctagaaacatattttaaaacttgttacgtcagacctaacccttttagcaattaagatataaaagaccctacgtcatctgaaacatgtaaaaccagacctaatactattcaaacataaaaccgccacatgtataacgtttcgaaacctgttcaaaacactatgctataaaatttaaggctaatacaaatcgaataaatttccttaaagataaagaaatgtctacctttgagaggcttgcaaactgctgccctcacccttctatcttctgaaaggataatagcccctaagccaactg

SEQ ID NO: 339678 - DNA, 485 bp, Cannabis indica
tgacacaaccttcccaacacactcctgtccaacgtggccatagtggatctaactcccacttaaccttctcggcatggcctaagtaatgagcaagttgtggatttaggcagcccccccggttcggtctacagcccctgctgggtttttggccaattcaggatcaaatgaccctatgcaacaagctgcttcagcccctgaacaagcagtaggtactgctgctatctcggctgctcctaatgtagcccccatggtgacatctgatgtcattgggcagacggttcctgtctcccaggcatttgctacaatcatggctgatcttaacccaagccaacctctccaattcaccattagatcgacctcttcacctgctacggcctctccttctacttgcaagtatcggtccaagcgccccgaaagtgccaatgaggttgagtttcgaaagatgttgaaacgaactcgtgaccttgctcgtgctcttgatgaag

SEQ ID NO: 339679 - DNA, 809 bp, Cannabis indica
atatatgcataaaatatatataaacaatgcaataatggcttgtacttaggccacctgagcctaagtgcaaggctcaccaaatagttaagaatgttcttaatagaagtacgaccattgtaccacatgcactgaagtaccatcttcgtactagtgttggtagggcaaaattatactttcgggtgctattgggtgttgtaccacatgcattccgtacccacttgtactcgtgttggtaacactgtaagttacccttaaacaccatacattgtactaacacacttagttctacaactattccagtgttagtagtgtaaacaataataacatgcattcattcacacacatacatactttatgctaatcttaccttgtttctgagttcaggtgtgctgatcaacatgagtggaataacagctcgacgccttatagggccctatatcataatattcgtaaatttgatgagagacatgctaacacactttttagggacttaaagtaaaaactaattttcctatcgatggataacatgacaataccctaaatatcacacaaacagaaaaaactaggctttacaaaactgccccagcaggtagagcagttccccaattggaagaccggttctgtggggtttcctagggactaatcggaattctggttcctacaggtccccatgaaccggtcgaccattttagtgcaagaaacaccaaaaacactcccaacacctcaattaaacctcaaacttcttaaaaacttccagaacacctgtatatgccacaataaactcaaaacaagcaataaacctcaacaat

SEQ ID NO: 339680 - DNA, 966 bp, Cannabis indica
ttacatagttttgcaccgccaaggactatttacctctttcttagattattgtagtgtcaatctcactataaccggattgtttacaataccggtcccaacctcacctcaatcacaatatgaaaatgtatttgaaattacaagcaaaatcaatctagaagtatgataatacaatggaaatctagagtgataagcaaccacgcttaagatgaataaacataaattttggctcaaagtgtgtgaaaagtgtttgttagaattttaacttggaagctcattaatctcacttggataggttaggtgtaagacataaatgctcagccaacttaatttttagagagaaaattgagtttatatagtgttggggtgaaaagtagccgtttatagccgttagcacgcattctaagagaaattctaccgtgaactaaaattttagatgcgaacgagaaatctagattgatgacaaccgaaatttcgcattccaactggaattttggatggcttgctaacagtggaaaaattagcattattccggactaaaacgtgcataattgcttactcaattatccaatttcagaaattccaattttgttctcttagttaaatgaaatgtgatttggaaaatcaatcaaaaaaaatttgaaccatcgggtgagaaaacttgttgcacaagttagtgagtgggccaaaatttgaatttataaatccgagtgtgctatgcaaatcactttaacaagactaaagtaaatttataccatttgattttgggtagtcttgatgtagatgagcctcctagcttgatttgcatgtttttgattccaagttgacttttctcgagagttgactttgacttttcaggttgacttttgacatcgaatttcgcatcaaattttccaaggctgtccttggtgtttaaaatacagcattggcatccaaaaactctaaaatagtcaatgttgggttttctcc

SEQ ID NO: 339681 - DNA, 1793 bp, Cannabis indica
agacctcgagtgtcccgagctagaacttgcttcattttgtactggccttctccttcggaaaaggttagatacacgtcctctatttaggtacatgtatacaccttccctctttgatcgagaaggacactgaaggtgtctcggtggtaccccacttgtcctaggttgagtcctagggtttctctcattatcacgaggaatttcctgttccctaggtcggggctgcctcatgtcctcattcctacgagaagcttctagtacatcattacgttcattcccttgattcataaattcttggaatctttgaggaacatctcgatgttgctcttgattattttattgtgcatccactagaacatccatagtacccccaagttattgctcctgagtgttttggggatttccttaatttgcttcctgtctcctggttcttgaaccttgaggtctgccccgtggtcttcttactccaggatcaggttaattttgagtattagttccttgattcgccctagccgttgcagcctctctttccaactcaatgtttcgtcggttaaattcggctaagcattgccggagttgtctattttccaattctactaatggtacatatctagttggatcatatacatcctcacttctaggtatataccctatgatattattagctttttcgttccttctttttgaattttgattattgccaccataatttctccttgaacgtgacgttccagtaatatgggtctttgagaacccattggctctttcccagggccatgtgcagtttcctcaaggcgatttccatcgttttgattgttatcagccatggatagatttctatttgtaagcagagatttttctgagttttatcactaagactctcaatgaaagcaccaaactgttaacgtagatttttgttaactaaaaatagtgagcatttacgcaataaatatatcacagaaataataataaacgattaaataactctagatatttttacgtagttttgcagttaaatctgcatactccacaagtctatcttattatgatattttttgaatacaggatacaatatataattgataatcttttttctctcaaattctctctctctttttctgtggaatctatccctatttataggaatataggttggcagttatttatttggaatcagtttaaaatgtacttgtccatgaaacgtggacaattcccacatttcatttaattgtatgtaggataattatttgataatggcttaagtattttttgttcttatccttttcgatggttaatgctgatttagacaattgtatctcgcttaacctgagttatctttcttgttcatcttgatgtggagaaaatgttaggaatactgtaaaactgtatatagccctaattaattcaagagaatcaaacaataaaattaaggaatagcggaagcgtaccggagtccatagaatcgattttgtaataaccttagattggtatgatcttccaattttttgcatcaaaaccttctctctggaactttagttttcttgatgatggggattcaagaatacgatatgaagcgatgcaaaaaatggggaccaatacctgtttaaattaatcctttttgactatttccaatttggcccctcatcaaattagaaattgtctaattggtatccacatattaaaatcataacaatcatgcccttaagtcataaactttattccaaaatagaccacataaatttgacttatttatttgatgacccaacacacattttatatatacaattgtgacccca

SEQ ID NO: 339682 - DNA, 1444 bp, Cannabis indica
ggtacaggttttactcatagtatcaattcaattcataatcaatttcccatttcatcaataatcttggtagctcttctgaaaaggcatctagaagcctttgagccacaaaattgtgtcccagttccacccgatgtttcctttgcaatatttgccacactaactgaaaggttggtgcatccatcccataataaaccttcagccttaaacgccatgatcaatagatttcaggacctttgatccttgcccaagaacacgaaggtcctcaccttctgattcaaaagttaccatctttccttcctaattaatatttgcactatactttacaagtcaatccaatcctcaacattacctcaaatcatctaaatttaactcaaccaaaacaaccaaccattctcttactaggaccgtaaccaatgggttttttttgtcaagatcattaaagttaacatcctttagccaatccaacactggacatttactttcatgaatctctctcttcatattatttcctttgtgatctaatccttgtaccctcaacagtaagggttagctcaatcacctgagcataaaactagaaaactcctagttatttaaccataatatctacattctgaacaatatacccgttccaccttaaagccttcctagcggccttagtagccgttgcattttaacaaaactttgccaatcggtccagcttagtgtcattctccatcactgtgttgcccgggattaaccatacagattctactaccttgtcactcaagtaatctcttacttcataacatacatttactcccggtcttatggtagtggaagattcatacccacaccacctaccccgagcatagcaggctcgcaatcattcttgctagattgcctcaagtacacctcctaatacactcgcgaccattccttgctcatagttagaatctttctaactaaaactaatgctaataagcattaccgcacatgcataaatatactcatcaactttatattaaaacttatcatgcttctctaacaacttacacatttcaaataagcagacaattcaaataatcagtaaataattcactaatcaactatacacttactaaaccatgagtcgaacgagtcttcacagccaatgtacatatcaaaccagtcttcaggatctttaaaccttggtcgctctgataccatgttgtaacgccctgaccctcaggaacgccacgtgtgtgcttttataaacttattattattaatctataaattttagaaaagtgtggtttaatttaaatctttaattaaattcaacataaagactttcattttaaataatgtcgtaatatagggatcccctgtttataaaaaaaaattcttttacaataaattacatttccaaacatagaaaggaaatcgatcctgcttcccagaagccaagaccccacggctgatatgt

SEQ ID NO: 339683 - DNA, 949 bp, Cannabis indica
tttgtaggaaaacttcataacttgatgctgcaatcagatctgttagaacaaattaaagctgctaagttaagtgatccagaattagtgaagatcaaagaagagatttcagctggtcaagccaaagatttttcagtgtcagatagtgagatgttgttgtataagacaagggtttgtgttccaagtagtacagaacttagaaatgagattcttgaggaggctcataccactccatattcattgcatcatggcacaaccaagatgtaccaagatcttaaaccctactcctagtggagcgggatgaagaagaatgtggtagaatttgtgtcccggtgcctaacttgtcaacagatcaagtctgaacatcagagaccggcaggtttattgcagcgattgacacttcttgagtggaagtgggaggatatcaccatagactttgtggttgggttacctagaaccacagaattgcacgattcaatttgggttgtagtagatcaaatcacgaagtctgcacactttctaccggtaaaataaacatttatagtggatcaatatgcagaattgtacgtgaaagagatagttagattacatggtgtgccaaagtccattatatcggattgagattcgaagtttacttctaagttcttgtagagtcttcagcgggctatgggtaccaaactaaaattcagtacaactttccatcctcagactgatggacagtttgaaaggacaattaagatactggaagacatgttacgagcctgtgtaatggattttgagggctcatggagcaagtacctgccactgattgaattctcgtacaataacagttatcatagtacaatagggatgattccctatgagttattatatggctgaaaatgcagatctcccattcactgggatgaaacgggagaaaagaaatacttaggtctagaatcagtgcaacgga

SEQ ID NO: 339684 - DNA, 559 bp, Cannabis indica
ttaaagctccaaaagcggttttattcggaaaaatgatgagagattttctatgcgaaggaggagatttaatgggtggggatcatttggtgtctagggaggaggtgtgcagacctaaacatgagggaggtctcgctattggtaggttagatatgaaaaacaaagggctgcttatgaaatggctttggcaatatccattagaatcaaattcactttggcataaagtgatcaaaagccgttatgggagagcagaaaattgttgggatactaaatcaggtcataggctatctccaagagatccttggaaggatatttcagatctttatggtgaatttttggagttggtaaaatttaaagtgggcaatggtgcaactatacgattttgggaagatatctggattggagaaacaacattaaagagtcgatttttggacctggcagtggtatcaaaggcgaaaaatatgagtataaaagatctggtggccattgaaggagaggtaggaaattgtgttgcaagctggaattttaagtttagaaggaacttgatggagagggaaatgcc

SEQ ID NO: 339685 - DNA, 660 bp, Cannabis indica
tcgatggccttcaacaaataggggacatggactatgtttgccgagcttctatgctatgttgggttttatggaaatctcgcaacaacacagtttggaacaaaaggaattctacggtacgtgatgtattagtatctgcttctattactcttgatcattggagaaaagctcaggaaaattttgctttatcatctctatcccttaataatagtggtgatggagccgagctttggactaaacctgctgaaaactacatcaagattaatatagatgatgcgctattccatcacgaaaattcctatggttttggcattgtagcgagagatgattttggaaagcttattgaagctaaaacttgttacaaagccggtacctattctgctgaggttgtggaggctctggggatcaaggaagctctcagttggattaagagcaaaaattggcaaaaagttgagatagagaccgatagtcttcttgctgttcaggctatcagaagtgatcataatatgtcctctatttttggtttaatcaccaaagactgttttgagttattgttgtctctaattgatgttaagttgcgttttgttaaacgatcagcaaatcgggttgctcatgctgttgctaggcatgcccggtttacctctggttgtagtatttttgagt

SEQ ID NO: 339686 - DNA, 1079 bp, Cannabis indica
cgtgtagcagtcccaacacgcttcctcccatgcagcatttaatgcgacttgattgctcaggggaaacctgacaactacgcggagatgccttagccttacttgggcttctgggagcgtgtggggctaccttatgtctcctccgggaggcatgtcccggatgctgctttattacataaagacttagcaaatagtttggatgctaagttgtttgaccacgtgtgccctggccaggttggtccacgtatattgggcaaaatcaggggcaacacgagtgattagactttctaacgaaaactcttttggtttgtgcatgagagtatttttaaaatctttccacgaagggggtaatttatcaatcataacaacaacttgaaattgttcatcaatagtttacctttagacaaaattttgtgagctatttcttgaagcacgtgagactgggcttcggctgttttatcatcggttattttaagcttcatgtagcggctcacaatgtatttctttgttcctacctcctcgatatcatattttttctgtaatgcttcccatatctccttggcagatttgtcagaattataataatcatataaatcatctgacagaccattcaaaataaaattcttacacagaaaatcattctccacctaagagtctcttttcttaacatgcgattcgtacttctcgacttcatccttcttctcggcaagaggtggagtctcagacacatctagtttcaaaataaccagcacaaacacaacttttttcatagtcaaaaaaaaatcttttgtcttcaacgtttaaaatgcaaaccctcgaaacgaaaaggcttgtcaatgtcagcagtagaaccagaaaagtcatcggtagtagtcatagcagaaggaacgtcttaaaattgttgactaaactgctagcaaaagtaaaagattaggttgagtcgtggactaggtccggcactgcccaggattgtgcaaacagtcaccaagtcgtatggtatcgaaaccctactatactgtagagaaccgtcgaatacaccttaaaaattatgatatcgcagatgggttttttttttttttttt

SEQ ID NO: 339687 - DNA, 1048 bp, Cannabis indica
aatttacagtttgagtttctaaagtaattgcagagctagttgcaattactttaggttgcagagctagttgcaaaaataatttatatggagaatttcgtaaatagtatacgaggtaactctcctttaataaatagtcttaatttaaagtgtaaataagaaggaaattagaagaggagtagtacgtcttgtcgttttccgttgtgttgttactttcatcttaaatattatcaataaatagagccaaaaaagacgatattatattttgcgccaaagttggcctcactttccatttttattcttttggatcctttttgaatatgagaaccaatgaattaaagccttgtaaggaggactgttgtgaatattaattgaagtagaaaactacgattgtgtcccctatcaactttcatattttcactcacatttatcctcaaactaattagttacatgagaatgaaggtaatgtatatatgtataccaggattgttattgggcagccggtagcattagtgttgtttagtattttttataagtggtactctataattagttaaaaatatatttttaaaattattttttttaaattatatgagatccgctacttaattacaatatgacaccaaaaaatatactaagtaccaataattctttaatgttatggtcaaagttactcgtgatttcgtccattaattcttcaatgtttactctgtattatttatactttaaacttattttattattttattatttattttatatgtatatatatattataaattaatattataaaggaatatatgagtaaatatatatttaaaaatataatatttgaatgattagagaaaaaataaagaaattaaaaaaataaaattttaaagatgtattttaaaaagtagagtaaaaaagctaatgtgagtgttgtaacgatattagttttttttttcttctagtttatatactcatactaatgtatttatgtttgtctttcaaatttggtggatcataaaaaaaaaatatttttaagtttttatttgaaaaaatgatattt

SEQ ID NO: 339688 - DNA, 523 bp, Cannabis indica
gtacgtggaaatattgttctgatttttaatatttcataacagtggcattatagttgcattaatattttgctaaaagttctttttccacatattaatattaatgtacaagtaatcatcgatcggtgacaaaaaaatactgacaaatagtttcttacatatgcacattcacattttacattttttagttgcaattaagttgcacgttagttggctcgcaacacatataactgtttcattacagtttcaacagcaacccacgatccatgcttcctgggattaaaaccttcgtctgatgcaaccttcggtcaaccaccaagcaacctccgtgcgatgcaactttcgtctgatgcaaccttcagccaaccacccagcaaccttcgtctcattatgtaagtgatagtgtaagcgggattttggtaattaaaagcacataaaaggtataaatgttttccacaccttatggaggtatttttgtaaataaattatcaatttttatttttcatgtaataattctaatttataa

SEQ ID NO: 339689 - DNA, 628 bp, Cannabis indica
tgatccaaaaaatactaggtctaaaatattagataaactcaaattaaataaataaatatatatgaaatagatccaatggatagatgaaccgatccaatacaacatccaatggatgttggatcgattggatgacaaaattaattagatcggatcggatggtaaaatctaacgtccaatatatgattggatcgaatctggataggcctaaaaatattggatgtgatccaatgaacacccctactttaattcatggaaattctacttacaaaattaaattgtttatagacaattgtcctattcaaaattattcatctacatttttacatttttttcatgttgtctacaaatatatcattaattaattaattaagatataattggtaagatttgataaaaagtactaatgatataagtcaatgtttattacttataaaaagttagtatctcagtctcacttctaattattattattttcttttcttattttagagtaaaatgagttttccagtaaaataaataactattatgttttggtcaaagaaaatatctttatatattaaaagtgcctatttaacagtttttcttggtttaacagaatatactttaaaaataaaagaatattctgtta

SEQ ID NO: 339690 - DNA, 741 bp, Cannabis indica
ctctgataccatgttgtaacgccctgaccctcaggaacgccacgtgtgtgcttttataaacttattatttttaatctataaattctaaaaaagtgtggcttaatttaaatctttaattaaattcaacataaagactttcattttaaataatgtcgcaatatagggatcccctgtttatcaaaacaaattcttttcaataggttacatttccaacatagaaaggaaatcgatcctgcttcccagaagccaagaccccacggttgatatgtacattgctgggagacctctgactcatggctgaacatagcttctaacttcttcacctgcaccatgaagcacccgtgagtcataatgacccagcaagaaaagttactaaataaaatcatagaaggtgctaacaaatttcattacaatataatatatataccgataggtcatacactttcaaggtgcataaataacttaacgtctataagagtacacttatcacatgatcaggtatattcatagttattcataatcaacaatctctgtatttcatacaacactccaaacattcactgcttcataaaacactcaaattcacacattaccataatcccataacctcagtgcttcataaagcactctaatcttacctctgtataaacgcgaattcttacatttcgtgagtcactaagattctgcaagaaaagaaactaatttcttaagaaatataaaaatccatttattcacattata

SEQ ID NO: 339691 - DNA, 1458 bp, Cannabis indica
gccctaggtttacaggacctttcgagactctcgaaaaggttggactagtggcaaatcgtttagctttgccttcagctctatctacagttcacaatgtgtttcatgtttcaatgttatgaaagtacatttcaaatcctgctcatgtactaaattatgagaatcttgagctagaaccagacttatcttacgaagagaaaccagttcagatcttagacaaaaaagataaagtccttcggaacaagaccatagctttggtcaaggtactatggagaaatagcaaggtggaggaagccacctggaagttagaatctgacatgagggctcagtatccagacttgtgcaggttagatttcgagaataaaatctttttaaaggggggataattgtaaagaccgcttaactttaatttagaaattagcagacaaataaggtttaattatgaaacttacataatagttatgaattatcattttacggagatttatttgaatttagaatgcattatatatgtcatatatgaaattttatatttttgcatgttttgtgcccgacaacatcggaacgcatttttttttgatatttttagtatagtgagacaatatagttagacattgggagtgtcgggaaaaattgtgattttagaattgaccaaaatacccctaggtggcttagatgctttttggttttactggggggcaaattggtctttttgaccaattagtttttgtctttttgtgagctatagttaagctttactaatctgaataagactttagataaatgaaagaataaaatagatttattcattattcaaaaatagaaaaaattcaagagaataacttctctttctttctagtcgatttctctctctcgagctccatggaagccaactagggcttgtgattcttcagcctaattctggaagtttagcaaatttcttgtgaattaatctaaggtaaatatcctagcacattttctttgtaaagttgcttggtattattatggtatatataacaggtttggaaagtttggtagagtttggggttgaattgagtgagtagtataattttgaagttttcatgcctgaactggttgatcggttctgtgggacttgtaggaactgtaattccagttggtccctaagaaaccttgtagaatcaaaattctggttggggaaccggtctaccggttggggcagttttgggaaccctagtttttccctttttatgatatttagggtatttccatgttatttattaatagagaaacatttagtttcaagtttaagtccatggaaagtgatttagcgtgtcactcaccagttttacgaataatatgatttaggggcctataattcgtcgagcagttgttccactcaggttggtcggcacacctaaattcggaaaccaggtaagattagtataatggtatgcatatgtatttacatgtttagcgtgc

SEQ ID NO: 339692 - DNA, 1125 bp, Cannabis indica
gagaaattagggttaggctaatgctctttatataggagagcttacatcaagataataacctaatatccctaaataacagaaactataaagtattatttacataataaaataataaatagaaaataggctaattatcccttaagaataggggaatagctgatatttctcccctatttttgtgggttgttaaagcccaaatcgtaacttagctttctgtcccagatgaaggctgcgcaccaagtgactgctaggtgtaggatggggtctagccggccatgtgcctgccagggtctggccggtcatgttcctgccagggtctggccagccattttcctgccagggtctgacaagtcatgttcctaccagggtctggcaagtcatgttcctgccagctttagcaagtgttggcaaaccttttcatatgttggctagccttagtaggtgtagaccagcctttgtacaaccttccttgcaaaggtaaggcttccttggtcgaacgagccctttcttggtctgacagtcacctttggccggccagcttgtgctcaaaccctggctggccatacaagctcctcctggccagcctatgtactccttttggctagccaaacatggttgtgaagcttcttgatgacttgcttaactcttcttgcttattgcttgacaatttttccatgccttgtaaggagactttatcctgctattaataaggctgtattccccatgtcctaagtcttgccttatgtggacatgccacatcaggtggaaaaattttgggataacgttttcccccaagtcctactcgaacatctagttggatagagacttcctcattctcatcttgcttgtagtagcctttgtcaagtagctttgtctagccaagtattggatttttgcatggcatgcttttagatctttaatctactctcttcatatatgcctcatcttctttgaatctgccactgataagtttcaagctttttaagcatttagaaactttttgattctcacgctatattgtagtttttttagaattttgatctgcatgatagcttagaatgcatgatgtgtgatttcttgatgaaaaagatttaattttggtcttcattgtgattcttgactctt

SEQ ID NO: 339693 - DNA, 656 bp, Cannabis indica
ccaaaaaactggtttcttcatcaagaaagcagaaaccagtttcttggtaatttttctggcgactatgccaattctgatgactttttccgaagtttgttgtcggtgccggaaaagtcgccggagtaggtgctagcgtcaaaatagtcgtccgaattggcattgtcaacggaaaaataccaagaaacgggtttcttagaaatcgatttcttggtaattttttcagtgattttttcggcgataatgccaattctgatgaatttttcggcgccggctgcaactccgacaactttttcggcatcgaccgctactccagcgacttttctggtaccggcagaaaactccggtgattttttcagcatcaataacaaataaaacttcctaaacaaataaaaacattaaatataggattggaaaacctaattacatatatatggcatatcaaataccataaaaagacctaaaaccaaaaaaataccatataaattggtcaaatttaaatgtgccatatttatcataagaacttttaaaattccctagtaagtgtaatttcctcttaaataaaagcatttgcaaaagaaatgaaagaaataaaaaaaaagttaaaaataaagtccaaaacagttaaaagtgctatttttaaagggaaatttacaaaa

SEQ ID NO: 339694 - DNA, 608 bp, Cannabis indica
agggataaaacacctcatgtataaagttgttggctaacaacttcccaacttcctatgttagtgccccttgcctctcggaatcaaaaggcctccttttctgtctctttgaaaggtagtttggatcaacatttaagtaatggtatataatgttagggtcaatccctatcatatctccatggctccaggaaaactaatcctggttcacctttagaaagcttattagctgctatttgagctgctcgtccaggttcttcccaacgtatacacactttactggatttcctgggtcgagaatgacctcttccaattcctcgattggtttcaacaggtttctctcatcttgaactcgagggtcaagatcttcgtctttctgctcagtttcttctaccaatatcgccatcaattgataaccgacttttctatgttgtagctctatgcgatagcaatcgcgagccagcatctggtcaccacgcaccactcccacgccatctggtgtttggaatttcaaggataggtgcttgatagaactgacggcccctaatccgatcagtgctggatgacccaataatatgttgtaagccgagggcaggtcgacaactaagaagtct

SEQ ID NO: 339695 - DNA, 599 bp, Cannabis indica
tatcaaattttaatataattttttatataatttttctttgttgggttttggtttgttttgtttcacactgagttattcatttcagtaattgagttcttgaatttgtaatctctttctcattattatcttatttttaccatcatcatcatcatcttcttcttcttctttatgcataaaagttattgtattttctttgttggattttggtctattttgtattacactgagttattcatttcagtaattgagttttgtgtatttgtctttttatttcttccgggtttaggttgataaactccaaagcatggagaataaagaaatagttagaataaaagggcttgaaagctaacttggcgaaaatagccaaatatatgatatgctaactttaaacccttcctttgactatctcatccgttaaacaatttattataaaatgtaagtattattacattaatataataatacaaattatatcatactaactacactgattagtgtcttactagtagtaattgacatgtatcattcgatatttatttggtgtttggtgtacttgttgtggtattttaacacacaagtatacatatcgttttaacaac

SEQ ID NO: 339696 - DNA, 1099 bp, Cannabis indica
gttgaagggtcggtgggacgcttggaagaccaatactgaccatgctggctttgtctgggatgagtccctcttggaactcgttcgtggggatccaaaccaattcatgtcgtcttggaaggatatggagtgcatatacatggccatcttcttggaccgacagaaacattggatcgctatggaggcgaatcttgagttgtggaagctattcgtcttcgattcgagtattggaactctaacggaagacgaactgaagacgttgatggatgcttggtgccttatattgtccaaattggtggaccagtgtggtgtatgtgacacccattacatggtgatggtccctcaaatgacagccttcgaaacccaggttaaaaaattcgactgggatatcatggacaaaaaagttgtaccttagacacaatcgaggtaatttaaatacaaaaaaattgagaatatgtttacgaattaaattaaaaaaaatatttgtttattaaattttgcgtttaactactattgcaaaatgtacgtcataaagcatattgagcataagttattggatcgaccattcgatggagtagatgatgaccatatgccgctcttccaccagagatggggagtagatttattctaccagaacttgttatgaactttagatgttttatttattatatttgttgaacaatctttacttttacgcttttctatttgaacaatctacttataacccgagtccacttatgtttgttttaataggttcaaaaatttgtaaaattttggtttttttagttagttaagcacttcattccatgcaaactgaacgaataattacaataatagattcaaaaaaactaaaagtccatgtttaacacataacagtataagcagttcatggaatacataatgggaatagtacaacacataataaatattatagtcaacattcatttttaacctcgataggtgcaagtgcttatgttgtgccccttcgcaccgcacttgctacaatttcgtgatttgataatcctttcaccattacaagcagttcggttgttcttgattcttccaaccttttgcttcttaggtcaccctactagttgcttct

SEQ ID NO: 339697 - DNA, 614 bp, Cannabis indica
ttctaagaactctttgctgtaactagacatgagtcgtcaaaagatgacatccatattaatacatctatggcatttgaatcttaatcatagtggttttgacaaaattattctctataaagagaaagcatgccaatatccactgaatgtatgtttatctgtattcgaacatatggatgtacatttatgggtgaatatgagttatcgttaaattcttagacgatctctctagatatttaccttatgcaaagaaatttgaaatgtttgacaaatttcatgaatttctagcaatgttaaaaaaacatgaaagtaagtggttaaagatcttacaaactgataggggtggagaaatatttggttatgcagttcaaagatcattaagttgaacttcaaatttgtatccaaacttacctctccagaattttggagtcgcatattgatgaaaaggtaaggtccgtgattagttaataagtccttctagatttccttagagatataaaatgacattatatgtcgtcccatctaagtgtgatcccaagaaaaactctgaatgatggaatggtcatatactaagtgtacaccattactagatttagggatgtcctgatcatgaactt

SEQ ID NO: 339698 - DNA, 510 bp, Cannabis indica
ggtgtaataccttgttcaagtcatgatgatccccactaatatctacactcaaggttgtgagtgagtgtatatacatatattcttcttttattatatatatgtattatattacatgtgttgtaatcttcttcatctacctttcatatatatatgcaatatatagtgtatatatgtgtaacaccctaacttgtctaggcgtgttatcgtgattttaaacatactgtgcagctcgttgctagtcaacgaggttaaagaaaaaacgtgattaattaaaattttactatttaattaaaaacttatgatattacatacaaaatatttcgggatcccgtttacaaaatactttacaaaagatttctatttccttacaaaatatttgtcgcccagcgactaaccataaaggcctgatgtcccaaggatcgtacgctccaagtttaaccgccccgacaggtacaatcttcatttgctcgttctcacggtttctcaactttaaccttgcccttacctaca

SEQ ID NO: 339699 - DNA, 1180 bp, Cannabis indica
agtatgttagggattgaccctaagcatcaaaacccgtttaatcagaacaagacgcttctagaagattgataaaataagcaattgaattgggagagttcttatgagattaaagcaacggtaaattaatgattgtaaaccacatcactgatgtaatattttgaacttcaattgtgaataaagtaatcatttctttcgacaagtaattataaagtgttacctcagatttttcccaaaatacgtggcagtggatgaggatgacacatagacctaagagaatttccacttacgaagatcaattatgtcttgggaaaagaaggcatctcatggagcgagcctcccagaggagagcacaaaacaggcctttactctccgagaggctagaattgcaacaaggcatctccgggaaggaaagagattgttcgaacagtcactttaatgccgcatgggggaaaacgtatttgaacctccataaaagatgtgacagatggcgtaagcccctttttacggcaattacacaacaattgttgagtctagtgatggctacattatgaggaatcacatcaatcaagagaggataaaagattatatccacatttttatactatatcaaaaatatgtttatatgaaaaatatttaagttaaatttaactttttatacctcatttataatacatgcctacaaaatgcgagccgataggtattcagcctcgcatgtagcttaatgttgtttttatgagttaactctcatttacaactgctactttgattttcctttctgatgagaaaggttccatttttgactttacattgtccatataaaactttaatcaattattaaaattttaaggtgaagcgagtttccaatatatcatgtatttctagataaattctagttaatcatatacatatagatgcccctcctgtaattttaaagaagaaactttgtaattacttgaataatacttcaactttattgataataaaaatttcacattacaaagagaaaatacaacactaagtttattgttaataaggtcgcaaatgttcaacattccagtggttctttattagcgagctgttgagtcgagccaatttataaaccctggttccaactactgcctccataacataagaaccttcccaatttaggttaaactctcatgcagatgcatctctcgtg

SEQ ID NO: 339700 - DNA, 2219 bp, Cannabis indica
aaagccagttcctagctaatcatactaattactggcctgttcaattatgaatcattgaaagagcaaaagctaatgttcttttttctttctgaacaaagcaataactaatgtgtgttcaactggttggcggtgatttcacatctatttacagggtaaacagttatgcttgtcaatagcatgcacggccattctagaacacagacccgtctctatggttgccaaagcaattaatgttttggtgacctcgtactcccactcaattaagacagggagctctgttaaaacaacaaaatctgagaagacatctgcttctggtgtgcctcatgttactagccctagacccggtgtagatgagtcagtcaatagagtagatgcccttggaaaatctgtcatacatgattctacagccggggataatgagccatctaataggtctacagctttctctaattcagattctgacgatagtgtgaactctgaatcagcacggaataattcgaatggtcttcataccattgatagtaaagtggacaaaagaaggttgatgggtggtgaaacttcctgtgttgcagtcatgccatcggctgttggaccaagtaacaactcattgattgccaatactgacgagcatcaagaatctcaaattacttcacctgcaatttcacctgatgagatatataactttgtgtttgcaactgttgaggaagagatggtgggggatccgtcttacttgattgccatcattgttgagtttcttcacaggtaagaattttcatatttagaaatcttgaaatatgtattgagttgcaagtgaatattaggtaacccgttatataatctgacatgaatctatatcaagtgatctaaatagacacgtttcctctcttgtttcatgattgttttgctgtttttgtagtgctaatttggaaaaggtgaaagttcatcccaatctgtatgttttgatgatacaattgttagcacgtggcgagcgatgttcagagcttagtttgtttgttataaacaaggtggctgattattcttcttgtgtactgtatacttttgtagtaatttgagctctttgtatgcttcttatgttgagctgaagttaacgacatagttttttgttgcaacagattcttgaaccttctaaagaggttgcagtgcaactcctagagtctggtcgtcaaaatccccaaattagaaagttaggtctggatatgctaaggcagcttgctttacatcatgattacgtactgtcgctagttcaagatggatattacctcgaagctttacggtatgctaggaagcataaggtaattcctactttatccaaatattggagaaactgatgccctgttcttaattcaatttgtcaatgttttaaactttttgcaaaattgactatgtccaacattgttgtgaagtcatctaaaatcaactaaagtgatcttgtattttacaaagggaaatttttagcgagagaaaatagtagagaaaagacactgaaatcttaaaatttaataccaaactttcttcagaatattttgcctctgaatgtatttaaaattctagattttataaaattatactgcacttaactaatacttaatacatttaatatatgcgatttttttttatctacaattttgtttgaatcaaaacaagcgaggatgatttttttttcctcataatatctaagatcccaaaatagggttagcaaaaaaactgtcacgattgtcttttgccaaagtcttagtatatatattattttcttctaagcccttggtgaatcctaaatcatttttcaaagtaaagcattgctttcttacatttcagttaaatgctttcattgttctcatagattagtttggtttatgacgaacttttaaactgaataaaatgagtaaatgtacaggtcgatacagtacggccatctctgtttcttgagacagcattagcctccaatgactcacaaaatctagctgcagttctaagattcttctcagattttacaccaagctttagaaccacatcagatcacagtacatactaccggattctcaaggagatgaactctacggctgctgcctgaaacgtgcatgtttttttgggtaaaaaacagtacaagtctaaattattaggaaagaaccacacgtcaagttctagatacaacagaagccaaataagtttatttcagttaaatatatatatattatatt

SEQ ID NO: 339701 - DNA, 1086 bp, Cannabis indica
ctcacggggttcaatggaacaacacttatcccaattggaaaagtgaggctcccagtcatcctgtgcccaaacacaccccaaagcactttcaaatactgcacatttgtggtggtggactgcccaacggcttataatgcaatcctcggccggccggccctggtggattttggtgcagtcacatcgattaggcacttgtgtttgaaattccctactcaagaggctgggataggaaccgtaagagggaaccagggagaggccaggcaatgttacaatgttgctacccaccgacccgttctaatggtctgtgaagttgttgagccaagaatggcagaagaagatgagctggatccccgtgtgggattcgaaaaaattgtagaacccatggaggatgtcgaggaagtgtcggtgtgtgacctcgaccccaccaaggtcctccggctaggaaaaagtctagagccggaggaaaaagaaaaaataataaagaccctaagggttgccacggatgtttttgcgtggtgtcaagaggacatgaccggcataagtccccacgtcaaacccacatccttaacgtcaacctagacatgccaccggttcaacagaaaagacgccccctcgactcgataaaggcagaaggcctagagaaagaggtggacaaattactaaccaccggcatgatcctagacgtgtattacccagaatggctggctaatccggtactggtaccaaaaccaaatgggacatggggggtttgtatagattttaccgatctaaacaaagcttgcccaaaggactgttttcctttgccaagaatcgaccagatggtggatgccacctccggattcaagctatagtccttcatggacgcatacgccggttacaactagatcaagatgcacaccgcggatcaagagtgcactagcatcaggactgataagggggtatattgctacctagtcatgcctttcggactaaaaaatgccggagcaacctatcagagaatggtgaaccggatgtttaaagggcttctggggcgaaatatggaggtatacgtggacgacatgctggtcaagtcgaaggcatacgcaa

SEQ ID NO: 339702 - DNA, 527 bp, Cannabis indica
aagaacaaataagaaccaacaacagaaaaaaagtcacataaataagactaaaacactcaaaatcatgttacagagacaagactaaaacactcaaaaccatattataaagacaagactaattgcagtagtaaaacacaaccccgaccaagtcgcacctaagtccaaggaaagccgacaggcttggtcagagaataaagataaaacctccgatattttatggtactcgttactattttttttatacaagtggtatacaactatttacatatttatatatttatggatatatttattaatgcaactgtttacatactcattaatgcggattttttaaattcttattaaactcagacatttatagttcttacgtttataggcaagatcccaagaaactagatgcatcttacttgtattacttttcatactttacaaaaaatctatgcataatttatcaacattcttgattactttctacgaaagcataaaaatactcattcaataacaaacgaatgcccaataatattaat

SEQ ID NO: 339703 - DNA, 1012 bp, Cannabis indica
cgtggaactttgggcttcctttcttccacgaccaggatgacttcttcttgctcctgctgagctgttcgggcatatctctctcgagctttgcccgtatctctagcgatgtgcgggcctccaataatgacttgcaagtgtccatctataggtggaggtagcaaacctggttgttttgaccttggttggtcttgacatacgtctgcaggtgcgggttgtttttcttgatcagaaattctatttcccgcttcaaattgtaacattcgttggtgtcgtggtcatagtctccgtggaaccgacaaaattttgtccagtcccttttgttggtatctttcttcatgggtccgggcttcttgtacggaattaacgactgagttgccatatacacactctctatatcttcagttagaatagtgaatgcattgtgtttggcatgatcacagggagtttttccggatttgtcggtgaactttcccttcttcctgtttccttgtttgtggttgttgcgtgaacgcttgccacttgaattgttggaatagttgggaagttgggcggacgttccagtggaagaagccttcgctttgcctgacttttgctcaccttcagctcgttgaatggcttcttcgagcttgatgaagccttgggctcggtcgaggaaatcactcattgagtcaaccggcccattcttccttatgtccttccatagttcaccaaggacttcaatgccccctattatcgcggataactttccatcctccgttacccgcgagactttggtcgcttccgtcatgaaatcgctgatggatgcccggagtggctcgccaggtcattgctttacttcgaccaaatctcccagatgcaatgggagctgacgtgaggaagagaattgtgcatggaattctgaagagaaggttttccatgaactaaactttccaggagccaacttgaataccattactgtgcggcctccgacagagtggcggggaaattctgcagcatacgtcccctcgtactc

SEQ ID NO: 339704 - DNA, 2333 bp, Cannabis indica
tgtgttcgaaagttttttgagatggtacattttgaaaatggttctggcgaggccaatattgttctgatccccaaaaagaaaaacccagaaagaatgtcggatctaagacctatagctttatgtagtgtgctatacaagatcattactaaggtcatggttgatagaatgaagctcttcatggatacaatcatctcagctaaccaaagtgcctttatcccgtggcatttaatctctgataatattctggtttctttataaatcttgcactacttaaggaggaaacgaaaaggcaaagatggttacatggcccttaagctagatatgagcaaagcatatgaccgtgtggaatggagatttttagaagcgatgttgaggaagctgggttttgctaattattgggttcaactgattcttagttgtgtgtcttcggctagttacagggttattcatggtgcttatgagataggtcctattctcccaactagaggtattcttcaagggaatcccttgtccccatatttgttcatcctgtgtgtggaaggttttttggctctccttcgaaagtatgagaatcggagatggttgcatggatgcaaagtagctaacggggcccctcatatctcacatatgctctttgtagatgacaactacctgtactgtaaagctacttatgaggaagcactccgaatcaaagaagtacttcaaaagtttgaattggcttcaggtcagagagttaattttgcaaagtcgtcaatcttttttagtgccaatactacagatgataataaggagaggatcgaggagttgttgggtgtgcctattgctctagatggtagtatgtattagggtcttccaagttcaatgggtcgaaacaaaacggcgaccttgagttatttgaaagaaaatttgagaaagcgacttcaatcttggggcttaaagttcttctcccgagcgggtaaggagattcttattaaaactgtggcacaagctcttcctagttatgctatgagtgtttttttgcttcctctggcgattgttagggatatggagagtatgatggctaagtattggtggaaatcgtctaataattcatcctcaggcatacattggatgtctaagaagcgactttgtgggcacaaagataagggaggcatgggttttagaaaccttcgtgattttaatctcgctcttttgggtaagcaaggatggcgactattggttaatccagagtcgctcgtggcgaaggtgtttaaggctagatatttcccccatggttcgttcttaactgctacaattggtcctaatccaagttttttgtagaggagtatattggaagctcaatccttggtaaagaaagggacccgatgggttgttgcagatggaaaagtatatccatcctaggtgaaccttggcttccggatgctgagagccctttgattatctcttcgcatccgagcttatctaatgccaaggtctgcaacttgatgaagatcgacggttcgggctgggaggaagacattcttactgatttactgctgcctcgtgatagattgttggtgcagtctatccatgttctgtctcgaccaacgatggataccttaaactggtcgcttgatctttctgggttgtattcagtgaagagtgcatataagcttctgcggcaacttaatggtgagtttgggttggatgtttcagctgaagacaggttttggaggaagctgtggaagctaaaaaccccaccgaaaatgaaaaatctgttatggcgtgcagcgaaaagttgtctcccaacaatggcccagctgcaattgaaaatagtacatgtgaattccacttgtccggtctgcaatatggctccggaaaccattgaacatgctcttttattttgtccagttgcagcaactgtgtgggatcgggtgggtattggcacggtattgcaacatgagttctcttttttgggttggtgcatgtatcattttgaaatacttgatttggataatgcaaacttgctggtggccttgtgctcggcaatttggaatgctaggaatgataaaatttggcaagacaaagttatggggatcgaaggcatcgttgcgtcagcaacaaactaccttaatcaatggtgtggttctcagaattcaaacaatgagatgttgttcactgggttcatttcgggggatggggctgagcaatggagtgctccaagtgttaatagtattaaggtgaatgtcgatgcgactgtgtttaatgattcctctacctatagagttggttttgtggcgagagattccaatggtttctttgttgaaggcggtacaaagttgtttcatggctcg

SEQ ID NO: 339705 - DNA, 1043 bp, Cannabis indica
ttacttctgtttattgatatgtagtgtcaaaatgaacaacccacaccccgaccgactcctagttaatgcctttgcaaatgaagtctatagtgtgaaaatgctccctggaaagagcattaactcaaacttgttaatgatgaatctgaaattccagaaagcaaacttgcttggaatcgaattatctagagaacaattggttcgaggtttatacttaatagtcttcctcctgagtataatggatttgttgtatcttatatgatcaacaattttaactcatccgacatggataagctagaagcagaattgcaagcttatgaaggacacttgattgcaacaccgccccccggatttgcaaacttgtgtaagaggaaaagaattaaggatgaagcttttaacaatgctgcttcttcaagtacaattgatggtaatacacttcaatgtttaaattgtaatgagaagggacattaggaacaacgatgtcccagacttttaaacaaatcgaatgaaagtaatgcttttatttttgaatcatgtgttttagagaatgacaaatccttgtggattgttgattctggatctactaaccttgtttgttcttcattgtagctacttgaaacttgcgattatctaaatccagaggagttaaagctcaaagttggaaatggcgagttagtgtcgttccaagctaaaggaagagcccgcctcaagtttcagaagaaatttttagttttagacaatattttgtttattcctacttttagttgaaacttgattagtgtttcatgtttacaaacacagttttataaattgaatatttcgagtttagttttaacaatttctcgtaatggattttaattatgtgttcctcacatggaacaagaactttatgttttaagaccggaaatacaaatcgcacttaacaattaacttttcaatattgctaaacctagaaactataaaagaaaagtgattaataatgatgatgacacttatctatggcatctacgattaggtcatataggctatgacagacttcataagtt

SEQ ID NO: 339706 - DNA, 775 bp, Cannabis indica
aaataatttttaaataaaaaaatatgacaaaaaaaagtttgaggcatatgcattgcatacccctgcgcgtgcggaagagggcttctgaccgagacaagaggctgcacgcagccttaattgccaagggaacttggtgtgacacggtttcagacagcccgtgtccgagtttcctcggtcaggcttgtctgaaaacgcgtggatgccaagtgaatcacgtcgtgtgcgcgcgtgtgtgcaactcgatttcacatattttcgtccaaattcaaaaaatcataactaattcataaaaattcaagttgagttctgtaaaagcctaaatttattaatttttcgtctactttccagtaaaaatatttccagaaggaaagaaaaaaaatattttacaacatacattgtgatttccatacaatcatcaaataagcacataaactatcatgaaaccatctaaatcaacacaaacatcattttaaatccatagttcatgaaagtaaattattaccatggctttgaggccagttgttggaatatgttttattaggatctagatttactaccatgtatgttatttgacatcctaaatatgaatttataaaacaatgtaatttaaacacatataaagtttgagaaaccttacattgggtgtagcggaattaaatgactcatttcactcagatctctaacccttgtatcctttctatagcagagtatcacaaatatctgagcccgattctccttctcttgacttgaattcttcacagtcttacacactatg

SEQ ID NO: 339707 - DNA, 586 bp, Cannabis indica
ctggcttaggtgaggggagggatgagggcggtgttttttcatatgaaacaattacagtcgaccaatccattttggatttggttgatagaattactcgggcatattcttccccacttagtgcaaagaatgagaaatgggatttggtgtcaattcctgattctgcatctcctgctgtggaagatgagattgagattctagatgttatgcctttgcaatccagtgttgcttttaagagacaatcaaaacctagattgcattgtagatctccgtttgtcaacgagtttggttcttctgaaccaaaaattcagaataagaaggataaggaggcatctagtgaattagcttttgaccctaaggagttgtttccctttgttaaagagattgggaagaacaccggccctgatgattgcgggggatatgtgaagtggattgaaggtgctaggttgatgaagaagaagtatgttttttattgttatgttattagttttgtttttaatagttgctgagatttgttttttaactggtttttttttcatttaggttttttttttctttgtgatttcaggaacaatgagaaaactgctgg

SEQ ID NO: 339708 - DNA, 1180 bp, Cannabis indica
ttgatttctatttattgatacttgtagtacacactatgactatgaacaaccccatagtgtcactgttaactgataacaagctctctggagctaactttgtgaaatggagagagaacattaatattgctctcattggtaaaaataccctgtttgtgttaacggaagacgctcctgagcagccaagtgagaatgcgaccaaggcagtcaaggaaaagttagagcgttggccaaatgccaacaacaaagcttgatactttatactgtctagcatggttgacaccttgaaaacaaggtttgccaatactctcacggttgcacatatcatgaaccagttcactgaactgtttaggatggtgtcaattcaagctcattttggggcgaccaagaatttcattaatgcacggatgaaacctcaacagaacatgcgtgatcacctactccaaatgactagttacttccaagaggctgagaatcatggagctattatcgatcagacaactcaagtgagtttgatattgaatagtttgactccagattttctacccttcacataaaattatgtcatgaacaagttggagcttgacttccacgagttaatcaacaaccttcagacatttaaaaatttggttggaggtccacaaaaatgaggaactaaagctcctagttctggcaatgctaatggtatgcccaaggttgaggcaaacattgtcgttgcttcgaaacccaaaaagaagaattggaagaatagcaagaagcctcttaatgctgttaaaacagctaaaagaaaaaggctgctaatcctaatgcaaagcaaaaaggaaagtgtctattgcaacgaaaagggttatggaaacccgagtgtcctaagtttctagcaaggaaacaaagtatttctctttatgctataaactcatgtgttttagagaattattatcccattgggttattaattctagatctaataaccaagttcattttcttattatttcagctcaagctgcttaaacttggattgctatcctagcgagttgagtctgatggttggacagaatggtagattgtccctgtgaagatgaagctcgaaatcttcctaatttttgaattaattgttttaatttatgagcaatttagtttaaattattggtttaggattttaatccctatttcatatttatgcaga

SEQ ID NO: 339709 - DNA, 723 bp, Cannabis indica
gatgtcaatgagagactcttcgaatatgaacctcgcctgaaccagactcagcgagatgatgtgagtatgaccaagtctaatcacattcgtacgattcgtagtatgtaggaccaaggaacggccttagcctgcatatatcaagatatatgcgagtattcccacgaccctcctacgaaaaacatagagatcgattctctatgttgcgagttggtcccaatgacccaacagcctcgataaaccgatatagactcgcatgtctcggttctatcaactcgttatatgatgtccataaaagcgacttcacaaggacgcagacatcctaaactcaactagtctcgaatgcatctcaagcgtgggagcttatgcaagaatatgaacagccaactcgcactaaagaagtcgcatatgttgctgtatttagtgaattaaactggaaactgttcttcatttattatgtttacgttttaagcttaattattgtaaatcaatgtataaaaggattgataatgaatgcagtccttgtgtaaatgataggacacttgctttgtatataaaggagtgatctgccatgaaatagaagagaccgaatctttgcaacagtggactaagcagaccgagatctgtctgaaccactatattcatcttgtgttcattatttttccagtcttttcctaagtatttgtgttcctgatttgaatactcgccattctgggtcgagtactc

SEQ ID NO: 339710 - DNA, 698 bp, Cannabis indica
taggtcttttctttcctttcagtgttattatttttgtgttcttttgggtaatttatagttgtcagtgataattataagttttatttgagttttggtaaagaaaagagtttaatagagaaaatacaagattttgctaaaattttgcaaggaatttgctgcagcaaaagtagcagtgactgaatgttgaaattaatgtagaaaaaatgatgacgtgacaattcattaattgatgtggcaaaaattagctgaggtagcatgaatacatatgaattgtggctaatttatgaggaaatttctagaaaattcataaggtttatgtggaattaattttatgaaatgtatttctatggaaaagagggataatattacctagcctccattacaccatttgggggaacacagtttcatagcagccaccattattgaaaatactaaggaaataaagaaaaaaaagaagaataagaagaaaatgagtgcacaagaaagaaggaagaaggaggagtcatccacattgtttcttctactgctttaatcctttgtattttatttttatacttctttatttcatttgggtattgttctttataatcttcagcatgaactaattttcttgtagttagaacttttaatgaatcttggattgtgaattttattaatgttttataaatatttttggtaataagttttgttcattcaag

SEQ ID NO: 339711 - DNA, 846 bp, Cannabis indica
aagataagaaaaacctaagactggttacagacttgtctttacaaaaatgtcactaggggaaaaccattaagtcattctcctaagcttatgatgagaggagaagccgatgaactcgagaaagactgtcttcatatagcttgaaaaataccgtcttcacatagcttgagaaagactggttacacgtagagagccttagtctctgcacaggcctcattcccctcatcatcaaaagatcccattacctaaagccgagatctattacccagcctcaagaaatttcttaacactagagagaggccgacataaagatctcttggcacaaaatagggtcataagctggttggtttctctgatagaaaccacgccaacttcctccctagatttacctgaaaccataccaatcttcctttggaattctacatcagcctgaggagcatcttcaagatcgctcacaagatcaataccctctaggaacacttgtgaggatcgaccatggcaggtcacggggttcccctggtttagattggtcgatagctcctcagccctggaatccatcgtttccagcctcagttgaggcttaaagtctataggaatgaatgaaaattggttggtgcatctgggttttatgagtctgagaagataaacttctaaactcagaagagacattttagcaggaagaaagtaatccgttctgataatggatttcacaaaagaaacagaggacttatgaaaaatgacaagcatgagccgtccttttatacatgaagttcagtgacaagaaagccaaagattgagaaatctaacggctgggaatcgtgcagaatatgaataggcgattcataatga

SEQ ID NO: 339712 - DNA, 883 bp, Cannabis indica
caaatgtcatagatgtattactgtggtttgatgaaatattgggtctagttacaatgaagagttcttagaatagttcgagtggattttggtcacaaaatagaaaactcataattcatacattaaaatacagttcggatccattgttagaaaatggatattaacaacttgtgaaagttttctgtagtatccaatgtattctggaaactaaaatttaaaatttctatttggaatctaaaatttaaagtcaaagacataaatttataccaaatattcttgagtaattattctagcttggaccatcactactattttaactctaagttcaagtcgccttcagtaagcatatactagtaggaaattctctaagatcgaagatttatatcatttcgggatagacgccactcatttttatagaagaaaataaagtgacatcataagcagataatatataaaccttttgtccaatgttatactatctaagcaatttcttgaaaaagcaaagaggaaaattaaaggataattttgaaaacagataacaatgtctcgtttaggcgagagtcaaagtcattcttattttataaacttcttcattgtttcatattgtaaacactattttaagttatcatctttagggatgattcaactagatgttacatttacaaatacttatctgtcgagatctaacactattatgtttgtctaacggatgacaatcttttggggattgtcctattaaaaataacaaactaagttagacaaacaatgaagactcaaaatttatactacatgactaataacataaaacaattaggttcattataaattcatacagaattcagaaattagcaagcatttaacaagtaataaagacatgtaaaaatac

SEQ ID NO: 339713 - DNA, 563 bp, Cannabis indica
acaaccacattctctggaggtattatcacaggattggtgaaagatagatgcggtctctgggtaggacgaggacacatggtgctgaggcgtagcagatttaaccttgtaaaggcggttaggtcggacttggtgactcgcgaaaccgaatcctcgcatgagaagggctcgtccagttgagtgttgtccactgagtcagtcccgctcccttctacgtcctcctcttcctctgactcgcggtctggagcctcccagtcctcgcccatctcctcaactttgtaattaggagcatgcctggaatgaacaaggtgttcacgagctgacaccgtagactcactatcacgaatctcgatggttcctggttcagcgacctcctgaaccatcctctctatatctgcggaagacaacgggcccagctccgcttctccggcaattggagtctcctcttctgagatcgaggtcgggataagctatcctcctggtcatggtcgccatcgaaagcattgcctcctgtccgacaagtcactcatctgaaagatagaagatcttttcagtgtggtgaatgt

SEQ ID NO: 339714 - DNA, 622 bp, Cannabis indica
gcaaccttttattcgataaaaattagaatctgacattgtcctatttaggtgagagtcaaggtcattcttattttatgagattctactattatttcatactttgtaaaccctactgtgagctttcactattagtgtgatccttactcagaataaaagatttataataatacatatctttcgagattctacggtattaaattgctaatgaatgaatatctattagggatgaatctcattaaaacaagaaccatatagaactaacaatggagatggaatatccttaaactaaagctcattattttcaaattatattttcatttgatatctattttaatctattgattttaatattcatatatgtatttaattaaaattaataattttaaaaaaatctaaaaataaattttagtttaatatttataaaaatataccttaggtagatataaaaataatattttacatcctttgtattaatgttctttaataaatattatgaaaattacttaatttaagtttgcccaaattaatttaaaattaattttcaactcaaatttaatttttcatatatatttataaatttgaaattattatatttattaaaatacatattcgaattttacat

SEQ ID NO: 339715 - DNA, 1143 bp, Cannabis indica
gactaaatttcatcaacgcacggatgaaacctcatcagagcgtgcatcatcaccttctccagatgactagttacttccaggaagctgagaatcatggagctgttatagatcaaacaactcaagtgagtttgatcttaaacagtctgactctagcctttctgcccttcacttcaaactatgtcatgaacaagttggagcttgactttcacgagctaatcaacaaccttcagacatttgaaaatttgattgaaggaccacataaaggaggatctaaagctcctagttctagcaatgctaatggggcagctaaggctgaggcaaacattgcctctacttccaaacccaacaacaagaagaagtggaagaatagcaagaaggctgttcaagctgtgaaaacagttaaaaagaaaaaggctgttaatcccgaagataagccaaaaagaaaatgcttcttttgcaatgaaaatggccactggaaaccccaatgccctataagtttctagcaaagaaacaaggcatttctttctatgctataaactcatgtgttttagagagttattataacattgggttattaattctagaactactaaccatgtttgtttttcttcttatttcagttccagctgcttgaacttggattgctatcctagcgagttcagtcagatggttggacagatgggtggagatagtccaagattgaagatgaagctcgaaatcttttttattataatttttgaataaattgctttaatttaagaacaatttgaatttcagttattggtttgggattttattccctattttttatatattgcagacaattcattttttttggagaatattacaataacgtttctcttttgataatgaattgcatttatgaattatcttgtgtatgcctatactaatcatatttatatgtttataatgtttgtatgtgtttgtgttttacaaattctatggtatattaaactctacaaagagatgataccacataaacacttgagaatttcaattctatgtttatgaataattttaattctgaaacaattattaagattttgttaaataaaaagatcttttaatctgataggggtggaaaaagttaagaataatatgcagttcaacgatcttttatat

SEQ ID NO: 339716 - DNA, 544 bp, Cannabis indica
cagtgcagaaaaggggagacaaattaaaaaaaaaaaaaaaagacttcagattcttttcagctagaaacaaaaacttcacaaggaaaaaataaatgtatgaaaaatatgataaaaattagggataggctacattcaatctaatctaattgaacccaattcaattcaattacaaaaaattaaatatctaattacaattagattgaattgatgttaaagttagattttactcggtttggattattagatgtcattaaaaaaaaaaaaaaaaaccgtccccatccaattatatttatatatattaaaataatatttatatttatttatgtataataaataatatatattttaattatatttttagtgaaatttgtgttaaatttataacatttgattattttgtataattgttttcatgatatgttttttctattttattattggcaaagttattttacttattttaaacttttagttgcattacatagagtattaaatttaaataaaagatgatatttaatttttttttacctatttttctttatat

SEQ ID NO: 339717 - DNA, 920 bp, Cannabis indica
aatcacgtaatacgcctatgttagttagggtgttacaaacttattctaatgtctattcattcttactggagtcaagtgatgctgctacctaaaaaagtgatcaaggaaatagaatatatctacaagtcttttctatggaaagggcaacacatgtttcaagggcatggtgccattgcttgggacagagtgtgccaaagcaagacagctcgaggtattggctttaaaagagtgagagagtggaacatggctgcaatggtgaagtacatttgggctgtagctaaaaaagaagatagcttatgggttaaatgggtgcacacagtctatatcaaagaaaaaaaattggtggtgctattcaattcccatacatgggagctggtactggaggaaattagtggcactgaagaatcaacttagctcttagtggacattcaccaatttgaggcaagtacttatagcatagcaactggttatgctttattttgtcctgttcaggagatattgaggtggagtgaactggtttggggtagatttaatctacctaaacatagtgtcatactctggattgctatgcatggaaaattgagaacaaaagaacgattgcatagattttgcattattgataatgtcgggtgtgttctatgctgcaatcatgaggaatcaaatgagcatttatttttcaattgtagctggacatcacagtcttttacaggtgtggcacactggctgcaatggaggaatttggttcttgacttagcaagtataactaagtggagtaagagggtgcgaatgagtagattcaaaaggaaagtgatggcagctgccattgccagcctagtttacaatatttcgagaagtaggaatgaattgatatggcaaaataaaacccccaatcctgatcaggtggtgattcagattaaaag

SEQ ID NO: 339718 - DNA, 673 bp, Cannabis indica
aaaaatagattaataatttaattaaaaaatcaacaaaaaacaaagcacatatgggcagaatgacctttttccctctcacattaaattgacataaaagggtactaagggtattttgagaaattctaaattcccaactaatctcaacatttccaatctctaacaataccgccccgctatactaaaataccaagatgtgattctactgagccatacatcgcgttccaatgttgccgggcactgaacatgcaaaaatatgaaaattctatatatgacatataaaatgcattctaaattcaaataaatcatcattacttaataattgagaattaataactaatttcataattaaaccttaattatcttctaatttccaaaaaactaagcagtctttacaactatcccccttaaaaggatttcgtcctcgaaatctaacctgaacaactgtgggtattgcgctctcatgtctgattctagctcccaggttgcttcctccaccttactgtttctccagagtacttttaccaaagctattgtcttatttcgtaggactttatcctttctgttaaggatctgtactggtgcaactcaaggttctcataaaaaagtatatgagcagggtcagaaacgtattttctcaacatcgaggcatgaaatacgttgtgaactgctgaaa

SEQ ID NO: 339719 - DNA, 523 bp, Cannabis indica
acaacactaacatgcaccaaaccatgattaaaattatatattcatgcatataaaaactgcagaaactgaactcaaacacaatcaaactttacagcagctattttcaccttttcactttgaaaaaccatagttttgagctaaaaactaccaagcttgaatcaaagcaaacaacatgcatttcaacctatctaatccattcaattcaagcattttaatcatagaaataacaacaacaactaacagcagcaacaacatcaaaaaccatacatgcaatactcatcttttcataattttcaacaaattcaagagggaaagataaaggaaccttaccaacacttagagatcacaaaaaccttgaagaatttagcttgaaacacacaaagaattccccccaaacccagctgctcaaaaccgaaagagagagaaagaaagagagaaagagaggttttgttttcttttccaaatattttctaacttttgaaataaaagaaaatgggcataaacacatatattcagccaacat

SEQ ID NO: 339720 - DNA, 632 bp, Cannabis indica
gtgttgatcaccctgcacgactcgttgaatattctttctggatgtgccacgaggcgtcctgctcggctcatcgttctgagcagatgctccaagtggagtccacgtgtcaccattctcgtgatgccacgtcagagtgccaaatttgggataacattttcccccaagtctgcacaggctctaaggttgcgcgtagacttattccgagctggctttgcctttggatggggacacgtgtcgagcaaccttagagcctgggcgtgtggacacgtgtcgagcaaccgttcgagagtcgatgtgaagctgactgggcgtccctttggttttcggctaattaatgctttgacaattaatattttggaaatttgaatttcactctccatggctgacggttgcactcgattacttttgatttcccatattcgcttttgaggcaggaagttgaggcgtctaaggttcctttgtatacagttacccttttgcctataaatactcattgtactggcacataactcattttatcacgcttcgttgtttagtaaactcaagagcaaaaatatagagttttctggcttcagagttgccgaagtgcctacagacgattactggtttgctcgaactcagacattcgaatc

SEQ ID NO: 339721 - DNA, 636 bp, Cannabis indica
atatataatatgtggataggcaattgtagaaaagtaaaaaataaaaaataaaaaacagtacacatatatagtatagaaaaaaaaacagtaaaaatgtaatatttcccttacaacagtaaaattgaaataaaatagaaaaaaacagtatgtagtgtaaatttccctagatatatatatacatcaaaatttctatttattttcccatatttttgtaaatatcccataaaaatatgagaaaaataaattttttgatatatatatatggcatgcaaactaaattgtatcaaatatgatatttttttaaagaataattagcaatttttccccctgaactttcgacaatattgattttggcccttaaaatatatagcttgttaagaatccccattgaacttttacacatacagaaatttagtccttttgttaggttccgtctcattattccgtttaaatgctgacatgtctttttaaattagcaactttgtcccctaaactttgacaactatcaaattgtacaccctcagaataaaaatgaaaaaaattcaacattttttttagtaaatctcaaaaaattaacgtagatcttaagaaaatgttattttgaatgattaagaaatttaaaaaataaattaaatt

SEQ ID NO: 339722 - DNA, 537 bp, Cannabis indica
aaaatataaagttagctatataacagagtaaatatgtacataaaaaaaagcctaacaagtaatctataaaaaatattaactacataaacaaacattatcacaagtaagctattgaagtaagttaccaattaattaggcactattttttttttttttatttatgctttcctgaatcacaattaacccatattcccttattgatatcgtttctttgtacatgaattggttgcccaacaatgaagtcatcataacataaatcaacattctcctcaccttcttcattttctaagaacctcctctctggtgtcgataaaataacagatcatttatcattagccagatcagaaatataaaaaacttgaactgcttggctagccatgatgaatggatcattcttgctttctctcttacttaaatcaaccaaaataaaaccaagctcgtcagtttttactccaacattgttgtcaacccaagaacatttaaaaagtggaattcagaatgcaaaataattgagctcccatattttttcaataaccc

SEQ ID NO: 339723 - DNA, 793 bp, Cannabis indica
tttagaattaaaaattattcacaaacatagaaaataatttcttagtgtttatgtagtattaactctatgaagagtttaaaatactatagaatttgtatcaataataaaaaatgcatacacatacaaacatattaatataattggtaattgttacataagataaagaagataaagctcaattcataaattgcaatttattttaaaaatagaaagctttattaaaaatctttaaaaaaaaatgtttgcaataatatgaaagaaaatagggattaaaatcccaaactaataattgaaatccaaattgctctaaaactgaaacaattaattcaaaaataaaaaaaaaacgagcttcatctttatcttggacgaactccacccctttgtccagctttccaattcaactcgatatgatagcacctgagttcaagcagcttggactgtaataagaagaaaaataaatagacaatgttagtagtccagaattaataatccaaatggataataatttactaaactcattagtttataataaaagaaataccttgtttctttgcaagaagtttaggacattgaggtttccaatggcctttctcattgtagtagaaacacattccttttagtgtatcaccaggagcagcagccttcttgcttttaactgttttcacagcttgagctcgcttcttagtatttttccacttcttctttgtcttgggtctggaagtagaggcaacgtgtgcctcggctttaatcgtcccattaccatttccagaggtttactccctttcttcttggg

SEQ ID NO: 339724 - DNA, 571 bp, Cannabis indica
gtctgaatgtgcatatatataaacgtgaatgtgaaagtatatatttgattaaaattatatggatataaatttatataatatatatacataagttttaaatcataaatcaaaacccaatcgatccaaccgatgtactgtttatatataaatatttatatatatgaatgaacatgaatatatatataaaaataaattgactatgattatatatataatcgggattatataatatgaaagtatatatataaaaaatatatacaatttatattataaatgaagaaccccatatgtatatatatatataaacaaacgaaactcaaaataaatcaaggcagagatatataatccgctctgatacaaactgttagacatttatatgtcaaaagtgaagcatatattttatgtataaaatgcggaatcaaatcaaacatatatacactatgaataaggatcgaaatacctccagccattgaatttttgagcttcaatcccacacaagctttgatttgcgaaggaaactgattgatgtgggtaatcgagcttcctcgctctctcaactctcttagatgga

SEQ ID NO: 339725 - DNA, 677 bp, Cannabis indica
aaaataattgagctcccatattttttcaataaccctataatacgtcatagttcctaaaacatggtttctatcttttgcacttgcaaaatgcatggtttctgcaacgatatgtatgccactattttgaacctcttgagcatcatctctagactttgtatggaaatatttatcccttacaatgtacgcttcatgctttgctaccgcaaaagttagtccaagggcaatacgactcaacacatcagatactccaattcggctcgtttaactttgctataatagtattccttaaccacccaatgaaagtttgacgatgctggtctgcaacccatttctatttatttttatgatttcttggaaccattgattgtaacatctccatatggtcactacaaaacatgtaaggtaaattaagttattgttcatcgtgactttagaaatgttaatcaaaggaaaagctactgacgttgtatatggctaaacctctgcattattgttcatcacgactaattgagcttgatctagttcaaacttgcacactggcaccattctccctttcccccttaatcctctatcaacctcatctgggtcagttgttggtttgctaattcctattgcctcaactccagccatgtactctgaacaaaattccacagcctcttcagatatgtagcactcaa

SEQ ID NO: 339726 - DNA, 911 bp, Cannabis indica
atttctattaatagttttatctattttaggaatatagagaataacaaaataggaaatattaattttttaaatttaattaatgattataaatattaaccattagatatttgatctaatggtcaagaataaaatacccatacatgggtaatacccattaagagcatacccatatatgtatattaacaaatatatattatatgtatatgagatatgtaacgtatgtatttatgaatttaatattgatattatgtgcatgttacacatatgagatgttgttttgtaacatatatattatattagggtaaatagcagcataagtacccaatgtttgtaaaactgtaattttcttttagtgacaaaattgtaactagagattggtccttttagtgaccggccactctagtgaattttcgtccaatattttattcttttttaatccatataattcaaacctaagccctagttgaaacattataaaaggaacatgatgctctcatctcatccaactaaactattgccttcaaccaaatcaaatctagttttcatactcagacgacgagtagatgagagacaccttctatagtgattcaaaccctccttcattgttattcatccaattcgcccatagtgatagattgccatgcccacacatagtaagtcaagtactcaatcatagtgcggaagatggtggtaaccaaacccgaaggagaaaaagagatccaagttcagatcttgataatgctcagcgatagaaaggaatcaagggctagagatctgaacaaaaagagtcataatattccactacaatcaatgtaaggttttataaactcttatatgtttgattttatcgtattaaagatattcatatttaggatgttagttcaacatatatggtagtaaatctagatctt

SEQ ID NO: 339727 - DNA, 971 bp, Cannabis indica
tcctagttaactcggataacggcattgcaatcttggaaaaaccttccacaaaacgtcgataataacccgccaaaccgagaaaacttcaaatttcagtgactgttttgggtttaggccaattcttcactgcctcaatcttccctggatcaatcataatcccatcttttccaacaatatgccccagaaaggatacttgtgacagccaaaactcacactttttgaacttctcatagagtttatgatctttgagtcgttgtagaaccattcgaagatgctgttcatgttctacttctgaccgagagtacacaagaatatcatcgataaatacaattacagaattatcgagaaaatcctagaatactctattcatgagatccataaaggctaccggagcatttgttaacccgaatgacataaccaggaactcgtaatgaccatacctggtttggaaggttgtcttcggaatatcctcttctcgaattctcagctaatgatatccagacctcaagtcaatcttagagaataccgtcttgccctgaagttgatcaaacagatcatcaattctaggcaaaggatatttgtttttaatggttaacttattcagctctcgataatcgatacacatccaaagcgtcccatccttcaaatagaaccggagctccccaaggtgacacactaggtcgggtgaatcctagatccaacatcccttggagttgaattttcagttcttttaattcagcaggggccatatggtagggtgcttttgaagcaggttctgctccaggaattaaatcaataataaaatctatttcacgctgaggtggcaaccctggtaattcccaaaaaaacacatccaggaattcctttaccactttaacctcttcaggtccaagtaacacatccactacaaccgctaggaaccccacacacccactgcgtaataaatccctagctttcaacactgagattct

SEQ ID NO: 339728 - DNA, 825 bp, Cannabis indica
cactatcgggctcaaacaccaccatcttccacttacagtcgatcgttgccctatagttggagagaaaatccattccgaggattatatcaaaatcagacagttacaattctattagattggtggttaattcacaatcatcaatccagaaagacaaggatcgaatccacctagtggatactataaggtctctcaatggtaacagggtaccaaaccctgaagtatatatatcacatggtttatggaatctttcaattactctactcgacatgtaggaatgagtagctcccgagtcaaacaatacaaaataagaacaatcatttatagataactgacttgtcaccactaacggattagcatctgtatagtcaaacaatacagaataagaacaatcatggtaaaaagtcgtctcgggttctgagtagtattcttcttaggctcctccttcttggcctgaggacaatctctgatgaagtggcccaccatgccacactgaaaacaagtcttggcctgacattcaccctaatggtgtttcttgcatttcgaacactctggatcagatcgaaatgaagatccgcgaccatgacggccacctctgtttcctcaaaactttctgttatcccctgatgttctggaagcatcagccttccgtttgtgattagggttaccactgtcggtccccttattgacattaccactagcaggaagattcgatgccatggcgacatcctttgcagtctgctcttttattacacgctactcaacctcttcaccaatcaaggctagctgtaccactttcttgtacaaagtttcatgtgaagtggtaat

SEQ ID NO: 339729 - DNA, 706 bp, Cannabis indica
aacctagtttcttgtttcttttgttgttactgttcatcttccctttcagatcgaaaatggtgagaactaagaatctagggcatactaaaaagttggtggaaaccgttgcaactccttccaatgcaccccctgctgcttcatccatgcctcctgctgctgcaaagtcaggagattcatcgcttccccagcgtgaatctcaacccgagaagccaaaacgcatccccaagaaagtggctcgcaaatctgtgcgaccttatcgaacctggtcttcttcgtctgaatcttcgaaggaatctcctccacctttggcagtccctcctcgtgctgcattagttcctgccaccactccaaccgatccttctactcgaactcgagcccagcaagcctctgctgagaaggaacttcgagcttctcgaagtcgtgataagacagtgcctccagccaagaagaagcttaagtccaatcctccttcggtttcttcaagttcagaagaagaagatccaatggaagtctcctttgacaaatcagtttctctccattccgagaaggagaatccagaggacatgggagtttcatcagacagtgaggacactaaagtcgagccagagcctcaattgacaaaatctgctcctgtagcaaaggcttctgctgctgccaaaggcaagcatccaatgaaagagccttctcctggtaatgttccttcaac

SEQ ID NO: 339730 - DNA, 554 bp, Cannabis indica
cgtttgggtttgattagaccaagttatgagggttggaagattggaaattgtcgtgtttttctgcgcagacaaccaaaattttggttggtttaggactgcaccaaccgggattttggttggactgcatcgagaaaggccgattttagtattttggccataacattttactcaggtgtccgttttagacgttctatataccattttaaagcttatgacgagctctacgatatcatatataaattcgagccaaattatgtattttattttagggtgtctccaccacatagtttggtagaaaaactctaggttcttttcagacattagaaaagtgttctagagtaaacacttatcagttgtacgtatgttagacttatgggcctgtaaatcgtcgagcagtagttttcactcagagttaccgacatacttgcattcaaaattaaggtaatattagtataacagtttcatatatgtatacatgtttagcgtacatgttagttgttgtcagaataacatatcaggatttcagtgaggtgtacatagagctgcaccgagat

SEQ ID NO: 339731 - DNA, 961 bp, Cannabis indica
taaaataatttccaacatgtggttggtggagaaacaagtggaggtgttggaacagaagtaatgtgatcacacatggcagcaagtggagcagaggccttgggagcttgtggagcagaggccctagaagttggtggagcagaggcccctacagcaggtgttgctcctagaactgaggtaacagcagcaaaagctggttctttagatgctcccccaacacctgaaccagatgcatgtgaggtgcccgcaacaccacggaggagttgctttaataattcgtcttgtctacgaccatgttcctctgactcttcaagtcgcttctccacctcactcatacgatcattgtcatcgactctctttcttttaggacgcggggttttgaaaaactgtgtctgtgtgacaccaccccccattcctctaacacgtcctccatgctcttctgttcccaaggctagagtgagtatgtcttttgagccttctactaatattgtcccctcctcaacttgctttcgtatctcagcctacattcaagaaagtaaaatttgtaagaatttgaacaacataaaagtgtttaagtatttgatcaagcacatatatgataaatggaacttacaatccggtcagcgacctcctgagcagggccatcgagctcgccgtttttgttcgtgtgtattctaatccacaagtctgccctgtcatatatagtaagctggtggcccaactctttctccaacttttcttcaactttcttaacaccacctcggcccgcatggtgattgtatgtattttgactcctgatatcttgcattttctttctcttttttgcccattcaggactacatcttttggcaacaaattctttccaatcttcgggcttgtaacatgaagcataagcatctggaggacgatcgagcattgctggaactttatctttgtatttgaaaattaggttccttgttaggaa

SEQ ID NO: 339732 - DNA, 759 bp, Cannabis indica
ggcgccttatttgagcatgaaggcaggtttgggtggggttgtgtggctcgcgactgccatggtaatatcgtggaggctttcaatcggggtcatttagggagggttcaacctgaagttgttgagatggttggcattaaggaagcattaagttagattgatcgtcacaattggggacaagtaattttagaatcagacagcttggtcatacaagctattcaaagtaaaatctctatgtcaacttcattttggttttttagtgcttgatgttcgtgcgttgcttttatctttagacaatgttgaattgcgttttgtcaaacgatctgcaaacaagctggctcactgtttagccagagattcttgtttctctctaggtcgtgtgcttcagttggaagattgttcctctgaagttcattctattatttttaacgatttgattagttaattaagatgccgatttgagtcaaaaaaaataataataataatcaaacaatatgaaaaaaatgacatataaataacaaaagatcagcaataaattaataagtgtataacataaaaatatatcaaatactgtatttttttgtaaataatatcataaaaatcttaaaatatttaaaattccgtgcaacactatttttattatttttgtgtatttgtgaaataatcatttacttttcaacttctctacggtaaaataaagaaaagagttacagtagaacctctattcaagaatacacttgggaccaagtaaattatattcta

SEQ ID NO: 339733 - DNA, 588 bp, Cannabis indica
ttccatgaaaaagaacaaagtatgggaatatgtagacacacatgatgattatcatccaattggatgtaaatgggtctacaagaagaaaacagttgctggtggcgaagtcaaaacttttaaagctagactagtcgctaaaggttataggcaaagtgaaggtgtggactatgaggatacttttagtcccgtcaccatgctcaaatccatcagaattcttctccatagctaatgtttttgaatatgaaatttggcaaatggatgtcaagacagctttccttaatggaattcttgaaaaaaccatctatatggagcaaccagaaggctatgttgttccaaggcaggaaaagaaattttgcaaacttaataggtccatatatggacttaagcaaacttctcgctcatggaacaaaagttttgatgaaataatcaagacctacagctttaaccaaaacgatgatcaaccttgtgtttaccaactcaaggatagtcaagtggtagtattcatggtcctttatgttgatgacattttgattattggtaacaaaattaaaaaaaatgattgacatcaaggaatggcttgacactcaa

SEQ ID NO: 339734 - DNA, 643 bp, Cannabis indica
aaaaaaaaaagaagggagagagtacaaagaataaaagaagaagattaagaagaaggggaagaaggcaacctctaaagagaagatttgagcttaacaactcatttctcttgctctcctattccattttctatcattttctactctttgttattctccttagcacaatgaacttgttattttctggttttaagttcttaatttcagttatgaactaaaatctttgagatttgggtggttatgaacccttgtatgaactagtgctttgatttgctatgattgagtagtcttatctttgttcaattagatgtgataaaatgttgattgaatgttaatttgtggccaactttaaaatttagtatgctagatcttacttggaaaagtaagacctagttgaacccatctaactgatgcataatttttacctctattttaggcattaattagtagtgaaataggcatattttgctagcatgattaactaaagatttggtgttatattggtctatttgtgatctgatttggtgtaggaatgcattgttgaaattatgaatggtatattgtaagttttggaaaaagcttgctggtttttctttaaatctcttaactctgccaggattgctgagtcattgctgggtcattgctg

SEQ ID NO: 339735 - DNA, 585 bp, Cannabis indica
tggccgggaatttagaatttcccaaaatacccctttagtgttatttatgttattttagtgtggaggggcaaattggtctttttgccccattattattttgtcttctagtgattttaatagttgaattatatgtttattttattatgttttggctgaagtaaaataggagtaagtgacatttaattcattttcatttcaaaaatcaaagttagaaaagaaaaatagaaatttcaaaactctctctctcttttcctctctctttcggcctcttggtgcagcaagggacttgggatttttccttgtgatttcatccctctttggtgttcaattcaagctaggttagcttctaagcaattcctctttaagtttgttgaatttttgatgaaaatggtgtattgcatgcatgataaatggatgttgttgctgctgtattttgttgatattttcagagatttaagcatgttaaattaaggatatttgagctgttagtgatgcataatagttaggttgcttgagttatggtttttcttgttaaaaagcttgagttttcaaagtgaaattgggtgaattgttgctgtagttgtt

SEQ ID NO: 339736 - DNA, 911 bp, Cannabis indica
tacccctaaataaataaataaatggttatttttttcaaagaaaaaacaaatattactggtctgttatttcccattgagaacagtgactagaaaaaaaaaaacatataattatataactcttgtttgtttttaactaaaaccataatcaaatattactggtttttttttggtaaatagtgacataaatatctaaaattttgagttggtaaatgacaaaaattcaatgatctttttaacgtcataagtattcaaatgacttaaacagaatacagataagacccgaaatctatattattagatttgaacaaaaatatatagtgtcggttacttctaaatcttttatatcacttacaaatttaaaatttttaagtacttatatcacaatttacctgtaatttttttaagttaaaaattataatataagtctattgtggaaaaatttttagtttatttttttataataaaatttacaaataattttaaatagttacaataaaagtcattataaaagaaattaaagtaaaattttgttaaagatgcaggagattacttctttaaagtggtgtagtatgatgataagagtcttgtctctctttcttttagatacaaacatgttagagaggtctctttcttggtggcttggacacggttttattagttttgaacactacaatttcagccaaaccattggaatttttaggcctaaaagtcaaatcatcataacaccaaataagaatataaatatttttcagtcatttaaatctaaaaagtttaacccaatttaggtcccactattgaaaatgcttgatgaattgtaatccattaccccaaatggggtaagttgaaaaatgcctcttttattcatcaattaattaaatttacctctaattttatatttatttgaaacatac

SEQ ID NO: 339737 - DNA, 530 bp, Cannabis indica
tcgcgcttttcttccagaaggtcgaggtgaagcgactgtttctcatcgttctgtgcaatgttaaaaacatctcttcgtagggaacctgccccaacctcgactggtatcatggcctcgcatccataggagagcgagaaaggagtctcaccagtcgtggatcggggggtcatattgtatgaccataaaacttgtggaagctcttctggccatacccccttacgctcttcaagttttccttcgatggtgtgtttgattatcttgttgactgcttcagtttgcctgttactctgcgggtaggtgactactgagaacgcctttttaatccctaactcatcgcacaattgtcgcatctccttacaatcaaattgctttctgttatctgaaatgagcttgtaagggatgccaaatcgacagattatggagttatagataaacgcgcgcagtttagctactatgatggttgctagtgcttttgcttcggcccattttgtaaagtagtcgaccgcaactacagcgtatttgactccgcc

SEQ ID NO: 339738 - DNA, 1171 bp, Cannabis indica
catttacttacatttctctttttccaaaggtaatagaatatagtgttcatatgctaaaacaaaacaataaaggaacacaacatagaaagttaaaaaatatttaaaaaacttaaatacagtaattaaactagaaaaataaagataaaacaactggaaaaacaactatttaaatttttaaaagaaaacagaaactttaccgagtcattgataaacatgtcacatgtagccaaatgataaaaccaggttttatcttcaacataatcaacacttaatctaaaccctgggaaaaatttcttcgcaccatccacataacaattgtaatgcctaaaacaacaaacgaacaacaaaaaaacaatattgaaatcaagtacttgcaaaaataacaataaaattcaaacaaaaaacagaatacaaaaatagaaagaataaaatagtcacctaagatgttttagcaaaccttcaccaacccaagcatcaaactttgcctcaatttcaggagagacgggatcagcaaatgaatcgtaaagaacgtaaaggcccttcacataagtaaccatcttaaaatccctctcatctcctcctgattgagaacctgatgacattacctccattggagtgctcctcacatcagccgacccaaaatcaacaaaaggcgatttcaatgtcggtgcacgctttctttatccaaaaaaggagtatcagaaacagtgtcctcagcttcttcatcagaaggaatggcagctgtcttttcgatagcaacacttggattggattctaggacctgaaaaaattaaattggaaaatcaggaaaagaaaaagttgcaaaacaaacataaaactgtcaagcaactaaaataaaacatattttactagcaaacaaattaagctacacttacattgattttacgaacagcctctaaaccagccaacacaacttggtcatcatcaatttcaagctcgcttaaaccatcgaaaaaatcatccccctttaaactagactctttggccttaacgttctcaacatccttagccctctcttcactacctgcaacagtcttagattgattcacatcagcagcaggaacatcactaacaaccttatcaactccagcagcatcaccaccatctttacccaactcatcaccatcatcggagtcggaatcaatattct

SEQ ID NO: 339739 - DNA, 974 bp, Cannabis indica
aattattaatgattagtggagtttcgatatcttaaatattcaaccatagtgaagtaggttttgcaaatatatgtgttgcggtgggatagatgaataaacaactggtatatttctgttgcaaataatggctgtaattgaataccccaaactgtaattacagccattatgctgccgaaattttggtagaattaggatcaaatttaatatataatggtgtattttgtatagggtccactcgctcaaccaccatcaagacgggatgtatcgaaggggaaaggtcccatgccttctccacaaggcggtgctaatgaagaagatgaattattctcaccaaaagtcatggctttaatccctaacttactaaaattgatgattgctgaatttctaagactcaaagatatacgtgatagaatcacaattatggtgccccaaggattcatagcaccgcgtctccagatcacgttatttggaaaggatttgcagcaggtggtattttgtgacttcatcggcaaccaaggaatgctgtttggaattatgtatactcttctttaatctaattaaccgtatataccaaattctagtgaaattattataagacactaatacttaacaatttaatgcaggggcatctgggagagcataaacgatttgagaaaatttttcaagttttacaaactagagcttctcacagtgaatggtatcaacgatgaagagaagagtcagtcttttgacaattcggaaaaatgattggctgcttggttaacatcgatgaataacaaccacctaatgttctttattccctgaaatatagggtaaatactctttaattttttaatgctaattggtcatttctatattataacttgaaattatttttatactatcttacttatatctcaatataattttttagtgtgcattggatgctagaggtcgttgcgccaaggaaaattatccatttagactctatacgt

SEQ ID NO: 339740 - DNA, 509 bp, Cannabis indica
aagctatagaaagttggcaggaaagatataaggctgaaagtttaagaagaaaacgtaaaaataagtataaatttttggaaaattctataatttaatggaccgatacgtctctatttattttaaataatttcttagtcaatttttttatcatgttatgtaaattatagttatttaagacattctgtaaaatttaaaaaaattcaaaaacgtttaacacgttgaaaactacattcaaacagtatgttgcatgcgtgattattttattttatacgtgtatgaaatatagtgtttgaatattattttttatattgtaaattattttaaaatttctctaaattttataagatatcttcaatagctgtacatgaatgaaaaaaaaattagactaaaaaattcttttgaatgccgaaataaatagatgtgcatcagtacatctctcctaaaataaggcattctagaatcactctatattttataaaaaaaaataaaaaaaactaaaaaaagtaaaa

SEQ ID NO: 339741 - DNA, 714 bp, Cannabis indica
ttagcaaagctggcctcgagaaagacctggatgaattaaatctagttgtggtagaattgttgagcgagccaagtatatgtgaagctgaagacatcgagatgatatatagctctccaacatggatgacgcctattatcaactatttactcgacgggcagcttccaaatgacaaaaccgaggcacgaaaactattgtatacagtgcctcactacacaatgatcaaaggaaaattatatagaagagggtattcaatgcccctacttcggtgtgttcctctcgcagaagcaaacaaaatcattagagaaattcatgaaggcttctgtggggatcatgcgggttggcaaagtctgtctaaaaggatcattagacaaggatattactgttggattatgttttaccaggatctagatttactaccatgtatgttatttaacatcctaaatatgaatctataaaacaatgtaatttaaacacatataaagtttgagaaaccttacattgggtacagcggaattaaatcactcattccgctcagatgtctaacccttgtatccaatttatagcagagtatcacaaagatctgagcctgattctccttttcttgaactagattcttcacagccttacacactatgattgagtaccacttgatgtgtgtgggcacttactctataactataggatttgaaatattgatgagagaaagagagagga

SEQ ID NO: 339742 - DNA, 1041 bp, Cannabis indica
tcgcatttctttgcgaagttgaaagcgtcttgccgcagggtaggccagtaatacccttgccgcatgatttttaaggcaagagaattaccaccagtgtgattcccgcagatacccccatgtacctcgcggagtatatagtcgtaatcctccccatcaatgcatttaagtagcggctgactgaagcttctgcgatataatcttccatcatagatgacatatcgggcagcccgctgtcgcagttttctcgcttctattttgtcatcgggcaagatacccttttccaggtaggctattattggagtcatccaagtaacttctctggcaacatctatttccatcacttcttcccgactcaccgtcgggtgagccaacacgtcaacaggaatcacatcgagcaattcagcttctctagttgaggccaagcaggccaatgcgtctgcgtgtgagttatgagcacgcggtactcgggatacaactactttcttgaatttttgcaacaactcacatactatggcgaggtacttagccaaacgcccgcctctggccagatattctccgtttacctggcatacgatgatttgggagtcgctaaaagcctgtaagtattctatcttcatttcgagggcgagctttaatcctgcgatcaaagcctcatactcggcttcattgttagatgcagaaaactcaaaacgtaaagcagtgtgtaccttaaaattgttaggactgataagtatgattccaccaccggaaccttcgctattagaagccccatcgacgtacaacgtccatccttctccattcagtacagcagtgtcaattttttcttctacgagtgccacttcagtacttgggaactcaagaatgaaatctaccaaggcctgccccttgatcgcagatctcagtttgtacctgatgtcgaactggcttagctctactgaccatttcaacaatcttctgatgcctctggctttgctaagacttgcctcaaagggtagtttgttaaaaacttcaatgctatgggcctgaaaaataaggtcgcag

SEQ ID NO: 339743 - DNA, 715 bp, Cannabis indica
taattttcttcgagcttggctaaatagagataaatgatagagtgctcattttagtgattatatttgttcactgaaatatcatttataggttgctaagtgttttaaggataaaatacactgaagggtgtaacggtaaattaatccctatgcaatgtaaatcatctatagaggatcattgattattgggattataacaatggataactaatagtgtatctatatcgcggaacataaagagcgttctatttaactgagagtgcaattccaagttctatagtggtgcaatgaggaattaataagttagaaaagttacttggtaaattctagatctgcttattagaagctcgttggctagtttgtatacacgcttgggacggatgcaccatgttggaaagagacagaggtctagtgtattctactagtttgatggcttgttttgagggcctgccaacatgcgtggaggcatggcgccttggggattggtccatggacgtatgggagtccttgggcgacgaaggagactattcagacaatatcgaatggggcatgatagaagcgttggcacgtcagcttggtgttggcatcttgccacacttgctaccttagtcacgagtgacaaggtgcgcgtcggtgttgggatttgccttatcatggtgggaacctatggacagtgcgagtatcttggctagagagtcttgatgcatggatgcactca

SEQ ID NO: 339744 - DNA, 1089 bp, Cannabis indica
ctttaaatttgttatatcttaatatacaatgcctactagttctctctctctactagcgttttttttcctcttcttcctaaagtctcttctagggtttcttatgcacccttgggcgccaccggccagatctcggccggtggcgcccgggagtcctgctctcggcgtgctacacgtggtggaggatgtcccctcctggtgggtttcggtgttggcgggtcaagtgggtgttgggcgttgctcttggggactggttccatggcacctattttctcaggtgaccgaccgccgctatttaggcggtttttctctgctgagatggttatcgccgccggtcagaggctcttggtggttccatccttttgggcagcgtggtggcgctgttgatggacttctttgggctcccaccattttgtctttgaggtttttggttggttgggtccttctcaggcaggtgttttggctttggagtgttgtttttcttcctattttttcaagtcacaatgtttccttgtgggtttctattcaggcgtcctggctccagtgcacattggttgttgtttagctttcggagtgttgtaaatgtagagggggggatgcgggtcttacccaaagggatgtgcttcccttttcctagcaccttcaccgttcagaaccgctatgggagactgagtgtggactttccttgttggaagttggcagcaactctttgtcttttgcatgtttgttttgggctctctagcagcctcctctgcattttgggattgttctttgaagttcttctatgttatttgcttctttgttttgtgtattttagtttaattagtctttttgatgttgttcaccttttgttttcggtggcgttagtcttagactattttggggtttatccctctaaatgttcctgtgtgagccttgagctttttgctccttccatcattggtgtggttagccaatatttgtgccatctccttgtgaggttatgcggttcgtccgctgggcatgtagggcttcggcccctttcttaaccttgaataaagttctattttttttaaaaaaaaaaatgttatatcttaattctattaaaaaaaa

SEQ ID NO: 339745 - DNA, 882 bp, Cannabis indica
tatatattttaaggtcttaaatttacatagaaaagtaatttaattaaatttatttttaaaataataattatactaatagaaaattataataatcaatataagtgttgacctcgcttttagccaacgacagtgactttaatttttttaagcgacaagtagtttattacgacagaaatatagtaaagcaatttaaagacacaagaattttatagaggtttagccccgagcagtttggtaatagcttaatcatcgttatttttatagacttaagaacaaggagaatagttccttttcttagagctcttacaagagtatctctgaatatgaattgttagacataatatctagaccctttgcccagtgaacatgagtaactatttatagggctataagcttggaggggaagtatttcccttctgtatacaattgctataagcagaaagattgcatagtaaatacagaatacaccaatcgtgggattgggacatcttgccatatctctgtaatctgatcccaaagttataggaatttccttgatgactcacgatgcaaaaactgaattcgctaagtgtttgtcgttctacgcaggttgcttactgcatcgtctaagctagcatatgaggtgtcctgttcggcttgtgtctcggaagcagatacccagagtcgattccacatgtcaccatcgagtgatgccatattagagtgcaaaaattgggataacatttgcccccaagtatgtacaggactttcaaagttgcgtgtagacttcatctgagctgtctttgcattttgatggatgacacatgtcaggcgcacttgtttgcgatttgatgtgaggctgactaggcgtctcttcggttttcaactaataaatgctctaac

SEQ ID NO: 339746 - DNA, 559 bp, Cannabis indica
tggaagacaaacttttagctttattttattttttgatttgaatatgagctaaactttttgaggcttcaatggctatgaactcctatgttgggtatgattaatttttaggtttttttagcatctttgcctttgttcactcaagtgagcttgtcattttatttgattattatttcttggccatgagtaacaatttgttaagctagatcttgttccggaagggctagatctagtagttaaacttggatgaagcaagagaaatcttagatttagctttttctttgtaagtggaataggaatatttcatttaccttgcataacttaagaattgatgtttaattggtgttttgcaatctggtttgatattagaatatgtgaatctagatggtagagcttaaattgtgagttttaaaaaaattctcataaacacataaaaaattatgttatctctgtgcaaatgctaaagtaatgctatagtaactgggaaaaacctaactggggggattagttattcaagccactttttaccatattacatttcttgcaagtaattttctagcaa

SEQ ID NO: 339747 - DNA, 472 bp, Cannabis indica
attacattttttttatcttgcaagcaatttttctagcagcagtagtattaattttagcaagtttaattcatgtcatttttaattttgaatcattactcaaccatttgcatgttatttcctctcactttaagttttaattagttgattttacatcgaactttgtttgcaatccctatggagatgatcgtacttatcactttattacttgtttgactgcatatacttgcgtatataattttcacaacaagtttttggcgctgttgctggggattgaaactaaaaattgtatattatcaattattttgtaatttattttcttattaacaacacatttcttattgtcagattgaacttgcatatctttatgagtgacatcattttgtagtaaagacctttaaatatgtgtctaagtcaagtttcaataaaagtttggaacataaatgtctttgctaattataaaacaaagccacta

SEQ ID NO: 339748 - DNA, 504 bp, Cannabis indica
tttttggctaatgtttttgtttgcttcctttcactcattcaagcattgtatgtagaattaatattgtaaatgttgggattaaaatcacttaacctctcaagtcagtatgtctatctatttgctcatcagatgaatctgaagaaacctgctacaatttataacagttggctttaataccaacttaaaggggactcaccagcaactatatataaaggttatttcagaggtctgaggggagagttctgatctctattctccaatgctcatactttagatttagtttagagagagagtccaaaatcatagtgagtgtgtgtggagggatgtaaaaagagagaagtgattttcctcaatgtgaggcctttcttttaattacttactatgctaagttgtaatcttgggctcattctattgtgtactactggctattcctattcaatgaagatccattattgaattaagttttctttttcttatttcaattaagtttaagttttgattttg

SEQ ID NO: 339749 - DNA, 843 bp, Cannabis indica
ttttttttttttttgttattgggcaatttacactaatatatacattatataattttattacaatacacgtgcataataatttaggtgaaatttaagagtattcataaaatgagaaatttaagagtattcataaaatagctgattcagtcgaatccaatttaatccgcaaaatgtggatattcgcactttgattggatgggattggaaaattcaaaattcgtatttgtgcagattgaatattgatttatatgtaaaagtaactgattcaattaatccaaacgtatttataaaaaaaaaattaaatatacaattaattttaatgtaaagaaaatagtaatttaaattttttattttttttttgataaatcagtaagttgtattgcataaattagtaagttgtacatcctaaaaacacctcaaatagaggccctaaaaatcatctctatttacaaattggataaaccagtattgttatgcacaatttcttttacaaagattggatccattctttgtcctgcctgctgattttttgagggtgaaacattgttaatctcatcttcaacttctcttttatctcttcatttactcgacctgttactgcctgttctcctttccaaataccagtatttcttgctgtccaaagttgataaaccagagaggttgttgcagcagccagaatttgcttttacccttactgattttcgattttccaatccacctgtagatgtgaggcaagctctcacttcttacattccatcccaaccattccttaagtccgtggaggcattcctctgcaaacttgcactcaaaaaatagatgttgagtcgtttctttcccatcctg

SEQ ID NO: 339750 - DNA, 743 bp, Cannabis indica
agacccaaactgagactggaactccggcccaaacacagtcgtgtacccagaccggaactgagacgtggacctagacctaaatctaggacccaatcccaaacacagacatagaactagatagggatccggatacgaacctagacttagaccaagacccagaccaggatagaaatgttgcacctagatctggacggagatcgtgacccagaccaaaacttggacccacactcgggaccgaaacttggacctggacccgaacctagacccagatcggggtccagaccttgacacaaacccagccacagactcggacccaaactcaaacacccacacctagaatcagacccaaaccaagaccgggacttggacccaaactagaaccctgacacggattagaaccaaggacttagaaccagaattgaatccagaatcagattgggattggaacttgggactcggacccaacctagaccgaggccacggatgcgaacccacacccagaccctgatctggacctacactaaaatctggacccgaaccctaactcagactaggactcgaactccgacccaaacacaaacccaaactcgaactaagaatcgcatgaggaactacaacttaactaggactaggacaaggaccaggacctaaacccaaacccgaacctagatcaaaaccaagacagagacctaaaccccaaccgagactaggactcaaacccgaacctagaccgggacccaaac

SEQ ID NO: 339751 - DNA, 1228 bp, Cannabis indica
taaagtatgggtgcaaaggcaacaatgccccttgcttgacatgagcacctgaccaggcatacatcccccttttagggtttgtggctcgattgttgtgagcgggaatataacaatctaactcgcccaggtagccgtcatggtcgagatcccgtaagcgtgcctcggtaaccttggacggagggctcacccacctagcacctagagaaccttgccttctatgaggaaccgcagtagtaagttcttcactgcatagtccatgccctcaaccaggatgtcgccatcagcattgactggctccccagcctcattgtatcccccaaagtttggggttgaaatctcctcctcttcctctgccttagaaggactgctaggacgaacatcgtcctgttcctcaatctcttggacctcggcgtccccttcatgatcctcctcctcctggacagagggatcttgttcagcacttggtaaggtggcatgcctggccacttgagggtcggatgcgtcgattctatgcgttatcttttttgtacgagccatcatcctatggctagatggaatacttaaactaaaatgttcgtcactcgaagaagttggactagaacgaagacaagggtgatcctcgtgcaagagttgaagcagatcctggtcgatttggtgttcgcttccccaaaactcacctggttttatctacaaaagacaacacgcaagatgagtgtttggtcaggatatcgaacattaaaacaggaaaatatgcccaccaggagtactcaatagattaaagaataaaaatattcgatgaaaagtcaaaactcaggaagtttgaaattttcgcgagttaggccaaaaaatttcatgaagcttagaataagcaagatgaaggacatgcattatgcagttcaaaaggcaagcattatgaacaatgaaatcgcatgaatcgttacaaaggaaaatcgcagagtttctaaaacttattgtctcctacaaatcttctacagcaaggttaaagttgcattcagagagtaaatgtgcaaagtataaataaaagaaactgagaacttactcaaggatcgaacgcctggattaaggttacaccaagctaaacaagcagttctggtgaaagcacttcagcaaacttgaagctaaaaacctctcttttcgctttgaacttacttagcaaggaaggttggtgaaaatgagtttgtggaaaaatgtgttgggttttatgccc

SEQ ID NO: 339752 - DNA, 661 bp, Cannabis indica
tttgagaacacaagtattttgttggggtaatggataggagatgctttagaaattggttgacagcaaggttgtacagggaagtagaataactgggtaaggagattatgtgagagagaaccacggcttcaagaataaaccccagactaacccaatatactcttccaaaaataacacaaacaaacgaaaatgagctgaccgatatgcaactcttactatatatgaacgtattatgggaaaataaaagcacaggtgaacaaacggaccacggttggaaactaaaactaaaagacacaaggatacatatcagtgagaacaatcgtttggaactcagagaggggaagatggaagcagtagaaagggataaccaaaaattagtatagcaaaacctaaagtacagtatactttgcagagaggggaaaatatatatagctaaatcgcacaaagcaaagcttctcctagacttgactataaatagataaacactcacggtataggggtaaaacgaagcagtatcagtcatatcgaaggcatttaatactgggtagatttgctgcacaaaggatttgaatatggcaatagacagaacacatttgcagaccaaattaaaatgtgggattcaaactcaagatagcaaagggaattaaaatcccttctgtcgaca

SEQ ID NO: 339753 - DNA, 566 bp, Cannabis indica
ttacttttttttttggttaaaactgaaaaaaaaaatccttaataaaatatatttagagcaatgaatattttataaatgtataacaagaatagtaaattttaaaaaaaaattaaaatgaagaaaaaatttagattatctgttgtagcgtatttaatacaatttttttaaaatgtataatgtaagtttccctttttaaaaaagttgttttgagtgtaaaattttgctgttttgtgaaaataaaaataaaatgtttaataaattctgtcgctatattacattattgcaacatattgactatatattggttgcatatttcaattttgaaaattcaaaaaaaaaaaaaaataactgtgtcatcgcctctattagctttttttttctttaaccttatcttctaatgtttaaacttcttaaaaaaaacaccctctaacaaaatttagactcctaattaatttatacaatcaaatgctattattttcaatttttacccaaactaccctcccttttattttccttctctctctgtctctttctcttcctcactctctcttcttcttcctcgcacc

SEQ ID NO: 339754 - DNA, 653 bp, Cannabis indica
tttagcgactagcctagccttgtaccttatagactcatctttagatcttccttccttgtgcttgaacaaccacttacaagacacaatacttttaccctcgggtcttggtaccacaatccaagtcttattcttcttgagagatcccatctcatcatccatggcattattccactccttagaattctttccattaactacctcattataattcttgggttccatatcatccatttccaaaatctgttagaagagcataagccaattcttcactccaaatgttgtagctatatttctgattaggcttcggagtcctcttagatctatcccttatcaactgatagtttataaggtcctcttcggtgccttcattgctgatctcttgttgagaatcaattcctcccccttgaccattgttcatgggctgccggttttggttaggttccacttgaaccattcccggtgtgtctccatattgttccacctgattagaacctgttttaacttctaggtttgtacctacagggttagtatcttccattcatgcactagacttttcattaggtaaacaaggaaaaatattttcttggaatataacatctctactattcatagttttaaatccccctttttcttttacccaaagtctataccct

SEQ ID NO: 339755 - DNA, 582 bp, Cannabis indica
gaaaccgcgtggaaatgccggcggtcccttaggtgcgcacacgtgtatgtgcatcaacttgagatattttcattcaaattccaaaaatcataactaattcataaaaaaatccaaattaggatctgtaaaagccaaaattttgtaatttttggtctacttttgagtaaaaatttttccaaatcaaaataaaaaatatttttacaacatatactgcgatttctaaattatcaccatataagcacataaaccatcatgaaatcatccatatcaatacaaaacatcattttaattcatatttcatgaaagcaaatcagtaccatggctctgacgccagttgttggaatatgttttaccaagatctagatttacttaccatgtatgttatttaacatcctaaatatgaatatttaagacaatataaataaacacatataaagtttaggaaaccttacactgggtgcaggggaatattaatggctccttccactcagatccctaacccttgtatcctgtctgtagcagagtatcaccaagatctgagcccgaatgtccttctcttgattctggattcttcacagcctt

SEQ ID NO: 339756 - DNA, 509 bp, Cannabis indica
aacataaaatgttatttctgatctttattaataagtaaatatgattatattgaaatgggttttatttagggcacaaaacccaacactaagaagtaagccaagagaactatggttgaaaccattcatgtggggtaatcgaaagttttttattacaaggacaagaaaggaaatttttaaaataagcctattccatggacttaacaaaatatcctgatcctagtgttaaaggtttgagattatctaaacccatggcttgtggtatgcctggtgatttaatttctctagtgcaagcaacttactttagtaagatgctagtgcatttttttctaatggaaatctatagaagcttctcgagttcaagacatttatctaaggaaaagttttaactattccagaaaagataatggccaagaaagaattccttaggatcagcggtgagaagtctcataaatgctttcttatgcattagacaagacaccaactgttgagtgggagtaatgagtaggtat

SEQ ID NO: 339757 - DNA, 994 bp, Cannabis indica
ttgcaaaaacacgatttttcatagtcatttctcattagaactttacctccatcaactaattataataaaaaataatcctcgacttggacacatgtgataagtgcatccggagtcaagaatccactccctgttcattgaggattctcagatggagaataattctccatctgttaagcaatcatcactatcctccgcagttctagatgaatccttttttgtggtgatgatgcatgttgtccttcatatctctatttgtgagatttgttgaagccttaactgctccttgtacttcttgcaaaatatttgcaagtgttcggaccttccacaaaagtaacatttacgagtttccttttccctagacttcgatcatgattgagagtgacagtgtttactcttcgaacttactttcttgggtgatctccctcttgccaaatacgcttcttccttcttgattcattttccaattgtaattcaaaatccttgaacttgagtgtggcaagagcatcttccaacgcaaccaaatctctaccatacttgatgacagcctcaacttcttgatatgcaattgggagcaatcttaacaaaataatggcctagctttcttcatcaatcttatgatttatattaaccaatcctacaataatctcattaaacatgtcaatattatcatggggttttttcattaatgtacaacaaaaataaatatattacaaaaaatgtgcaaaaaaacttaattataaaaactcatacattttaataacatatttactaatatttaaatcattagatataatatttactaaacttactataaatatatatatatacataatattctttaaacgtggattatggattaaggagcattaatgtgtagtcattataacatgtaattttaaatttattatttatgattattgatttgatacttataatagttactaatatatgtatggtataagtacatgataaaaaaaataaaatttaagaagaa

SEQ ID NO: 339758 - DNA, 558 bp, Cannabis indica
aataaaacatacttggtagtaaatctagatcctggtaaaatatttccaacatgatttagtacttgtcaaagttagaggggcatgatttgatatatatcaaagtctggggagcatgatttagtatctaaacaatcactgaaatagtaaaattgaataaaattagacaaaagtccttaaatctgacaaacttaataatttagagaaaatttttaacgactagaaaatttcaaaaaacatgatttagtacatgttaaaatttaggggacaaaaatcttaattagtctttttatttttaaaattaaaaaaacgtagttatagaatatatttttatttttgaaaattaaaaattttacatttatttttgcaattaaaaatttaaaaagagttaccgaaagctactttggatagtcttagggaaacttacaaaaatactgcttttttaccaaatgttttcaaaaatactgggacacgacaaactttacatttttactgtccaagcccatttttatttcttttatactgcccaagcccaatatatttatttttatactgtaaaca

SEQ ID NO: 339759 - DNA, 680 bp, Cannabis indica
acaaaataatataattatacaatctattattatatacatattacataaattaacacagtacaatttaacacacactacaaaattcacaattaaaaaaaatatataatataattataatatatatacataataaataaataaataaaatgctaattggatatcgggtgggtctcgagttttgaattttcaaaaatattaaacctgaacccagtctggtatataaccgggttactcccgaacctagtgtactaaaaattgacacccaattttttcaagttttttgggttttagaccaagagggtttcaggtataaatgtccacccctatctccaattgttagcttcaagcatcctgtcacatcatcaagcactattgcaccaataacagtatgtcaccttttgtgatgtttggcattaagaccatctctaatgatagtattctttaacgatatcaaaaactttcacatcacctaaaaatataataatttattttatccttcttttatattatttttagcacttatgttttaaaatgttcaaatggtatgcacttctaacaattattaaaataatattatattttcatttaatgtatattaataaggggaattaccccatatactttttttttaacttttttttcaaattttacggtttgggtttctaaagtggttgcagcgc

SEQ ID NO: 339760 - DNA, 651 bp, Cannabis indica
catagtgagtaagacggtggtaaccaaacctgaaggagagaaagagagccaggtttagatcttgataatgctctgctacggaaaggaatcaagggctagagatatgaacggaaggagtcattatattccgctacaatcaatgtaaggttttctaaaacccttatgtgtttatttcattgttttagagaattcgtatttagatattaacgaaacatacttgttagtaaatctagatcctggtaaaatattcccaacatgtggagctatagtgacctgccagaatctataggccttatcgtacgaggtcttggtaggacaatggccggccaggtttgacctgggaggaccatggccggtcagacttccctgtaggtctatggatggccaggattgacctggtaggactccatgaacaactctacacgtggacatcaaaggtgggctgcgaattgggccctaaaagtctaacaaaatggctgaataatatatagaatcaaggccatttgggtattttgtaaatatctaactaactatgctgtttccaagggatttgaattgtaaacctagggtttaagacttcccatataaaggccttaatctctagctgaaaaccttagtttcctttaagtcacttagcctccaaatagctct

SEQ ID NO: 339761 - DNA, 491 bp, Cannabis indica
ataaaatgattctgatttttattaattagtaaatcttattatattgaaatgggttttcattaggacataaaacttaacaggtcgatcactaccaaatcaacgatcaatttagcggtgacaggggcagtccctaaagtgataggtaatttgatcattccctttaatgtgattgtatctccagtaaaaccgtagatacttgaagttaccggtcgcaagtctttctcatgcaaccccatttgtttgaaatcctgaaagttgaggagattgactaaacttccattgtccagtagtacttgatggacatggttgttgggttttatgccctaaataaaactcatttcaatataatcagatttacttattaatatagatcagaaataacatttcatgttgcatggttcacatgatttgtttcatgattgtatgtacataatgtatgaattcatctgaaaccctttccacatactttatcctgtttattgtgctgtcaa

SEQ ID NO: 339762 - DNA, 520 bp, Cannabis indica
ttgcagcggaatataatgtctcattccactcagatctctaaccgtcgtgtcctttctgtcgtagagtaccaccaagatctgagcccgaatgtctttctagggaatctggattcttcacgatcttccacactatgattaagataccacttgatgtctgtgggcactcactctatcactcaaagggttcgatttccatagtgacggagagagaagagaagtggcggctaggttaatggtagaaggcactcaggtttttctatgaaggaataagatgcatcatctttttcctgaagccatcactacctatttatagtatgccacctagggttaggttagaattatttggcattaaaataatgataaaaacctacaatagtggccggccatagcattggatattgggccccacttttgcaattttgttgttttatcatttctacatctcattttctcaaaaacgctaattttcaaattctaccatttaaatgccaattcttactatttaataactaaaattaat

SEQ ID NO: 339763 - DNA, 782 bp, Cannabis indica
tttggccgaaggaagtcaagaagcaggatagattggttttccaatttataagatagagtaactagcatggatgtaaataatgatagaactatatttgattcatatataagtccttatttttatgaggatgctattttgtttgtccaaaagagatttatgagcaatacaactacttgatttattaaaaaaaacaactagtttttaatgaaattctttaatagattaaagtgtgatattaaaaaaatatttaatttaatttaaataaatttaattattctaaaaatgacttcaggaacgacagtttcgtttctgataacaaaacagttgttcctgataatgtgtaaaaactaagctaccagtttaagtttttgggacgacttttacttttcaggaacaactcatttttgttccgaataatctagcattaggcacgtcattatattttgttcctgatattggttttcaggcacgagttatcaggaataaaacatcaggaatgactagtcgcgccaaaaaatcttttggaacgaattaagaggttttctggaatgaaaaaagtcgctcctgatgacagtttttgttgtagtgtggggctaggcggtggccggaggtgggttgctgcaatgtggtggtgatggtggtttctgggttttcttttttttttgtatttttgaagagagagaggaacagagatagatagagagagagggggggacgaaggggtctgttatttatttttatttttttgtttttttatacatacatatatattattatttaat

SEQ ID NO: 339764 - DNA, 1709 bp, Cannabis indica
gggaaccatctttctttttcacaaacataatccgagctccccagggcaatacactgggtcgagtaaatccaatatcaagcatcccctgaagttgtaacttaagctccttgagttctattggagccattctatatggagctttggaaacaggttcggctccaggtgctaaatcaatcacaaagtcaatttcttgttgtggcggtaatcttggcaaatcctcgagaaaaatgtcgagaaagtctttaaccaccctgactacctcagccccaaatgtttcgggtctgctggattctagcaccactgctaaaaatcctacacatccactgtgtagtagatccctagcccttagcacagaaataactgggatccaagacccctgaactgatccaacataaataaatggatcttcaccttttggctgaaaagtcaccattttccgcgtacagtcaatactagccaaatacttggatagaaaatccattccaagtttgatgtcaaattctgttaattccagttcgataaggtcaacactcaactccctatcctcgatcctaactggcatagacctaatgcgccaattggagataaccaacttcccgctaggcattagggttctcaaccctcttttaagaatatcacaaggcctacccaaaagatcaattaccctcgtagccacatatgaacgtgtagctcctgaatcaaataatacaatatacaaggagttgttaacaagaagttgacctgtcaccatagaaggactggctgtagcataagcttgggtgatagcaaacacccgagcaggtacaggttttgcctctgacttcggctcttcttcctttgcctgagggaaatctttcttaaaatgccccaccatgccgcactgaaagcatggcttccggttgcactctcccggatgatgtttcttacaacatgggcactctgggtaagaataaccctaacgtccacctctatcttggttcccgcggaaccgtttgctctaccccaaaccagcagatggtggggcaactttcctgttttggtcagtggtggaatcaccaccatccctaccatatgcaggtgtaggaaaagtgggggttggaccaactttcggagtcacttggggctcctgaaggaatttaatcgcaccctcagctctccgagatttttcaaccattttcgcataagtggttgcttcattggtagtgatcaacagatcatgtttaatcttcaaattcaaaccggccaggtacttttctttcttgctgaaatcagttggcacgatacccacggcgagtttggctaaacgatcaaatgttgtggtatactcagtaattgacattccttcagtctgcactaactcagtgaactccttccgcttagcactgcaaatagcttcattataatacttggcattgaataattcccagaattcttccccggtcataatagtaacatcccgggtgagggtcaccaattcccaccacataagggcgtcttcctggaactggaatgtagcacaggtcaccctatcattaccatccacacccatgaaattcagaatttgctcaatcacagtgagccactgctcagcctgcattacatcaggatctcccagaaacaatagaagtgcttgcttatagaacatttcatataacggctccatacggttgccagcaacaggttgtctgctggcaccgctggaactgcaa

SEQ ID NO: 339765 - DNA, 511 bp, Cannabis indica
aaatatgttagagttttagtatttttgcaaacatatttgattacttgttattttctgaacttgtgtatgaatttattgaaccaaaagcttacttctgtttattgatatttgtagtgacaaatgtacaaccaacatcccaacactcatctaacaaatgcctttaggaatgaacttgaaagtgtgaataagactcctggtcagagtaatacttcacacttgctcatgatgaacaagaaactccataaagcagctaagctaggaattgttcaatctaaagagcaaagagttcataactccaacaatcatactacttcaagctcagttgagaagattagagaaagtgattccacttcctcagattatacttcaaaacagattgaacaagcaataacaacaattcaaaaacgattaagcaatgatgatttagtttttgaatcatgtgttttatagaatgataaatccatctggattcttgattctggatctacaaccatgtaagttgttcattgca

SEQ ID NO: 339766 - DNA, 512 bp, Cannabis indica
cacgaccactatggcatactttacccctccctttcccgttggtaaggatccaatgagatctatctcccccacactgcaaagggccaggggctagtcattatggtaatttcgttgggcggggttctcggtatgtttgcaaatctttggcacgaatcacattttaggacatattctacacaatctttcatcattgttgggcaaaattaaccttgtcttaatattttctttgagagactcggacctccggtgtgatctccatagaacccttcatggacctcctgcatgatccgtctagcttcagggtccgacacacatcttaagtacggcatgctgagccctctccagtaaaggatatatccatcattgcgtatcgatgtgcctgatactgtaacctcctggatacaaccctttccttaggcaattctcctttcattacatatttgatgatggagtccatccaacttggtccttgctcattagtagctaccgtttctttggctttgatgcttggc

SEQ ID NO: 339767 - DNA, 759 bp, Cannabis indica
taaaaagtagacatttactaacttagtttccaaatttatggccattttgcatttcaaaccataaaaaaataaaaaatgctattcatcccgacttcactgacttgaagtatatcccgagcttacgtgtccttcataataactgtcatataacaaagtttttatgattttgaaaagagtgtactgcaggttttaatgaaaaaaagagtgtacttaattgtgggacctatatgtattctaattttttctttttatttaattgtaatctaatcttaatttttattttcaaaaataggatttcattcaataacattaaaaaaaagtatttttttaatatatatttatggagtcttcgatacgttagagcagctccaaggagcctctaaaaaaacattattggtgtgattaatgctcaaaggacacaccaaactttgcaccattagagcatctccaaggagctcatcaaatttagtgtcacactatcatcaaatttgatgttaaaaactatcttcactccaaccacaacaccaaaaattacactaaaaaattattccttattattatattaattttttaataaaataaaaaaataatattatattaattactaaaaccaccacaacaaattagcaccttcctaaataaaatagtcacacgtgtaacagatagtttgaactttattttcagcttgtaaattttctaaatttttaaattttacaaaatatcttaagtaattataatatacacaaccataaaaaaaat

SEQ ID NO: 339768 - DNA, 641 bp, Cannabis indica
tccttcgtaggatttgttgaccgattcttggtagtttgattcaacttcaatgatggggaattgctcttcattaattgagggctgccaatggagcctttgctttgagaactttcgaagctgctaatccaatgctactccctccttggattagctttgtaagtgcagttaccgtttttactttgtcattacgagtaattgcacttgttgtccaccaaatctagactcatgtccccgtccttttggtccccaacaatgtagagggggtgacatgtatgagtgtgaagggagtgttttggcgacttgaatgttccttaacttcggaaagtgtaagcaacatagatagaacaataggcgtgggccttcccatttgctaaaaatggaaaggtatagcttatgcccgtcgtaatattgaatctaggggtgttcatctgatccaatctgcacttttttggtcaaacaacattcaatccgcactaagtgcggatttcatagtttggatccaatatgatccgcatagcagtttaaattcaatccgcaatagtacggattggatcggttatttttttaatgataaattatttaatattttatggaaaaaaattaaaaaaagactattgtttcttaatctccaataataatct

SEQ ID NO: 339769 - DNA, 671 bp, Cannabis indica
ctataaaattcttgtgtctttacattgcttttctatatattaattgctataaatcacttacgcttactaaataagactcactatcgttggctaaaagagaggtcaacattaaccaaacctaaaggacagaaagagatctaggctcagatcttgataatactctgcgacaaaaaggaataagggttagacatttcagggggaatgagtcattatattttgctgcaatcagtgtaaggttttcctagacccttatgtatttaatttcattgttttagagatattcatatttaggatgttcattcaacttacttgttagtatatctagatcctggtaaaatattcccaacattaagtagtgggaagatccacttggtcaagtttaatgaacaagtagaagaacataaataatacatttcagccagagcttaaccttctcaggattaaaatttattgacataatatcaacaatgtgatatttaattagaaatatataacggtaagtttatgatatcttatacaatgtcaataccggtctagttcaatgtatactccatacatctgatactagaatactttgctaatgccctacgaaggacataccacatatcaatgtgtaaggaaactttatcgctaattatcatgtcagtgtaaatttagtttactgataaatc

SEQ ID NO: 339770 - DNA, 540 bp, Cannabis indica
atcttgtgcctttttcatcactcttggatttctcatcatttcaaccatagcccaatcgacagttatagctgatgtttcactcccgcctagaaagatatcctgaaaatcaaaccattttgtatcatcaatatgtttcatgcttaatcgttaaaaaaaaaaaaaaaaaaaaaaaaaaaaaaaaaaaccctatcttagtgataactttttagttacaacataaagtttataactaaatgtgattttataagttgcaacaatatttaattacgtgtgactaaattaacatagcatttaaatatacaagtagtcactaatttacttttagttgcagcaagtattataactaaaaacacatttagtcacaacaaattgtgattattgtcactaattcatttagtcacggaccttttagtcacaacataagaataataatttataattagtcgtaacattttcacttttattagttacaaattttgttgtgactaaaagtaagatgttttgtagtgaacataatttatctattcatatcacactatc

SEQ ID NO: 339771 - DNA, 529 bp, Cannabis indica
tcagcccaaaaatgagaaaagacaaaattatccttgacttgtacgaagtcggcactgcggcggggaatatcctcactgcagcggatgtagaaaagtggaaaaacgggctttctgtggtccactggcgcgacggccaaaagccccgccgcggccactggacccattcttttgtgcttcgacctctttcagtaaaatgggcataactttctcatacaaacttcaaatgagctgattcaagatgctttggaaagataaagataagatataaaactattaagttttgactttttccaaaattggatcagaacatagtcgaatttaggcttgaagtttcagttttattctctttcgaaattttctctattttatagatcactgttttccgaaatttgtccaatttctgcattccaagtatcgaaacctgaagaaatgtgacccgaaacttaggctaaatatagcctaagaggaagcttttcgggcaatgttttacaagaaatattataatgagtccattcgagcagcaaaagcg

SEQ ID NO: 339772 - DNA, 1144 bp, Cannabis indica
ctagtttgatcacatgggtaagtttagaaccttatttcttagtgggaaatattttagagaaaataattatcgggattgagcggggttatgggatttgaccattttacccctagctttagaaataccctagttttaagtctaaagggcattttagtcttttccttggtgaggataggtggctgccctaggtgattgacacctagccaagtaattttttcagcaagagttaattgggaaaacccttttcatttgaggaaattaagaaaaagaagaaaaattggaaattagagttatctcttgaactctctctttctttctttcggctggggcaaagctagggcaaggatcaaatttttccttccatttctctgggatttagcaagaattcaaggaggaattaaccaaggtaaccttagttactctctagttatggtttttctcaagttttgcttagtttcaaggggtgatttctaggtttgggggctgttaggtttccttatgcttagggttcgaattttatagtttatttgagttaatttaagttcctagcagctagtattgttgattggtttgagttttgtgcaactttaagctttgagttcaaagctttgagctttaatggcaacttgagtattgatggtttgttctgtgaaattctggttggaaactgttgtttatgcattgtataggtaccctggaagttttaggaaggtttgggattgaattgagttaagggggttggtttttgtgttcccagcacagaaccggtcgaccggttctgggggacctgaaccaaccggtcgaccggttggtgtcccagtttttggacttccggttgggaccggtctgccggttgggggaatttttggaaccctagtttttcccaattttgagatatttagggtattgccatgtgatttatcgataggggaacttttagtttcaagtttaagtccccggaaagtgatttagcgagtcactcatctgtgttacaattaatgtgattagggcatccatctagcgcgagcatttccgttcaggtcggccagcacacttgaattcggaaaacaggtaagaactgtatataatgtgtgatatgaatatctgagtgtatatatatgctatgtgtatatgcatgcttaaa

SEQ ID NO: 339773 - DNA, 550 bp, Cannabis indica
atacatatatacacaccaatatatttttacatacaattacatatacacatatagcaatacttttacatatatacatatacacacatctatacttatacacacatatttatacaaatatacatatatatacatttacatatatatacttatacacacatatttatacatttacacatatatataaatacacatatataaactattatacacatttatatacacatatacacacaaatttctacaaatacacgtaaaactataaaaatttacacacatatataaacttaaaaaactaattaaacacaattttatacataaataaattaaaattattatatatacacaaatcaacaataaattaaataaaactaaaatagaggaaaaaagggtaccggcggtgaggtgcggcggcaggagggtggcggctcgggcagcggctgccagaggtacggcggcatgttctcgtcggagtccggtagaaatgattttttggaaaaaaaaatgaaaaaaagaagaaaaagagagaaaaaagatttggtagtgaaaatgg

SEQ ID NO: 339774 - DNA, 717 bp, Cannabis indica
cttgaagaaagacataatgagttacaaataaccaatacagtctatcaatatcgaatcacaagatattttaacaaaagagtccaaaaaaggctctttaaggttggagatttggtgttaaaacatgtatttacgaacatgcgagatctggctgctggagtgtttaacccaaactgggaaggtccttttgttattgaagtagtcgtggaaaccagaatttacaaattagcttggcttagcggctcgctaataaagaactattggaatagtgaacatttacaaccttattactagtaaatgtaatatgtaaatgttatatttatctctgtaatagttaaattcttattatgaataaagtgaaagtttgttcaagtaattacaaagtttattttttttaaattacttaggggcatatataagtgtataatgactagaaaccacctagaaatatatactatattgcaaaccccaaaaattaaaaaatttcccacaaaggaaaggataattgattaaaattgtctacagacaatataaagtcaaggaattgaaaaaccttttctttaaaaaggaaaaatcaaatagcaattgtaagtgagatcaactcataaaacaacataaagttatatgcgagtttaatacttaacggctcacatcattgtggcatgtattataaacgaggcacaagaatgccttgaagaataatacttaagctaaaatatg

SEQ ID NO: 339775 - DNA, 698 bp, Cannabis indica
tttgtcatttggaagttgcccattgagtaaattgttaacaataggtgtcatccatgttggagagctgtctatcatctcaacgtcttttgtttcacatatacttggctcgctcagcatttctaccggaacaagatttagttcgtccagatcattctacgaggccagttttgctaaggcatcggtgttggagttctgctctctcagaatttgctcaattttaaagtaatcgaatctttccaagttcttttgaactttctctaaatactttgccattttcaagcctttggcctggtatttcccgaggacccagtttatgatcagctacgaatcactatgacagatgagattttttgtctttcaaggcctccgctatctttaagtcggcgatcaaggcttcatactcagcctcgttattagatgcgtcaaattggaatctcagagcatagtgaaacttaaagccttctggcgatattaatgtcacccctgcacctgaaccctgctcgttggatgcaccatccacgtataacttccaggtttccgcatttcactgatcagatgggatttcttctagggttataccttgtatcatgaaatcagctaaagcttgacccttgatggatgtttgaggatggtatgttatgtcgaactgtgtaacaccccgatttcccaagatgtcacataggatagtccatataaaa

SEQ ID NO: 339776 - DNA, 509 bp, Cannabis indica
gattgggtctattatggcataaacaggtattctagaggttttcaattgttcgggggttgatttgtggtgtggggagcatttttggtggttcttgcactgaaccgatcaaccgggtcaggggaaccagtagcaaccggtcgaccggttggtccccaggaaaccccattgaaccagaattccggttggggaaccggtctaccagttgggactttttggtgaacaatactttttccggtttttgtgatatttggggtgttagcttgttatccatcgatagggatatttctagttttgattctaagtccccggaaagtgtattagcatctctctcatcaaaattttatatattgtgacttaaggccctgtaaagcgtcaagctattgttccactcaggctgaccgacacacttgaacacggaaacaaggtaagattagcatagaacatttatatatgcatactgtgtttatgattgtgtatgtgtttgggtgatatcatagcgacacaaccat

SEQ ID NO: 339777 - DNA, 850 bp, Cannabis indica
tagcactacaggatatatttttgggttgtggtagatcgattcatgaagtctgcacattttctaccagttaagacaaccttttcagtggatcagtatacagatttgtactttaacgagatagtaagattgcatggtgtaccaaagtctataatttcggatagagatcaaaagtttacctctgaattctggcaaagtttgcaacgagctatgggtaccaaactgaaattcagtacagctttccatcctgagactgatggatagtccgaaaggaaaattcaaatactgaaagatatgttacgagcctgtgttatggatttcgagggctcctagagtaagtacttaccgttgatagagttctcgtaaaataataattttcagagtacaatagggataactccttatgaattgttatatggcagaaattttagatctccaattcactaggatgagacaagggagaagattaaagctagaatgcttactaataaagcaattttagatctccagattccgtacagcgaactaataaagcaattgagaagattaaagctagaatgcttacttctcagagcaagaaaaagagttatgtagatccaaaacgcgaaaatgtagagttttaagtaggggatcttgtgttccttcgagtgtctccaatgaaggggatcaagcgttttggagaaagaggcaagttatgccctaaatttacaagaccgttcgagattctcgagaaggttggacaagtggcatatcggttagctttgcctcctgctctttcagcagttctcaacgtactccatttctctatgctaaggaagtacgtttcagaccctgctcatgtactgagttatga

SEQ ID NO: 339778 - DNA, 868 bp, Cannabis indica
atgcacaaatcttcctcttcattatagagtcgaccataggaagagatgaaggtcacatgacatgtccaccgagtgacctatttcccaagtttattcatagccctcactgccgaggaaaatcgtggttacaagctaaaatatgtaggaaaaacgaaacaagtctaaacccacaaatacaaaaacaacaaaattacattctaacacaaacattgcttgtttcatgttgtggaagccatctctttgcataaggtttcaaccaacaatgaaaaatttaccattgaaagagttaaaagtagtgaatactatgcaaacatactgagatactaaaacacacatatctgtgtaatcatatctattttcaaaaagtaagagaccaaaaacaggggacttatgagctatttcactagtcattccattctcatcaaaagcttgtcaaaacaaattggagcaataattatatatacctatatatatattataatttctcatatctagtacttttaaaaattaggttgtacattaagtaacatgacagcaacatgggtttttagagcaaagcatttcgaagacctatcctttctagacctgagcagagaatggagagtcttgttgtaaccttgcttctgcattgtaattccttgtatttttctgtatttcgttttgattttgttttgtttgttttattcttttctgctttttgtactttctctgtctcttgtttaagcggctttcctccgccttaagtgagggcattaatctatagaagagggtgatcagtctaagacaatgatctctcctcttttttttttaaaaaaaatgtaatatatatatataaataggctatgtttgccaaatattgaatgtattt

SEQ ID NO: 339779 - DNA, 879 bp, Cannabis indica
gtctcctccatcatgaatctgctgatgtatcctcaaagaggctcgcctagtctttgcttgacttcgaccaagtcttctagatgcaacagaagttggcgagaggaagataattgtgcatggaattctgaggagaaggccttccatgagttgaactttcgaggggctagcttgaaatagcattgctgggcggcttccgagatggtagcaggaaaaatactgtaacacacatcccctcgtatcccttggagatccattttcattacgaaatacttgaggtgggagagaggatgttctcttccagtgtacattttcgaggttcgcattttaaacttgtggggcaacgccaggagattgatctcgggagagaaaggggttccacgtgctcgctccaactcgagatcattgtttctttgtctggccatgccttggaacatactctttagttcatctagctgtgcctgcacggctggactaacttgttcggcattttggccaatttgagtcacatcagtatctttctgagcgggaatttgagcacgggtttcaggctgcatgatcattatgccaagttgatcgtctactcctctccttctgttcaaatcgtttttgagatcatgagtcgtccacaacccatcgaatacagaaacacctggctgtctcaacgattgattggcttggttgacaggtggaatggcaccgttggcctggttggaaccatcaggtatgacttctcctaatgaattactagacaaggtctgtccacctactgcttggcccacaagcgaaacttgtgaccggagatttggcggctgaccatttatagtctgggtagtattcatcgttggatcttcgtctgtttcaccaagggggatgaccttc

SEQ ID NO: 339780 - DNA, 627 bp, Cannabis indica
gtcaccagctctcagagatgttgttgtcttgcagaaacaggagactcgaaactacctagtttccgagtaaatcaccttgtcagtaaaagtgaaaatatgaagttatgaatttgatttcatgactctcaattattgtgaaaaactatacgaacggtcgaggcggaaccagatcagataagcagaaaccagcgcactaggccatttgttagcctggtgctgggtgcttattttagagcttccaagatgtcgttttggcacttacaaggttcttaaacttgaggaagaggtctcttaccctatttttaccattttagagagaatacttggagcagaattgacatttgaatgatcaaaactagcgcaccaagttgattgtcaacttaggccgtaggcttagtttcaaggccctcgagattgtggttttctcccctagtttgcttacatctttgttgtttcttatgatagaaaaaatgctcggaacgcttttttagaaaattgattggaaacagcctgtgttgaaaatttgtcaacctgggcgctaagcccagtgccaagtgtcaacttgggcgttagtgttggaatttattttaccaggatcttagatctactcacaagtatgttgtttaa

SEQ ID NO: 339781 - DNA, 540 bp, Cannabis indica
gctgactacgaattagatactatttaatgtttctactatttaagtttttcttttttttctatcatcatcatgttatatcatattagttctttgttaactttataagatgagaagttgacattattattttttaaaaatatatttttctgatgaatcatttaacaggttgacatagctatataatgttgatgtttagagtgtatttaggatggtgtctaagagcgtctctcatggaagtgtaaataagtggtgaaaactaaatatagttcatttaacaaaaagtgtgttataatagtgtgccaaaaagtaatgtaaatttagcacataacaaattttgtgccaaatttggcacaatatttgctatgatgtaaaatttacatcacaataaatgcactactttttcatttacatttatgtcatttctattattttattagtatattcaattatcacattaaacatttacatttataaatgcactactttcttgttctatcttttgagattacatttatatgtaatttacttgttgatgttatg

SEQ ID NO: 339782 - DNA, 636 bp, Cannabis indica
ccccaaataacataaaaacgagaaaatctagggttcctgaaaatcacctaaccggcagaccggttgcccaaccggaattccggttctgggaattttagaaccccatccggaattctggatgcacaaccggaattccgattcctcgcaggaaaccttcaaaaaatcataattcattcatttcaaacccaatttaaaccaaaccttccgaacctgttctaaataccccaaagaacaataccaaagcatcaaaacagcccagaacacacagataccaaaaatgccattaaagctccaagctttgagttcaaaactcaaacttggttaaacaacactatcatgcatcaaaccttgattaaaattacatattcatgcatataaaaactgcagaaactgaactcaaacacaatcaaactttacagcagctacattcacatttttactttgaaaaaaccatagttttgagtataaaattccaagcttgaatcaaagcaactaacaagcatcaaaatagctctaatctactcaaatagtcatgctttaacctctgcaaacaacaacaaaatcacagcaacaacaccaacctaaactaagcatgcaaaccttcattttcttcccaaaatttccaagaaacaagaa

SEQ ID NO: 339783 - DNA, 722 bp, Cannabis indica
aaaataaaaaaaaataaaaaaccccaaaaaaaataaatagatattatatttcctataaggctaattaagaatttcgctccctgaactttgacatgtaccaagttatgcccctgaacttttaaggtcgttaaaaatgcatcctcaactattgagattgttggatttaaagacttttatccaattttagtttaaaagttttttaacgactttaaaagttcgagagacatcatttaatgcaaagttcagtggacaaaaatcataattagccttcctataatgcctccaatatataatagcaatttatattgcaaattataccaaaaaaataaaataaaatatcattaataatcttcaataaattaaatatttaaaaaataattgatgacaatattataattaaaaatgtatattaaaacattgtatttatcctgtgataaacttaacataatattatattttgtattaaatttagttcaattttaagcatgagtcaaatttagtacaagatttaagggcttgattggtttgagatttaaaaattatgttttctaaaagagtgttttggaaacaaaaatttgaattttgtatgtgaaaaattgtttctaaaaatgtgattggttgtagtgtaagtttgtgtttttgagttttaaaaagttggatttgtgattggttgggaatctcaaaataaaaaaataagagagtatttgaagagtttttagatt

SEQ ID NO: 339784 - DNA, 666 bp, Cannabis indica
atcaaccaaacgggccctaaatgcggaatgtatggaaaaacatctcgtaataaactgtcagttaaagtgactttttctaataattaattatagttattatttaaagttccatatttttacaacaattagataaccaacagttttaaaaactaataggaaataatataaaagacaatcataaatgtatgtgaaaaatttaattttgtagtagtgctcagttataaacctatgagctatctagagatatgagcaataaaagaatcccactccgaacgacaatcacctccttcagcgacagaccgtttcactgcaacacccatttccacagctctcttcctaatctcatctccttcttctgaatctgaacccattattctcctcacacttctgctgatcatcgatgaagtaaccaactcatctctttcctcccattccattacagccacccccactttcagaacccttgtaatcaacaaaccattgaaaggttggtctgattgcattggccaggccacaatgggcactcccatactcaagctctccacacacgagttccaaccacagtgactcataaacccacctgtagatgagtgccccaaaatcttcacttggggcacccattccctcaccaccattcccattcccttcattctttcctcaaaccca

SEQ ID NO: 339785 - DNA, 654 bp, Cannabis indica
aattttatttgataattaattttaagtttttaaataaatatttattacatttaagttgttgaattagataatatggcatttgtgaaaaaataggataaataattgagtaaaatggcaaaattgtaattggtaggtccacatcctaatggtcggccacttaagctcaatttagccatttatttatcaattttttaatgccaaataattcaaacctaaacctacaaggattcctataaatagatagtgatagactcaaaactgacatcttacgatcattagcctttcagtcaaaattgagtcttctctttctctctctaattttcgaatccttctccctactttcttcttcaatttttgtccctcttagtgaattagtacatgcccacacatagcaagtaagtactcaatcatagtgtgtaagattgtgaagaatccaacacctgaaggagaatcgggctcaaatcttgataatactctacgagagaaaggaacaagggttagagatctgaatgaaaagagtcatttaattctgctgtaacaaatgtaatgtttctttaactttatttgtgtttaaattctattgttttagaaattctatgtttaggatgttaaacaacacacatggtagtaaatctagatcttggtaaataatcc

SEQ ID NO: 339786 - DNA, 657 bp, Cannabis indica
tggtttttatggactgataggaataatttcatacatggcaaaccagtcctctttccatctcagatttgggccaagtctgcagcttatttctgcaattatcagcaacatgcttcttctcataactccatcaaagtctctacaggtgcagctactaattctagatggcaacaacctcatttgcatgaattaaagatgaatgtagatgtagcttgtgatgtctcccgtaacaagattggtgttggcattatcattcgaaattcctcgggtcaagttattgcggcttactctaaacctctcactggtaggtacaatccgcaagaaatggaagctaaggcattactaacaggtttagattgggctgcctcacataattggtctatcaagcattttgaatctgattctctggtgttagttaattccattaacagtaaatctgctgctatttcatattttggtgatttagttttggatattaaacatcgtttatcctatctctcctctgtttgtgtatctcatgtcaagagagatgcaaaccaagccgctcttggcttggctaaacaagcttcggtgttggatgatgattgtatgtggtttgaggaaattccctctgccattttctctgttgttgtaaatgactctttctaatttataataaca

SEQ ID NO: 339787 - DNA, 752 bp, Cannabis indica
atttatgttatgatgacttcatttttgggcaaccaatacatgaaaaagttgtaaaaattaattgtaaccttgaagaagacgttgctgaatacattagacactatgagggaatatgggtcaattgtgattcaggcaaagataaatgaaaaaagaaaagaaaacatgtctaattagtaacttacttgtagtagcttactagtgataaggtttgtttatgtagctaatatttgttatagcttacttatgatactatttttttatgtagttactctgttatagctaattttatattttgtttgttaatggtgtagatatggcaaactcaggttcaagctcaaatttagacccaatagcagagtgtcctagggcaatacctaaatgaggtagaagtgagatgaatgaagtgtccaagctaatggaccaagaaaaaagacttcctctcctagtcagtgataaaggagagtattgtggaagaaactatgtcaagctagtatcaactttaggagttagatgtcatatgacgatagagctgtcctatgaaaattggaagcaagtcaaccctaaatttaaaaataaaatttggaaagatatataggtaagcagttatttgtgagaattttgatttttgtttgattaattcagatgttaactctaatcatttttgtttaccttacaactagactggttttatagttcaagatgatttcaaacataattgcatgatcattgctgggaagttaatgaaagacttc

SEQ ID NO: 339788 - DNA, 545 bp, Cannabis indica
ataataaataatcctatataccccaaactactaactgcatgtataaagcataattctacattacatgcacaaaatacaaaaaaaactaaaaacgtatgtgagagcatatgagaataaatatatatatggaatacttttaaatgggtattacccattcatggttaataaaaaatttaactataaatattaatttaaaagatattaatgttgaaatttttgttttgaccaacacaattaaagaaacaaattaatactatatgcaaattggtatttttttaaaattattatttatgcgtccacaaaataattggtattattcaaaataacaaatgcaatatttgttttaggcccaaacacaaagagcccaacaagcaagagtcaacacaagtcaaaaatgctcttctcactaaagtggttcggcccaccagcaaaagagaggtttctctctccaatcaactcagcccccttttcctcaattagtggatcggcccagcaaggatatcagcccaacaaatgaaaccctaataatccaaaccctaatatat

SEQ ID NO: 339789 - DNA, 743 bp, Cannabis indica
ggatgccctaatcacatattgaaaccgggtaaatcacacgttcaaaaccctaaatcgggaaacccgagtccacaacttaaggctctgctatactcactagggattacattaacttaggaaatagagaaacacccaactatggcactgaaatggacgagagttgaaaaaactggtttttcgggaaccctgcaaaaaccggcagaccgaaatcccaaaaccggtaaaccggtttcctggcctgcccagaaaaccggttaaccggttttccctgcagaaaaactccaaactttgaaacttcaccaatttcaccccaatttccaccataccttccaaaacacctaaatagggtatacacaatatattccaacaagaaattcctagaaaaactcattgaatccaaacatgccttaagtttcaaagcacaaacttatgcaattccatcacaactcaacaaaaccaatatccagtacttagaatcaacttaaaatcaacctagaaataagattacacaaactttaaaccctaacagcccctatctttcaaaattacataatcaaaccaattaaaactagagaaacacataacttagagagtgtctagggtttacctttgcttcaagaacccttggatcttggctgaattccagaaaaatgaaggaagaaaaagtgattcctccttggtttattgctggttcgaagagagagaagggaaagagaggtattatttgattttttttggtcttt

SEQ ID NO: 339790 - DNA, 979 bp, Cannabis indica
ttgcaacattgtaacattgccttcctccccctgatttcctctcaccgtccctattccagcttcctgggtagggaactttaagcacaggtgccgaatggatgtgactgcgccaaaatctaccagggccggtcggccgaggatcgcgttgtaagcggtcgggcagtccaccaccacgaaagtgcagtatttgaacgtgctttggggggtgtccgggcacaaggtgacgggaagtctcacttttcccattgggataagcgtcgttccgttaaaccctgtgagttgggaaccactgggtgagaggtctcggtccgtcaagcctattgcagtgaaggcctccttgaagagtagattcacggaacttccgttgtcaatcaagactctggccaccactttattggcgatgggggtctcgatgaccaacggatcatggtgagggaagcgcaccgtcttggcgtcttcttccgtgaacgtgatgggttgatccatcagccggggcctttgagctgggagttgagtaacctcccaaacctcattgtgttttacggcccccgcataccgcttcaattctttgcgggtggtgcctccaatatggggtcctcctgagatcatggccactctcccattgggtctgggtggcagaccggggatgtgctgggcatctccggcgggagcaactggagccaatactcctgctgcaccccctggtgctccctgcggcaaaacccctgtcgcgtgacccggattaaggtgaggcagccgattcttgatccactcatagaggtgccccaatcggatcaggttttcaatctcatccttgagatttttgcattcattggtgctgtgcccaatgtcgttgtggtactcgcatctttttgatgggatccctccgggagctgtctttgtacaagggaggtggtctccggtagtgtgtattttgcctgtaagcaaagtcacatgctcttgggagtccgtcagctcc

SEQ ID NO: 339791 - DNA, 579 bp, Cannabis indica
aaaaagaacttttaaggggtaattgttatacccaaaattttgctagcacttcagagggagacacgtgtgaaattaggaagaatacgaatcaacaaatataatgataattatatttgaaaatggaataactcattaaatgtgaaagtgatagagtttatttacaacttgctgactataaggtcttatgcgagataaagatatacaaactgttgtctcgtgcgttaatgagaaaccatacaacattggatgcgtaaggtgaggcatcaacctcgtcacacatcaagaggcgtaggagagatataatgactgataaggcacttagcgtataatacgcagtatacaaactaagtgtaatagccaggtaagctcatactactattagcaaggcatccatctcgctataggaaggcacgctcatggtgccttcactattcaactccagacatctttcaatgaaactcacagcgtcgtcgagtcagttctctcgatagaagctatcattcaagtgatgttggctgttgaagttcaccttgtcgccaagaactgtggttgtcagatggagcaccatgtcttcaagca

SEQ ID NO: 339792 - DNA, 571 bp, Cannabis indica
tttggggtttccatcctttgttgataaaagcaaaatgtaaatttttgatgtcatcaaaaatagggtatggaataagctaagagggtggaagaattctatgttctcaatggtaggcaaggaagtacttatcaaggcaattgtccaagcaataccaacctacatcatgagttgctactttctatccaaaaataccataaaaagtctccataagatggcagttcgctcctggtggggttcctcagataaagaaagaaaaatctatttgtgtaagtggtcaattctgtgtaaaatgaaagagaaaggcggatcgggatttagggatcttaggttgtttaatcaagctcttttagctaaacaaatttggagatgtgtttgacatccgacaatgctttgtgctaaggtattaaaggctagttacttccctaataatgatattctaaggctaaatgtgattctcatacttcttttgtttggaggagtttgcattggggtaaagaaattattgttaatggcaatcattggtagattgagaatggagagaaaatctgattattatgttgggttttatgcc

SEQ ID NO: 339793 - DNA, 763 bp, Cannabis indica
agtacctacaaacataaaaaaactaaaaattgtctgaaatgaaaatcaaccaagaacaacaaagattccctaaaaatgaccctattttttcaatttagaagccttgaaagacttgctttgcttctcatcctcgctatcaaatactttcatcatttttcctttgaccgtacgagaagaagagggcagcaagtcgagtgtgataaacttcaatgtcaaaattaccaggaacatctttcccatggatgaagaactcggcaaatgcagccacaaatgctccgcaatcactgttacctagaaagaaaaacaaaacagttaaacaactattatacaacataaaataaacttaaaagcaacaactcaatttttctgctgagatggcagaccagcaatctccacaactcttagaggagttttaaggtcagaacctaaatcaggaacatgggacctattcttccaaaattcaagcagataaaaaaacaaacgaaattaagacaacaaaataaaacagaaattcagactaaacaaacgaaaatgaaaaactcataaaaagaaaaaataaattaaactaaaaaatagaagccctaagaaaccaaacaaaatgctaaaatgaaaaacctagaatagtaaaattaaaaaacacaaatggcaaatacaaacaaattccaaaaaggggcgaaaccaaaaaaaaaatcgaaatcaaacctgataccgaagaccaactccatcttgatcattttttttagcatcatcttgaggaattttt

SEQ ID NO: 339794 - DNA, 1185 bp, Cannabis indica
taattataagagtataattattagatatcaaaaaatttcttattcatatggagaaggtataatcttgtaaagatgtacaagagaattaagattatacgatatgaataaaacaagtcggtagtgtattaaagttctgggaatctttaatatgaaactactaagtacgatttaccatacactatacttctagtgtgtgtgattttgattcagatcccatatgtagatgaacatgtagttaagttactgtgtctaattagattatgcatgactggactgatatatactaaacatctttttatcaaacttgttgtttaccatgaaaagagtttatcatatcacaatgatgatcattagtagatcagtatgaatcctgagtatacatgaactcctatttgtgttcattgagttctttgattcactcgtgaaagtttcttagagaagacgattcttacaacttttgttttgggagcttaataacatgagtggttgggaacatgttatacaatagaagaatccaagctttcttaacggatcgaatattagttcctttatagtgttaattttgggagtgctaacagttagatctaaatcaataataagttataaattaattgttcacgttgaataaatggtacataaagaatcaagagctaattagaaggtaaaatagtattttgaccaactctaattatgaactaataattggagggcgagctattgattatatcaattacaagtaagaattctctaaatataattcgatattatcaaagagtacaattccatatttatagtggactaataatggaattaataaactagattattctcttgatgaaattgatggtaatcttggatttattagagctttgaaatataggtccatggtccccgagtcacctctatacaacactgtatagaggaaagttttatttgataaatatattttgagtgggtataaatttctatgacaaataaattctaaaaggtaaaatagtaatttgtgaaattattattttgattaattatggaaattatgaattgtataattaatagtatttaattatttaatttaattagataaaattatattaattaattaaatataatattattattaaataataataaagagaaaaatatattattttggagaaaatattatttatttttgttgcccctgat

SEQ ID NO: 339795 - DNA, 659 bp, Cannabis indica
aatattaaaaattacaatttatcacaaacgcttagaatcctagactattaggtgaataataatcataagatgacaatagattaaaataaaacctaatctagtgattatctatacaaaattaaaacaataatcatgatattgaacatagaagaatagaaaccatttgatataatggaaactagaattaacattcatcaatgaaattaaaaactctcgtcttgagttttgaaataactcttaactaaaaggaaactacttggacctagacattataatcaaaatcataataaaatagtaagagtttaaggagaagaaaaagaactatgatgaagaacactcgaagtcgcaatctccatctttcctttgctctctctttgagtttctatctcaatttcgtagctaaaaaattctaaaattcgtaccttaaaagtcctaattctaatgcttgaaaaatatttcactaaaaaagatatctcctttaaaaaaaaaagataaaatttgaatttgcccagtaaccgcctcctcgccgcaacgagtaggacccttcgccgcagtgacagtgtcctcgctgcggcgaagccttcctgttgccgcggcgacaacacctgtttctttatttattttttattttttttctttttgcttgctacaatgagcac

SEQ ID NO: 339796 - DNA, 717 bp, Cannabis indica
cattccaaccacccccataaaattcagaatttgttcgatcactgtgagccattacttagcgttcatgacatctggacctcccagaaacactggaggtgcctgcttatgaaaccttttgtataacggctccatacggttaccagcaacatgttgttctgctggcatcgctggagctacaacgacctgagcttgctgaggaggcacagtaggaagaccttgctgccttaatctttgaatttcttcatcttgctggcggattcgatcttgcatttccgcaaacctctactcccaatccggaggagcttgtggtggatttacaggatgaccaccttgagctctaccacagccacgggtgcgaccacggggattctagggattttgatttccctgaccgcctccggtctcaaccatattaccctgacttcttgtatttcaatgggtgtccatttttataggacttagcctacaaacccataagacaagaaggttagacagcgatcacaaaacttaataccattcttaaggacttgaaggcaacacacgtaaaataaataattataatctaatatgcttcctatcatgctttagtaatcacatataatactaaacaagtacaggcttactgaaccgtgaaccaagctttctctgatgaagattatacatgtcttggcaagcttcggtaaacaaacctggcggctctgataccaaaattgtaac

SEQ ID NO: 339797 - DNA, 1081 bp, Cannabis indica
ggttcgggttcgtgtcctgagtcccgatctgagttttaatttggctccgtgtcccggtccgtgtctggctcttagtcctagtcagattctcgtttcgggaatgagactgggtcccagtccctcggtcttattcctgggtccaggtacgcttacagtttcgcatccagtttccggtcacggggtacgggtttaggtccgagtccgggtctgggttcaggtttgggcctgagtctgtgtctgggtccgggtttaggtccaagtctgggtctaggttttagtccgggtatggatcccagatccaaacatcgactatgggttaggtttaagccccgggactaaatcaggatccccctctcaagtcccaatctagttccacttcgggtgctaggtcttgatcctagtccgggtttaggatctgggtccggggttaggtcctgggtctcggtgctagtttctgaagcccggatcccggatccaggtccccatcctggtccgattcctaggtcccagtccgagtctaggactcggtaggcgttcaagtcctagtccgagtttgggtttcgagtttccgatcccggtctggctctagatctaggttcgagtcttgggtttgagtcttgattcaggtctgggtctgagtctcgggttccgatccgtgtctgtgttctgaggcccaggtcaaagtcccccatccagttccgggtcctaggtcctagtctgggtccatgtttgggtttaggtcctagtcccagttccgatttcgattctgtgtctaggttcagctttgggtctgggtctccgtctaggtcggggtttgagtcctagttcgagtccaaggttgggtcttggtccaagtccagatcccggtctggatctgggttttggtccaggtctgagtccaagtcttgggtcgggtccaggttatggtctaggtctcagtccgaatctaactcccaagtttcgatccctgtggttatgggtctgggtctgggttcaagtctaggttcgtatccagatccatgtctaggtccgagtttgggtttgggatcgggtcccaagttcaagtctgacctgatcccgg

SEQ ID NO: 339798 - DNA, 989 bp, Cannabis indica
atccataaccattcctaaaacagtattcaacatagaaaaattaaaatggaatagagaaagaaactgttggtggaaagactctggatcttcactttgctcctcttgccgctcttcactgcgttttaggtctccaaatcgcttcccctaatttttaatcgcagttttctatttatttctcatttttagggttcgacggacaaaaatacccccgatcgtacggactctcgccgcgacgactggagcttccaaaaaccgtgtttctgttttggactttatggccgcggccatgatgatctcgcagcagccagaagtgcgctgagcctgaatttggcgtttttcttggctccacttgtcttttattgcacttttgcatcctggtgcttccattactccgagaaacctgaaaacatagaaaacaagcataattccgtcctaaaacatcgaaaaacgaacataaaagtgatccaaaatataggctacaaatagcctaacagtaattctgcaaaagaaaatcgaatagagtcaatacacttcttcacatctaaagtgaggttattatgaaccttctcatttcgagtgcgccagatggtgtcgaccacaagtgaggcatacaagaaaacctcctccacatcagtccccttatgtttcaggtcccaaatgaatttgacccaatcccacatccggataccagtgtcacagatcggataaataccccaaggagaagatcgccagacatgaaaagccacatcacaagtaagaaataataataataataatattatataataataataatatattaataatgataaaataaaaatataatataatattaataaaaaatttattattaatagttatcttataatttttttagccactaagaaatctctatttttaaggtatttggccaacttcgagtaccctaaaataccccgatatttctaaaatcaacttatcttaataatctcatcaatatttctaactaa

SEQ ID NO: 339799 - DNA, 550 bp, Cannabis indica
tctctatcaagacaagctcaaagaaaatcatcgtttcacgtctaaatacttagagaagctattgattccatatctatgatcagcgctcccactcaattaaactatcatgttcctaagatgtaaatatccgccagaaccataggttagtatccacgaacagcttgaagaacataaataatacaactaaattgaacctaagcatatcaggattaagattcatagacataagatcaaccattgatattaacttagaaaaatataatggtaagtttatgatatcttgttcaagatcaatatcggtctcttctaatgtatactccatacatctgatactggtaggccgaaacataaaaattgttaaaccgtgggaactgcccaacccattaaaatctgcccgcatggaaaccgcccattaaaaacctgcaaaaattgggttgggttgagttttaacttgctctttggcaggcgggtacaggttcgcctaaaaggggcgggtccaacccgtacccgctatttatattttttttttaaaatttataactaaaactaa

SEQ ID NO: 339800 - DNA, 1135 bp, Cannabis indica
gtttcagggaacagattgagaggcctgatgttgttcctccctactccgccattaaagacgtccacaggcgatgttctagctccagacaacgacacgttcatcattccgatgttgatggacccattgttagcacctccgtttgtttcgtttccagccatgatggtattcttacttgaagtgaataatattttaattctcgattcccacagacggcgccaaatgttgttaagtaaattttacaacaccaattatatatgatattattattattaaagatatattgaagaacaactgcgagtattcaaccaagagtggcgagtactcaaactgggaatgagaaatgattaacagaaagctgaaaataacaatgagacaaaggattatagtggttcagtcagatcacggtctgcttagtccactgtagcaagagtttcctcggtgccatttcacggtggatcacccctttatatacaaagcaggtgtccgatcaattatacaaggattgcattcattgtcaatccgtttttacacattgaattacaataattaaactaaacaacgttaacattaataaatgaacggcagttactaagctcatcaacgtatgcgtcttccgaatctgcgagttgactgttcatattctgatgttaaactcgcaggtttatcattacgtttagaatgtctgcgtccttagtcagtcgccttttgtggacatcgcatgatgagctgatagaacttagacatgcgagtctatattggtttatcaaggctgcagggttcttaggaccaactcgcatttatagaaagtcaatttccaggtttatacaaggacatggagaggatactcgcacatagtttgatatatgcgagttactctcttatctcacgtaatacgagttataatcatgcgattagactttggtcatgctcgctgcacctcgctgattctatctttaagcgaggtttaaaactttgaggagtctctcatggacatcttagctttcattggaaatctgagtacacgtgtcctctaaacaggagtctggtctcgagtttttaggtgagagaaatctcactataacacagtgtagatcatctatagaggatccttgactattaggattgtaacaatgga

SEQ ID NO: 339801 - DNA, 756 bp, Cannabis indica
acgatcactctagattttaccttatgctaagaaatttgaaatgtttgagaaatatcatgaatttctagcaatgttgaaaatcattaaggtaagtggttaaagatcttgcgaactgataggggtggagaaatattgatgataatataaagtttatgattagttactagcagttgcctaagttcttctagggatataccctagtgataggaaaatttcaaaatgatggaatggttgtatacttagtgtataccaatactagaatcatgcatgtcgtgatcgtgactttaagaaaaactagaactgttaaccaaggtttgcatgtttgatagctattctaagtgattaggggtgggccatcctatggtcattaagataataaagtatttgtttaaacaaatactacttttctaagaaaatgactcagtctgaaaacaaagtagcaaagtagaggagatattttttatgattccaaaactgttctatcatcttattcgaaataagatggccccattgcctctgttgtcttgacacaaccgaagaggtcaataccatttagtgttcttagaaaaaagtcacggtaccttgtcgtagtgggagggtttcaaggaactcaccctgttatgacttggaagacaacagtgattaaaatccattgttagattaaacaagtaacggatagtcagaataaggaactaagtaaagccaagagaactacaatggttgaaacctttcatatggaacaaccaaaagttttct

SEQ ID NO: 339802 - DNA, 661 bp, Cannabis indica
ccgaacaaagagcctgggactccagctgtctcagtacttctctttttatctttctttttatatatctatccgaccatgaggccttttttaagacatcatgaccggcaagcggtctttacagacaacaggctgaccaggtagcttttaatcccggtattacatgcttttgttatctttaatgaatttcattctctttttataatcatcgtgcaactgtgtttgttttatctttaccaaatgctttgtacaggtataggtgccccccaagtgaccgagcagacttatgactcgtggtcacttgttttttgcaggtatacttttttgtctgttcgaggttttgggttcgactaaaccttttgtacgcagtggatggtaaattaacaacatgttggtaatttcaacccaatttgaattttgaaataaacatctttattcatttattgatcgaaaatgtgtttgttaccgtagtaacttacatcagagatatttgatctaatctgatcttttagcttaacatgaaataaaacaaattgcagaaattagaaatagtactttaaatggtggtcatccgacctgagtacttttcaatttttgtccgaacctttgggcgtagttcgcccagcaagccattcacttaaaagtaaatgttctttcagtactt

SEQ ID NO: 339803 - DNA, 754 bp, Cannabis indica
aagggaaaacctggacctgtttacctggtcacatggagacatggttggaattgatccctctgtgataacccatggactcaacattgatccaagcatctagcatgtcaaacaaaagaggcggttgctagacaaggagcatgctcaggcgctcaaagatgaagttaaacgactgagggccaatgacttcataatagaagcattgtacccttagtgggtgtccaacctagtgctggtacctaaacccaataagaagtggagagtctgcattgacttcacctgcctgacaaagcatgtgcaaaggactaattctcgctgcctagaattgaccagcttgtggatgccacgactggcaatgaattcttaagttttatggatgcatatttaggttacaataatataaagatgtatccacctgatcaggagcacactgttgggttttgtgccctaaataaaacccatttcaatataatcagatttactaattaataaagatcagaaatcattttatgttgcatggttcacatgatttatttcatgtttatatttaatgtacaacttctattaagtctagaacatatgtatttgttcatgattatagtaaggtcagcacagtggaatataatcaggattatatgttgaaaagtttaattccctgatttgtcagttcactggatttagactggcatgataatcaacgataggtatacttacaccttggataagtgttatgtcatttccaaggcattggcaaagt

SEQ ID NO: 339804 - DNA, 880 bp, Cannabis indica
accaactcccaaacttcattttgtgacacagaactcaattcttctttcattgcatccacccacaatgcagatttaggactattcactgctttttggtaactggctgactcagaatcatctcccacattaaactcacgttcctgcatgtagacaagatagtcattaggaatagcaggcctacaggctctttgtgatcttctcaccacaacctcatagtcccctaaatcaagattttcatcttgtactggatcttaaggttcaccatgagcttctattggaacttgttcaatcacaggatcattagtaggattagaagcggaagcggaagcaacaggtataggggcatagacacgctctttcctgaatacaatttctcttgacccttgacttgaaccaaattcatcctcaaaatagacagctcagtctgattccatcaccctggtggtgtgaaagggacaatagaacctagaatctcttgaaccaatagtgtagcctacaaaactcccactgatagtcttcgtatccagcttcttagatttagggttatatgaccttaccttagttttgtatccccaaaccgtgaaaatgacgcaaactcggtttcttgcctgaccacagctcgtatggcgtctttggaaccgacttgctaggcacatatcaagaagtgtgcaattccttctttcagcaattccattctgctggggtgtacctgacattgtatattttgcatcaatgccacattcctgaaagtatctagcaaacggtccggggttccttccagtttcatcataacgcccataatactctccacctctatcagaattgacagctttaatcttctttctcttttggagctcaacatttgtcttgaaaatcttaa

SEQ ID NO: 339805 - DNA, 1180 bp, Cannabis indica
gcacgttactttcaacaatatgtgaagcgaccaagcaatggacaaaaccagccaaatttgcccaataactcaggcagccaaagattacaacctccacctatagaaggagaggacattctagttatctcagtaggtccacatctcgcgtgagaaagtaacaatgcctaaaaaagatatgtcaaggaagttaagaatgagcagtcagtctttgctccaaaattgtctaagaaagctaagactaagaaacctccaattgtgttctcggaggaagacataaagcatgtgagatatcctcatgtcgacccactagtgattacaatacagcttgctaacaaaagaataaaaagggtgttggtggataacggaagttcagtgaatatcctttataaggatacactgaagaaaatgggactggaaagagttaaaaccttgcatggtaaacctgtgttgatttacaggaaatagtgtcaccagtcaaggaataattgaacttccattaactgtaggcgagatgcctttatccactaccataatgtaggattttctagttgttgacttaccatcagcctacaacatactgttgggtcgacctacgccaattgaactaggggcagttagttcaattaaacacctatctttgaagtttcaaacaccaacaggcataggtgtagtgcgaggtgaccaagtactagctcgttgctaccatagagctacagaatagaaaagctggtcacaattgagaaaggtgagaagcaattcgagaacttgtatcctcgagttcaagaagaaaagaacctattaaaacctttcgaggaattggaagaagttgttttagatccagaaattcccacaaagtgtgtgttcattgggaaatatctagctgaaaaactaaaatagcaactaaaaagttttctgaaggcaaaccaagatcagttcgcctggagccattcagacatgatagggattgaccctaaaattatttgtcacaatttgaatattgacccgaatcacccagcgaagacacagaaaatgttgggttttgtgttctaaataaaatccatttcaatataatcagatttactaataaataaagattagaaatcacattttatgttgcgtggttcacatgatttatttcatgattataaattctattaagtccagaaaataagtatttgtt

SEQ ID NO: 339806 - DNA, 664 bp, Cannabis indica
tttaatgttgaggaaatatgtttcagactcgactcatgcttgagttgtgaaacccttgaactacagtcagacttatcctacgaggagcagcctgtacagatccttgataggaaggagaaagttctttgaaaaaagaccatcgctttggtcaaagttctctagagaaaaagtaaggtggaggaagccacctgggagttaaagtctgacatgaggactcaatatccagagctattcagtagattttgaggacgagatacttttaacggggagataattgtaatgactgctttagtaatttggactagtgaaggcaattaacactaatttttgatatttttataattatttatgaattcaattattttagggccccattttttgttgggttttgtgccctaaacaaaacccattttaatataatcagatttactaattaataaagatcagaaatcattttatgttgcatggttcacatgatttatttcatgattatctttaatgtataaattctattaggtccaaaacatatgtatttgtttatgattatagtgttgtcagcacagtggaatgtaatcatgattatatgttcgaaagtttaattccatgttttgtcagttctctggatttagactggcatgataatccagggcattggcaaagttta

SEQ ID NO: 339807 - DNA, 581 bp, Cannabis indica
aaggaaggtccgggaggggcttaacctcccgtatacttaccctttacgaatggtccccatctgtcagcgcgtaagaaggaaatggtactgtagcttgccccttctataccaaagacaatgcaaacttcccataaagtaaatcatcgtggggatttccccattacctcttcttccatgcccctttcccttacgtctctaggcggctcatgacctcgcctatcacataaactgtggacatgtcttgtgttgtgaaaaattgtatacgcaagtgtacgcaatcgtaacaagtaataaagtgataaagtctccacagagattgaaaattagaaattgatttataaaactaattactcacaaattggtttcaacaaaaataaaaaaataaagtgatgagaatatgtaaaaaaaaattaacaaacacaaactatgaagaaaacaagctagaactatgcaaagttgatataatggtgcaaatgagtattgttgcaaattgatgatgtcaactaggaatttaaaatgtcataatcctttttccaaagtgtttatgatttgattctctaattaattaacatattcctatg

SEQ ID NO: 339808 - DNA, 630 bp, Cannabis indica
tggttttaaccatagttctcttggctttgcttcttagtttcttattcttactatccattacatgtttaaactaacaatggattttatcacaagtgtcttccaagtcataacaggacgagttccttgaaaccctcccacttcaacgaggtaccgtgactttctatctaagaacataagtggtattgacctcatcagttttgttaagacaacagaggcagtgggaccatcttatagagaataggataatagaacactttggaatcaagaaaaaaatatctcctctactttgctactttcagatttagtcactttcttagaaaaatagtatttggtgaaaatgaacactttcttatcttaatgaccataggatggtccacccctaatcactttagaatagctataaaacttgtaaacctcagttaacagttctagcctttcttaagttcacgatcaggacatccctgaatcaagtaatggtgtatactaagtagatagtcattgcatcattctaaatttttcctatcacaagggtatttcctagaaggacataggcaactgctagtaactattcgtagaccttagggaggtaagtttggatacaattcaaaaatcaacataatgatctttgaa

SEQ ID NO: 339809 - DNA, 596 bp, Cannabis indica
aaaattgagagagttatgaattttttaagattcgggttgaaatcgtgtcgagatggtgcctatcgcactagcatctcggacaaggagacccactcgtgcgcgtgcgtatgggacaagaagttgtctgaagccgtgtgcctttagacacggatgctgcatccgctcatgaatgctgcccatcagaccctgcaatttcctctcttgcgcgcgcggaagggctgcgtgcagccttcctgggctgcacgtccagccctcctaggcagctactcatccaacccgatttttgtgggatttttttctcaaatttcgatttttccaattttcaaaacccaaaaatcaaactaaaatattatttttaatatatttaaacttaaatatcaatttaaaattaataatatttatttttttaatagattactattattttttgatattttaaggtttaaatttaaaaattgattattttattttttaaattatggtcaaattttaaaaatttgttaattctttaatatttatatattatttaattataagatcagatattttaatattggacatattttaaattaaatgatagccttatcttttaattt

SEQ ID NO: 339810 - DNA, 614 bp, Cannabis indica
caacaagatttggtaagcatattttatatacatatatattgtgtatatatataactatgaatagatcactaataattatatttaattaatgtgtttattattatatatagtattgtcaacaacaaaaggttgaggaattaaaggaagtggttagaagagaaatatttggagaatcatcaatatcatcatcagcttattatgatgcttggaaaaatcaattgaagataattgatgtggtagaacgtttgggattgtcttatcattttgaatctgaaatagaaaatatgatagaacaaatctacaacaaaaccaatagtgatgattttctcaaagatgaagatttgcatgatgtttccttgtggtttagacttctacgacaacatggatttagggtttcttctggtaaatatttatacatatatgttatattaaatgagactatatatataactaaaaataattaaaataaaaattaaaatataattaattagtatacatgcatcgcacgtaatattaatctaatatattatgtatatatacatgtagatatatttgaaaaattcaaagatgaagatggcaactttaaaaaatatttggtaagtgatactcttggt

SEQ ID NO: 339811 - DNA, 1409 bp, Cannabis indica
aaccatgcaacataaaatgttatttctcatctttattaataagtaaatctgattatatcgaaatgggtattatttagggcataaaacccaacagtccaaccgtgcaagcatagtgggacgaactaaaaagtatgttccaaggcacgaccaatcagaggaacaatgattttgagttggaccgagcacatcgaacccctttctcccctaagatcaatatcgtggagttgccccacaagtttaagatgccaacctggaagatgtatactgggaaggaagatccattatcccacctaaagtattttgaaatgcaaatggatctctaaggagtacgaggagacgtgtgttgtaggatttttcctgctaccctctcagaaaccgcccaacaatggtatttcaagtttgtgcccggaaagttcaactcgtggaaggctttctcctcagagttccatgcacaattttcctcctctcatcatctttagttgcacttaggagatttggacaaggtaaagtaaagaccaggagatcctctctgagcctacatcagcaaattcatgatggacgcgactaaggttttgtgggtaaccgaagacgggaaattgtctgtgatactgtgggcattgaagtccttggtgagctttggaaggacataagaaagaacggcccagtagactcgatcactaatttccttgatcctgcataaggttttatcaaactcgaagaggctatccagcgggcaaaaggtgagcaaaaacctggcaagtcaaaagctccttctactgggactttcgcccagcttccccacgacccaagcaattcaagttcaaatggtaaatagtccagcaacaataataggcaagggaatggaaaaaagggaaagttcaccggtaaaatggaacaagctccccgggagaatccaaccaagtatactgcatttaccatcctgacagaggacatagaaaatgtttacatggcgacacagtcattagccccgtacaagaagcccgcacccatgaaaaaagatgtcagcaagagagacatgaccaagttttgtcgtttttatggacactacggccacgacaccaatgaatgcaacaatctgaaatgggagattaaatttttgataagaaaaacaacccacatgtatagaagtatgtcaaggcagatcaaaatcagaggggcgataacaaccaagacttgctaccacaaatcgtagagaagcatctgcaagtcattgttgaaggcccgcacatatctaaaaattcaggcaaagctcaggagaggtatgcccgaacagtacagcacgagcaagaagaagtgatcctggccgtagaagagaggaagccgatattagtttttttgcactaaataaaactccatttcaacgtaatctattttattcaacatcaata

SEQ ID NO: 339812 - DNA, 550 bp, Cannabis indica
attctccaccaaagtatcttatgacgctccaaaacttcagttccatagtttgttccacaaggcgggagcaacattgcctaaaagagcatgttccaatgcttgaataaggtaggaagatttagtagagaataaaccactcaactctttagtccaaacccacctatctttaccctaatcactgggcctaccacttttgaagatgttactggtcgtctccgggttataaagagtgtggagcttagatttcccaatccctgttgtttaagagtaaaaccgctactttcttcaaaccctcaggccgaaaagaattaggtttagggtggaattcatggacatggataacccatggatcattcaagatatatttgtctcttttccatcgaaaataagcttgcaagcacctttcttgtgacagtcagtagtcccgtgatccgtaagggaaaataccgggtaagctgtgcaaccccacaccgcctggggaaggtcaagtgagatgattctgagactgtgtaggtatgggactacacagttgaagagggcttaaatggat

SEQ ID NO: 339813 - DNA, 645 bp, Cannabis indica
taatgactaccattgttattaggcaccttaatcaagttagtcttgaaaattagtaggtgggtatttgcggtacgagtagtgtgggttgaaattttttttttttcaaaaatcaaatcgcacttgcggtttttgtaatttttcaaactgcaaccgcactgcgagatcttaaaaccttaaaattatactgtaaaattacagtgatgcgttgcgatatgtacagtttacactacaatcagaaaattcaaaaataagcctaataaagttttaaaaataattaaaaaaaaaacttattaaaattttaataacatatataatcatcaagtcattttattaaattatttctaaaatcgtattgtaaaaattaattattttataatatatcatgcggtgcgatttgaattataattattaaattcaaaactgcaaactacactgaactacacggtttgataaaaatacaaaccacacacaagtctaacctgcctatatctaaagtcgaacctaactttaagggtgcgtttggaagtaactgtgtaattactaggtaggataattactagggtggtaattacacagtgtagtaattacactatattttaaaatgaaaggtgtgtttggatatgaggtggtaattacatatgaatt

SEQ ID NO: 339814 - DNA, 865 bp, Cannabis indica
acaaaatataaaaattgggtattatgctgtaaatttcccttgttttaataagtttgtatgatggttttttttttccttaattctctttgagatatcatttttaaaaatatatatatatatatatatatgtaatgggtacctgatgagaatccttcccctagtggataatccatgctttaatttaaactggtattaggacgggtaaatggtgaatttaggaagcaagtatcgggatgggggagcaatccccgcccctgccccaccccgtctacatctctaattacaagaaaggctaaaaggcaccattgcctagcacctttttaggtatcatattactattgttgcaattaagtaggggtggacatccgatctaatctaacattttttttgtcatccgatccaatccaattagtaattagatttaaaaaatcatcatccactccaatccaattaaacctcaaaatccaatccaatccgatccaattactaattgtgtttgatcgattttttaattggatatctaattgcacacttaacttttaatattaacttaaaaacatgaagataaatacgcaaaacttaaatatcaccatttatttttaagtttaatactttataaaatattattgttacaaacgtaatgtaactaaaatataattcatgctatcttttgaaccaaatttaacgtaacttttagcaccaaagttaacacacattttatatcaccattaaaattaaatttttacaaaatattttttaataaagcaatatattacatttacaactgagtaatttgcggaaaaaatatctaagttttatgccgagtagcagatatgtacctaacttgtatttttggcggtaaaaa

SEQ ID NO: 339815 - DNA, 981 bp, Cannabis indica
tgatcatcttgagctctcccttgagttactccctttgtaaaatctatttgcattcttcttgaacttcaaaaacttcttaaatttctttgtgagtagggttatatcctccatatcactatcaccatgctcactagcttcactatcatcatgtgaagtggatttgaatgcaatggtgttcttcttctttttatcgacttcctcttcttcttgagcattcatgaaaatctcatgattcatgagagaaccaatgagctcttccaatggtagagttgagaggtccttggcttcttggatggcaactactttgccttggtaggctttggtgagacttctcaaaatcttggtcaccatatctttttgtgtaagtaccttgccaagagagttcaaaccattagtaatagttgtgaaacgagtatacatgttagcaatggtatcatgttgtaacatcttgaaattttcatattgagtaactaaaagttgaattttagtttctttcatggcactagttccttgatgagttacttctaacattttccacatatcatgagccgaggaggcttgctcaatatttttaaatatatctctatctaatccacatattaaagcatacttagccttagcattcttagacatcatctttttatcattttcatcatatgcatcatatttttttatagtttctacaccatctacaacatgcataggaatgtaaggaccataacatacaatatgccacaaatcataatcaatggattgaagataagttttcattctaattttccaatatggaaagtcaaccccatcaaagaatggtactctacttgtgcttaaaccttctagcatgttattgtgtgaattgcttggaaacgacataccttgagattgtgaaatctacccaaaaacaagagcccttgctctgataccaattgttagaccaagatatgtttccaagagggggtgaattggaaatttaaactaatt

SEQ ID NO: 339816 - DNA, 1010 bp, Cannabis indica
aaaaaagtaaggaaaaaagaaaaaaaaaagggtaaaatcgagaagacgaagtctactctaaacccttaagtgtcattacgtgggacgaagatgggtcctcgaccaaaatatggtgaaaagaagtattctaaacgcaaaagaggaggaatctaacgcgttttaaagaccgcctatgattaatactttgggttattaactaattagggtttaagcatgagatttaattaatatttgtgaaatgcatattttggaaatatattttatgtcatatatgtttattatgctattttatgtgaatttcttaatttctgtgattgtgctctgaagctgtgggaagtgacgttgggcctttaaagagtcacattttatatgtataagaatattatcagagtatcattgttagatattagaggcgttagaatttttggggtttggtaattgaccaatttacccttggaaggttttaattattaatttgatggaggggcaagaaggtcttttggcaaagacctcttttgtcttatttggattataataggctgagtttaagttaataaaaaaaataaagaaaagaaagaaagatatatattacttaggtttgaaggaaaagaaagaaattagagaaaatattcattcatctctttaattctctctctctttcgattctcttggggagcagctagaattgtgttgttcactattgattcaaggatagtgattgaaatcctcaagttttgatccaaggtaattcttccttctttattctcttaacttaagttaggttttatttgtgagtttaggttataggttgttgtatgattgaagatgatttagttgggtattctggaaatggtgtgatgttgtttaacgttatttgaactgaaattataggttgatttgaggtttgggcaaagttagagtttatgaagtcaaaactagctctctaatggtgaattgagaatttgtgtgaattgttgagttctaatgcttgaaactggtttattatagtg

SEQ ID NO: 339817 - DNA, 576 bp, Cannabis indica
caccatcaaagttctggtggttagatattctccaacagtaaggggaaatctgatacacccgatgagtgtgatgctttggttagagaggctacacatcacttgattacagggcgccaagtcagcgagttggagcctcatattttcatgtgttgattttgaaaagaatgttgaaagaggctccatggtccaccatatatcttgttatagtcgtattccaaatttctgcggtaacgaccagggggtcattgtgtgagaaactgtcttggactggatcttctttctaagaaggagatcatgggctctctaatcattggttgcatagagcctcattattttcctttcacgaagtcacttttgggctcgtgatagagtgtccgagcatagcgctctatggttttgttggtctcgcctgcaatatggggttcgtcaatgacgccccctaactgttctaccactagaggtttgtgtataattggttgtacctgcctgtgcacctaagggaggccagcatttgtggatggaggctagcctttagacatggaggtaagccttcagatatggaggccagccttcaga

SEQ ID NO: 339818 - DNA, 1055 bp, Cannabis indica
catgcttcacttgttgtggactcaaatgattacttggatctcaaacaagttggggaaaaaatagttgacaagtgtaagggccttcccttagcaataaagtcaattggtgatctcttacgaggaacccgcagcaaggagaaatggaacaacattctaaacaatgatatatgggagttgtacgaaagaaatgaagtcaaaattcttccagctttgtggttgagttattttcatttactttctgaagtaaagcaatgttttgcttactgctcactatttccaaaagattatcatttcaaaaaggaagagatggtcttgttatggatggccgagggtcttttacattcgaaaaatgaaaagacagttgaagaggttggagaagagtatttccaagatctaatttcaaagtcatttttgcaaccatcaacagatcaaacttttctcatgcatgatcttatacatgatttggcaatatttgtttctggtgaattttgtttaatgatggataatagaagtaaatgttctcacaagcttcgtcatttttcatacatgcagcaatgtgcaaaagccgatgagcctaaagaatttgaggagttatttaaagctaagtgcttacgcaccatattgtggcaccaagactcaaggcagctaaggttgttgaagattgaacacttggataagtcattcccaagcttgagaatactatccatacggaacttttttatccctgagtttcctaattcaataggcaatttgaagtatctaagatatttgaagttagattgttgtgagattaaagagatacctaatacaatttgtaagttgtataatttggagacactattgttgaagaattgtaggaaagttactcgactaccaaataatataggaaatttaatcaagttgcgacatcttagtgttcctgaatatggtttgttagaagagatgccattgcaattggggaagctacaaaatctgcaaacacttaacaaatttgttgttggaaaaaatatagattgtggtggcattaagttgttgaaagagtttcaagatctaca

SEQ ID NO: 339819 - DNA, 485 bp, Cannabis indica
aaaaattaaaaaaagactattgtttcttaatctccaataataatctattttcaatttctattaatatataaattcaaccaatatacatatatgtcaatatatatatactcatttttatatttacactaaaaatatatatattcattactaaaataaacaagttagtatatatatatttttttgttgaaacaattagtatatatatatttaaatttaggaatattggcggctaaaccacccgttttgtaacacttaaccacaaaaactgaatttttggcggctaaactatctaaaccctggttctgttttgctctgcacacctctgtctgaaaatcacagttaagtgccacagtggactgtcacgtgtacacgtggtgcaagtaatattaaattataaaaaaataattataaaatattaaaaaaaattaaaaaatcaagaaaaaaaaaattaaaaatatttttttaactttttttctttttctttt

SEQ ID NO: 339820 - DNA, 905 bp, Cannabis indica
cctcaagaaataattggagagcaaagtgatatcccacgccccattggcaccaatcaagtcagaaaccattacatcaacaccaggcgcaggcgaaataggacgaaacgatctcggcctgggaagccaaggatcccgaaacgcatgcacactctgaccatcccccacacctttcctcatacccgattgcaacaactccagcccccacactaaactcgaccacaaatgagacgatccagggcgatccttagcctccagaatggacagagtgggaaaatatttgtacttcaacacccgggcggccaaagaatccggcgattggagcagacgccaaacttgtttagcaaccatagcttgattaaaaagccgaatatccttgaagcctaatcccccctttgacttaggttgacagacactctcccacttgacccacgcaatctttcttttatcattctgagtaccccaccaaaattgcaaaataattgagcgaagcttatcacaagtggccaccggtaactggaatatactcatcaaatagtttggaaccgcctgcagaatagccttgattagaatctccctaccacccgcagaaaagaaactcctcttccaacctcgaacccgtttctgaaccttgtcacaaatacttgcaaaggtccgctttttattcctcccaataacagttggcaaccccaagtacttatcatgagtagcaactgaccccaagcctaaaattcccaatacacttgcacgatctgctggcaaaacattcggactgaatgtaatagcagatttttcaaaattcacttgctggccagaagcattctcataacactgaagaatccgacgaagagactccgcctccctcccattagctctccccactactacaaaaggccaaattcgcgacg

SEQ ID NO: 339821 - DNA, 556 bp, Cannabis indica
ttttttaatatataattgtctaaccaactaaattacttattctatttcaacaaaagggatatatttagttcaagtttacaaagaataattaaattatgaaatgcacataaatataaattgacactttatttacaaaaatacctccataaggtgtggacaacatttatacccttatataattttaattaccaaaataccacttacactatcacttacacaatcaaacaatagttacaaggttgttgctgtgtggttgcgcagtggttgcatcagacgaatgtttcaatcagacaatggttatagggtggttgctgggtggttcgccgaaggttgcatcagacgaaggttacaatcagacgaaagtttttgggtggttggctagaggttgtatcggatgaaagtttcaatcaaacgaaataattgttagcaaaatatttatgcagctgtaatgcaactgttgtgaaacattaaaaatcagaacagtgtttccacgtacgtaactctatttacatgtctctttatgatttaattgttagacttttatttgggcttacat

SEQ ID NO: 339822 - DNA, 577 bp, Cannabis indica
actttatatgtgtttatttattatcattttagaagttgatatttaggatgttaaacaacatacttgttagtaaatataagatcttggtaacgtatttccatcaactggcctcagagccatggtaattgatttacttttaagaaatttggacttaaaacgatttgtgtgtgatttggatggtttcatgttgatctgtgtgttatatgataattgattgatgcttgtgaaattttatgaaaaataattgaattttcctttctggaattatttttgttggatagtttagaaaaaacttaagcaattcacttttttacagaacttaattttgattttatttgaattagttatgcaattttgaaaatcagaaaatatgagggtgtcatcactcaccccacgcgcgcgaatcactcatttcctcggacgcgtgcggcttcggacaagcacatgttcgaaaaatcttggtctgggcgtgttgacgttgtttgaagactgggatgcgtgcgcggagaggctgcatgcagcctcctgcgccgtgtcttctcggtcaggctgcccctcgtgtgcgtgtggacagtat

SEQ ID NO: 339823 - DNA, 1058 bp, Cannabis indica
aaatatattcaaataaataaaataaatacctgaaaaaatatctaatttaagttgttctaaaatagcaaaattttcaacttaaacaatttttcagtattaattaaataaaaaatttaagtatcttgaactaatcaacttaatttgtaaaatatccctatttaagttgatctaaaatgaacaaattttcaacttaaaaatattttaaagaatatatgaataactaattttttggaaaattctacacaattattaatttcatatatttttgttaacacagattttcgttaacgataataagcctatttcgtgataggattagcacaaaaattaattgtaatttaagaaaaaataataatgtaagaacaacacaaagtttttacgtagttttacagttaactctgcatagtccacgagtcaattttatttacattattacatagggtggcagttaattacaatcagattcaaatcccacaacaatatttccccaaaattgtgggctttaattacgtttgtcccacgtaactaaatgtggttattatttgaaaatcacacagctgtgattcatcagcttttaatgggtcaatgctgatgtttatttagatatgctgcaaagtgtatctcgctggggcatttcgctgggaacttgaatggcaacaataaccctggcagcgagttggagcttttcctatgtctttctgaggttgacaatataaatcccatcatttctgcgattgaagacataatgctccatctgacaatcgcagttcttggtgataaggtgaacttcagtagccaacatcatttgagtgtttgcttctatttgagagagtttcctcgtcggagcagtggatctcattgaaagatgtctggagtttattagtgaaggtaccaagagtatgccttcctatagcgacatggatgcctcgctatctgttactcagattcttccaactattatacttagttagtataatgtaaattattcgctaagtgtcctaatagtcaccatgtcttgttaacacttttttactacatagcgaggttgatgcctcact

SEQ ID NO: 339824 - DNA, 494 bp, Cannabis indica
cgatctaagcagaagaaggggaacagatgagaagaatactacagcaatcgttgagcccagagcccatactcaaatccccgctcagaaagacgccgacgtaatccaaaccgaaaaaaatgttgagcaagtcggcccagccgtacaggccaagcttgacgagttgaagaatatgtttcatggcatggccggacagcgtaataatgatcttgagttagaccgtgctcgcagaactccctctcaccagagatcaatctcctgccactgcctcacaagttcaaaatgccaacgtggaagatgtatactgggagagaagatcctctttcccacctcaagtattttgagatgtaaatggatttacaaggagtatgaggggacgtatgctgcagaatcttccccgccactctctcggaagctgcacagcaatggtactgcaagttggctcctggaaagtttcgttcatggaaaaccttctcttcggaattccatgcacaatt

SEQ ID NO: 339825 - DNA, 1228 bp, Cannabis indica
gctaacctagcttggattgaacataaacaaatcttgaattctcaaagaaaaaggggcaaatccctgctgctcaaaggggccaaaaatagagagagagtatgggagaaaatgatttttctttatctttggtttttctcaattttctaacttttaataaaataaaataaatgtaatattgaatcttattattcagccataaccattagataaaacacataatcacagtacacttagtccactaaaggacaaaataacaatggggcaaaaagaccaatttgcccctccacactaaaataacatagagggtactaaagggtatttttgggaaattctaaattctcgaccaatcccgaaattcccaatgtctaataaactgccccaatatactaacatcctaagttgtgattctactgagccatacaccgagttccgccggacaccgaaaatgtaaaaatatgaaatctcactatatgacatataaatgcattcaggaatcgaataaacatcataaataattatttaaatatctataaataattttcataattaaaccataattaactgctaattcccaaattaaactaagcggtctttacaaacttgttgtttctcaagccattggattttctgatattgattattttgaagaagtttatattcattatcattctatttaagttttgggtttgttttttatgtgcttgtttgttggtactttttttttatacaagaaaaagtccattctataactgaaatatctaatatattatttccaaaaaataatatagaatgaagttatttaatagaatgattaaggtgctcacgttgcatatatatcaccttcaacttattaagattggccatcaaaatactgcctttattcggtatgtatgtgtataatatgcatatatttttcttctgctttaccaataacttctcctcttacttttttcgaattggtatgtccattaatttctcttatttgtttctttatagttttgtgctttattcaatatttatccaatgggtttattctgtattgatttgaatggattcaaatgttaggttattgaaaattgtgaaaatttggttattttggttacttttgttttactttagttactattggaacatagtaaagagtttttgtttcactactacaatatgggcctttagcttccttttttgtaatccattttataaaaagggaagctaaagggtgtgaaaa

SEQ ID NO: 339826 - DNA, 701 bp, Cannabis indica
tacttatagttctgggatgtatggatttagaccatgcactaaggaatgaacaacctgcacctctcactaaggaaagttcccatgatgataaaagggaatttgagaggtgggatcgttcaaatcgcatgagtctaatgattatgaaacacagcattccagaagccttttggggcacagaatccgaaggggttactatggctaagaatttccttgaacaaattgaggaacgttttgctaaaaacgataaggttgaaatgacaacacttcttggttctttaatgaacatgaagtataagggtcaaggaaatgtaagggagtacattatggaaatgcatcatattgtctcaagattaaggacacttaagattgagctttcggatgatgtacttgtactcatggttttgttaacgcttcctccacagtttaaccaatttaaaattagttacaactgtcaaaaggagaaatggactctcaacgagcttatttctcattgtgtgcaagaggaagaaaggttgaaaaaggacaaaactgaaagtgctcatttggccactacccctaaggataagggcaagaaaaggaaatttgagaatgaagctgctaagggtccagttcaaaagaaacaacaacaggattctaagggttgtttctttgtaaccaacctggacatgtgaagaaagattgtgccaaatatcacgcatggc

SEQ ID NO: 339827 - DNA, 536 bp, Cannabis indica
caacaagctcagtatatatacagtgataagttagttacaaagtctaaccaactaagcaacggaagctacagtaaataactaactctaactgactatgactgtacaaaataacagaaataacagtatgtacaattgactcatacagagtctctaacaccccccctcaaactcagctgggccaatgagactaagctgagtttgtctctaagaaggagaaatcgtgtgctggaaagagcctttgtcaagatgtcagcaatttgatcatgagcaggggtatgcttgacaatgagctgcttcgatagaattcgttctcgaacaaagtagagatctagctctatatgcttggttctggagtgaagtacagggttggctgacatgagaactgtactctggttatcacaccagatggtgggaggatgtggaagcttgaaaccaatttcagttaataaggattgaatccagatgatttctgcagtggtgttggccaagcttctgtattcagcttctgtactggagcgtgagactgttctctgctt

SEQ ID NO: 339828 - DNA, 1182 bp, Cannabis indica
ccgcttactctaagcgggtccgcagaggaatggttcaagaaactggagccaggatccgtgggctgttggaataagttacagaccaacttccggagacagtttgtcgccgcaagaaaggttaatctggaggtcagcgccttgactaacatcaagcagttgcctacggagaccttaaagaattatataaagaggttccgcgaggaagcctcgaagaccaagaaagttgatgacggacaacagcttgcccttctccaggcaggcatccgtacaggaacttcattctggaacgaactacaacaggaaggagctgcgagccttcaggaattccagaagagagtccaaaaatatatcaatcttgaagaggcccaaatagtggcctatggaggatataatcccaccgggatagcagggtatgtgcccggagcccaaccgtcgggtattgtcccaacagtaactccaccaatgagcgacatacaattcactgctactcccggatatggccagggccaggccttggcccccgcgtcgtcccattttaggaatccctcagggataaatggacaagccccctcgcactccgctccgactgcacgcttggccggcccttcccaaggtttaagaagtaaaaggtcctccaaggatagtacccggacggaggaaaagtgacaaaaaagggggtacactccccaatatacctagtatacggagttgacggactcccaagaacgtgtgtactttgctactaggcagaatacacactaccggagaccaccccctctgtacaaggatagttccaggagggaccccaacaagagatgcgagtaccagaacgacattgggcacagcaccaatgagtgcaaaaatctcaaggacgagatcgaaaacctaatccgattgggacatctctatgagtggataaaaaatcggttgcctcatctcaacccgggccaggcgactggagctgtgccacagggaacaccagggggagcgacaggagtactggctccagttgctccccccggagatgcccagcatatccccggtctgccacccaggcctaatgggagagtggccatgatctcgggaggaccccatatcggaggaactacccgcaaagaactgaagcggtatgcagggccgtgaaacacaatgacgtttaggaagttactcaactcctagctc

SEQ ID NO: 339829 - DNA, 542 bp, Cannabis indica
aaagaaacaaggtatttctttctataaactgatgagttttagtgaattattatccaattggattattaattctggactactaaccttgtttatttgtttttcttcttattatagcccaagctgcttgaactcaggtgctatcttagtgagttgaatcgaaagctggacaaaggggtggagttcgtccaagataaagatgaagctcgtttatttatttttgaattaattgtttcagtttaaaaacaatttggatttcaattattagtttgggatttttattccctgttcttttctcataatgttgcaaaacaattttctttaattttatgatttttttttacaaataaattgcaatttatgagttgagcttcatctactttatcttaaacaacaattaccaattatatttatatgtttgtatgtgtaagtgtttttattattggtacaaattctataatattttaaactcttcatagagttattactacataaacactagaaattatttctatgtttatgaataattgttaattctaaaacaa

SEQ ID NO: 339830 - DNA, 914 bp, Cannabis indica
ctgacggttgcactcgattattttaatttcccacatttgctttcaaggcgggaagtcgaggtgtctaaggttcctttacgtacagttacccttttgcctataaatacttggagtactggcacatttcctcatttcatcacccttcgttgttaagcaaacttcagacaaaaagagagagttttcaggcttcaaagttgctgaagagtttacagacgatttcaggcttgcttgaatccggacacttgaatctttgagtaagtttctgaatccctttatgtttttcctttgcatgcttgtgcttttgaatgtatctttgctgtagaaagaacactgtaggaaaccctagggtttgaaacttctgcgactcttcttttccatgtccttgcgttagctttcagccgtaaggcttattttagaactgcattgcgtctgttttccattctgctttctttaagcttcatgaacttttttgccctaactcaagaaaaactttctgacttcttgagtttagacttttcttcgaacatggctgttctttaatctgttgggtactcctggtcggcatatttgcttgttttttcgcttgatactccgtccaacactcatcttgcgtgttgtcttttgtagatgaaccctggtgagtcttgggagcccgagcatcaaatcgaccaggaactgcttcaacttctgcacgaagtccaccctcgtcttcgtgctaatccttcttctgattccgtacccagccatagaatgatggctcgtacgaagaaaactacgcgtctggctgacgcttctgatccccaggtggctcggcttgccaccctgcccgacgccgaacaggatttggcggtcccaatggaggaggaccgtgagggggacgctgaagtccaggaggttgaggagctggacgaagc

SEQ ID NO: 339831 - DNA, 917 bp, Cannabis indica
aaaaaataaaataatatatatattttctattttaatattagatgctattcgatgattattgaatttgattagtcggttggatctattgaatttacatgtcatccaagaaccgaccgatccaatattgaatttccaaaaatatcatctgatccaatttaatcatgattggatatttaatttttgacagttggttgacactggatcggttggtttatcattagattggatcatttctgcacacccctaaaaggaaggtttcagtggctgctataaggtggcgtttggttacaaaataaaaatggaataggactgagaatggtaacaagaataagaatagaatggaatggaatttctattcttttatttggtaaaggctatgaaatcaataactgaataagaattgtgatgtttggtatagtatggattgaaatagaatttttattattttgatcataatgtcctttacttttttaaaataatttttattttataaatttgccattatggtacaaataaaaaaatagtatatatttatgtatcactctcaaactgtattttttttagatttaattatcaaataataaaatataaataaataattgggaaaaaaacaagaaaattccaaaaagggtaaaatattacaaaaatactgtgggtcggcccaatcaacatttgtacagcccacattgaatatattacaaaaatacaatctgacctataccttcagtcgcacgtcacgaacggagacgatgaaggaacctccatcgatgcagtcggctacgcaaccagaatgaaaccagatcgagcgtagaacaaccataaattccggcgaatttcgataggaaacgaacaaatctaaggatctaaatagaaaatttaaaaaaaaaaaaagaccagaaaaccgtggagaaactgaa

SEQ ID NO: 339832 - DNA, 1612 bp, Cannabis indica
ggtacccttaagccaaagtcccccaatgtctaatgaggcatgaccacatagacacgatgaggtgcaagaggtgttgggatgaggtgaagaagctaagatcggttgcgattacaatgaataacttacgaaaggttatcagatataacaatctcatccagctcacaactctggttcctcaacctttaatctcagtgtcggtactgacgcaagggccaaatcaatttctaacaactacttccaattcatttttgctgagccatgaagtttatcaaaaactgacattataggatcctgtagtgatgacgactgggagtttaccttcaatatcaccaatatctactaggtttttggataggcctggttatggtactgctggtaggaagtgtgttgttaagggaaatcacttctggtgaaggttattgatagggattcctatcatttcgatgtaagcataacccctaaggctacatcaaagaaagtaactcgagacattataagccagttaggaaatctctaccggagtaacactcaccctactggaactccgagtctttgccttgagaactacctggtgccttggagtcctcttgagtgacagactgcgcaagagatcctagggcatactgggttgtgcgcatcccctgaaccttccctgagcatggatggtgcgtgcacatagtttttcttacatgaaagatgacttgcggtatgacacgtgtaaagaccgcttagtttaatttggaaattagcagttaattatgatttaattatgaaaattatttatagatatttaaataattatttatgctgttattttagaattccgaatgcatttttatgtcatattttataaatttgcatttccgctgcccggcaacatggaacttggtgtttggctcagtagaatcacaacttagcatgttagtatattgggatggtttattagacattgggaatgtcgggattggttgggaatttaaaatttcccaaaatacccttagaattctttaaattagttttgtgagggcaagggcattttggtctttttgccttctagcattttggtctttttgtggattgattaattgaattatattgatttattaaatcttggtttttgctgaaatgaggagttgaatttattttttatcacttttacaaattggaaaaaaatcaagaaaaaaacaaaaactcttttctctcaactccctctctctctcggcccctcttggagcagcaagaactttggtgattctttggtatttcaaacagattttgagtgcaattcaagctctaggtatagctcttacctttcccttctttagtttcttgaaaattaagaaaaggtgatagttgctatgtttagttttttgtgtatgttgttgtctactgtagttatatgttgttttctgtgattttatatgtttgaattgtattggtatttgagtaggtttgatgcatgtttggttggttttaaactagtttagaattttagctctaaaactatgattttcaagtgaaatgatgaaatctgttgctgcacttgttgttgatgcttgttgttgttttcagaggttattatatgcatatttgagtagtttaaaccaggttt

SEQ ID NO: 339833 - DNA, 897 bp, Cannabis indica
aaaagtcatagtcgctggaaaagtcactgtcaccgaaaaaagtcatcagaagtagatgtctcaaatataaataaaatagaaccgcttctataacatattgaataaaaatagatgacacataataactcaaaccggttataattgaaatataactagttctataacataatgaataaaaataaataacacaagataactcaaaccagttataattcaaaatagaactagttctataacaatgttacaatgaataaaaataaatacacgaaataacacaaatagttataactaaaatagaaccggttatataacatagtcaatggaagtttttagggtagatatggtatgagtgtaactatttggtatgttggagcatgttgaatggatatttttgtttgagttattttatttaactgatttttgtgtgtgagtttttatcgtagttgctttacgaaaccactttttttttctttacgaaaccactttttttttgtctcaaatttttaactagttgataaatataaccagtttcgttatattatattttgagttattgtgtgttattattgtgtgttatttattttactatttatacctcaatatttttcagaatttatccctacttttttttaaattaaattataaatgattttatgaggtattatgtgttgtgaggtattttgttgtgaaactagttttatttttaatttatgtaaaagtggtttaggaactgattttctctttattttttaattgtaatcagtctaagttattgtgtgtacttgtttatatttattatgttatataactggtttgagttatttcatgttatttgtttttattcattataacactgttatagaatcgattctttttttaattataaatggtttaagt

SEQ ID NO: 339834 - DNA, 534 bp, Cannabis indica
taatggcaacaattcaaatttttagatcttatgtcttctttttccaaaactgtaaaaaaatgtttatattagtatatatattattatttgctaatgtaataaataatataattaataaataaaacttacagctttttgaacgtttatataacggttagggttcgcacgtgtcacgatgttactcatgtatttcactacataaaaactatattcttggtttttaggttgtcttggacaatttgctaataaaatttctagccacgccccaagaaacgcatgtgatactcctataatctcatatacgttgttttaaaatttgtattaatatttcaattcattaacatatatataacttagttaattaaaagatttgtaattacataaagagtaattaaattattacttttctaacattgcattaatttgtgagagatctttgtggtcacgtatagggtctaaatgaataattttttctcgtgtaacaacctctagcatccaatgcacacaaaaaaatatattgggatgtatataaga

SEQ ID NO: 339835 - DNA, 614 bp, Cannabis indica
  modified_base (576)..(576): a, c, t, g, unknown or other
tttttttttttttcaaatctgaattttttttattttcggataaaatgagtttaaatattttaaaatgggtttatcttgttctttggatgattattgcatggtttattgtaagattgcaagtttttcattgagtttatcaatggttggaaacccattttcgaatttgtgttttatgggtagtgttttatatttttgtaaaaaaatagatgaaatggatgttggaaattgggagagggttagaaatggaagaacacccccaccaaatccgacgaaaacggtggttcgatgtgtcgttctcaggcgggtttgatttcaggtcccgtcaacccggttcgtcgaccagctcgcccggttccaaggtcagggatgacccgcgccaaacgacatgtcgttcacgcctggagttgtagtttttggttggctgaaacgacacgtcgtttggaaaaaacgacatgtcgttcgcagattttggttcagcccccagccgagaaaacgacgagtcgtttggaccttgcgacatgtcgttttctccaaaacgacatatcgtttaccaaaaacaacacgtcgtacgacacnggttaaaaaaaaaaaaacaggcgcgtggggcggcgtgc

SEQ ID NO: 339836 - DNA, 677 bp, Cannabis indica
tttcaccattttgttccattttttaatttttctatcatttacttgtatgcacaatactaattcatgaattttattcatatttggtcattaattttttattgtggcataaactttatttatttttctaacaattagtgcttattttcttacctatcgtaagattaagtatgaaattgtttggtaatgaggaacatttaaatattaatttatttaaatattgtatcttcctcccatataagattaagatccttataaataattaattatcctatcgataataattgcttgctaaggatgcttaatatggtgaagaaaatttattaaatattatgaatcacaatttatctatcctttcgatagtaaattaatgtatttgattataatatttaatagattgttcttacctgtgtatgagttctactttattaattttgtctaagaactctagcatacatgatgatcatttgttattttgcgatcatttatttatgagagaaagagcacaaatgacatgattttgttataacatgcatttaatggttattgctcttgtttctcattcagctttaagcgttccaagaaactctgccatgttgacgctaaatggaaccaaccacaagcagtgggttgaatccctcatgctaaatttgactcttatgagagtggacttggccttg

SEQ ID NO: 339837 - DNA, 1426 bp, Cannabis indica
ttgtaaagagtttatttagggcataaaacccaacaatattcacttctcaggtttcacattaggatcataagtcacatttaagatggctagtctaaaatatgtaattaaacaaataagcacaaatcacacaatcagggaggaataataataataacattaactcaattagagaaacgtcatctaacaatcatcatatccctaaattgagaatttagttcatgttcaaatacataacaatactaaagcagaatttaacataaaagaaataaaaggagatgacgaaagaaactgttggtgaactccgggctgccactctgctccttctgtcgtcttgacagctttttaggtctaaactttcgcttcccctcttctctttctcacagtttcctttatatttttcgtcccaaatttcaaaagatgaaattggcctccagctgtacggaacctcgccgcgacgagtgttgctttagccacgacgatggagtagctcgccgcggctactgggccaatctcaaaaactacattctgccaaatcttggtcgcggccgttaataaatctgtcgcggccagaagtgaaccaaatcctgctttccaatttttcttggctcgactttgtcttttattgtaaagaccacttagtttaatttagaaattagcagttaattatggttaattatgaaaattatttatagatatttaaataattatttatgttgttattttagaattccgaatgcatttctatgtcatatagtaagatttcatatttttgcattttcggtgccggcaacatggaactcggtgtttggctcagtaaaatcacaacttagtatgttagttttgtgggacggttatttagacattagtaatgttgggattggtccggaatttagaatttctcaaaatcccctttagtgccctttatgttattttagtatggaggggcaaattggtcattttgccccattgttattttgtgctttagtggactttatgttgtgaaattatgtgattttaattgctatttgttagctgaatataaagtttagttatgcatgatatcttttatttcaaattggaaaaattagaaaagaaaaacaaaacccaaatttcctctcaagtctctctctctttcggcctctctttgagcagcaaggaggtggtgttctccttggaatttcaagctgattttagcaagatttttgtgttctcaagtgcttggtatgatccttgtaactttattttagttttcttggtttttaagaaaagttgagttttgcatgcttgagaagttgtggctgtagttgttgctaggttttaattttattttctgaagtttagttatgttttaaaatgatgattcaagctaagtttttgatggtagttagttggatttttaaaaaagtatgaagtttttgagctaaat

SEQ ID NO: 339838 - DNA, 621 bp, Cannabis indica
acactgaattgctttaggaaaattaggtctcagctggtttcctttggtagtttcaaaaaggagagggaaagaagaagactttagaaattttcttaggttttgttttttctctaatttttctttttcttgtttttactttactctttatattatttaaaattaaaacatattatcttactaaagatatatccagccccccaaatccactaaaatccaaataaaaaccaaggaaaagacctatttacccctaactaaattaaaatagctactaactaccaaggatgaactagtcatttccaaaccctgaaaattccaataccgctaaaacctaataatgatactccgataatatactatatcatataaaatacgactctctaaaggcccaacgtcgctttccacagcttccgaacacaatcacaaaaattgggtaatttacataaaatagcataataacataaataataataaatatatttccaaaatatacatttcataattataaattaatctcatacataaatcctaattatttaataattcaaagcattagtcatatgcggtctttacaatcatccccccgataaaaggatttcgttcccgaaatctacctgaacaatt

SEQ ID NO: 339839 - DNA, 1249 bp, Cannabis indica
tgtgggcatggtactctatcactaatggctcaaaagattggtgaaagaataatgaataaggtgtgaaatcactatagaaaatcagtctctcatctacttgttaccagagaatgaaaactaggtttagtttggttgaaataagttggatgagaatgagagcatcatgttcttttatagtatttcaactagggtttaggatttaattacatggattaaaaaagaataaaataatgggaaaaatcactaagtggtcggcctcactagttataattttgccactttatttcaactatttatccttctttcaataataccatattttctaatttcaatcatataaatgtcaaaactatttatttaataattataattaattatcaaataaaattggcatttatattatttattaattagacttaacaaagtctcttaattaacaaataaaccccaaaaccacttttcttcacaattaagcccttgcatagtgaaaatttataaataagatatagcctaattttagaattataattgactaattaaaactaattaactgagtttgcaagcagtattatttaaactattgtggggaccatgggcctatataatcaaacttccaataggtagaactagaatttaccaagtaaatactctaacttattaattctcccttgcgccactattgattcacaattacactcttaattatatagaaccattttcaatcattgggtatctaaactccgcgctcaacaatcttttgcttacataatatactagaagttgtaccttttcttcttctcgcactaaagtggcacttatggcatgatctgacactaccagatacaaaaacaatggctctccctgaattggtttggacaatattggagctttggtcaaatattctttaagtttttggaaggcatcttcacactcaactgtccattcaaacttgttatttccacggagaacattaaagaatggaatgcatttgtctgttgatttaaaaacaaatctactaagtgatgtaattcttccagttaaactttgaacatctttgtgattctgtggtgaaggcatatctagaagagctttaatcttctttggattcgcttcgattcctctggtactgacaataaaacccaaaaaatttcatgagaaaactataaacgtgcacttcttcgggttcagtttcattctatatttttggatgatagagaaagcttcctctaaatcttcattgtggctcatg

SEQ ID NO: 339840 - DNA, 1041 bp, Cannabis indica
cccaaacccaacaaaaaagtgaagagtgtacatcgacttcactaacctgaacaaagtaagtcaaaaggactactttctgcttccataaattgaccagcttgtaaatgtcacatcttgccataaaatcttaagtttcatggacgcgtattcaggtttcaaccaggtaaagatgcatccaccaaatctggagcatacaagcttcatgacagacttaggcctgtataactacaatgtcatgtttgggctgaaaaatgcaggggccacgtatcagaggcttgtgaacaaaatgttcaaagatcttatcaactgcaacatggaggtgtatgtggatgacatgcttgtcaatttcaaaaggctaggggcatgtggcggacctaaacgaatgcttcaaaatcctccacaactacaacatgaagctcaaccccctcaaatgttctttaggagtaggcccgggaaaattccttggcatcatagtcaatgctaggggaattgaagcaaacccggacaagatccaagcccttttaggcatgaagtcgcccactaccactgaggaagtacaaagcctaataggacgcattgctgcactaagcaaatttgtgtccaaatccacagacaaatgtgtacccttcttcaacattctcagaggcaacaaaaaatttgagtggatagaagaatgtgaaaaagtatcttgggagctaaaaaacaattggctcaaccacctgttttgtcaaaaccccttaacaatgaagagctagcgtgtacctagcagtcacagaacatgttgtgtgatgtcctcacaagagaagaagatggtgtacaacaccttatatactacaaaagcaagagactaatcgatgcagaaagttggtacccactcatggagaagctgacctacagcttgctcttggcttccagaaagttaaggtcatacttccaggcacacccgataaaggtgtacactgatcaaccattgcggtaggttttacaaaaacctaaggcatcacatcgactactcaagtgggccattgaacttggccaatt

SEQ ID NO: 339841 - DNA, 587 bp, Cannabis indica
aaataaaaaactaattaaaaataatgttaccaaatacatcctaaaaattttaaaatcatagaagataaaaaatgcattgatcacgatgacactgtttaatcatttttatttttttatctattgatctgaaatagagacaacgaagatataggtctagaggctgttttgcttcataacttaaaaattattttcagttttaaaatacagattacagttttaaaaaattaataggagtcttttggcaaaaatttttaaaaaaagttttttaaaaactgagttttaaaaaattcgaaaatagaaaacatcaaaatgttgtttttaatttttaaaaacaatttttttcatgtcaattttttttgtctaagatattaaattttacatttttactcacatactcagatcctagatccgaaaccagactcgaacccggacctgaatgggttcatgtcatgacatagtgttttaatattgatttttttagtaagaaaaaaatctaaaaatagttttaagaaatttgtggcaaacaccattaaatttttaaaatgaccaaacaggctctagtatttggatttgtctttttttttttt

SEQ ID NO: 339842 - DNA, 1116 bp, Cannabis indica
ggagcaagacgatgttgctctttttgaaactcaacgagatgccttaaaagattcaagaaagagggacaagaaagctctctacctcatctatcaagtggtggatgaagatgcgttcgagaagatctcagatgcaacgacggccaaagaagcatgggagaagctttaagcttgcaacaaaggagcagagcaagtgaaaaagatccatctttaagctcttagaggtgattttgaaactttatttatggatatactgaatcaattttttgattatttcactagagcattatcaattgtcaaccagttaagaacaaatggcgaagaaattagtgaagtaaaggtcatagaaaaaattcttcgtactatgagtccaacttttgagtacattgctataatcattgaagagaataaagtttagaatccattactattgagtaactcatgggttctttacaagcctatgaggagaaacaaaaaagaaaaaagaggcgaaaagagaaaatagaataattactaaagctcaccttggaagaagaaaattctgacaacagtaaaaataaaaaaggaagaggatgtgaccaaggaagcgaacgtggacgtggtcgagaacaacgaagagaaggaaggggtggctataataacaataatttcaataatggagaacaaagtcaaaattcacaagcaccaagagggcgcaaaagaggcaactcattgtcaaggagtgataaatctcacattaaatgctacaattgcaacaagtatggccattatgcctccgaatgtagatcaaggagggtcgaagaaagagccaattttgtggaagacaaaggtggagaagaaagaactttgttgcttgcctgcaaagacaaagatgaagctcaagaaaataaatggtatcttgacactggcgctagcaatcacatgtacagagaaagaagaatgtttgtggagctcaaccaaatggtaaaagggaatgtctcttttggagatgaattaaaagtacacgtggaaggcaaaggtaagattcttatacgcttgaaaaatggaggccatcaattcatctcaaatgtctttgtgcccaacatgaaaaataatattttgagtttgggtcaattacta

SEQ ID NO: 339843 - DNA, 590 bp, Cannabis indica
ggtattcgggtaatggggcctggaacagaccagtagttggtgtcaagatctgggactcagactaggaccataacccatacgaagaaccaaacccgaacccagaccaagacctgggacgcaaaatgagaacctgaacaagaattgccaaaccatgaccttacaacaagactaggaccgtgacgaggacccggacccaaacaaagaaccgaacaaagacctagcctcagatccaaactgagactagaactcgggcccagacacggtcgtgtaaccagaccggaactgagatccggacctagacctaaatctaggacccgatcccaaacatagacttggaccaagatagggatccggatagggctgcacacgggtcgggtttttgggttttcgtgttgtcgggttcaggttttcggatgtcgggtcttgaaaatttataatcgaacccgattttcagatttcgggttctagcgggtttcaggtcgggtgtaccgggttattattaggcgggttcgggttacaatgggccagatccgattgaaacattttttgggcccaaataatattttattttttaaaaatatcaatttttt

SEQ ID NO: 339844 - DNA, 957 bp, Cannabis indica
cagaagaaatcatggctgagaatactaatggcggtaacactggaggcaacaatggtaattatggaggtgccgttgaaaatcaagcaaatggtcgtagtctgagggactacattcttccagctctaacaggggtccagtcttgtataagaccacccaccgtagatgtcaacaactttgaaataaagcttgccatactccaaatggtgcagtcttcaatccagtttggttgactcccctctgaagaccccaatctgcacttgtcgaatttcatggagttatgtaaaacttttaaagtcaatggagttagtgatgatgccatccgattactatgttattctttatgttttcttctgtcgactcacagtgctattttcatgtgtagttaagggcaaggctaaagctgaggtgtcgtgagagcgagcaggtgaagattgtacatgtcggggcagttatgcctggagcgtatgatctttgggacatcagggcttttgttgtttggtcgctaggtgacaaatcttttgtatatgaaaagtaaacttttgtaagtgggatctcagaattttataaatgtgttactttacgtttttaattaattatgcaaattttaaataatcacgtttttcgttaatctcgttgattagcaacgagctgcacagtacgattaaaattacgctaacatgcctaagttagttagggtgttacaatttgatatcaaagctgccagattatcttccaaagattgtcacgacatgtacagttgtcctcagcagacagctcgtttcacgatttagtaagcttttattgctttagtagtttattttaatagtattatttaagaaaagcctgttaggaagcgtgttagtagtctgatagtagaatatgcgcatgtttttaatttccaaattagtggcattagtaagtttttcttttgatcacgatctgaccagactagctctt

SEQ ID NO: 339845 - DNA, 581 bp, Cannabis indica
acaaataacaaattcaaaacaaaagaaaaaattgtatgtataaagaaaagtttaacattgttttagattatactttttttataaataagaataaaatatacatttgatctattatattttaaaatatatttgtattgtatgtattaaaaaatttaaattgttattttttacattaaaatattaactgtatatataaatttgagtgattctacaatgcacccccttaaaagagatgtactgatacacccttgacttgtttcggcattcagaaaaaatttttagtctaattttctttcatatttatgtacgttataactatttaagataactcacaaaattttgaggaattccgaataatttataatatagaaaacaatgttcaaacagtctattttacacgcgtataaaataaaatagtcacgcttgcaatacactgtttgaacgtagttttcggcgtgttaaacttttctaaatttcttaaaattttgcaggatgtcttaaataactataacgtacatgaccgtgagaaaaaatttgactaaaaaatattcgggtgctaaaacaaataaaggtacatcaat

SEQ ID NO: 339846 - DNA, 792 bp, Cannabis indica
atcttgttgaggcaatttatctaaaaaaaacaatttccaaaggatctgtatccttcactccctgaaaataatcagtgctcttgtcaatattcgacctttgaccatagaaatctacatgagataatcaaatggcgcaaaataatagcaaatgcattcacaaaactacgattgtccttatacattccacgcctcaaagaattgcacaccttaagacatctcatcttgatgtcaaagatgcacaaaatccaatgtgccaaagcaattacatttactggaaatagcatgaaatctaaaacgatccatggtttaccacacaaccaaccaaacccatcaatatacgcagctgccttagtatcccgaaaaacagaattaatatcctcatcttttgcacaaaacttattgtacaaatcaaatatgtgtgctgcaaaacaaaatcagtgctgctggcagcaaccctcacacttttgtcatacttaatttgcttcctcaagtaataaaagcacacatcaatatgttgcaccatgtagaacataaaaaaacagatattataaacacacaaaaaaactcaaaacaaacagaataaataaatttaattaatatatcataaaaaagtactatccgagcatgataaattcctcttcggggttctcaaatcgtaaaaccacattttatcgtcaatcttcacaataacaaaatctaacgccaccttcaatattcgatactcttgtttgaacttcttcaatttgcttttatcattgaaaccaacattaaaccattgctcaaatgatttaa

SEQ ID NO: 339847 - DNA, 1148 bp, Cannabis indica
taagtaaaaggttactagggacagaacctagatatccccctctagaaaaactcacgttgtgcctagtccatgcgtctcgcaagctacggccatacttccagacacaatccataaaagtgttaactgatcagcccttgagacaagttttatcaaaaccagatgcttctggaagattgataaaatggtcgattgaactggggcagctcgacataacataccatcctcgaacttccatcaagggccaagctttggctgacttcttgatagaaggtataactccagaaaaaattccacctgttcagcgagacgtggaaacctggaagttatacgtggatggtgcatccaacgaacagagttcaggtgcaggggtaatattaatatcaccagaaggctttaactttcactatgctctgaggttccaatttgacgcatccaataacgaggctgattatgaagccttgatcgccggcttaaagatagcagagccattgaaagtcaaaaatctcacctgtcatagtgatttgcagctgattgtgaaccaggtcctcggggaataccaagctaaaggcttaaaaatggcaaagtgtttagagaaagttcggaagaacttggaaagattcgattacttttaaatcgaacgaattccaagagaacaaaactccaacgtcaacgccttagtaaaactggcctcgcagaatgacttggatgaattgaacttagttccggtggaaatgctgagcgagccaagtatatgtgaaactgaagacgtcgagatgatagatagctctcctacatggatgactcatattatcaatgatttactcgataaacaacttccaaatgacaaaaatgaggcacaaaaactattgtattcagtgcctcgttacacaatgatcgaaggcaaactatataaaagagggtactcaatgcccctacttcggtgtgttcttcccgcagaagcaaatgaaatcatcagagaaattcataaaggcttctgtggggatcatgcgggctggcaaagtctgtataaaaagatcattagacaaggatattactggccaacgatcaataaggacagacctgaatttgtcaagaaatgtgataagtgttagaggttttcacatataccttgcgtaccgccaacagaa

SEQ ID NO: 339848 - DNA, 526 bp, Cannabis indica
tttttcgcttattgcaacacaattttcagttcccatcaaagcagtgcgttgtgacaatgctaaagaactgaatatgacaagcttttacagtagcaaaggcaccgtcaaatacaactcttgcgttggtcgtcctcaacaaaattctgttgttgagcgtaaacatcaacacatactaaatgtcggtagagctttattatttcaatctcatttatctttaccttattggagttatgtcataaatactgctgtttatctcataaatcgaactccttctatattacttaacaaaaagacttcatttgaaattctctataagaaagctcctacttatgaacatcttaaagtttttggatgtcttgcctttgcctcaaccttagaaaccaaacgacataaacttgatccaagatctcgcccttatgtctttattggttatcctcctggtatgaaagcttatactctcttaaacatagaaactcaagagatcattcactctagagatgtttattttcatgaagatattttttcc

SEQ ID NO: 339849 - DNA, 665 bp, Cannabis indica
ttataattattattcttttattctttcatattcatctgtttgcaattctccaggcttcttttgcttccaatcaactactctctgaggggctcgaatacttggagggcgaggtccacaaattactatccaatgcaaggctgtgaataagcatcaggacgacgcctaataagaaaatacccgccttaagcaagaagccgagagagcgaaggaggaagccgagaatgcaaaagaggaagccgagaaggccaaagaggaagccgagaaggaaaaagaggaggccaagaagaccgtcaaagcccaagttgatgagtttaagaagaagctcgctgaaaaagaagtcgagaccgttgaacgatgcgaaaaggttggtttttgcaccgtttatcgagcctagatgaagaaccccaatatggacaccagcttcttagaggagcaggaagaggaaactttagccctttgcgagaagaccaggatggaggaggaagagcgcgaggttgaggaagaagaagaagaagacctgtgcatgtctcctagcatgtagacttggttatttatttatctcgcttttctcttttagaaaatggcccctttgccaagacaatggttttcccctggtggcattttttttttttttgtaaagatagatttgcaaggttggatggcca

SEQ ID NO: 339850 - DNA, 785 bp, Cannabis indica
gggggcagttggagtggtagacttatcagcgactttgctggcagcctcgtccaggacttcctcagtgtcggcagcatcagcatcctcggggaaaagatttcctccacctccctgagtctgcgtgggtgacatggctcgaaaagcctcagccatctcaactgcctccgccccaaggattgagaagtcgaagtctggaatcttggaaagagttgtgtagatgtaatcagagaccggctggtcgtactgcttctttccattctccttctcgacctctaagttgcgagacacctcctcaatcttcaccttggagttcttggcttcgagttcgacttttttacgaaattcctcgtgctccttgtccttgtcagccgcttcctgtttcagcttcttgacgctctcctgaagctgagcattctgcctctttaacagttcagcttccttagagccagcagcaaaggctttcatgaacatggtcatagattgcgaagccaactctacagaacatggaataagctcctcagaaggagtcctctccaccttggacatgaactcctcgcccacaaacttttcctgcagaactaggaagtcgcgagttcggacagctagatcaatcacgactttcttccccttgtcctgcgtagccttagttggcttcttagaggagtccacgacaatgatatccacaacatcgctctttctcttctgggaacgataggagatgtcgtcgctgttccagtctttggcttgcagttgaggacccgtgcggacttcaggaaagtcatctc

SEQ ID NO: 339851 - DNA, 1917 bp, Cannabis indica
ttcaacaagtactatctcaactatagtcgataactcaagggcctctagctcaaagagaaaggacgattctaaggaatcgtcaaaggacaaaaagaagcagaagaaacacgataagtacgtgtcaatttataccatttatatcgagctcaatgaaactcgggaaaatatttacctagcgcatgagcacaatgttgctttcggtaagagcccatgaggcacgcgaggcataaaagggatccgaacaggtattataagtaccataaagagatagggcacacaacagacgagtgccactagccgaaagatgagatagaaagtctcatcatgtggggccacttcaagcagtatgtgaagagataggaaaatggacataaccagcccagtcttccaaataacccaaacaaccaggggttgcaacctcctcctgttgaaggagaggacatcctggttattttgggagggccacatattgtgggagagagcaacaatgcgcaaaagaggtatgtgaaggaaataaagaacgagcaataactatttgctccggaaacttcaaagaaggtaaaaactaaagaacctccaatcatattatcggaggaagatgaaaagaacgtgaggtatcttcacctcgatccattggtgattactatccatctcgccaataaaaggataaagagggtgttgatagataatgggagttcagtgaacatcctttacaagaaaacactaaagaagatggggcttgcaaaggccaattgaggccttaaatggtaaatctatgcggcttcactggcgacaatatcgccagtcaaggcataatcgagctcgcattgaccttgggagaggcacccctatccaccacaattatgcatgactttttgattgttgacctgccatcgacttataatatattattgggtcgcccagcattgattagactaggggcagttagttcgatcaagcacctatccctgaagttccaaacaccaagggtgtgggagtggtgcgaggcgatcaaatgctggctcgcgattgctatcgcatagagttacagcacagaaaaaccagtcaccaattaatgacagtcttggcagaggaaagcgaaaagaaggatgaagatcttgatccgcaggttcaagatgaaagaaacttattaaaccaattgaagaattggaagaagttgctctcgacccaggaaatcctgcaaagtgtgtttacatcaggacgaacctggacgagaagttaaaatagtagcaaataagtttcttatgggcgaatcaggatcagttcgcctggaaccatggagatatgatagggattgaccctaatattatctgccatcatttaaatgttgataaaaacaacccaacaaagaggcaaaaaaggagacccttagattttgagaggcagggggtgctgaaacaggaagttgataagttattagtcaatgactttataagtgaggtgttttacccctcgtgcatagctaatcttgttctcaacccaaaaacctaacggaacatgaagaacttgtattgacttctctgatctgaataaagcattcccaaaagattgctttccactacccaggatcgaccagttattggatgcaactaccgagtacgaacttatgtcatttatggatacatattctggatataaccagataaaaagcatgtgtcagatcaggaacatacgagctttgtaaccaatatgagactttactgggacaaggtcatgccgtttgggatgaagaatgttagggcaacatatcaacgattagtgaacgagatgttcgcaaatcagatcggacgaaacatggaagtctacgtcgatgatatgttagttaagtcagtgaaaagtgggaatcataccacggacctcgcggaatgcttcaaaatattaaagaagtataatatg

SEQ ID NO: 339852 - DNA, 548 bp, Cannabis indica
gaagtaatagaaagttttggtaaaacaaaggtgcccgtcaaggtcacgggtctacctttagatcatatctagagtgtcccaaatgcaagaagcaccatcagggtgagtgccgggctaagacttgtttccactgtggtatggtaggccactttattagagactgtccacaggctaagaaagaggaaccaaagaagaacaataattagaatccagggcatctattcactatgactcagggtgacactgatgctagtccgtcagtggtgacaagttagttgtccattaacggttgttcttattctatgttatttgattcaggagctacccattcttatgtatcgagtggagcaattgaaagttttcatataccgtgtgatgtgtatgctttggggtttggtaccctgttaccctcaggagacctaatcgtatttactcggtggattaagtctttatcttgtttgattgccggttatgaattgaccgccaacctaattgaattacaattgtctgattttgatataatcttaggaatagatttcttgtctaaa

SEQ ID NO: 339853 - DNA, 606 bp, Cannabis indica
ctcccttggctcatcatgggggattttaatgctttcctttacttgcatgacaaacaaggtggtaatcccgataggggtccctcggctgacttcagaaactttttggactcttttaatcttttcccgctcgagccagtggggcccttactcacttggaataacaatgtggctgcccctagaaacatccaagagcgattagactggggaatcatcaatagtgcttgactgacatcttccctgaggccgatctttctcatttgggtttctttggttctgaccatcgagccttggagttagacacctctcccactccgggctccctgcaaaaggataaaagaaaacgatttctttttgaaaatgcttggttaaaggacccgaactggagctatgctttcgataaatcctggactggcctctcggcccatcatgatgcgatccccaatcttgttgcttctcttgacagatgtgctacaagccttagcaactggaatcacaagaaagatttcaatttcaaaaagcacatttcaaagatcgagaaagatttggaaagggcccgctcctctcccgtgtgggacgacaacaccatagcaaaaatcaaagatctcc

SEQ ID NO: 339854 - DNA, 670 bp, Cannabis indica
taaaaagttccaaactcgatttctaactcaaaatcacctaaaattcaacaagtaaacatataaactagtcccatagttaccaaagaacaattctacaaagtcagaatctccataacatttttaaatcataaagcccctatataaaaccaatcatttttagcttaaaacgtaattaaaccatactttaagcttttcctcttcaaggattttctatcttggtaataccggagcttagatcgttatgtttcacgttgaaaatcgaagaaaatgaatatagagggagaagattttatcgaaagaggaagaacgagagttccgttcgtcattcattcttttactgttatatcttaaaacataatatatatattgttatagtgagatttctctcacctagaaactcgagaccaaactcctgtttggaggacacatgtactcaatttttcccaagaaaagctgagatgtcaatgagagactcctcgagttgaaatctcgcctgagctagaatcagcgagatgatgcgaatatgaccaagtctaatcgcattcgtgtgactcgcattatgcaggaccaaggaacgaatttaagtcacatgtaccaggatatgtgcgagtatcctctcgatcctcctgtgaaaacttagagatcgagtctctatgatgcgagctggtct

SEQ ID NO: 339855 - DNA, 519 bp, Cannabis indica
taccaccgtcttactcactatgattgagtacttgacttgctatgtgtgggcatggcactcatcactaacgttcgaataggtgaagaacaatgaaggaggtgaaatctctatagattgaactctctcatctaggtttggttgaatagtcaagttgatattaatttgacaaagtgtcaattggatgagatcatagtatcatgctcctttttacattgtttcaactaggtcttacggttgaattatatggattaaaaaagaataaaatattgagcaaaaatctcttcttggccatgcacattaaatgaccaatttctagttacaattttgccactttatttcaaccacttttcttcttttcaataataccatattttattcaaacctataaatgtcaaaactatttatttaataattataattaattactaaataaaattgccatttatgtaatttattaattagaccatacgaagtctcttaattgacaaattgaccccaaaatctcttttcttcacaatt

SEQ ID NO: 339856 - DNA, 504 bp, Cannabis indica
actataccttttcgagtgtagacttttgggtacagggtccgtcttcttctcaataagtgcgccatggcatcaatttgctgtgttccaaaagaaaacagtaagacagcaatcgcataaaattcgcacaaatatcgcaggaaatcgcacaaagaaattaccaaaattgtttcaaaaatcgcacaaacatcgcaatttcatcgcacataagtcgcaaaaaatacctaaaaaagtgaataatcgcacacacatcgcatataaatcgcataaaagtcgcataaacagatcaaacataaagtacaaacattgcatataaatcgcatacaagtcgcacaaacaattaaaaccacaataaattaattctgttaagaaataacttacagcatcgtcgagccattcgttcagcaccatcaatttcacgaaccaggatctagtggcttcgctagtgtgaacatccctaggacggccattgtccctagcataagtgatccacttctggaaaaattt

SEQ ID NO: 339857 - DNA, 683 bp, Cannabis indica
aggatctagtggcttcgctagtgtgaatatccctaggacggccattgtccctagcataagtgatccacttctggaaaaattttagcagccggcagtccaccggtttcagtgtgtctactaccacaggcccatgtcgttttttcttcttcccagctgtgtagtcattcaagaaaactggcttccgctttcgcctaaccctgtagaagtccaccccagctggtggcccctacaactcttccacatcctgagattttgtatcacccagggaaatgacaatggcgtttgcaggagtaggaggaacgtcacatacgtcaggttgccaatcttctgggtagacatcatcatcatcatcatcatatgttggtggtgatggatgtactgtctgtaatggctctaccgtgtctgatggatgtgttggcgatgattcatgtgccggcgctgatggttgtgtcggctcagaaggctgcttctgtaacaaacttatcacggtcgcaatttgatccatgataagattcttcatctctttgtgacttctcttgaagtcagccttcatctcagtctgggcagtgagaatcgcaagtagttgcgtgtctaccttgtccaatctcttagccaacaagaggcactcagactcattggctgcagcagcggttggcggcacagaggcaggggttgggggcaca

SEQ ID NO: 339858 - DNA, 745 bp, Cannabis indica
agtatttgattggttaaagtcggacctcactggtcagatctaacggctactttactcaaggaaaaacaaaaataaagaaataaagaaaactctataagatctggaatttcggatctacgggttttttttttttttttaacaaaagtatcaaaatactaaatatgaaaaatctaaatcaaaaatatcaaatgttcatttaatggtacataagaagcggacaactcattcaaatattcatttgtctattcagctaaaaagaaaaaaaaatactcattcacttcttttttcgtttttttttttttcttttgagagtaataattctttcattatttatatttttaagaacttgtatataccttttaaaaaaattgttataaaatcctttcaatttcaaaatcctgtccaaaacaaatggtgattcaatcatcataaacatcgatttcaaaaaataaaatcatcataaacatcattaataataatatcgccataaaatataattttttaaataattgtaatctcttaaattttattttttctaattaacttttaattatattatatttttcatatacacccaccttcaaattttctatagaagtatgaggcagcgttttaaaaagataattttatttatttatctttaaatctttcctttaaattaataaaataacactctaaaatcacttaaaatacttttatctaattttttaattttaattctttttataatattaattgattaatt

SEQ ID NO: 339859 - DNA, 345 bp, Cannabis indica
gggcataaaacccaacatattgcccatctcatagcacaagaattgtgaaatcaaagaatgcaaatttttttgaaaatgcatcagtcagtaggagtgatcaatcaagggacttaggtcctgagaaagatccttcagaaccttccacttcaagagcaagattgataatggtcaatactcctgtagttcaaacggatgttgaacaaccattaccaataattaaagatccacaagtgggtaataataatctagtagatcaagatgttcaagagttgcctataactgttgaacaacttgctgaatctgctgaactagctactgctccccaagagcctgttggtgaagtct

SEQ ID NO: 339860 - DNA, 468 bp, Cannabis indica
actcaaaaggggttttgggaacacgatttaaaatataagttgcagtcataagtgcttcaccccataaaaactctggaagatttgatctacttatcatgcttctaaccatatgcatgagagtgcgatttttcctttcagcaacgccattttgctcagtgaacctgacatattgtattgagaaactacacaatttcttgaaaatattcaacaaaaggcctcatgtgtactccatattctgaataacgatcataatattctcctccacgatctgaaagaataactttgatgactccttctaattgtttctcaagaacatttcaaaagattttgactttatcaagagcgttagattttcttgaatcaagtaggtaaagccataaggaggaaaatcattgataaaagttataaaatacttttttttgcacaacgtggtggaataagggctactgatgtcagtgtcgataatct

SEQ ID NO: 339861 - DNA, 567 bp, Cannabis indica
tttcaacccaaaaatcacagattcaccaccgccttcaacccaaatccatcggactgggtttgcctttgatcttcggtggtgttcggccggcgtgcgtgcgtggtggatcgccgatggtggttcggtcgagatgggtatggatgggcgtgggttggttttcggcgtgggtggtgctcgccgtgcgtgggtggttcgacgaggaggagatggttagggcagtcggtcggtaagtcggccagggttgcgtggagggttggagcggtcggtgggtggatgggtggtgatggttgagggttgggggcggtttcttgcgatggggttctgggcgaagaggcaaagaggcagagagagtttgagggaaggagagagaaagggtttgagtttttgagaaaggtattcttggggttttggaaaagtgatcatatattttcaatgtagaaaagtattagtttagggaaaaaattatcccccaatgcatgcatagaaattcaaatttccctatgagaaatagtaaaatgaaaaaatgagtcaaataaatgcaaaagaatagaaaattatagtgtattt

SEQ ID NO: 339862 - DNA, 526 bp, Cannabis indica
tccttgggtctttggaacaagttcgcatcaatctacataaaaaaatctcttataaataagttgtatctcaagaagaagttgtacacactttgaataaatgagtcaaaggaattgagaaatcatctagatgatgataacaaaatcattcttgatatgaataatcttgggatgaaaattgattgatgataacagaatcatcaatcattctgttatcatcaatcattctgttatcatcaataatcttgatatcaatcctcctcaatcattctgttatcatctagatgatgataacagaatcattcttgatatgaataatcttgggatgaaaattgattgatgatgaagaccaggctataataatgatgggttcacttcccaagatgtatgagcactttattgatacaatcttgtatggcaaagaaactctaactatgatagaggttaaggctgcattgaattctaaagaaatttagaaaaaaggagatgagaaagatgagttcaatggggaaggattactcattgttaa

SEQ ID NO: 339863 - DNA, 587 bp, Cannabis indica
agtttactcactcgagatcatctctctaaaattttgcatattgacagcaggctttgtccaatttgtggctgctgtgatgaaacttcggagcacttgttcttctcctgtttgttttctcagcaggtgttgaagagtgttaatggttggttgggaactgcttggtcggaccgtctagaggactagcagctttggactaagcggctgggaaacaaaaggataaatttagtcgctgcaatggttctttcaaccactgtgtattatgtgtggcaaaatagaaacacgtgtattttcaatagtttttcttatagtgttcaaaagattgtagagatgataagaaaagatgcaaagtataggtttaataattttaattttaagaagttgaaagatgaggagaggttattattattaaaaatgacttctttgtaggtgtgggcttgcgttgtgttgaggttgtaagtaggggtgagcaaaaaattcaagaaaccgaccaaaccgaccgtccgaacaccgaaaaaatcgacaccgaaaaaatcgaaaatcgaaaaaactgccttcggttaaaaccgctttaatatggtcggttttag

SEQ ID NO: 339864 - DNA, 971 bp, Cannabis indica
taattagagaatcaaaccataaaaactttggaaaaatgattatgaaattttaaattcctagttgacatcatccatttacaactatactcatttgcaccattatatcaacattgcatttttagtcaaatttaataattcttacttattttcttctcaaagtttgtatttgttaatttttatatattctcactactttatttttttttctgtttaaaccaatttgtgagtaattagtttataaattaatttctaattttcaatccatgtggatacaatactcgatttattactttattacttgttatgattgcgtgcacttgtgtatgtaaaattttctacgacaaatttttggcgctgttgccggggattgatttagtgaaattttgtttgtgaaacttaattactatcaatttggttttttttttattttttttatttttcatttgtttagttttatttttttgttctattttacgctttgtttgtcttgttttggtttcttttgcaaggtacttgagatgtctcatcgacaagtccttagaaattatgttcaacatgacttggagcccttatatgaagtatggtggagatacaagacatttctaatgaggtttcaatatcatggtttgtccaaagagttttaatgagaaatcttcctaaatgggttgaatccaagcacacgagaatgggtagaaagaggagagggtatcactaatttctaccgactatcaattgatgaagcctattaggggcccatttggcaaaatttttggaaaagctaaaagctgcttttcaaaaaagttgtgacgaaaaggtgtttggtaagcagttaaaaaacaacttattgtagaatttatggaaaaactacatctaaaagctaaagtttgtacaacccaacttttagaaaaatctattttgattaaaagactataaaaaattatttttactaaaaatttatttaattatttatt

SEQ ID NO: 339865 - DNA, 567 bp, Cannabis indica
ttacttcatgaaatatggatttaaactatgaatgtttattgtattgatttggatgttttcatattggtttatgtgttatttgatgactgtatgtgatttacgaattttccatgataatatttttactatcgttctgaaaatattttatttgtattccttgtgaaatattaagcaattttaatttttacggaactcaattctgataaaaattgaaaaagttatgaattttccaagtttcgggttgaatggatgcacatagtgctcaatcgcatgcactaggcttcggacaaggaagccatacgtgcgcagatgctagggacaatacacgtgtctgaaggctcaatgttttctgaagccatgcacgtcacaccgagcaagcacgcacacgaaggctgcaatgtagcctcctgcacgcgtagatgaggctgcacgcagcctgtgtgtgaatagaaatgtgctatgtacccaaaatccgattttttgggatttttcatccaatttgaatttttccaattttaatatattatttttaatatatttaaacttaaatatcaattttaaattaat

SEQ ID NO: 339866 - DNA, 712 bp, Cannabis indica
aatctaggtggatttgtcattctctaaaacacatgattcaaacgctaaagcattggaatcactgctaaactattttttgctttgaggaagtggaatcactttctctatttttctcatctgagcctgaactagtaggattgtcagaggaattattctcagtatcttcagctttccttttgcccttatctgcattcttggagaaggatctccatgcaagtgataatgtccgttcataagcacgcaattcagcgtccaacttgtctatgtcagacaagttccaattgttaagaaagaattggttaaactcaggtgataagctgttgagaataaaatgaactctttgctcttcagataatataattcccagcatagctgctttctagaatttcatgttcatcatgagcaagtgtgaagtgatactctgactaagagtcatcttcacaattgaagttcattcgtaaaggcatattctagatgaggattggggtgtgggttgtacattttgacactacaaatatcaataaacagaattaattatggttcaataaattcatacacacgttcagaaaataacaaccaaagtaaatatgtttgtaaaaataccaaaaaactaagcatatttattattttctaaggtttccaacataatgaaatacagtgtcccggtaggcgagagtcaaagatattattagttgaataaagtagtcagctc

SEQ ID NO: 339867 - DNA, 548 bp, Cannabis indica
agcctcctcttggatcgcccgcctctcagcgaacaggtcccgcaggatcctcacgacctcgtctatgcccccgaattcggacaggacgaagccatgattgacgatggtcctagagaggcggctgatctccgcagaaatctgaaaaaggagaaaagagtgagatcaaatgccttagacaaaaaattgaggaaagaactgaatcaagtgcttaccgcggccattgcgttgctgatgtcttgcacttggtagacagagttgaaggatgcacaaggagcgtaccgtttgggcgagaattgagtcatgtgggagacatactcgctggtcatctccgcggcaaaaggagccaaggtaggccccaggattgcaaaagtcctccacgtggaggacgttttgttgctcctcccgtagaaccctcttcaaggcctccacttcggcctgcccccgggtgtattcatcaagggcatagttgtgcttggctatccgaagattttacctctcctcgtctccaggaatcagagtcaacacaatgccgagaggcactgcgtatt

SEQ ID NO: 339868 - DNA, 547 bp, Cannabis indica
cgtaaagataatgtcgccagatcgttaaagcaagaaccactgcagcatgttttaagtcatgagttggataacactcctcataatcttttagttgacgagaagcataagctatgactctgttagcttgcatcagaacacatcccaaaccttgtctggatgcatcacaataaaccacaaatttctcttgatctgatggcaaagctaacaccggagttgttatcaaacgttgcttcaactcctggaaacttgtttcacacttatctgacaacacaaatctctgggttaggggcatagaaattttaaagaatgcttcgaaaaaacgtcaataataccctgctaaaccgaagaaccttcgaacttccgtcacagacttggacctcagccaattcttcactgactccaccttgtttggatcaaccataatcccattcttcccaacaatatgacccagaaaggacacctccgacaaccaaaatccgcactttttgaactttgcatacaacttgtgatccctaagttgctgcaatatcattcgaagatgatgctc

SEQ ID NO: 339869 - DNA, 1010 bp, Cannabis indica
caagctgatgctgcagccagtccttatgttgtcacaggtcagcttcccatctacaactctttgtttactgtattatttgattcgggagctacacgttcctatgtggctccgagaataattgatcttttgtgtatgccttgtgatattctagaaagagggtttggaaccctattgcctagcaaggagttggttatctctaataggcgcattaggtctatgccggttaggatcgaggatagggagttgagtcctgaccttatagaactagaattaactgagtttgacatcatacttgggatggattttctatccaagtattcagccaatatagattgtaagcagaaaatgatgatttttcagccagaaggtgaagatccatttgtttatattggattagttcgtgggtctcggatcccggtaatctctgcactaagagctagggatctactacactgtggatgtgtaggatttttagcaatggtgatagactgcatcagacccgaaacatttgggcctgaggtcatcagagtggtaaaagactttttcgacgtgtttcccgaggagttgctgggattaccgccgcaacgagaaatggatttcatatttgatctggcacctggagccgaacctattggaaatattttaccaggatcttagatttactaacaagtatgttatttaacatcataaatatgaacttctaaaacgatatgaaaacaacacatataaagtataagaaaccttacagtggttgcagcggaatataatgtctccttccactcaaatcttgaacccttgtatcatatctgtcgcagagtatcaccaagatctgagcccgaatgtccttctcttgatctggattctccacaatcttccacactatggttgagttacccctttatgtgtgtgggcactcactcactcactatatggttcagttttcagaagagagaaagaaagagagaaggtggcggctaggtttaggaagaaggctttgagttttctctgaa

SEQ ID NO: 339870 - DNA, 551 bp, Cannabis indica
gaagctaacattcaaatgagcttaaaaaaactctttgtaaataaaagctacgatcgtcacaagacatgcatcatcgacctcggaaggaaaaatggccccagcttgctattgagatcactggaaccaagcttttatcgagacatctcgagatacaataattaaagacgtgttttaaacacgatcattgttgacccagtaaaagcgggaaaatcacagctatatgattttcaaatgataactgcatttacactacgtgatatgttatcaaatcccgtgattttaggagatgatcgttgtaaacatattacaacaaactttgtaattaactgctcactatgtaattataaatattggaaaataagatcaaataggagacaaaaaactcatacaagagaggccttgggaaaataatcagaaatctgaataagattgactcgtggactatgcagaattttaagtacaaaatcacgtgaaaaacccagtgttcatacttttacttttatatcttttatttttttatgtgaaatcgttactgtgaggctcaaatttgg

SEQ ID NO: 339871 - DNA, 854 bp, Cannabis indica
cagctccgggcagagtaaaaaataaataagcctgaaagcaggtggtaagcttgaggaatgagttggtatggcgcaaggctaacaaatacaagaaaattaatgaagtaatcttgaagggaagcatggccccggccatcaggtgcatttgactccaggctccgaagcccccatagttatggttgggcgtctccgtatcccggggcggtcggtggtatgtcccggaggtcgcaggctcgatacctgccaccaccatgatgtgttctaactggtgagggcaggtcagggtagagtgaagctcagccgcttcccacccattagcacgggacttgtgcccttcctgggccaccggagccttcatgacttcctctagggtggccaggcgtttccctcctttctttgaagatttagaaccagatgcagacatcttagttctgagaaagattgaaaaatccagcagtcaggccccaaaccaaagcctaagtcaaaaaagggaatgggggtcccctaaccgcttgaaagaggccccctccggacacttgtcaaaaagaaagcctcataatgttttccttgacaagagtcgggtgcaagaatcccaaagatggtgacattacgaataagcaaagaaaaaaaagggcaagaatcgaaaagacgaagtctactctaaacccttgaatgtcaatacgtgaagaaaatatgggtccttgataaaaaatacgaagaaaagaagtaactcgaacaccacgaaggaggaatataacgcgttacacaaaaactcaaaacagaaactcccagaaactcaaacatcaaacctaaaaaaagaagatgaacagtaaagcatgcgatgtacacaaaca

SEQ ID NO: 339872 - DNA, 553 bp, Cannabis indica
actacaaaaaataataaactattcttttataactaaaaaaaaaatctaagtcaaacaaccttacgcattgtaatacttctaaaaaataaaaaaaaatatattttcgaaatctttttatatctcatatttaattaatcaaaaataatttatctttctacaaaattacttaaaagtatattattttatacaaaaaatttgaaaaattatttcaattgatgaaaataatttacttattattttattaaataaaaaaacacaattttaggtatataagtatatatatatgtaataattacttttctcttcatcacattagattattaaaataatagatttataaaattttaaaattgttaaattatatacattcacttaaatttttagcattaatttgagacaggtataaacaaacccatttattaatgtgtgagggccatagcctttattaaaaaaatattacacttcaaaaatatatgtattttctaatttcataattgtaaagttaaatagtaaaaagctccacaaaaattaatttagtataagtgattataat

SEQ ID NO: 339873 - DNA, 608 bp, Cannabis indica
ttgtatccattaatcaaaaatatatttatattatatttcattaaaatgtatccactttcgtgagtggactgctcaatatactctcactctctacttaagtccagcacataatttgcattaacctaaaagattgatggagacatcataatatcttaaagaatatggaaataaaagtaaaaattaaaacaaataaaaataaagtaagtatataatgtaattttttcaaaaaattttgggcccgggtgatgggccttgggcgtgggcccctacatccccacacttgagtctaccctaaatgcatgtggtagtagactagtagtaaacaaatttatttacgtaaagtaaaattattttccaaagattaggtataaaaatgtaatgtttctaaaatattgactacatatatgtgtgaatttcatgttaaagaaagaagatatattataaaagtgtaacattttaaaaatattagatatacttacgaaaagaaaagtcggtataaaagtacaacatctaaaaatatagggctatttacaaaaatatgggaaaaaaattcgaagttttgataaatatggcatgtaaacttaattgcattaaatatggcatttttt

SEQ ID NO: 339874 - DNA, 829 bp, Cannabis indica
actcgtttttaggttttactgttaattttctttttcgtttttgtccagttttgtttaaaaaaaaaggggaattgcccagtggccgcggccagatgtagtatagccgcggccatttaaggcttacagaacccctattattttcacgaaatctggccgcggcgaggggacataccgccgcggccatttaagccttacagagagtatatttttttcacgggttttggccgcggcgaggctatatctcgccgcggcgaaaatggtcagatttctttaaaaaggggcaattttcatatcatttcaaaacacatttcttatttcctaaacctaaccaccacgccgaactaccctcttccacaccaattttcttcttcaaatccaattcataaccttttctcttcaaatttcaccataatcttccttcccaatcatcttaaaccattatttctctcatcaaacactcattcccactcaaaatcaaccccaaatccctaaaacctcacccaaaaatttcaaaaacccttattcatcttcttctttctcaagaacttcaagctttcaacaatggaggatgattaaaggaggattctcattgaggtattgattctaagactcccaatccaatttttattgaagaatttgtgaattgttggatagttttggaaagtttgttggatatttgggatttttgctatatacattgttgaaaattgtttgtgtgagtagaattgggtttgattgtgagggaattaattcccgggaagtgaatttttaaggggaagtgctgccgaaattttaaaaaaatcttgaaagttaggaaatttgggtgata

SEQ ID NO: 339875 - DNA, 672 bp, Cannabis indica
attttaaatctttttcagaaccaaaatatttgcatccggttccaaatcttctcagaaaggaggaaaacgcgtggccaccctagaggaggtgatgaagggtcccgtggcccaggaagggtataagcctcgtgccacagggtgggaagcggccgagcttcactctacccttacttgccttcaccatttggagcacattgtgctggtggcaggcataaagccctcaatttccgggacttaccatcggtcgccccgggacgcggtgacgcccaatcacaattatggaggcttcggagcttggagccaaacgcacttgatgtccggggccatgcttccccttcaggattactttattaattttcttgtatttgtcggcctcgtgccataccaactcattcctcaagcttatcgcctgctttcaggcttgtttattttttactctaaccggggctggggctctcccagtctggcagagattttgtatttttatgaacttgtttctgtccctaaaaagggggacaaacttaaggacggattttacggtttccgggcccatcctttgaatgagggctcggtccccttcaaccagcaaaaacacgtcaaggaataccgtcaccgcttcttcttctcctccgggttccaggctgtggaacatccggagcttctcacggagtg

SEQ ID NO: 339876 - DNA, 833 bp, Cannabis indica
tgaatatctctaaaataatgaaatcaaacacataagagtttagaaaaccttacattgattgcagcagaataataggactttttccgctcagatctcactcttgttcctttctgtcgtagagtattatcaagatctgagcctagatctctctctccttcaggttggttaccaccgtcttaccaactatgattgagtacttgacttactatgtgtgggcatggcattctatcactataggctcgagtatgaagaacaatcaaggaggctggaaaactgtatagaaggtgtctctcatctactagttgtctgacatgtagaaaattaggtttgatttggttgaagccaatagttgagttggatgagatgagagcatcatgttccttttatagtgtttcaactagggcttacatttgaattatatggattaaaaagaataaaatattggccaaaattacacctgatggccggccactaagggatcattctctagttaaaattttaccactatatttcaactacttattcttctttcaataataccatattttctaattttaatcctataaatgacaaaactatttatttaataattataattaattatcaaataaaatttccatttatattatttattaatcagaccatacaaagtctcttaattaataaattaaccccaaaacctattttcttcacaattaagccattgcttagtgaaaattcataggaccatggtctcctcactagatgagataatactgcttgcaaactcattaattgattttaattaatcaattataattctaaaattagattccaataagtagatctagaat

SEQ ID NO: 339877 - DNA, 443 bp, Cannabis indica
agtggtaccataaatacttaaatacatttatttaaaaaaaaaatggaactttgtgagcaatcaatagaacaaaaggcaggatcatgatcgtgttaatctcaaagtgaaaaaacaaacatgaaacatgaaaacaacaacattacagtagaaattaattacaataaacaaaattggaaaagaatcaccgaaaattgttccgcactctgcttaaatccagtataggtagtcccttgtatacccaatggttattataaaatagatgttgtctcccttatataaagaaatagtctcaatagaggactctatccgagataatgtattttacaaatatatttcaatatctgttagaccttatgtttaggagagtgtgggagggatagtgaataaaaggttgtgtttaagtcattgtgcattggccattgagtagttattgaatgggaaaa

SEQ ID NO: 339878 - DNA, 613 bp, Cannabis indica
cacccttttattatagtggagagtgattctaagatggtgatcaagaacctaaagggcgacgaatccttttggcagcttgagaactacgcaagacaatgcaaacatctctctaattctttcacttgctgtaatttttcttatatttctagaaactgtaattttgcggcccataatgtggccaagtgggtgtttgccaacaatatttctggtatggtagaagtctctactattccgagtaatattttctgtaatgaccgtgaggtctgactatttgtttccttctaatatatatacgctttatttcaaaaaaaaaaaaagaataatcctacaccattacagataaagcgttcatataagtactatctttagcattttctacttaaaatttacaaagtggttggtttctacttaagggaaatttgaaaagtttggttataggaagaagggaatagtttaaggaaagtggtgtagagagaggggcaatgggaagtgacactcattgaacttgcattctcaactacaatagtgattagtgaggatctacaaacagcgagcaaatagtgagaaatataaatatatgggagatttataatgtagtagattatttaatgaa

SEQ ID NO: 339879 - DNA, 1466 bp, Cannabis indica
ggctcggagtgatttcttcttatgggcggtagtttttctttacctcttgggaggaaccacttcggcagcagtagggactccagggttggatgtccttttcttccccttacggtccgtgatgtcttcataacccatgtctgcaaaacaagacgaggcgttgcaatcattataaaggtctattaaaaaggggaggagtataattttccacctaagggatttaccaaaatcactagaaggagagctatcactagatgaaggggaagaaggatcgtaatatttgctaaaatccctacagcctgtaattttgaatatatcaaaaggctcgattggttataaatcccaactcgcatctatgtgacctgccctatcttccatagtaccgtattgctcgactataccataaaatgactcgtaatagttaatttggatgtggaatctaggataccaactgtcaaacttatgagcaatgtggtccacaagaagagaattccaaatataaaaattaaggcgggagtcttcaaaggtgactaaggtactacgctcagctttaagtatagtaggagacgaaccacattgattacctttggatgctccttcaccgaattcccgaggggcagtactttgaaggtattgtgcttgagccaagcgatcctaggcctgatcctcgggcgacacaataatctgttgccaagaagaatacttgggaatcttataatcacaagtatattctttatcagcaagaaggcccaccgatcgcaagttaacctcgctcaaaaggaagttggatgaccgaagactgtagggaagggttaacaggcgcctatgcctactaaccatctcggggtaggagtaggtcttgtcaaaagagctgtcaggacaaacaaaacattagtcataaacttgataaaggaagactgatgtaaataagtaagaagagaacgatcacttacgaagtttgtgaaacgtggttgtgccgatgggggaaagacgaaatgtccagaagaagttgttcttaaaggacactttatttggcaagtctacaataattttaggctcgttggggtgagtaacgagatagaaaaatcccactgcagcgttcttcctcgatggaacaaccttaactgagtaaagatactcaatctctactggagtgggacaccccaggttcataattttgtacaagactttcagactaacaagaatcctgtaggagataggagtcagctggaatggggcaactccaatgtggtttatatagtctttgaactagtcccgaagaggaagggcggcccctacactgatatgctcaaggctccaggcacccatgcttgttgaaccactggtactggtctcaccactggtccctgggttactgctggaaaagcatgcagggggtagcaactgaactcaccctctcgtactgatctaacttggtatgattgcccaagttcaattccacaggtttt

SEQ ID NO: 339880 - DNA, 322 bp, Cannabis indica
atgaattcatacattatgtgcatataatcatgaaataaatcaatgtgaaccatgccacattaaatgttatttctgatctatattaataggtaaatctgattatattgaaatgagtttatttagggcataaaacccaacatcttttctctaaggattctttccaatttatagtctacaaactcgtggagcagttcccggactattgctacatacgcgaccattctttctttgcgtgtctgatattctcccgacacctggttcactaccagttgggaatcgctgtagacttctactcttttagcccccacaattttttctaatc

SEQ ID NO: 339881 - DNA, 1029 bp, Cannabis indica
ctcgcgcttggccttggccacagctttgccttgagccctttagctcctccctggtgccctttgcctccgcctgagcctcattctgctgggcctcctcctgaaatgttttcctctcagtcgacaagtctcgcagactcttcatggcctcgtccatgccccaaaattcggacatgacgtacccatggtcaatcagggtctttaagaggcggccggtctccgtagtgatccgaaaagagaaacaagaatgagatcgaatgccttaagacaaaatataagcaaaaagaaagaaggaatcacaaaaacttaccgcagccagggcaacactgatatcctgaacctgaaaaatagagtttgtggaagcacaggctgcgtatcttttggcggagaattgggtcagataggagacaaacttgctagttacctcagaagcaaagtgggcgagagtaggaccgacaaagcggtgaaaccaatctatcaagggatccatgttcaggtcccagacatttctgaaggcctcctcgcgcaaagtattttgttgctcctcccgcaagacattcttcagggcttccacctcagcatgtcaccgactgaactcgtccagggcgtagttgtgtttggaaattcgaagtttctgcctttcttcatctgcggggaccggggtaagactaatggcaaatggcacggtatactcctcctcctcgggaggaatccttgagtctaaactgacggctggggtgtccttccttctgggcctcttggaagactcggcctcgaccattttacccttccgattgcggtcaagggaagccacaatctcatcctcctcctcgtactccccttcatcgtctattaagacgattgtgcctaagggggcactagaagacgacctcccaggggtcatcatttgggtaggaaccggaggtagagaagagtctggggtgtaggtctcggcgagagttgccaaaaggtcttccattggcttggctgctgcgaaaagaataaacaagtgttagaataactataagaagg

SEQ ID NO: 339882 - DNA, 763 bp, Cannabis indica
ctatcctcaaatggaaaaattggcgttcgcattggtaatatcgtcgagaaagttgcgaccttattttcaactcacagtattgaagttttaacaaactaccctttgaggcaagtcttagcaaaaccagagacattggggaggttgttgaaatgggcagtggagttaagccagttcgacatcaggtataaacagagcactgcgatcaaggggcaagccttggcaaattttatcctcgaattcccaagcaccgaagtggcactcatagacgacaaggttgaaactgctatgccaaatggagaagtgtggacattgtacgtcgatggggcttcgaatagcgaaggttctggtggtggaatcctactaatcagccccagcaattttaaggtacacgctgctttatgttttgaattttctgcatctaacaatgaagccaaatatgaggctttaatcgcaggattaaagctttctctcgagataagaatcgagtatctacaggcttccgcgattcccaaatcgtagtatgccaggtgaatggaaaatacctggccagaggcgggaggctggttaagtatctagccatagtatgcgaattgatgcaaaaattcaaagaagtagtcgtgtctcgagtaccgcgtgctcataattcacacgcaaacgtattggcccgtttggcctcgactagagaagccgaattgcttgatgtaatccggtggatgtattggctcacccaacaataaatcaagaagcaatcatggaaatagat

SEQ ID NO: 339883 - DNA, 1186 bp, Cannabis indica
tgctttgagaagcaagcatccgagccttaatcttgtcgatagcttcattggttctctgaactaattttggacccaagtacttcctttatcaaatttattcccaatgaataggggaacgacatttcctatcatatagcatctcataaggagccatccctattgtactctggtagctattgttgtaggagaactcaatcaaagacaagaacttactcaatgaaccctcaaagtccattacacaggctcgctgtaaatcttccagtatctgaattgttctttccgactgaccatcagtctgagggtgaaaagctatactaaatttaagctttgtacccatagccctctgaagactcacccaaaacttcgatgtaaactttggatccctgtctgaaacaatagatttagggactgcatggagacgaactatctcctttacatacacttcagcgtactggtcgactgaatatgtaactttcactggcagaaagtgagctgattttgtgaatctgtccactatgacccataccgaatcatacattcctgtggttttaggcaaaccagtaacaaaatccactgcaatatcctcccacttccactcaggaaggactgaaggttgcaataaccctgctgacctttgatgttcaaccttgatttgctggcaggttaagcatttggacacgtagtctaccacatctcttttcatcccatcccgccagaagtagggttttaaatcctgatacatcttggtggttcccggatgtagtgaataaggtgtggtgtgagcttcatgaagaatctctttcttaagctcatcaatactaggaacacaaactcgagctttatacaacaccattccattatccgagactgaaaagtctttaggccgaccagccattacctcatctcgaatcttgactagctcgggctcttttaactgagcttttctgattctctctaatagatcagattgaagtgttaaattgtgcaactttctaactacaaactcaatccctgcactaaccatctcagaagcttgttgaggggctatcataacagtaataatctacccgggacctcttctactcagtgcatcagccacaacattggctttcccgaggtgatacaaaatctcacagtcatagtctttaacaagttctagccagcttctctacctcatgtttaaatc

SEQ ID NO: 339884 - DNA, 695 bp, Cannabis indica
taaacaagtttagactccctctaaattattactgcaattctttgtaatgcactttatgaatctgacttctcaaacacctccaaatagcgaactcccttcgtctttgaagcgtgagtgcttacttcctcccgaagtaaggcttgaacaagtcttctcccgaagaccacttctcttgttcagtcaagttgttctaacaaactcttaagacagagtaagaacagatatgaaacacactagaacctagatgaacaactaggttctcacaaaacaaagaaactctcctctcacaaataagaaaaatgcaaaaaactgaatactataagagttgattcgaatggctgctctctaggtcctatttatagaatatagaaaccctagaaatagccacaagatcgaatctacagcagtagaaaactttcctaaaaaaaactcgatctgcagcatcagaatcgaaatctgacgcaacacattagaccaaaaaaggaaacttgttataaacgggtccgatcttatattgggtcttgatacttactacaaacagcgaatatgatctgatataatcaagacaaaatcgaacttaacgaggaaagtgataaagatcaaagtttcctttaaaaaccaactttccataagagaattgcttctcttatcagaagtttctatacaagaacagagttgggttttgtgccctaaat

SEQ ID NO: 339885 - DNA, 683 bp, Cannabis indica
aaaaaaaaaaaacaagtttttatacaagtattaccattttttttttgttataatttacacaccgttattataaaaatatatattctctcacataaagttaaatattgttctaaattttcttggtgagagatgatatcgatctcaaaagataaaattagtatatatgcttgcacctattcatactagtattcttgaacaaaatctatttaggtactaatccctacactttatatatagtgacctatgtaggaattttacttggtgaaattccaagtttaacctacaccactcaagaaatatgtcaaaacgacagggacaaacttgtcccagaaaattcaatttaaaacctcaatcaacgacaaagaaactttggtcgttttctcctgcacgacaatggaacttgtcgttcttcactcacacgacaaatcgtttaaaccaaacgatttgtcgttcttgattgaacaaaagtaagttcaatcagagctaaccctagctcatttgcaccttcgaacattcgagagtttctcaaactctctctctttctctctgccttctctctggttctcaaaccctagaaccagagatccttctcgatctattgatcgatcttacccagaaaccttcccagaaacaacccaaaacacacacacacaaatatcaaacatagatcattaggttagggt

SEQ ID NO: 339886 - DNA, 522 bp, Cannabis indica
acactaagtaaaattaacgaaagacattttacctaatgtacctaagcaagacttctataatagtgtgtttttagtcaatcaaagtgcgagaaagttatattttgatataatattttttattgattaaataaatgttataaaagttacaagtttataacaaaagagataatatctaatctagtggagaatttttatattatttataaattatataatatatatatttattgtcggaattttaaattgcattttacaattttgccctacaccaacaaataaactaatcaattttaccaaggtcaatttagacctttccctatccctgacttttcaaagtcagcagagtcaaaacgactccgttttgtctttgaacaaaaccaaagaaggattcgagaaccttctcattcaatccctcactctttgttttgctcgaaaccctagcagagaatttctctctgagaaactcgaagctagaccttaatcaacctagaaaaaaaaaccagaaatcccagatcaaacaca

SEQ ID NO: 339887 - DNA, 805 bp, Cannabis indica
gtaattaactctaatcaagttgacagtagaacacagaattaaatttaaattagacaacgttaatctcaatcaaacttgggtagtacattctgaactaactaaacagttgtatacctgatcaactaattcttcctcattagccacaacctccatgtacttcatcacgtatacaccgcaatctcggtcattgtcttgttgaggaagcccgcgatctttactgtcaattccgaaatccacaaaaggcacattctttgacttattctcatctaacaaaaggtccaacgtcgacagctgcaaacatatacaattagttagattaaatgaagaatgagttcacatcaaacaatgacactttgcaactttaccatttctttcgtagcgtcaacacgatacttctcatccattgcgatgtgtagcgattccagaaatgagacaaccttggacttcatattaagttcggcaccaaaccaatgtggtgcaccttctagcgtcaacaccggcacaaacatctacaattgaatagaggaacaataaagtcataaataaattcaaattacagaccctatagatattcgacactacaatgaccaatatgcatcgctaacataactcagttttcaaaattacaatttagaacgaccatgtgtatatgatgaagtaccttgacgcattttttgaagttgtcttcgtaaaatagtgttgaccattctcgttctttcgcaatcctcttcacattaaatgaaccgggagttttttgctgcaaaagcattgttcatcttgtcaagtaacagaaattacaaccaaa

SEQ ID NO: 339888 - DNA, 629 bp, Cannabis indica
gtgttttatcaacatttccccttctgtaatcatgagaaagcgaaaaatccagttacacgctcataccaagcacgtggtgcttgtttcaaacaatacaaagctttgtctaatctataaacatgattaggaaaatgaggatcctcaaaccctttgggctgttcgacatacacttcttccttcaaaaaaccatttaggaatgaaaatttaacatccatttgaaacaatttaaaaccaagaatgcaagctatgaaaagaagtaacctgatagattccaatcttgctactggagcaaaaactttatcaaagtcaataccctcaacctgagtgtatccttgggcaactaaccttgccttgtttcgaatgattgtccccaactcatcactcctatttttgaaaatccactttgttccagtgatatttacaaatggtagtcttggaatcattgtccaaacattgtttcgaacaaactgatgtagctcatcctgtatggcaagaaaccaatcttcatccattaaggtttcttttactgattttggttctaaagaagaaacaaaacataagaattgaattatattagcatattttcttcttgtaaccatgcactcatccaagtttccaaggatgagatc

SEQ ID NO: 339889 - DNA, 851 bp, Cannabis indica
gaagagaaaggcctaccgatttggtaagtgtcgctcttcccacttttgaaagagtcttagctttccaaccatgtaattttgaagtcaggttatccagaatgaagttaaaatcagcatccttttgtctcgacctgaaaagagggaggcctaaatacctgacatttccttccggagatccaatacccagcatagccttgataccttgtttcatgctgttgggggtattcttactaaagaaaatggaagtcttcattttattcaccttctgaccagaccaggagcaaaacttctcaagacaatcccaatatcctttggcctcctctagattggctttaccaaccagaatgaggtcatcagcgaagaagatatgggatatcataggccccccccccctactcagcctgatgccactaatagatttcttagcttgggcatcttccagaagcctagacaagatgtccgccgcccaaataaagaggtagggagaaagggggtccccttgacgaagaccacgcgaggggataatctttccaaagtggcctccattaatgcaaatgttgagagtggtggtagatatacactgagaaacccaattccaaaattccgatggcaccccaaagcaatcaataacatgatcaataaatctccaactcatcttatcataagctttcatgaggtcaatcttaatagcaaacagaccttctcttcctctcttcctattaaacgagtggataatttcctgggcaatcacattattatcttgaatattcctcccaggcacaaaggctgcttgagtagggcgggcagataagtctaggtaacactggcttgattctgttagcaataatctt

SEQ ID NO: 339890 - DNA, 864 bp, Cannabis indica
cacaattcccaaggccaacctcgccaaacggtcaaattgcgttgtatactcaataaactcatattttccttgtgagttagttgagtgaattcttttctcttagcacttctaactgcttcattgtaatacttagcattgaaagcccggaaactttcccaggtcattgcgtaacatcgtgaatcaaggacaccatgtcccaccagaccagagcgtcttcttgaaattaaaaagtggcacagaccaccctatcattaccggtgacgcccataaaattcaaaattctagtaatcactgttagccattgctcggctttcatgacatccggacctccaagaaaaactggaagtgcttgcttgctgaacctttcatacatgggttccatccgattcactgccaccactggtccggcctggacagcaggggcaggtgcgactggaatttctggagcaggcactgcaagagcaccctgctgtctcaactgtcgaatctcattatcttgttcattggtcctagcttgcattgcggcaaacctattttcccaatttcgggcatgatgtgaagctttggcagcttgggcaacctgtggcgggttaacatcaccccgaccacgtgacctgccctttggacctctacctcggccccagacatttaggggaatttgagctccctgaccatcattagatccaaccgaattgccctggctcctggtattttgcctggcgtccatactaatttgaacagcctgcgtaaccaagagctagtctggtcaaattgtgatcaaagaaaaaattactaatgtcgcttatttggaaattaaaaacatacgactattctaatatcaggctactaacatgcttcctaaca

SEQ ID NO: 339891 - DNA, 838 bp, Cannabis indica
cattttagtaattttgacccgagaaaggtaaaacagtgaaattaatttattaacgtgcttatgggactatattattatatagtatgcctgtgatgtctttttcaagtgtgttctgacaggttggcacggtatagtcacaaccgggtattttgggccgaaccgggttcgggcccgaaatgcaatattggattgaaatattggcattttagttgatagtgagaaatctgaattttatttgaaaagaaatgagcaagaaatgtcatttttacccttgtatgtgtgtgggtatgttatttagccttaggggcaatttggtcttttgacctttatttgacaattgataaaagatgagttttgagaaaataaaatagaatttttttagactttggttcccctcatacccaacccctctctctctctctctcaaaccctcttgcttttcaaagtttgattgttgggtgaattgtttggatttggccaaaagtgaagcttggaattaaggtagttttgctgttgtttttattcgaaattcatgctgaaattcttgctgagttcattatgcaaaaacatgttttgggctgttttgctcttgatttgcatgtaagaggagtgagtgttaattttgattagattaatgttagaagattcatgctaggaacttttatgatgatattgattattttgattggttaaggtgtgatttgatgctttaatttctgaggttatgttctgaaatttttaggcaaatattattgaattaaatgctttgataattgatgttcaacttgatgattatggtgagattgcttgatatttcctttttgtgtatctttggtat

SEQ ID NO: 339892 - DNA, 711 bp, Cannabis indica
aagttttgtttggtccccaaaaatagttgaatcttaatctttgctaaaaacaaagaatatgcccagaggagttctcgaaaaaaaaatcctcagaaatgacctaggttgacaaattgtcaactaaggccctggtcagccctaggtgtcaacctggacgctgggccttgatcccgacacccaagaagtattgtttcttcgctaaaagtacttattttcccatttttatgaagacgaacaagatgcacgagtcaaatttttggtctgatacttggaagtgatttagaataacaaattgtcaacttgggcactatgtgcccgggcaccgaatactctaggtgctcaaaaatgaactttctctgaatttgattctgatgcctcaaatatgcctgtggtatgtctagttcatgttccaatgaaaagtttgacctatttacactaagacgatcccaaaatttgaaaccatagttcaggatgtcaacttgagcgctgggtaaaaccctaggtgcccaggtttacttttgagatattgattcgtgtattttagctcatgaggcttggatttggttgctccatatcttcatggtatagaatactaaaagatagtgggtgtgacagtcagtagtcccgtgatttgcaagggaaaataccgggtaagctgtgcaatcccacatcgcctggggaaggtcatgtgtgatgattctaagactgtgt

SEQ ID NO: 339893 - DNA, 743 bp, Cannabis indica
ccgaagcctccgtaattatggttgggcgtctccgcatctcggggcggccggtggtacgtcccggatgtcgcgggcttgattccagccacctccacaatgttctccaattggtgagggcaagtcagagtggaatgaagctcgaccgcctcccatcccgtagcacgcggtttgtacccctcctgggcaacaggacccagcatgacatcttctacggtggccagaggcttaccccccttcttgaaagattttgagccggatgcaaacattttttattctgaaaagagttaaaattccagcaattaggccccataccaaaccctaaatcaaaaaatggaatgggggtcccctaaccgccggaaagaggccccctccggacatctgtcaacaagaaagccttagaaggatttcctagacaaaagtcgagtacaaacatctcacagatggtgacattgcgcatgaaagaaaaagaaagaggaagggcaaaaaatcgagaaaaacaagtcttctctatgcccttgaaggccatcacacgaagagtgtatggtcctttacaaaatataacaacagtgcgtaacaagagtaaccctaacaccagagaagggaaatctagacgtattacgtgaaaactcaagggaatacattcctagaaacttcaaacactaacctagaaaaacaagtaaataataaagcatgccatgaacataacagtaaagtaaggggtgcgagaaacttacatgaagtgt

SEQ ID NO: 339894 - DNA, 919 bp, Cannabis indica
ggtcaaattgcgttgtgtactcagtaacactcatattttctttctgagtcagttgagtgaattcttttcacttagcacttcttaatttcattgtaatactagcattaaaagtcttggaacttttcccaggtcattgtcgtaacatcgtgaatcatggacaccatgtcccaccaaaccagtgcgtcttcttgaaattaaaaagtggcacaggccaccctatcattaccagtgacgcccatgaaattcaagatcctggtgatcacagttagccattgctcggctttcataacatcgggacctcccagggaaactggaggtgcctgcttacggaacctttcatataggggttccgtccggttcatagcaacaacaggttcggcctgcacagcaggggcatgagttactggtatttctggagcagggactgcaggagcaccctactgtcttaattgccgaatcacttcctcttgttcattgattctagcttgcatttctgacaaacctattttcccaattttgggcatcctgagcagcttgggcagcttgggcaacctgtggcgggttaacatcaccccggccacgtgccttgcccctgagatctctacctcggtcacagacatttaggggaatctgagctctctgaccatcattggatccaacagaattaccctagctcctggtgtttcacctagcgtccatattatttagatatttagaacaacctgcgtaaccaagagctagtctggtcagatcgtgaacaaagaacaactttctaatgtcgcttatttggaaattaaaaacatgctccaattctactatcagctactaacatgcttcctaactggcttttcttaaatcgtacaataaaaataaactacaaagcaataaaagcttactgaaccgtgaaacgagctaactg

SEQ ID NO: 339895 - DNA, 490 bp, Cannabis indica
agtataaaaaatcaaatttctcatatagaattatataataatataactattcattatcaaataattttaaaatgtaattccataattttgtcaatataaaaaatttgagaaagaattaggagctctcacatagttccatagatagctaaagtaccaattaattttttccaagattaaatgtgagagcatttactattttttttgtagtgattactatgtcattaaaataatgtattttcactgcataaacaagtgtgccatgggattggctctacgggtgaaaaaaagagaataattgtgggagttatatttggggtaggatgagtgacaaacttagaatttttattttgtggaggcttatttatcattaaaagatatttatacttatactataattactcttactagatttatttaattttatgggagcttttttattattttggtctataattatcaaattaaaaaaattatatttaattttttaaaa

SEQ ID NO: 339896 - DNA, 827 bp, Cannabis indica
tccgggaaattccttggattcatggttaaccagcgaggaatagaagccaaccccgcgaagatcagggcgttggtggaaatgccatcaccaactaagccaaaagaggtccaaagcctcacaggtaaagtcgctgccttaaatcgctttatatcgcgatcttctgataagtgcaaagagttttttcagattttaaaaggcaataagaagttccaatggaccgaaaaatgcgaggaggcttttcaagccttaaaaacgcatttggggcaacctccaatcttatcaaagcccatgaccggcgaagtcctatccatctacttagcagtgtcagaatacgcgattagttcggtactaatacgcgaagatcaagggcgacaatacccggtgtattatgtcagtaaacgattactggatgctgagacccgctatccccaaatggaaaaattggcgttcgccttggtaatatcgtcgagaaaattgcgaccttatttccaggctcacagtatcgaagtcttgacaaactatcctttgaggcaagtcttagcaaaaccagagacatcagggaggttgttgaaatgggcaatggagttaagccaattcgacatcaagtataaaccaagaactgcgatcaaggggcaagccttggcagattttatccttgaattccccagcaccgaagtggcactcatagaagacaaaatcgacattgctataaccaatagagagatgtggacattgtacgtcgacggagcctcaaatagcgaaggctctggtggcgggatcttattaatcagtcctagcaattttaaggtacacgctgctttacgttt

SEQ ID NO: 339897 - DNA, 922 bp, Cannabis indica
gcatcaagtgttagaaaccaaagcaactagcttcttaaagataaaagagtatagaaaatactccccctgcatgaaagcactctaacacataaaacaagaaactttttttggacggaaaatcttacaaaccgaaaacacaacatctttttaaatggaaaagtgcacaaaccacaaacaagcaactgttagaatttattttatcaggatcttagatctactcacaagtatgttgatttaacaacctaaatatgaacttttaaaacgataaacaaaacacataaaaaattaagaaaccttacagtgatggcagcagaataatgtgtctccttccactcagatctctaacccttgattcctgtctgtcgcagagtataatcaagatctgagcccgaatgtccttcagatggatgtgatcctttacagtcttccaatctatgattgaggtactgtttgctgtgtgtgggcacttctctctcacaaaggattatgaaattctctctttttttctctcttgatttcgtgtatgatatgcatcccaagggaagagaggagggctggtatatatagggaaaagggaacctcaactttccaaaataaacaattttatcttttacggagtaattgattaactgtcttatttggtgtgatccaccactttcctattacagataactgttaggtttatgttagtaattacttggcaattaaaaaattgaaaataataattgggaaatacaaagtagtggccgaccatggtgtgacttgggcctcacttgggttttgcagtttccacaattttatttctattttcccaaaactaaccatttaaatgccaaaactaattatttaataactaaaatagattattaaataatactgtcatttaatattattattaattagacatacaaagtctcttaat

SEQ ID NO: 339898 - DNA, 679 bp, Cannabis indica
caggagcacccggggatttggaatctctgcctttgcgggacaacaggtaagacagtagttagcacgtagagtatgcgcggtggcgcttatattgaaattgatatatgtgagtaattgtaaccgggattagggttattaccctaatatgagcggttaatagcctagggttattaccctagtgatataagttgaatagatgctatgccatgctaagtgtatgattatattgagatttaaggattatgcgatcaaggcataatcaggttggactcggtaatcaaaaccgagaagaaccattctaaggccttattgtaaatagacgtgtgagagcaacacgtaggtttacgccacgtaaacataaataggcatgtgagcgcaacatgcaggtctgtgtcacacagacagatttgaatggcattgttgtttgtattatatgatgagcatattgttgatatgttttatactgtcttgctgggcttggctcacgggtgctctactgtgcaggaaagggtaagactattgctgatcagccatgagtgcaggagctggacgaagaatgtacatgtccgagccatatcagaccaagcgggttggggtctaccagtgttgtatttttgagactctgttttgccgcttaggtcggctaaaagaaaaggacttgtaataatattttgttaaa

SEQ ID NO: 339899 - DNA, 480 bp, Cannabis indica
tgaaaatattatttaataatctattttatttattaaataattagttttggcatttaaatagttagaattggaaaattggcatttttgagaaaatagaaataaaaaattgtgaaaactgcaaaatccaagtgaggcccattaacaccataggccggccacttgtgcaagcattttccaattattattttcattattttaatgctaattaattactaacctaaacctagcagttgtctataaatagaaagtgatggctcacaccatattaagcagttaagcaatttttcagttattcagaaaactgcctttttcagaaatttgagccatcccttttctctctatagtcgaaccctatatctcttctcttcctctttcaatttcgagataccctagtgaaaagagtagtgcccacacacagcaagtggtacctctatcatagtttggaagatcgtgaaggatccaaatccaagagaaggacat

SEQ ID NO: 339900 - DNA, 942 bp, Cannabis indica
ggatcaggtaccgcagctcgcaaaatgtcgcatccttgcggcaacgcttgaggaaaatgcccacgattggttcacccaattgcctgaggcctcaatatcgacatgggaaacctttgtcgacttattcctcacacattttcaggccacgatgacttatacgcctccctatacaactctggccaacatcaaacaagaacccgctgagtctttgcaagactattttaaacgatttaatgcggaagtaacaaaagtcgagaaggctcccgagtcttcgcttgtttgtatgttaataacaggtgtcctgccaagaaccaatttttggaaggaattacaagctcgaagaccagaatcgctagtcgagttcttcactatggatgaacctcataagagaattgagaattctctagcagagttggaaaaaggcaaggacaagcataagtcgccagtaccgcgatcgcgatctcgcagtcctcgagggaagaattccagaggtcgaagtccgagaagacgcagcccacggagacagcgaagcccgaagttagccaaatctcctccaaagaaggagtcttcgccgaaaaggaaaggtggaccacgcttcgtgaactataccgaactcgcggtgccacgagaccatatctacgcgattgaggaaaggaacagagtcttcaagaagccgcccccgatcaggggaaaccgtgacaagagagaccccaagaaattctgtaagtaccataaagatattggtcacactgctctggaatgttgggtcttgcaggatgaaatcaaagagctgattcgaagaggaaagttcgacaaatacaaaaagaacgaggaaggtcatccccgagcggatgacaaagaagaaaaccagaacgcgagtggttcgagaacacctcgcaatatattaacaatcattggagggccccatatcgcaggagactc

SEQ ID NO: 339901 - DNA, 533 bp, Cannabis indica
agacaaagacaatattgaaagaagcagattagcaattagcaagaaaataaactaaagtagaatttaatataatcttatgtaatatcaatctttaaacaattccccggctaaggtgccaaaaacttattacgaatgttgtaaatagtacgcaagtgcacgtaatcaagtagtaagctcacacaggtgaggtcgacccacaaggaattggattgaataccactagactaaatctatgattctatttggcaaatctatatttttgagaattaagaacagaataaaaattcaagaagcttaaatacacaaaaagaaattaatcaaaatgagcaaagagggaagagaatcatgttgataggtttacccaattgttaatgcctgattactatgcccaattcctattgtgaatgatagattattcaaattaacctagctctttttagatcttttaggttctaaatcacatgctctctaattaatctcttaattagaatcatcgaattgagatcataaacatgtaaaaggtgatcaatctt

SEQ ID NO: 339902 - DNA, 569 bp, Cannabis indica
tggtcgtccgaagatcattaaaaaccgttctagatacgagtatttatccaagttcatattttcttatatcaaaccacaaaattacttatgttttattcatattttattcatttaaaaaaagttttatgaatattcaacttatcttaatgtttgaatatttctaaatatatctagcaccataaaaagaatttacgtataacatttaaatcatacaaatctaaattaattgtactaataataaatttaccaaataaatacaaattaatacaattattgtatgataattaattaaatgtaaattcctaaaatttagacaataaattacataaatttggtaatatataatgaaatgaataattataaagatttgtacaattgttacatgcctaaataatcatgtaataaattagcatattaaatttttttccacttttaatttatactaaataacatataaattctaagtatatgtattaaataaaaaaatggaaaataaataaatgtaatttattgactaaataaatccaaaataggaaaataattaatattctaaataaataaaaaattta

SEQ ID NO: 339903 - DNA, 1009 bp, Cannabis indica
ttagacgattcggtaaaaaggcgttttgtgtctctgaaatgacaaatgggaggacaaccttaaatcgactaaccagaaccttggtgatgagcttagagataacattgcaaaggctgatgggacgaaagtctttcatagtatgaggctttttaatctttggtattaaagttatgattgtgcggttgagtttggtagggtcagccccatcatttagaactcccaacacagcttgagcaacaaaattccccactaaatcccagttttgttggtagaacattgcggacataccatcaatccccggactcttgtccggactcatgtttcgcaaagcatcttcaatctccgctttggtgaaaggcctggtgagattatcgttcatttgaggcgtaaccatggcaggtgttgttttaagaacagcagacaaagcctcggcatcagaatgtgaggtctgaaaaatgttttggaaatagtcttcaactaccgacaccaggtctgaatgagctgtcattttttggccagaatcattaaagagaagtttgattctgttattggattgccgtgctgaagctttagcatgaaagaactttgtgttgtggtcccccaaattcatccaatcaacacgtgagcgttgtttccaatacatctcttcttgttctaaaaggtcatcaagaatagattcagaagctttgagctcctccatagtgatagcagatcggatgacagaattgttcaaatcagtcactcgggtttgagcttcagcaatttttttcttcatgcgtccatattttcgaatgtgccattgttgcaagttggtagcacatgagtcaaggttgtgtagcacatttttgattgaaggttgagaagaatgatgtaaccaacattgagaaatgatgtctctactctcagcatcagccaaccaaagtttttcaaaatgaaaccggcttttacgtttgaattgttgtgctggtgtattatgagaagtgagtacagcagctatagcacgatggtc

SEQ ID NO: 339904 - DNA, 3320 bp, Cannabis indica
aaaaaattgcaactcgttctagtaccacggtattggaatgggaaacattaagaaaatactaccaataagtaccaggtcggccgaccacactaagtactgaatgaacatttacttttaagtgaatggcctgctggacagactacgctcaaaggtttcgacaaaagggaaaaaaagtactcaggtcagatgaccactttttaaagtacaatttcctatttctgcaatttgttttatttcatgttaagctaaaagatcagattagatcaaatagctttgatgtaagttactacggtaacaaacatattttcgatcaataaatgaataaagatgtttatttcaaaattcaattgagtcgaaattatcagcatgtttctaagttaccatccagtgcgtacaaaaggtttggtcgaacccaaagcaccgagcagataaatagtgtacttgtgataaacaagtgaccaagagtcataagtctcctcggtcacttggggggcacctatacctgtacaaagcatttcgtaaggataacacgatgattataaacagagaatggaattcattaaagataacaaaagcacttaataccaggattaaaggctgcccggtcagccagttgtctgtaaaaggaataataattccaagtttaaagaccgcttggccggtcatgatgtcttaaaaaaggccttatggccgaataagatatatagaagagaaggataaaagaagaagtatttaaatagctggagtcccatgctctcggttcagatcttctgggccggtaggagctggaggatctgttgtttgaacgggaggtacattagcattttggccggtggaagaagcagtcgcatcaggctcaccataagccacttgggaagcgcagaactcgagatacatgcctttggcttcacccaactgatcaaagtttgcctgagggttagccttccaaaagtcataaaagagctcgaggccggctgtctctaagacatggaccttttctcccagcttctccacctcggctgtaagctcctcctcctcagacttcttctcctcttctacccgagggaggaaaggtcgaagagacgtcctttcatcctgaaggctattcacctctgcagataaggtttcgatggtctcctcaagtcgatcagaagcctcgagatccttagtcaactcggttattttcttctgagcagtaaaaagcttcttgttgacttcacccagctccaagttccaccctggcatcatcagtgtccttcctggccaagtccacctccgccctcatggtgttggacagagccgcgttcttggaagcagcagacttaacccgggagtatatgtaagccaatttcagaccagcctgtgcagagaaaaaactttataatctgagctaaatgaagaggattaaaggaaactgtgaagaaaagcttaccctggtgaattccttcaagactcctcccatcaatagcttcaaagaagagtcgttatcagcaccggcaagttgctcacttaccttaggaaccaaccggttcatatagtgggcgagtatctccttgcctttcttggcctttggaagcactaacaaaggaggagtaggagtcggcatcacctcggatccacctttggattgctcaggcctgtccgaacttcctcctcgagaatctttggacttggcagcttttggagtagaggggtttgcgacagttagttcctcagaaaggtcgataacctccctcgtaggcgccttttccttggagggagtcccttcaccgcccttggacttcttggcaggaggagatgcgctcgagctttctctaactctcttcttcaaagcatcgagcatcttttgagacatgtctgcatgaaaaaaaaacatggttagagaaaatagacaccagaagcataaagcataatagtcaagatgctcaaaaacaagacagagtagtctgcaaaacgaatgcccgagcaagacccaaaagtccatcatcacctgaccctcttatcttagacatgatggctttcccttttccgagcacgggaggaggtgcccgaggaagcgaactaggctccctaatgcgaattgcatgttcaataggcctaggtggggccagaagtttcttcctcctcttgagcggagtcacatgctcttcctcagcttcatcttcaggattcaagggttactgagcatattgcttggcccttgcacctcccttcaacttagcctcgtgcttcagttgaagtagctcattctccgaatgagctcgttcagcccgtccaacatcagatttcctcttcctccccttcactggcttgggaatgaaatccttcgaatagagcccatacttcacaaagttatcctcggaggtcaattagatgatatccggtcttcccccggcagctgagcaagctcttgagctctatccctatgagtaagagtgaggggagggcggtgatatgttggaatttgctagaaccaagtatgggtgatgcccgcaccatccaccatgaagtactcatcaacaaaatgcccaattttgctgatggccttgtcctcgcttcacgttaaccacttgaagtctggttgagagaaatagaagtaccccgacctaccttgcttaggggtggacttcaaatcaaggaaccagctaaccacgtggggagaaggcatatcccacttttgtgaggcataaaggacgaagagagaagattgatacttaatgcccttgggagtgaactgagttgggcaaaggtagaagaagtctgctacattcttaaaatatgggtgtagaggctacaatgccccttgctgggcatgagcacccgaccaagcacacatccccctttcaggatttgtggctcggttattgtgggcgggaatgtaacagtccaactcgcccagatagccatcctggtcgagagccctcaggcgcgcctcggaaccttggacggagggctcaaccacctggcaccaaaggtaccttgccttttatgaggaaccgcagctgtaagttcctcacttacgtagtgcacgccttcaacaaagacgtccccatcaacattgactagctcccaagcctcattgtatcccccatagtttggtggtggaaccgcctcctcttcctccgcctcagagggactgctaggatggacgtcgtcctgctcctcaatttcctggaccttagtgtccccttcatgatccccctcctcctggacggttggatcttgttcggtgctgggcagagtagcgtgccgagccacttgagggtcaaacgcatcagccatgcgcgttgctttttagtgtgagccatcatcctatggct

SEQ ID NO: 339905 - DNA, 454 bp, Cannabis indica
gtacaataattaaaaaaagaggtaaaaatggtagactttaaaaaagaaagtaaaaataaaagaagacaatataaaaatggtatagagtataatgaaaatttggatagagagcgtaaaagaaagttcacatttattattgaagccagaattaaggctgaaattattgaaacaaaaaaacacggcaagaaaagcagcatacaacaaggaacaattaaacagttacaaaacaagaacaaaaacaatggtagaagagagaaaaattaagggaacaacccagaaaatatataaacctcgatcagtatttcttgaaaaattcataaatatgtccactaatctcatctggtttagcttggttggcaaagtgaggcacatcttgaattataaccacttcttcaagtgagggcacatcttttttgaagccaccattaataaatatgtaatctttcatgccttc

SEQ ID NO: 339906 - DNA, 989 bp, Cannabis indica
aactatcagctcggcggattacaggctcctaaaccgtaaaaatcacaacaccgataagtgacacgctaaatcacaaccgggacaaaggttttaaaaccaaacttaacctactgtaacttaatacaaaaataccccaaactagcaggaaacaaactgcctgaaaacctgaaactagcacgaaacgaccagttgagaaaaaccggtttctcaccctactgcaaaatccgggtaaccggttttacaagcagtgtaaaaccggttagccggttttacccagaaaacccacaaaaatcaattctccaaccaaaacgtttccaaactcaaccaaactttccagacctgctaattagaccctaataaacattttccaagtggtaaaacaaagcttcatgcacaaaatcaaaatccaccattaaagctccaagctttgagttcaaaactcaaacttggttaaatctaacaaacaagcatccaaaccaactcaaatctacttaaacatgcataaaatcacctctgaaaactacagcaaacatcacaaaacagcagcaacagatttcaacaattttctttgaaaaccatagttttgagccaaaatttcataacttaataaaatcaagtaatcaccagccctaacatgcttgaatcaacattttaaatcaaaaataaacctctgaaatcaacatcaaaatacagcagcaagaacaactcaaaaataagcatgcaaaccatttctttttcatcaaaaatcaagaaactaaaagaaaagaagctaggacaaggattacctctacaagattactaagaacttgctgaaaatcacaagaatcaaccaaagaaacccagccctagcagctcccaagcttggccaaaagagagagagagagagaaagagctttgaaaaattctaattttctaactttgaaatttttgaataatgagaaaataaaaatgctattttaactctttacttcagccaaaagaaatgccac

SEQ ID NO: 339907 - DNA, 640 bp, Cannabis indica
aacattaaatgttatttctgatctatattaataagaaaacctgattatattgaaatgagttttatttagggcataaaacccaacacatccaaacctggacccaaacccgtaccctgtgacccgaaattggaactgaagttggaagtagaccgagacccaagaatgggaccggaaccaggacttggtcctcgaactgaaactagacctagacctagacctgaaaccatcaccagaccatgacccggactccaactcagacctagacctaaacctccggatcccaacctagacctggactcgggacctgaacccaaactcaaactcagccaaacatggagatggactcgggacacagagctgaggctgggacctaaaccgcaccccagtctcgatcccagaccctaactcaaacttgagacccaagacctgaacaagaaccagactaggacccatgacagggatccagatcttgactcaggatccaggaaatggggcttggaatggaccgatagttggtgtctggatttgggactcaaactaggaccagaacctagacaaggacgaacctagatcaggacccaaacccacacaataaccgggacctagacccagaataaggatagggacctgggaaacagaa

SEQ ID NO: 339908 - DNA, 1095 bp, Cannabis indica
tctttatttaatatattgttcttgtaatattttatttagagttgtaattgtcttagtcttttattcatcttattttattattccattgtaatctctctattatttctaacaatcaagaagattattttttgttttcaatagaaggagaaacaatcaagatgatgaaccaagacttggtgagattggaccacttcgatggctataatttcactaggtcgcaagacaaggtgaggttcctcctaaccacactcaagattgcctacattgtagagtccaccttggagcccttacccgcacctaccgacaaggatactgatgaggtcaaggcataaaggaagaagagagaagatgacaatcttctatgtagaggagacatcctaaactcactctcggataggctttatgacctatacaccgacactaaagatgccaaggaaatttgtgttcaccttgaaaagaaattcaaggccgaggaggaaggttccaagaaattttttatttctcaatattttgatttaaaatttcttgatggtaaacctcttttacctcaaattcatgagttgcaagtaaatgtcaatacattaaaagtgctcaaaattgaacttcccgaggaattccaagttggtgcaacagtggcaaaattgccaccatcttggaagaattatatgaagagaatatccttcataaaaatgaggattactctttggaaaaaatccaaaaacatattcgaatcgaggaggaatcgatatgtagcgataatcttgtggaggggtctaatgaagagctcccaaaccaaatgcaacttctaatgttcctaataagaataagggaaatacaaaaaagggtaataccttgggtccaaagtcttaaccaaaccaattcaaaggtggaaaaggtccatgttttgtatgtggcaaacttagacactattctaaggattgtaagcatggaaaagactttaggggacccaaagtaaatgctatcgaggaggatctcattgctactcttagtgaggtgaattgtgtgtaagggaaagtgaagggatggtggtatgatacatgtgccactatgttggaatttattttaccaggatct

SEQ ID NO: 339909 - DNA, 533 bp, Cannabis indica
ctattcggccattagaggcagccttggtgtttttcttcttcaaattcttgttgatttcagcttgtggtgtgtctctaatcaaggtatttcttggctttaatctttccttgtttttcttgaaaagaatgttgaaaatggatgaaaatgcatgtaattttggatgttgttgctgctgatttctgtggttgttttatgtggttgaaaagcatgattcttagagattaattaagctaattgtggtgtgtaattcctaggttgagcatgctagaatttcttatgcaaagtttagttttcaaagtaaaaagttgagaaatagtggctgtagttgttgcatgatgtaggttttgttttctgctatgtttctatgtttgtttaagtgattctatgctagcttagaggcttgtgggtgagctttagccaagtttgagttctaactcaaagcttggagctcacatggtgaattttgcctctgtgttttctgggtggttttgaggccttagaattgtttattaggacctatgtaggaggtctgg

SEQ ID NO: 339910 - DNA, 877 bp, Cannabis indica
gttgttttttgtgttgtcagtgtgaagaagtactccgatgcggacaacatcttatctccaccgatggatttttctttcattgaaatttccgagaagatgtggttctacgagcttcatgcttgtggtgaatttctgcgtgacagtgtaagaaactagtttctttttattattttctatgtctttgctgtttgagtctattttctggtatcggttctttcaaaaaccggtttctgatacatgtgtttattgcttttctgtagcatttagatgtggtattctattaccttaggaagaagattaagcaagacgatactttgaaccagaggattaccactaccgattgtttgtttgatcaagtcatatggaattcctacaatcagttcttgaaatcgggttctaatccttctaagattgactttgataatgtcattcctagatacattgttgtgagtatttgttttgcaatactccttgggtgcttactgaccatgttcttatatatgtcaatattcaaaagcaaaaacattggatattggtccattttgatatcaaggagaggatgttgaacgtatataactccatgtctggtgctctcaacaagaaacgcgccttggatcatgtgaaagcttattctactatgctgccattttatttggagtatcttgatgtttattcttctaggtcggatcttaatttggttcaaggtccatattctgttgggaaaagagaacctttgaatttcaagttcatagatgggcttccaagtcaggtcaataggtaattcttcctcttttcatcatatattttttttaattgaaactagtttttgttgaccaaaagtcattcactcatttattttgatgataaacaaatattt

SEQ ID NO: 339911 - DNA, 695 bp, Cannabis indica
ggtcaattggcaagagaagtgatgctgctcatgattttatttcaacgattttttctctttcgacaggtaagtatttcaagtttaagtccttatattaaatatggattagtttactattgttatttcacattatctttttcattatattgtgtggtaatggagttttattctttgttattttgtaggttattttgtggagggtgcctacaattacagagaattactgataatcctaattttaaacttaatttgtttgatatagttttttagcatttttatattaggatgttagtttattgttactagttaaaggataatacctttggctagttattcttaaaaattttcttgattttttagttttgtagtattgctaagagctagagttataaagtgtgtgttaatttctaaatttatatattattttattttgaagattgtcattctaatataagtgtacttttgttttggtgttgtaatttttcaatttcgccttgctctaaagacaactagttaataatgggaatgtgttttttcaatgtgatgtgctgtttgaagacgttatagctttattgtctaaattttcgagagcagttttgtctcatgtggcttgggatgagaattctgcaacgcatagtttgacaaagcatgccctaaccgccttcagttagaaaatgagctatcctggttcgagg

SEQ ID NO: 339912 - DNA, 702 bp, Cannabis indica
ttttattttacaaataaattgcaatctatgagttgagcttcattactttatcttatataacaattaccaattattatgtttatatgtttgtgtttttattattgatacaaattctatagttctttaaactctttatagagttattactacataaacactagaaattatttctatgtttatgaataattgttaattctaaaacaattattaagaatttgtttaataaaaagatcttttgatctgataggggtggagaaaaagttaagaataatatgcagttcaacgatcttttatatctaatgaactctggattatattcgaaactccacataatctctataacacttagagaatcatgatctctataacctttaggggtggatcataatctctatatacttaggggtggactatattccacagtactctttgtgacacataattttaaacatggaagtaatataataaattagctattatcagaataaatccttgatcttgattatatgttccagtttagatttactgttgtaatagataatgataccaataaagttctttgataatgtatcacactaccttaattgagtgggagaattttaaaattctttacccatcttcatttggttgacacttgtgataggaacttaagaacactactgataaagcaaatctaaccattcatgtggatagaaataactt

SEQ ID NO: 339913 - DNA, 724 bp, Cannabis indica
ttttttttattttagtcttttgttacctcaactcaaatctaccacgagacatgttctttcatcaagtatgagaaacagagagattggagaagaagaagagagaagtagagttaatactctgttattcctctgttacgttcttattaattgaattagaaaatgaattacaatgatttatatattgaatagctaaccgacatttaaccaaggtgtaaaagaggattaggcagttgtaacagtagacaactatcataactaacaactaacaaatatcctaacttcctaatcttgacagcccccttcaagatggagtgtatatattagatacattcatcttggctacaatgttttgaaaaggagaaggaagtaaagccttggtgaaaatgtccgctaagttttgttgagattgaacgtgaagtaacttgagtgtcccttgctaaatttttttccgaatgaagtggtaatcgatttcaacatgctctgtgcgttcatggtaaacggtgttgtcacagtatagagtcgtaggcttgttgagggagacgccaaaatccttcagtagagctatgaaccaagttacttcagacgttgcattggccattgcacagtattcggcttcggcagaagatcgagaaacaacttgttgtttttttgacttccaagataaaagggtgtaaagcccgcttagttaatttggaaattattagttaattatgattaattatga

SEQ ID NO: 339914 - DNA, 735 bp, Cannabis indica
acgcatctaatgaaattaacgagtttccaatcatatcatgtcattgcatcgtagattcatgtttaattctcgttctttacgtttgttggtcatcttgattagttatataacacatacgtaattttctgtacatgtatttatgcagattcaatttgtttgctttgtagttgtgctgtgattccttccccatttttcttttttactttactgttgagagatgctttatatattgtttagagatgtcttcaaagattgtttgagataatctccatcatcaattttactttaaagacaaaaacaatacatgaaaattatgaatttatcactgtttaatatttgttttttgaaaaaagagaaggaggccatatatggctggtctccccctattgccagtcagctatatatttcaggtgtctttagcctattgtcagctattttttgtgacatgttttgtggttcatcttattcaggttctcttatctggtgtagtaattttacaagttgctatctcgaaggatttacttgtttacttgctatctagaagttgctatctggaaggatttacttgctatctggtttaggtgtttaccttcacaacccgacagcccttattgcaatcgtatacccttcatgatctggtcaattggtgttgtgagagtacacaccaatggcatcacaagggctcaatctattgtatagcaaatataaaatgtttggggaaatactaatagattg

SEQ ID NO: 339915 - DNA, 689 bp, Cannabis indica
aaaataacatttcgatgtttttgttttctaattttttaaccctcggtttttaaaaaaactgtttttaaaaaattttgtcaaacgacactattagtttttaaaaactattttctgctttttaaaactgaaaacagtttttaagttgtgaagccaaacgatccctaaaacacttattgctattattatttattgattcgatctttttactttgtttaaaaaattttattcagcatctaattttgtataataattttattaaatctgtaacgctctgaacctcaggaacgccacgtgtgtgcttttataatcttattgtcattaatctattagcttaggaaaaatgtggtttaattaaaatctttaattaaatttaaaatagaaactttaacttagttcaaaatactgtcgtaatatggggatcccctgatggtaaaattcttttccaaccaattttaaaatcgttatacaagagtaggttatacatccaatcatagaaaaaggggtgatcctgcttcctggaagccaaaacaacacggttgatatgtacattgctgggagacctctgactcgtggccaaacagaatcgctaatccttacctgcaccatgaagcacccgtgagccatagtgactcagcaagaaaagctattagacaaaagaataatatggaaagtgatagtagatttcattt

SEQ ID NO: 339916 - DNA, 895 bp, Cannabis indica
tggcatagaaatcttagagaatcatttgataaaaaatcgataataccctgccaaatcgagaaaactttgcacttctgtcacagattttggcctcgaccaatttttcattgattcaatctttcccgggtgaagcatgattctgtcttttccgacaatattccctagaaaagacacctctaatagccagaattcacactttttgaattttgcatagaacttatgatctctaagtcagtgtaataccatttggagatgttgctcatgctcttcttctaactgagagtacacaaggatgccatcgaaaaatactataatactatcaaggaaatccttgaatactctgttcataagatccatcaaggccattggagcatttgtcaattcgaatgacattaccaaaaactcattgtgtccatatctagttcgaaatgcagtctttggtatatcttctttccgaattctgagttgatgataaatggatcgtaggtcaatttttaaaagcacagtcttccgctaaagctgatcaaacaaatcatcaattctgggccatggatatttattcttgatcatcagcttgttcaattcctaataatcaatacacattctaagggaaccgtccttctttttcacaaatagaaccgaagctccccatggcgatacactaggttgagtaaaccctaaatcaagcatcccctgaagttgtatatttagctccttgagtttcgttggaaccattctatatggtgcttttataggttctactccaggtgccaaatcaatcacacaatctatttctctttgtggcggtaatcctgacaagtcctcgggagaaattctttaataaccttgactactttaagcccaaatgttttaggtctgctggagtcagtcacaa

SEQ ID NO: 339917 - DNA, 787 bp, Cannabis indica
gtgtaagaacccaatggaagcttgaagcgggaaccttacagaaagttcccttattaattttaaaattattatatacctttctctttaaagtaaatgaaatttttattaatagataaactgaacattgatattaaataaaaataagttaaccaaactatttataaaaagcatcattttcaactaaataacttatgaacttgagcatctaaacaatacacgaaaagaagttcatatatcgaggcttgccccgccagcgtttaaaactaacatataccttcttttttttttattataattaatggcatcacatacctattattttattacgtacaaattatttcattatcggcttatgcggtaatattatattatattaatattatttaattaatacaatattatatttggtttgatttgtattaatagattgtgtaatattataatatatttttaatacactcgatcttaacaccgattacgggccaccaggtctcattccagatacatgtcccaaattcgggtccaagttgaagttcgaatccaagttggagattggaattgaccgtgaatcatttgtaaatattacaatacaaactaatatagactatttattatatattaaataatacaatatatcttgtgttaaaaattttgatcgtaataattattataatttatctgaacataatatttgttaggatagagttagttagaaattcagttagtactatttcttaaagaaccgtgtttttgcaaatgtcagttgtatataagaaaatataaaaac

SEQ ID NO: 339918 - DNA, 695 bp, Cannabis indica
gagcaacgtcaatccaacaagcagtttgtatgaaggcacttcggcaactttgaggccaagaatctcttttcgctctgaagcttacttagcaaagaagggtgatgaaaatgagtttatgtgccaatgctgtttgatatttataggcaagtcacgaaaagagataatcatctcaaaggagcctcagacgcctcagtttccctccttaaaagcgaatatgggaaataaaaaataatcaagtgcagccgtcagccgggagagaaaattggatttcaaaatattaattgttagagcatttattagccgaaaatcgaagggacgcccagtcagcttcacatcgagtctcggacggtcgcactcgacacgtgtcctcatccaaaggcagaagcagctcggatgaagtctacacgcaacttcggaagtcctgtacagacttggggggcaaatgttatcccaatttttgcactctgacgtggcatcacatgaatggtgacacgtggaatccacttggaacatctgctcgggaagcatagtccgagcaggatgcctcgctggcatgcccagaacaaagtattcagcaatccgcgtagagtaaccaacacttcgcgaattcagctttcgcatcgtgagtcatcagcacaatccctataactcagggatcaatttacgtggatatggcatacacacgatcccattat

SEQ ID NO: 339919 - DNA, 803 bp, Cannabis indica
atcgtaaaaatatttaaaattccttaaaaccgtacttctgtaaagtttttttttttggtgtatttgtgaaattatccctaaactaaaacccctttttctattttaaagcttctttaaaatttattatcaatgctttacatttagaaattattacatagaaaatataaattgacactttatttacaaaaatatctccataaggtgtagacaatatttatacattttatgtaattttaattaccaaaataccacttacactattacttacacaattagacgatggttgcagggtggttgctacgtggttgcgcggtggttgctacgtggttgcgcggtggttgcatcagacaaaggtttcaatcaaactatggttgttgggtggttgcgtggtagttggctgaaggttacatcagacgaaagtttttgggtagttattgggtggttggccaaaagttgcatcagacgaatgtttcaatctaatgaaataactgttagaaaaatgtttatgcaactgttctgaaacattaaaaatcagaatagtgtttccacgtacgtataactctatctacatgtctctttatgattcaatatgaacaaattcaccattagaaatttataaaaaacaacgaaaatacgccaggataaatattttactatagtattgacgtaatgttttttagattatacttgagttggattgtttgggaactccaaaacaaccttttgagatatgcctttcatagatctaaaaattgaagtcaggacattagttttatgcatattaaactggatttttggttaaa

SEQ ID NO: 339920 - DNA, 523 bp, Cannabis indica
acttagtcttttgattcatatgatcacaatcgcattccactgtgttgacgatactgtaattgtgaagaaacatattatctggacttaacagattttgtgtgtaaatgtaataaatatattaaaccattagcatgtaaaattcatgcaaacataaatcacttcaaatctcttatattaataactaatcagattgtaaaggattttatttagggcacaaaacccaacatgtcagtggtgagacttctgaccaaaaatcttatcttcagcctcattcacattcttctctaaatttgaagcgaatccgtctgggaaatgcacagacttaataaatctggaaaattcatgtcgccggaaaaagctcctattaccggtgatatagatcgggggcaaaagtgggacctggaccaaaaatttttcccacttttgccggtaaatttattgacttttgcaggtaattgtatactttgtcgatgcaattaaaaaactgcgctggcaaacgtatacattcttgtagtgtcagatg

SEQ ID NO: 339921 - DNA, 675 bp, Cannabis indica
tagtcggtgtttatctaggacccaaccccggacccgaacccagagcaggaaccaaactcagacccggacccaaacccaatcctagacacaaacatggacccgaacccgtaccctgtgacccaaaattggaattgaaaccacaagtagatcgagacccgggaatgggaccggaacaaggacttagaccggacttggacctcgaaccgtaaccaaacctatacctaaaaccgtaaccggaccaggactcggactccaacccagacctaggcccgaacccggatcccaacccatacctcgacccggtgccgaacctggacccgaactaagaacccaacatggaacctgactcgggacacagaattgggttcgggacctagaaccgaacactagtctcggtctggaagccaaactcagaactcggtcccatgacctggacctagatttgggacacgatcccaaacccaaactttgacctagataggtatccgaatacaaacctggacttaagcccagaccgagatccaaacttgggacctagatctggacagagaccctgtcccagaaccagacctagacccgcacctgggacccaaacccagacctggacccgaacacaaacccacaccgggatttgtacctagactcagaccccgacccaaacttagaccaggactc

SEQ ID NO: 339922 - DNA, 1248 bp, Cannabis indica
gcttgaaagtatggtcttaactttgtgaagcaattagtaagcaaaaagaaagcttctcgatcataggatatctagactccatgacaaccaatcttttgcttacataatatactagaagttgcacctttccttcttctcgcactaaggcggtatttatggcatgatttgacactgcctggtacacgagaaatgctctccatcaattggtttgcatagtatcggagcctttgctagatgttcttttagttgctagaaggctgctttgcattctactgtccattcaaacttgttgtttcctcgaaatacgttgaagaatcgtatgcacttatctgtggatttggagacaaatctgctaagtgttgctattcttcttgtcaacttttgaacatatttgtgttttttgggtgaaggcatgtccataagagctttaatcttctctaggttcacctcgatgcctcgagaactgactatgaaacccaagaatttccctgaagaaactctaaaagtgcacttcttttggttaagtttcattttgtactcccaaattatggaaaaggcctcttttagaacatcgttatggcctatggaagtctttgatttcaccagcatgtcatcgacataaacttccatatttttccccagtacattattgaacattctattcaccaatcgttgatagatagctctgacattcttcaacccaaatggcatgaccttataatagtagattcctttgtcagtttggaacttgtgtgctcctggtcagccacatacattttaatttggttgtagctagagtatgcatccatgaaggtcaagagttgatatcctaaggtagtgacaaccatataatcaatgcgcagaatgggaaaacagtctcttagacaagctttgtttagatttgtgaaatctatacacatcctccatgtcctattaggatttaggaccaaaattggattggcgagccatatgggatacagagcttccttgagggagtcaatgtttgtcaacttgtctacctctgtttatactgcttctaacctcactagatctagaggtctttacttttgtcggattggatctgccttagggtctatgtttagtgcatggcaaataacacggggactgattccagtcatgtcagaataactccaggctaacacatcactacttgccttgaccgtggaaataatttttccttcactaccggaggtaagttcttccccactcggataaccttggtgggat

SEQ ID NO: 339923 - DNA, 2535 bp, Cannabis indica
aagaatggacgaaaccatggtgcttagggctcggaatgctaatcacctccgaaagtattaccaatagttgaaaaaataaaagtttatgttctataaagtaaatttgtactggacaaataaatgcaacctctaatccaaagtttgtaaaactgagtgacctaaaattgaatttcatgtcactcaagggggtagtaaagcataccacacagacaaatgtgaacaaaccaaatttaacaaagttaaaagctaagtatgtattcaaacgtcaatataaagtgttcggatcccaaagaaaagctccaaaaaagataagggcctggggacgggccttaagtgtctccccttaagaaaaaaaaaatatataagtaaattgtctcaaagaggggagaaggattaaatatgtaaaaagaaaaagaaaaataataataatagtggtagtgaaagccggtttaatcaatccgaggtggaagacgaggacccctgcgctcctctagcaatgcatcaagtctcttctttttctcctagaagcagacgaggacctcttcaggcttgggatagaagtcaaggttaaggttctgaccgttagtctgccaggccataaagacaccgtgatcgaaacgtttgttgtagtgctggcaggtaacgggggccaggagggcatctctttttgccttcttttgagcctgcttcctaaagtcacgcagctccttcacctcaacggttaggttggctgtcattctcaaatcagcttggtgcagctcctctagcgactttagcctggcagtcagttccttaaccgcctccttggcctctctaagctcacgcctcgccttagtcacagcctcatctctagtcttcagggcatcatcccttgcctttaatcctcagtcttggcctttaacgcctcctagtgactccgctccatctgagcctccctttgctgggtctcctcccggatagctttcctctcggccgccaagtctcttagactcttcatggcctcatccatgcccccaaaatcggacatgatgtacccatgattaattaaagtctttgagaggcgaccagcctctgcagcaatctggcaatacgagaaaaatgtgtaagtacgggaggacaggcgccttaaaacaagacccgagaacactaacagatagacttatcgcggtcatggcagcactaatatcttgaatttggtagattgagttcatagaagcgcaggctgcatatctcttggccgggagttgggccagattggagacgaagtggcttgtcagctctgaggcaaaaggagcgagggtatgcccaatgaagcggttgaacctgtccatcagggggtccatgtttagatcccaggcattcccaaagtactcaccgcgtgaggaattgtcaccggcctcccttaggacctttttcaaggcctccacctccgcgttcccctttgtgtattcggccatagcataattatgcttggcaatccggagctattgtctctcctcgtcagcaggaacgggagtcaggactatgccgggaggcacagtatattcctctgcctcaggtgggatccctaagtcagagctaggagccggagtatcgaccctcctaggcttcttggtagactcaacctccaccatcttgcccttgcgcttccggtccagaggggccagaatctcgccctcttcttcctcttcagcctccccatcctcattgattaggatgatttggcctaagggtacgctcgaagaagacctccctagggttaccattaggttaggtgcttgaggcaaggcggggtcgggattgtaagtctgggaaagggtcgccaaaagctcgtccataggcctagctgtttcaaaaaataaacaaacaagtgtcagaatggtcacgagaaattatgcacacaagaacaaagcagtaaaactaatcctccccaaaaaatctaattcagccctagcaaagtcctggactattatactagctttgtcatccccaagaaagctgtccaaggggagaaaccagctggaagacagataggctgaatgatcaagaaggataggtgcgggaggcccagaccccatctgggaccggccttgaaaatgacctaagtttgaaaaataaaagcccttggcatgatcaccccatcgggtaggggacatcttaaatctaaagaaacgttcgtcaaactctataggtctacatcgagaataatcttgagcagacgggacatgatggataactaagggagacttaccagatccggaggtgctggcatcaggagccccagtgttgggaaccgggagcagcaacttgggccgagaaggcgcccgctctttaccagcctctaacctgagagtcctccctgcagcggcttgagccttaatataagctagctcctgttccctcctaaagaggtacttctggtaccggtcctccgctgaggcgataatgtccgcccggagtgccttttcagcatccggggtgcgagtgttggggcaaaggaccttagagaggctgaagtcatccaccgattggctc

SEQ ID NO: 339924 - DNA, 692 bp, Cannabis indica
aactcagtagcatctccgatggtcctctgggcgttggttccagggcagaacacttgtgttatgaatgccctggttgggtgcgaaactgttattcccagtctcttgcacaccaggcgcgacttcatctataggagttgttacaccattgcccatgcttgccagctgtccaggattaacaactggcagaaccctcatgtttcatgtgttttgcaatgcaggatccaccgtctgcgaatttcctggatcagtcaggcctctacgagtttgcaccatcgtatttgcggttagattttgaatagagagcgattcttgattcttctcttaagaaagcaccaaaatgcggacctcgcttttagccaacgacaatgagtctatttttataagaaataaaagctttatagtaatcgatatagaataaagcaatataaagacacgagaattttatagaggttcagccctgagcaattcggtaatagcctaatcctcattacttgtattgacttaagaaccaggagaaagattccttttgttatagctcttccaacattatctctgaatatataattcttagataatatttttagggtattctcaacaaaactgtttgcgaccttttgcccagtgaacatgcatcactatttatagggctagtaagcttagagaggagagtttcccctctcgttacaatgtgt

SEQ ID NO: 339925 - DNA, 668 bp, Cannabis indica
agagtaaagcacaaaagaaaagaaaaaaccattaataaagacttaccgcggtcatagcagcgctgatatcctgaatctgatagattgagttcatggaagcacaggctgggtatcttttggccgggagttgggtcaggttggagacaaaatggctcgtcaactcggaagtgaagggagcaagggtaggaccgacgaagcggttgaaccactccgtcagagggtccatgttcagatcccaagcgttcctaaaggcctcctcgcgtaaggaattttattgagcctcctgtaagacctttttcaaggcttccacctcggcattcccccttgtgtactcggccaaggcatagttatgcttggcaatccaaagttgttgcctctcctcatccgctgggacgagagtaaggatgatgctaagaggtacagtgtattcatcggcttcaggcagaatccctcaatcagagctgatggccggagtgtccaccctcctaggttttttggaagtcttagcctccaccatcttgcccttgcgctttcggtccagcggggccacgatctcaccttcctcctcctcctcaaccctcccctatcttcattgatcaagaaaaattggcctaaggggcactggagagacctccccgagtcgctgtctgggctggtgccggggagga

SEQ ID NO: 339926 - DNA, 516 bp, Cannabis indica
agcaaattaaaaatatgcaaagttataaaaccattaaagtatatttaagtatgcttaaggaagattataactgctatagcgaggcagaattggaaactgctcgaaaataaaaaaatttggtagatcactgactacttaaataggaagattatgagcaatggaagaacccaaaagtactatacatttgatcaaaatatagttgtttacactgtgaataaaaatgctgccaaacacaattgtattcagttcgaattaaaatagtacaaggcatttaagataagaaaaaacctaaaactggttacaaacttgtctttacaaaaataccactaggggaaaaccattaattcatcttcttaaacaaaggatgagaggggaagtcgataaactcgagaaagacggtcttcatatagccaaagaaagaccgtctgcacgtagcccggagaaagaccgactacacatagctagagaaagaccagctacatgttgagagccttgatctctacacagacctcattc

SEQ ID NO: 339927 - DNA, 958 bp, Cannabis indica
tcatagccctataaatagttatgcatgtccactgggcaaaggacgagagattttaccctagagatattatctaagaattcatattcagagatactattgtaagagctataagaaaaggaacctttctccttgttcttgagtcaatacaaatagcgaggattaggctattaccaaactacttggggctgaacctctataaaattcttgtgtcgttacattgctttactatatatcaattgctataaatcacttatcacttactaaataagactcactgtcgttggctaaaagcgaggtcaacaaagtattttaaggataaaatataattaaagagtaaaacagtaatattataaagtagagagaaataatgaataatcttataacgtatctataattgatatatcttattgggagcccatggtctctgtagtctctaacataatgtcaaatatgagattgtaataattgattatttaataaattaatattcacattattattttgtcaattttgagaatattccaccgttggtgaaaataaaaaagaaagatataataaaggttttattatttgaaattatatttttagtattaccaagctaaattaacaaataatttaattaatgcaaaactgttataaaattgtttgaacagaattaaaatctgctctatcaaaaaccaaacctgatagatcaggattacactgcagaaattaaaatgacacacgatattttgtacgtggtatcagcaatccttgttgattgatactatttgtaatatcccaataagcctaatagttaataattagggtttataattatattatggattaattaggtaataagtgagattatgatcctactgatctagttgaacataaattttaaatttgctataagtggataaataagcgtaatttttaaattacggagatttatatagcatgtgtgaatgtaata

SEQ ID NO: 339928 - DNA, 827 bp, Cannabis indica
acaaaacgagatgaatgcgcatatctcaattttgcgtacctcatgcatgttagtttgattgtaatgattgttaatggataaatgtcttcaaggtcaattcttacataatacatgtatcctgtcgatatgatattatgtacgtcttaattggttaccttatgtgtgatagacaatgttatggtggttgattatattgtccaagtgggagaatgttagaattattattgtggactaatataatcatgagcttaataccataaacacaatcattaactatgtgcctaatatttactcactaccataatgggatggtcaataattaataaatgtattagaggcacatgagagcaccctaaaactataattggcccattaaattatagtccaccactaattatactcattagcccaataagcctaagccccttagggttaggtgttggatatatataaggggttaatatgtgttagtataaataggagagtgtgtgtggtgatgagaataagggttttgctttcataggctcctcttctaccatcttaggatacattgaagaatttggtgttatagcaacaatggaaaatgcaaatatgggaggtatgtttttcatattgtttgtgatgctctaaataaagtattgatcttggttcataatctgtagtagattaacatatttagcattctgaatggcaaatgttccaatgttataatacagtataatactaaatgacatttatcatggttgttttcctcttaattgcatatactaattgctagaagtgaaattcatggggagaaaagagggagagaaagacctgtagtgact

SEQ ID NO: 339929 - DNA, 948 bp, Cannabis indica
tatatagcatgtgtgaatgtaatatgtactatctatggcataaaaatatttttcaggtttggcgaccttggagacccgatcaggggccagagatgtcataacagatttaattaatagatttgatgggaatattataataagttgatagtgtaagtattggggtaattaggagtatctcaaattttacaaaataccctagaattaaagatttcttagtggctaaaaatggtaaaaataatccttttataaatttattattattattattattattattattattatcaatgtgacacctgatgcttgtatcatcctcatcatcacttgaaataattatatttattttcctaagctaaatacgagaaagcctaatagcataagccatatatgaagtaactacttcatttctctttttccttctacttgctcggccaagaccaaccaatcaccataatcatcttttcattccttttcttcaccaatattcatactttgagtttggaatttgaaaagaagctattactttggaagttaagctaggaatttttggtaagtatgtgtacagttttatcttggaaattattttgggtttaaggtgttgtaatagttagactatacaaataaatgttgagtgagtggggaatagatttctaaaatgatttagagtttaatcatgtagttaattattgagtggaggcagttaaggttatttttcagttatggagctttgagcttgaactttaatgacactttttatttgggagcatgattttgatttctgctacgttaagaatattgtatgggtatgatataagtgttctgtgaagtttaaaatcaattggttagatttttgtagaattcgagaagatgaaattcaattttttcgtccccgcaaaaaaacgttaactgtttttgttatttttgagagaatccctattcgtattttgg

SEQ ID NO: 339930 - DNA, 1212 bp, Cannabis indica
caaaaaaataccaaaaattaaaacatatttctatttacttttccaaaggttttccaacaaactgatacaatgcccgttttaggcaagagtcaaagatatcattattgaatacagtagtcaactcatctaaaatgaaaaacattctagcaacctttaattcgatcgaaaagagaatctaacgttgtccagtttaggcgagagtcaaggtcattcctatttcctgagcttctaccattgtttcatacttttgcaagtcttactcttagcagccactattgggttggacattactaagaataaaatacttacaaataatacatatctttctagattctacgaagttcaattgctaatgaacgttcatccattagggatgattacccaacaaaaacaaaaactatgtagaaccaacaatggagattgaatatctttttgattaaagctcattatttaaaatgtatttttatcaaatcacttattttagtctatatattttaataatgaaaattacttaatttaagttgttccaaaataaattaaaaattaattttcaactttaatttaattttctaattaattttcgaaaacccattataaagatataaaatttcgaaaattgattaaaatataaaaaaataaatacttaaaaaatttcttatttaagttgttctaaaatagcaaaatttttaacttaaattattttttaaaatttaattaaataacaaatttagtatcttaagctaatcaccttaatttcaaaatagctctatttaagttgatccaaaattaattttcaacttaaaaatatttaaagaatatctgaataactaaatttcttaaaaaattctaattaattatttatttcgaaatattctagtttaagttgatccaaaattagttataataactgattttcaacttaaatatatttttatgaaaaattcaataaataagtatttagaaaaatcttattagttataacttcttaatttaattaagtacagaaaaatacatatagtttattctgaataaattttattaaactaagtgtgtttttcagaaattaatttcaaaataatctgatgaaaaattaatttatatatttcgaaattaattatcttgctaatcaattttattaggttatactagtgtgattaacctactacacttattcaaacaaggcaaatgggccttcacaattggagctgttca

SEQ ID NO: 339931 - DNA, 756 bp, Cannabis indica
ttggattggatggatccaatctaattcaatacataatggacctaaaatattaaatggatccaatccgatctaaaaaatactaggtctaaaatattaaataaacctaaattaaactaataaatatatatatgaaatacatcaaacagatagaacctatccaatccaacatccaatagatgttggatcgattggatgactgaaattaattaaattggattggatggtaaaatctaacatccaatatataattagatattggatgtgttccaataaacacccctactaaagcgtgtcatgagacccctcaagtaggatgtcttaacttatttgacatttataaatcttaatcagagtcccaaaggttgacttaagtgttctaaatgtacttttggcatgtgggtccttgtgtaggaatagttatttcatttttttttttcgaaaattaagtacaacaaatatacatcatcaaagcaattttttttttttaaaaaaaaatcatcaaaagcaaacttaactcatcgtttttttagaataaatattagtgttggataaattcccatactattgtcccataaataaagttacaaggaaaatatctcaaacagattacaacaaactttctcagatcagaaacaacaacaacaacattataaataagtggttcaaccttccactttgagcaacacaccattttcggccaagcaaaaaaaaaaaaaaaggacagcaacctttggtttctttgtgtaacccacctca

SEQ ID NO: 339932 - DNA, 708 bp, Cannabis indica
gtgctgggttctctgacagaaaccacgccaacctccttcccagatttatctaaaaccaggccaacttccctctagaattctttatcagcctgaggaggaccatttaaatcacccacaagatctatgatcacttgtgaggatcgcccatggcgggctacggggttcccgtggtctggattggtcgaaagctcctcagccttggaatccatcatttccggccccgattgaggtttgaagtcgttgggaacaactggaaattggttggtgcatctaggtattatgagtttgaaggatgaacttctgaactcagaagggacattttggcaggaaagagatgatccattctgaaaatggatctcactaaatagccagaggtttatgaaaaatgacaagcttgagccgcccttttatacacaaagtctagtgcaagaaagctcagtattgagaaatccaacggttgggagaacggaaaaatatgaagagacaattcataatgaccctcgaaaccgtacaaccgccagaatcaaaggatgcatttttccaagaagagatcttgacgaaaatgccctctataattattaaaaagctctttttactaaaaaagaactttttgaggggtaattgttatacccgaaatttggctggaggacacgtgtcaagataaagggaatgtgaatcgatgcaattacttcttatggaataactcat

SEQ ID NO: 339933 - DNA, 683 bp, Cannabis indica
cagtgaaatagtgtacaaggtacgaggaacttacataaggtgtggaagctggatgttggtgttggtcgtcggtaaaaggttaattggcaacatcgaaggaataagagcaggaaatctatggtgtttgaggtttcttttctctttggaaaactttgaggaaatttggtgaaatgctgaaagtaaccaaataaagtctgacgaaatttggtgaaatgctgaaatttggctaagtctccttaagcacaggattaccttagacatgcctcccggagaaggcatgtaagtcgtgcatgcccccgaagagcaaggccacaaccaagcacctccgggaggtgtaagaccctatctgaacggtcatctcgcatttaatgccgcatgggaggaggcgtattgaaactgccatacgtaataaagtctgacggcacaacccccagtctgcacctactaggctatgatcaataaagtctagtgacggctactctgtgaagaatcacatctgtcaaaaaggatgaaggactgcactcataaaatccctacagaacctagggattagaccacgcattacctatgatatattcattgggaatgtgtgactttattgatagttacagaaatacatgtaccttaattctagggatcaccccactataaataccccccaaaactcattaaagaggggtcga

SEQ ID NO: 339934 - DNA, 1100 bp, Cannabis indica
agcctcacttgttgtcattcaatttaattaccttttctatattagtgatctgtgttggtatgagactatagagttgaaaaagacttaaatagattgattgttactatatatatcaacaagttgtattttatttttcggtagcccatcatgaaagtgcaagtgaggacaaaacatgttagaaacactcgtattatactcgtgtataagagctattattacgtgggtgtaaaggcccaatggagacttgaagcgaggacgttacaataatgcactctcttaaaagggatgcaccaatacatctctatctattttagtatctgaaataatttttagtcaaattttttctcatggtgtaaattatagtcatttaagacatcctgcaaaattttaagaaatttataaaagtttaatacgccgaaaattgcgttcaaacagtatgttgcacgcgtgactattttattttatacacgtgtaaaatagactgtttgaatattatattgtatatggtaaattaatctgaatttttcaaaattttgtaggatatcttaaatagttataacgtacatgaatatgaaaaaaattagactaaaaaattctctcgatgccgaaacaagtagaaggtgcatcagtacattccttttaaggaggtgcattgtagaatcaccttaagttttatgtatagataaaaattttgcaacagcgaaaattgttttaagatttctctttagaagtttttaagtgtcccttaattttttcgcaggaccagggctcgcatccaggtccgtgttcgcgtttgggtccattttccgggtctgtgttcgcgtttaggttcgcgttcacgttgaggtcagagtctaggtctaagatcgggtccgagtcccaagttcgggtgagggttcgagtttagatcttgagtccaggttcaggtccacgttcgggttcgggtccgagtctgtatctaggtttgggtccggattgaagattggggttgactcaggattctttgtaaatattataatacaagctaatacggaccatttgttatgtattaaataatacaaattacattgtattaaaaattttggtcgtaaaaattaata

SEQ ID NO: 339935 - DNA, 505 bp, Cannabis indica
atcttcaagttgttcgtggaacctaacttatggttctggcagatatttacatcttgggaacatggtagttcaattgagtgggcgcgttgatcatggatatagaatctatagcttctataagtatttagaagtgaaacgatgatttcctttgagcttggtctgatagatataaatgattgagatctcattttagtaattataggtagctaagtgttttaaggataaaatacattgaagggtagaacagtaaatttgtccctattcagtgtagatcatctatagatgatctttgactattaggattgtaataatagataatcataacgtttctatatcgtggtacatatagagcgttttatataattgagagtgtatttaattccaaatgtatagtggcccaatgcgaaattaataagttagagaatttacttgatgaattctagatctacttattgaaagctcggtaatataggcctatggtcccctcactagttgagataatact

SEQ ID NO: 339936 - DNA, 734 bp, Cannabis indica
actctgaaccacacccaattctatctataacataggcatctcgtacacctccacctccactcccaaaacccgtttcgttttttggaacattgaaaacgattcaagaagcaacactaggcagaagattggtttggggtatcggaccattaatcccctctgtttccttctctttgtttgcttttttatctggtacgttttgtatgctttctctacttttttttgttcatcgtgattttattgtagtatattgttttcagttttttttttttttttttttttctcagttagggtttcttcctgactctctttgaaccaacatagccgcctgaaccgagaattttccctggtaattttcttcctaatttgcttctactcgttcctttctctgtcgtatcaccagtatcgggtagttatctttgttagagcattcatgggatcgatatagaggaagttggatgaaaacccacctggcgaaacaccccagaaacagcctagggataatggtctggaggaaaagcttaatgatgaacctattgcctgcttacatgatgttcctgacacaatcatttatggttttatcatttttatttagggctgtggcaaaaatgcttttactttttgttttttcaaacattgatttttggaagttcaataccttattattttttttttttgtttttcagaaaaaaaaagtaccttatttgtttggctacttcccttatgatttgtttctc

SEQ ID NO: 339937 - DNA, 658 bp, Cannabis indica
gtgggctgctagggttgggagttctcttaatttttcaagcattttcaacaaatctaagtgtaattcaagttgttggtaaggttcttgaatttttaaggaaattggataggttgcatgtgtagtttttgagttgttgttactgctatgattaggtgttgttttctaaagtttaacatgcttgatggaatggatttgaactgattatgttgttagttgttggtctatgcatgtgtgaagctttttcaactcaaaatcttgtatttttcaatggtgaattgttgattaagctactgtagttgttaattatgcttgagttcattttctggagtaattttatggtgaattatggtgaatggagcaggtttttatgcttgtaggtgagctttagccaagtttgagttttgaactcaaagcttggagctcacatggtgaattttgattctgtgttttctgggctgtgtttcctgctatgaaccggaattctggttcagcaaccggaattccggatggtgttcaggaatttccagaaccagaattccggttgtagaaccggtctaccggttggggacaaattgggaaccctagtttttcccatttttatgttgtttagggtattgccatgctttttatcgatagggaaacttttagtttctagttt

SEQ ID NO: 339938 - DNA, 735 bp, Cannabis indica
agtaataacattaacatcaacagagactttccaaaaaagtaaaagccctcccccaagaccttgcctaggcacttctaaaacactatcaaaacgaagcttgtgtttgaggtgcattccacgaccagccggcaacttagtctccatgacaaacaacaacaaaggctgatgttgtttgacaagcagggagagattacggaatgctcgagggctccctaaacctcgaccattccaactgtagagactcatttttctcggcggggccgcatagcagcacctgccgttggctcttcattggacatagaggggaccacaacatcatcagaaagtaatagctctagcgcgcttgagcatgctacgcacagagtctccaacttgggcattttgacgcgtgaaggtcggcctcgtagcaggggaagtggcagtggaagtacggggtatggttcattgataaccacccccttaccacctctaaactgagagggatggctagggggagacaacgcaatagcttttcctttggcaatatgggtggaaacagaatctgtcataatgggagcagggattgaagttgatatgggtggcattacaggacttgaactggagtgtgagacagggattgaagtacccttaacagagctgacccgaaagaatcaaaagtttgtttggactgatcggtgtgagaaaagtttcctggagttaaagcaacgcttgattaccgctcctgtactaactctt

SEQ ID NO: 339939 - DNA, 508 bp, Cannabis indica
aaaacctttggacggagaagaataaagaatatacttggctgtcacgaaacatgctataagtgccgtactgatcagagaatagaacaatatccaacacccggtctactcatcgaagctgagggtcggtgcccattgatagaaaagctcacttattgcctaatcctagcaacaagaaagctaaggccctacttttaggctcttgttgtttgggtgtacactgaccagccattacaccaagtattacaaaaatcggacgcctttagacggttgctcaaatgggcaatggagttgggccagtacgaaattatatttcagccccgaacagcgattaaagggcaagccttaatagattttgtggttgaatgtacgggtaaacccaaacacattgagatctgcagtgactcacagttggtggtaaatcatgtatctggagagtatgaggctcaaggggaaaagatgatagcatatctgagcaaaatatatgatctgctcacacaattcaaaagct

SEQ ID NO: 339940 - DNA, 511 bp, Cannabis indica
tgagttgaaaagcaggggttaactctaagtgtcaattatcccagatttgtatgactaggattactggcacctgatcaggtgcactcggggattcagaatctccttctcttggtggacaacaggtaagacagtagtttgcacgtagggtatgcatagtggcgcttatgttgattatgatatatgtgagttattgtaactgggattagggttattaccctaataggtacggtttgttagcctagggttattaccctagtgaaatatatgtataaatgttatgccatgttggataaacgtatatattgagattatgaattatgcgcttaaggcataattaagctaaactcggtaagctggtaccttgagttaattttaatgcggtctagggttattaccctagaatattatggatccagtaaaagcgtgagttagggttaacgcttttaataaatgttatctaagtatatagaagtgtattgtataagtggttacttagtatgtaagttagggt

SEQ ID NO: 339941 - DNA, 699 bp, Cannabis indica
aatcacgtaatacgcctatgctagttagggtgttacaaaggtcatcaacaaagaagagatgagataaactagggccatctctactcagcctgatacctttaatgatgccatggtccatggccttctcgagaatccgagagagaatgtcagcggcccaaataaagaggtacagggatagggggtctccttgtcgtaatccacacttaggagtaagactgctaaccatccctccattgagatgaatgttaaatgaagtagtggtgatacactgggagacccacttccggaaaatgtctggagctttaaaactactgagcacgtgatccaagaagttctaactgagtttatcataagccttaaccagatcaatcttgatagcaaagaaaccttctctgcccttcttatatgtctaattaataaataaagtaaatgacaatattatttaataattaatttttgcccttaataatataccccatatcaaaatttatactctcccttaatttgtacaaatttagtccattgattacatgaactccccatcttaccctttttttttaaaaaaaaaaaaataaaaattggtaaaaactgaaattggtctttctctctctctcttccctctctctcgtgcaccactctctctctagaaaaactagaaaaattactcaaaaaatttctctctgtccgtcccactctctc

SEQ ID NO: 339942 - DNA, 548 bp, Cannabis indica
cccaaccggaattttggttctgggaggaaatcttggaagccaaccggaattccagttcctacaggcctctttgaaccgaaattccgattcagcgcaggaatcactaaaaaattcaaaactcgaccaaatcaatcccaaaccaattcaaactttccagacctgctctatacaccctagagaacattttcaaagcatcaaaacattcacccaaacacataatcaaaatcctccattagagctccaagtttgagttcaaaattcaaacttggttaaatctaactaacatgcaacaaatcctattctaatccactcaattaaacatatttaagcttctgaaaataataacaactaatcacagcaaccacagtagtaacaactcaattcatgcaaaaatatcatttttcttacaactcaagaaacttaagaggatagtcatgagcttacctagagcttggattttcctcaaaatctgcttgaattgctgaagaaagaaattgaatcccctaactaccttctagggttcacgagagagagagagagacagagag

SEQ ID NO: 339943 - DNA, 711 bp, Cannabis indica
ctaattaagaatatagtacttttattgtttgtatttatagtaaaaatgagtacatacttttgcttttatggttgtaataggatttaaatgttgaagcatatcacgaatgtaagttagtacatagtaaccacattcgtaattgtatggttgctttggacaagcaaaggtccatatctccggtccatttgtgccaaatacaatagcatttgaactaatatttgcatatgcactgttaaagacattaaaaaaaaatataagttaagcatttagaatttattaattgatgattatattagaatgaataacttaaagttctaaacttacatctttatcatctcagccataactgacaggattttagatttaagtgggtttaagaatacaactcttcccgatgtcattgctataatcaacatccaatgcttgctgaaaaaagtaacaatgttgtattaatataaaaataaatattatagcgaaagtgaatagatgtgtgattcttaccctatgttccatggtataaaataatattgtcctacatgagtcatagtgtttaaccacattgataattgatatattaccacaatcgatacaaggacagcgaattttttcaggatcgctacaattctttagggaaaactcgaaaaagtgattaaatccttctacgaattgtggggtttctctcttctcctccatccatgacttatccatttt

SEQ ID NO: 339944 - DNA, 496 bp, Cannabis indica
ccctttatatagaaagcaagtgtcctttaggattacataactaatcggtttagaaccgtttttacattaaatgaaaatatttaatcaaagtaaatatttaaagaataaatgaagaacaatttaatctgttcttgtattaaaggtattgaaatgtatgcgacttgataatccccgagttgcatgttcatattccaacacacaaactcgcaggctctatgatattttgtattcgtagggtggccttcgggcctatcgcttgaatgtctgcatttattctcaaacgcatagtccgacattctatgtgttgacaacatagaacatgcgagtccctgacgaattgtcgaacacattagtcattcagaccaatcttatgtaaagaagtgatatttattagtcgcaagagagatatacttggtcatcgcatataatcaatatacaccaccagtattaacttctcttgatcctgattatttatttgactatgcgaggcatagta

SEQ ID NO: 339945 - DNA, 1169 bp, Cannabis indica
cgaaaaagtctagaattctcatcaagaaaatcatcagtgggattagcatagaaatccttaacaatgtttgcaatgtacccattgaaaccagtgagagtgttttcccatttatggaattgaataaacttaacaatttccatatacccagtgagcatgcaaattgtaattcctctcactctaaaacttacaggtatcatacaaattccaatcacgctcattatcacgataataaaatcgaggaaagtgagaaaagggttgtaggaacgttaccaggagaggattccttcattggctgcttgcctttggcagcaacagaagcctttgttgctgaagaagaacaagcaggagttggagcagattttgtcaattgaggctctggctcgagttcagtgtcctcactatctgaggaaactcccatgtcctctggaatctccttctcggaatggagagaaacgaatttgtcagaggagacttccattggttgttcttcttctgaactcgaagaaaccgaaggaggattggtcttaagcttcttcttggctggaggcactagcttatcacgacttcaagatgatcgaagtttcttctcgaccgaagcttgctgggcacgagttcgagtagaaggaccggttgaaatggaggcaggaactgatgcagcaggaggaggaactgcagtaggtggaggagattccttcgaagatgaggacgatgaagaccaggttctgtaaggacacacagattttcgagccacttgcttaggaatccattttgtcttctcgggctgagattcacgcaggggaagcgatgaatctcctatatttgcagcagcaggaggcacgaatgaagcagcaagatgtggtatcgaggggttgcatcggtttccaccatctttttgggatgccctagattctttgttgtcaccattttgaactgaaagagacaatgaacagtagcaacaagagagacaaggaatagattagggtaggtggtgagtttaaatgacaaccattcgtttaaataaacatggaagcaagaagagaaaaggaaacaaattttgaaattttgaaaaataaccgccagcccatgaacaaaaaggaaaccgcccactttcttgcaaaaataaaccccctttgctttttttaaaaaaataaataaataaaaggaaacta

SEQ ID NO: 339946 - DNA, 1310 bp, Cannabis indica
agcaggtacttccatggatgccattctggccgagcttgtcggggctcacactcctgatgctccccttcctttaacttcctcccagatggccacccccttgaaagcttcttccagtgcccctccagacactattgacttagtggatgaggaggaggtgcttccgggagaaggtcaagaaaagcaatggggcttttctgaggaagttgaagaaggtaaagaagagcaacgggctcttcctgaggaagttgaagaaagtgaagaagagcaagaagttgctctgattcgcaagcgcaagggcaagatggttgcccaggaagagcccaaacggcagcggagagctgatactccggcccctggtcttgatggcgggatctctcccgaggtggaggaacacacagcccctcccaacattgtgctgactccggttcctggagatgaggcgagacaggaactccggatagctaaacacaactacgccatggatgagtactcccgggggcatgctgacgtggaggctctgaggagggttttgcgagttgaaatgcaaaatacccttaacgatccgaactaccagaatccgtgggatctaaacttggaccccctgtcggattggttcggtcgtttcctcgggcccaccctagctccctttgccgcggagatgactggcgagtttgcgtctcagcttacccggtgtgcacccaagcggttcgctgcttgtgcatccttgaactccatcttccaagtccaggatctcagccactccctcaccgtggtaagtatttcgtagtttacttttttcctcatcattttctcataaggacttttactcatacttgtatccttttccagcttgctgccgaggccggccgcctttccaagaacttaatcaaccatggcttcgtcctgtccgactttgggggcatggacgaagtcatgaagatccttcaggatttgactgctgaaaggcggctttaccaggaggatgccgagcgccgggaggcccttgtcaaggccagtgaggaagaggccaggcggagggaggcacaagcggaggcgataacccgtgaggagacccttcggagggataggctggaggccaggcaccaggaggagctgagggcggaaagcgaggctgctgctaaggccaagcgtgagcttcgggaggctagggaagccttggatgaaatggctgccaaggtgaagtccttagaggaagttcaccaggaaaacttggagtatagggccaacctggccgtggagctgaaggagctcaaggactttaaagccaagccttaaagaaggctaagaaa

SEQ ID NO: 339947 - DNA, 818 bp, Cannabis indica
ctttgtaaatattataatacaagctaatacggggcatttattatgtcttaaataataccacatacattgtattaaaaaatttggtcgtaataattaatacaatacattgcttaatccaaacatagtgttatttattatttaatacaatacgacccttatacggtgtatcaaacgagccctcgtttggtacaacgtattgtattgtaatgtattgtattgtattggattgtgttgtattagtattatttaatacaatacaatgtttggtattgacttgtattaatttattttataaagttatataatacactcgatcccaacaccaactacgggtccgggtcccggctaccaggttcgggtacgagttcgagtttgggtccggggtctagggtccgggtctgggttcgggtctgaggtccaggtctaggtccgggttcggggttcggggtccgggtcggggtcacgggtctgggtctaggtttgggttcgggttcgggtccacggtccaggtccgggtttggggtctgggtccgagtctggggttcaggtccgggtccaggtccagggtccgggtcggagttcgagtcggagtcccgagtccgagatcgagtctggggtctcgggtctggggtccaggttgcattatacttcgctagctagtccatccccaatataacatcaaagtcctctaggttcaatttaatcagatcaaccgaaaattctcttccctccacatcagggccgtctcaaatatttttgaggccctgttctaattttaaaaagtaggcccctaacaaaaaaaattataatttgtaaat

SEQ ID NO: 339948 - DNA, 980 bp, Cannabis indica
tcttagatttagaatgcccctacccggtggggtgatcatgccaagggtttttatttttccaacttaggtcattttctaggccggtcccagatggggtccgaacctcctgcacccattcccctggatcattcagcttatctgtcttccagctggtttctcccctcggacaactttcttggggatgatgaagccagtgttatagtacaagaatttgctaaggctgagttagatagtcaaggtatgactagttttaacgctttgttttcgtgtccatattttctcatggccattctgacacttagtttgtttgtctttttgaagcagccaggccaatggaggatcttttggcgactcttgcccaaacctacagcccagactctgctattccttcggcacctgaccagttggtgaccccgggaaggtcttcttatagcgcccctctaggccaaatcatcttgattgacaaagacggagaggtcgagaaggaggaggaagagggtgagatcctggctcccttagaccgaaaatgcaagggcaaaatggtggatgcagagtcttccaaaaaagactaagagggtgaactctccagccgtcagctctgactcgaggattctgccagaagcggaggagtatactgtgcctcccagcatcattcttactcccgttcccgcagataaggagaggcagcagctccggatagccaagcacaattatgctatggccgagtatacaagagggaacgccgaggttgaggctttgaaaaaggtcttacgggaggccaagcaaaattccttgcgcgaggaggccttaaggaacgcttggtacctaaatatggatctcctgacggactggttcaatcgctttgtcgggcctactcttgctcccttcgcctccgagttaatgagccatcttgtctccaacttgacccaactcccggccaaaagatacacagcctgtgcttccacgaactccatctatca

SEQ ID NO: 339949 - DNA, 546 bp, Cannabis indica
ttttacagagatttaagcatgtttgtttgagttgaattgagctgctagtaatgcatgattagtggtttttgctttgattcaatattggaagtttttagttcaaaagcttaagttttcgaagagaaaattagaaatttgtttctgtgattattgcatgagcttgtatttgttttctgcagctttagtaagcatgtttaagtagttttgctatgatttggatgcatgataggttgcttagtcaagttttgagttttagaactcaatatttgacctttaatggtaaaatgagtttctgtggttgaagctcggttttgttgctttagaaatgttctataggatgtttagaatacgtctggaaggttttgtgtgatttggatttgatttgaaagagttagaaatttttgagttctgcctgcgaggaaccggaattctggttgtgcattcagaattccatatggggttcaggaatttccagaaccggaatttctgttgtgcaatcggtttgccgcttggggaattttctggaaccctagatttcctcgtttt

SEQ ID NO: 339950 - DNA, 722 bp, Cannabis indica
aaatataatcaaaatggaacaccttgtccactggtccgtggcaccgcgactgatatatacattgctattacgacctcaaactaatggctgctcaactttggccttccctttacctgcaccattaagcacccgtgagttacagagactcggcaagaaaagtgaataatactataaacaatataacgttcatttaatcacatgttaacatgcttaaataattacacaatattattgttaacgcaaattttcgttaactatatcaaagcctaaatcgtgatggatttgcacagaaaataaaagcagtaaaagaaaaataaagaacacaaagttttttacgtggttttgcagttaaaattctgcatagtccacgagtcaatcttattaggtttctgatacaattatagggctttttctctaatgaatttttcatcccttttttagtataacctactcctatttatagttacataggaggacagttaattataaattggattgatatcttacaacaataatcccttgaaattgtgggatttgattacatcccacgtaaaataaatgcggctattatttaaaaatcacatagctgtgattggtccacttttactggatcaatgcatacgtgtattaaatatgttgtaaagtatatcgttctgggacatctcgctgtgtaaatagcaacaataatcctggtagcgggctagagtttttcccatgtcttt

SEQ ID NO: 339951 - DNA, 894 bp, Cannabis indica
attatattttctctaaattgtaaatttttttaagtttttatttaatatttactaacaataattaattaaaagtgaaaagaattttaatagacaaatcatattattttttaatttttaattaatgataataaattatgaaatcattatccattaagaaagctaattttatcttttcattttttataacttaaattatatataatacttattattattattataaacctatttaaattctttatttaattctaataatatatgttatacaataaatttttaatataaatatccaatgttctaccataaaaggactcattcaaagtagcttgcgaaaaaaaaaaattggtgaaaaagtaatttatactcatgaaattgtgaaaatcgtcaccacacttcaaaatttaataaagagttatcgatgcatggttggaggttctacaaatttattcacgaattaagaagatgtgcttcaagatctttatcttatgttgtcatcaattttcttattcattttctacattccactttgccctttttatgtaattttgtaatcgataagaacaacaaatgggttgtaagaacattaatcaatacgtttttattttcaaaaaaatttgtcattcttgctctatgaaagtaattttttattttttttattttttgtattaaaaaataacagcgaagtgaaatatatgacatcctaattatttataaaaattactgggtgtatatatactaattatagattttacatgaaaatatgactaaaatgtaagttattttcttacatattttatctcctatttacgttgtatttgtattattttaatttttacaaatatagaacttgatatgaaataaaagaagataatcaatgtataaaaaaattgtatt

SEQ ID NO: 339952 - DNA, 829 bp, Cannabis indica
gattttgtctaaccaagaggagttgattcttgagaatgaaaccatagaaatgcctgctgttggtactactttcaaagttcaagagaaaccttctcaaggaaaatctgctaacaaaaaggctaggtctacttcccctagtgctactgatgaacctgctgctgcatctgcctcaacttctgcttctacagaaatggttgaattaaatttgcattttgaaagaatggagacaagtcatgccttacttctcaggaggatggacagaatcatgaaatttttccgatccaatgatgatgaataaatggtccatcttttatcttttgctttttatttatgtgtgattgaactattatgactttttttttgttatctttggctccttgatagacaaaaagggggagtagtatttattttttggattgcttgttacaactctggacccttgttttagggggagttgctctgtttgtggtttgtgcacttttctgtttaaaaagttgcttgtttgtggtttgtgaacttttctgtttaaaaagttatcttgtttgtggtttgtaagctttttcgtataaaaaaagttatttgattttatgtgttagagtgcttcatgcagggggagtattttgtatactcttttgtgtttgtttctaacacttgatgcatgttttctccaaataaaatgttttgtcaatgaaagtgccaaagggggagattgttaattctatttttgacatatttaattgacaaaaatattttattatttattgtatattttcgacttgagtatttaaattggtgtccatattttttgtatctaaatttggaaggaaag

SEQ ID NO: 339953 - DNA, 723 bp, Cannabis indica
ccatctggttcttccatgtatattttttcttcaagtctcccatgtaagaatgctgtcttcacatccatttgatccatttctaggtcatacttggcaacttttgtcatcatgatccttatagatgtttgtctaaccacaggagagaaaatgtcattgaaatcaacaccttctctttgattgaatccctttgcaactagcctagctttaaacctaatttcttcacctggcaatcgttccttttccttgaaaatccatttgcagcctatccatttctgccctggttgtcttgtcacagttttccaagttttgttcttgtgtacagaactcatttcttcattaattgcagcaagccatttccttttatttcttgagttgattgcttcctgatatgtactagggactgtagtgtcaatctcttctactgatgcaagagcaaaagttgtgcaatcagcaaagccaaacctttatggtggcttaatttgtcttctttctctgtcactaacaagtaggtagtcttgtgaatcatctggtaagttttcttcttcagttacatgctcatcaatctctgaatgtgagtgctcttaagtatccacctgatctgtagcaccttcatcttccctactattttgaatttctaaaccagtcatttctctgtcagtttgcttgtggttttccgcaacagttttcatagccatttctgttgggttttatgccctaaataaa

SEQ ID NO: 339954 - DNA, 749 bp, Cannabis indica
acttcaagaagtgattctttgacacttgctgaggttcaagccttactcatgtctcatgagagccagttagagcatcacagctctatgacagacatttatatgaaacttcaggccaacctcactgttggaaataacaaatttaactcagggaagtacatcccaccacctgctcgtggaaattaccgtgagaactcttcaagaaatgttggccgaggtactaatcgtggttcttttgtctatcatacaagacttatttgtcaattatgtatgaagagtggacacacggctgctgtgtgccactacctctttgagaagaactatgttccacccaaatctgcccctcctcgtgcctacctcactgagattgaagttgaaaatgagcatcaggtacctcacactactattttacctgattttggagatgacaatctatggtttgttgatacaggggcaaatgtacatgtcacaaatggttccgagtcccttgattcccctactccttatgttggaactgagacactttctgtaggtgatcgtaagagtcttctcatcactcacataggctctacttctttgtccttccccaattctcatgctttacacttaaattctgtcttaaatgttcttgccatgaaaaagaatttaattagtgtgtctaagctaactcatgacaataatgtgtatcttgaatttcacaaaaattgttgttttgtcaaggacaaactcacgggagctgttcttctcaaagg

SEQ ID NO: 339955 - DNA, 528 bp, Cannabis indica
tcatgctcctcttctgattgagagtacacaaggatgtcgtcgataaatataataacacaaatattgaggaaatccttgaatatcctattcatcaagtccataaaagatgtgagagaattggttagtccagaagacataactaaaaattcataatgcccatacctagtgcaaaaagtcgtctttggaatgtcctcctctcggattctcaactaatgatagcctgatcgtagaccaatctttgaaaagaccatcttcccctgaagttgatcaaaaatatcatcgatcctaggtgaaggatacttattcctaattgtcattttattcaattcccagtagtcaatgcacatacgcaaagacccatctttctttttaacaaatagtacaggagctccccagggtgacacactaggccatgaaaaccctatgtcaagcaacccctgaagttgaatttttagttctttaagttctgttggagccattctgtaaggggccttagaaaccggttctactccaagtgccaaatcaatt

SEQ ID NO: 339956 - DNA, 2296 bp, Cannabis indica
tgttaattaaacacacttgttagtaaatctagatcctggtaaaataatttacaacaacttcttcttctactgatatcaccgaagattcgtctcaacaagcaactctaccacgactaaagatctaccaaaaccctcccctgctactttttatcattcgccttctgtacaattagatgagcataactacagaacaatagaaaacaccaggtgtttgacgccattaaagagagtcgccttcgaaaatttcttgattggactctcacttttcaaaaatttcccaccgaagtagattgactcgccaatcgcatcagccctgagtatgagagttaggatcaacaagataatgtgcttgttttttggtttctctcatctatgtctaaaaaaattctcacttgcatggttggctcagacacaacaactcagatctggacaaatattcgagaatactacacaacatagttgtaaatacgtgtgtgtcgtgctagcatggcctatatttttctagctttttaaaatacgtgtaataccctagaattaaggaaagggattagcaaaaccctaactagttaagtgagtattattgtggaattatattattatataatttattatatgtgaattaatatgagaaatgacatgttaagaccccgttggtgagctaggggcattttagtaattttgacccgagaagggtaaaactgtgaatttaatttattacgtgcttatggactatattattatatagtatgcctgttttgtccttcttcaggtgtgttctgacaagtcggcgcggtatagtcacaaccgggtatttcgggccgaaccgggttcggggccgaaatacaattttgggattatttattggcattttaataaagtgtgattaatctgaaatttaattgggtatatttatgttggaaatgactatgttatccttggaatgcttttatgtgttatttggccctaaggggcattttggtaaattggccttttggattaattgcaacaaaaaggaattattttgcattttagaaagaaaattctgggttattttctcagctcttggctgaaccctattctccctctcccttcaatcttttcacttcaaatcttcctctcttgtgtgttgttgagcttgttggagcttgggggattttggtgtgctttgattgtgagaactttgaggtattttccagctcttatttctgaattttattgctttgattctgaaatgaaataggtatgaactcatgggttatgttcttgaattgcatgcttatgggttttagattgtttatggagttgtagccatggttgtgttgtgaattataagatttgctttgtgtatgctttgaatggtaaatttggggatttctagttgctgaatttgggtaagaaaaacatgctgaattttgattcattttggtgacttccttgtgtagcttctttatgagttcttggtgattttgctcaagttggagctttgaattttatgttgtttaatctgaaattttgatgtgttttgctggtgttcaagcataaaaattatgtatgttaatgcctatttaggtactttttatttggtgaatgattagcttgagttgtgtttgggtttgtgttgaattagatgagtttaggggctaaaattcattgctgaatgctgatttttagttgctggtttttggtgttgttggaagtgaattaggtgtaattccactctaattacttggtttatgctaggtgaaagtttggtatgattgtgggttgatatagcatgaaaattggtatttttggatgcattttcgtggctggaaacagggtttcctgggtttttaaacccagtagccgcggccatttttggcagcttattgtattttttttgggtttttattttggtcataacttttgactcgggactccgtttgggacgttctttatatcgttggaaagctcgttccgagctctatctgaatatctggaatttaaatgcccagtttataatttgtggaaatggatttggggattaaccctatacttgtgtatcccagaattgggactaggattaccggcacttggtcaggagcatccagggattcggaatctccatatttgcgagacatcaggtaagaaagtaattagcacgtagagataagcgcaatgacgcttatatggaatatgataaatatgagaaactagcaaccgggattagagttattactctaaagtgagcggtttattggcttagggttattaccctagtaaattattaatatgtaattgttatgccatgatgtat

SEQ ID NO: 339957 - DNA, 1571 bp, Cannabis indica
tcatgttattagtttcttgattcactcgttaaagtttctcaaagagattaatcttacaacttttgttttgggaatataataatatggatggctaggaacatgatgtaaaattatgaaatcctaacttttctaacggatcgaacgttggttccctttaagtgttaattttggaacttgaatgttgtgcacaaattcagatggaatcttgaattatacttccactagtgaattaatagaactaatggataaagaagtaattagaaaggtaaaatgatattttgaccaaaactaattacaaaccaagacatggagggctaatcactaaaattgattatatcaatggacactatagttaaactcagtaaatataattctataattactaagagtgcaattctatatttatagtggagtaatcatagaattaataaacaatagattatttggttgatgagactcaataaataatctagtttattggagcttagaattataggtctatggtttccaaattgccaccttgaaacactatcaaggggagggataaagagaaatgagaaactcttcattttcgagtgagtttcccatgttggaaatgagaaatgcaaagttgtgaatttgacttctctaacttcacggatcttagttattgtgaaaaacttgatggacagtcgaaacagaatcagaatcaaataagcagaacccattgcactaggccatttgtcaacttgggtgatgggtaccctattatcgagatcgtgagatcttgtattgatacttccaaggtctttgaacttgaggacgaggtctcctacctcattttgaccattctgaattcattgtcacattagatttgccatttgagtaattgaaaacaacatcccaggttgattgtcaatctaggcgctaggccaaacaccaggataacttgggcgttgggccctatttctaggggctcagctttgtggttttctcccctagtttgcttgaatcttcattattttttatgatagagaaaatgcacagaatactttttggtgaacttgattgaaaacatcccaggttaacaatatgtcaacctggacgctgggcccaacacgaggtatcaacctcgatgctgggtcccagttatggcccctcaaaaattccgtttggtccccaaaaatagttgaatttcaatatttttcttaaaacaaggaagatgcttggaaaagttctcaaaaaacaccatcaaaatcggcccaggttgacaaaatgttaacctaggcgcggggccagccctaggtatcaacctaggcactaggccaaccccaggtgtcaacatgggcgctggaccttatttttgacactcaggaagtgttgtttctcccctgaaagttcatatttctccatttttgatgaagacaaagaagatgcaaaagttggattgccaatatgatacttggaaggcgcctagattgactgattgtcaacctaggtgctagggtgctcgaggctctgggtgctaaaaaataaacttgttctgattctgattctgattctgatgagtcaaatatgtctatggtatgtct

SEQ ID NO: 339958 - DNA, 800 bp, Cannabis indica
gcctaaactgggccaatcacaagttccttcggctaggacgttcattcaaaacccccagtaccctaatagttcaaacttggacagttaaagatctaacaacaacaacagacaaggcaatggaaaaaagggaaagttcgcaggcaaagccgaacagatgtctaaagagaatccgtccaaattcactactttctctgtcctgactggcgacttggagaccatctacatggctactcagtcagtagtttcgtacaagaaacctgctcccatgaaaaaggacataagtaagcaggacatgtccaagttttgcagttttcatggagattatggccatgacaccaatgactacaacaatttgaagcgggaaattgaattcctgataagaaaaaataacccacatgtgcaaaaatatgtcaaggccgcccagcagacaataactaagatttattactgcctccaccagtagacgagcatttgcaagtcatcattgggagcccgcatatagctggagattcgggcaaagcttggaagaggtatgctcaaaccttacagcacgagcaaaaagaagtggtcctggtcgtagaagaaacgcagccaaaaataccacgagtaggggaacccagtataacattcaatgaagaagatgttgtcaaggttcgtttcccacataatgatccattagttgtggaagtacagatagctaacaacacagtggcccaaactatgatagacaatggagcctcaataaatatcctgttcaaaacaccatatgaaaaaataggctccaactcaaagatctgatc

SEQ ID NO: 339959 - DNA, 517 bp, Cannabis indica
taaacacatttcttaaagaaaaaaaaccagttataaatagtataaaaactaaattacatacaataaatatttaaaaacacatttctaaaagaaaaaaaaccagttaaaatacaaaaacaataacagaaccagttaagatactcaccttcttcttcttagcacgggatttctttacctctggtttcttagatgcatcaactggaacttcggaaccagttccagaatcagcaccaacaaaagcaacattagcaggctcaacctgttaacaaaaaaatataatattaaaactggttataaaacagttataaaaacgataagaataaaacaaaagaatacaaaacagaataaaggaacatgaattaaaaccaataaacaaagaaatcagttatatacctgatcgtttaacttttgggacacagaatcagattggtgataatcctgttgttgaactccaggatcaacataaggaataatgttctgaaaacattgatcaggaaataaacaacacaataacatg

SEQ ID NO: 339960 - DNA, 523 bp, Cannabis indica
gggtttggggtttggggtttggggttcgaggttgagtgttttgggtttaggatttggggtttggggttttgggtttttgggtttagggttttgggttaagttattgtacattaggtgtttggggtttgggtttggggttttggttttttaggttttggatttaggggtttggggtttgaggtgtggggtttgggattaggggtttggggtttggggtttggtgtttagggtccttggcttttggggttttttggtttgaggtttagggtttgtggttttatgactagggtctagagtttaggatcttggacctagtatttagggtttgaggttttaagtgtggggtttggtgtttgggttttagggtttggggttttggggttttagggtttggggtttgggattcggggtttggggtttgtgagtttgggatttggggaatgggaatgggaatggtttggggaatgggaatgtgcatgggtcggggaatgggaatgggaattggaaatgggaatgggctggg

SEQ ID NO: 339961 - DNA, 681 bp, Cannabis indica
cacccccaagagtaaacaccatcccagatgtagatttcctatcaccaagacatgcctggaaatctgaatcggtatagcctacggcattcaaggcaccacccttgtagactaacacgaattgccttgtactcttcaagtacttcaagatatgcttaacaggattccaatgttcctgtcttggattcgtctgatacctgctcacaattcatattgcataacagatgtcaggtctagtgcatagcattgcatacattagactcccaactgctgaagcataaggaacccttctcatgtcctctatctctcgaggatcagtgggacactgttccttagatagacgaataccaaatctagaaggcatggtttcccctttggtgttggtcattgagaatctctctaaaaatttatctatgtaagttgtttgagagagagcaagggatctattcttcttgtttttgataatatgaataccaagaacataggcagcttcacccaaatctttcatttcgaattgagtgtctagccattccttgatgtcagtcattttcttgatattgttgccaataatcaaaatgtcatcaacataaaggaccagggagactaccacttgggtttgcttgagttggtaaggttcatcttcattctgaagaaagccgtaggtcttgataatttcattaaacc

SEQ ID NO: 339962 - DNA, 633 bp, Cannabis indica
acattgaaatggagttttattttgggcataaaacccaacagatgcacgattggatttttcagtataatacttggaagtggcccagattgacaaattgtcaacctaggcgttgggtgcccgagtatcgggtgctccaagtgctcaaaaatgaactttctctgaatctgattctaatgcctcaaatatgtctctggtatgtctaggtcatgtcccaataaaaaattttactcatttgaactaagacagttgttgtgaaaattatatacgcaagtatacgcagtcaaacaagtaataaagtgataagtaagatcgtctccacaggaattgcaaacaaaaatatcttgtaaaactaactaattacaacttaaagtaaaagcaaataatatgcaaatggttgagtaatgattcaaaattaaaattgacatgaattaaacttgctagaattaaactactgctgctaagaaaaattggctgcacgataacaagtgtaatatggcaaaaaatggcttgaataactaattccttctagtcaggttttttttcagtcagtacaacatcgattcaacattactctagcattctgcacagagataacaaaaaagtcctctaggcttgtgagaattttccaacact

SEQ ID NO: 339963 - DNA, 712 bp, Cannabis indica
gttaaccgggaagatagccgctttaagccgctttatctcaaaactttcagacagtgcctgccattctacgacttagttaaggggaaccgcaaattaaagttgggatgagaaatgccagttggtcttggaggcgttgaaaaaatacttgacaatgccccccgtcctttcaaagccagagcccggcgaaaccttactcctctacctttccttgtctaaacacgccgcaagttcagtattggtaagggagcaagggaagatacccaataatcgagaaattagcatgggccttagtcacttcagcaagaaaacttcggccgtacttccagtgccatacaatctcactcatgacattctttccactaaaatgggtcttgtacaaacccgaggtatctgggagactaatgaagtgggaggtagaattgagcgagtttgaaattcaatacctacccgggacggctattaagggacaggaattagcggatttcctggtcgagataactccggagcctatcaagtttgagaaggaatctgccgagagggactagctgctaaaggtagacggatcctcaaatgtcagagggagcggagtggggatagtactactaacgcccgacggagaaatgatggagcaatccataaagttgcgtttccaagccaccaacaacgatgctgagtacgaggctctgatccatgggataaaattggttaagga

SEQ ID NO: 339964 - DNA, 581 bp, Cannabis indica
tagaatagtcacaataaaaaaaaatattctcatatggtgagaccgcgacttaagaaagtcacatgcaaccttggaccttttatgttttgtgataaagtaagttgtaagttgtgacaatattctgagtatgatttttaattgggaaatttcattatttgcccttaataatataactcatatcaaaatttacacccttttataatttgtacaaattgattcctctaattttaaaagattcctaaaatacccctaaattaaactttccctctctctcagacgttccctctctctctctctgtcctcctctcttcacaaaccagtcgaccctccctcttcaccaagcttcgccgccaccaatctccagccgacctcacccctcacgaacccacgaacccacgaatcggcctcaccccacgaaccggcctcaccccaggaacccacgaacccacgaacccacgaaacccaaggcgaccgacgacgacgaagaggacggcgacccacgaccacgaccacgaaccactgatccaatccaatccaacggtaagttttttctgtttaaaatttagaaatttcatagattt

SEQ ID NO: 339965 - DNA, 1919 bp, Cannabis indica
ttaaattgaaatttatatttagagttatctcaattgataatttaattaaatacacatatataaaataaattagatttaaaataaatattagatgtaaaatacacttttaaataattgagctttattataaggatattcgatctccattgttggttctacattgttcttgttttagtgagtaatcatccctaatggatgaatgttcattagcaatataacgtcgtaggatctcgaaagataaatattatttataagcgttttattcttagtaacgtccaccctaatagtggcttctaagagtaagacttacaaggtatgaaacaatagtggaagctcatatgataaaatggccttgactctcgcctaaacgggacaacgctggattctcatcttgatcgaataaaaggttgctagaatattttttattttaaatgagttgactactctattcaatgaatgatatctttgactctcgcctaaatgggacactgtatcagtttgttggaaaccttagaaattatttaggattgtttgttttttgtatttttcacttgtcattcctacttgctaagtggtaataatttctgaatgtgtatgattttgtattaaaccttatttaatttctaattgatatttgtagtacctaatatgactatgaacaaccccatggtgtcactgttgactgacaacaagctctctagagctaactttgtcaaatggaaagttcacattaatattgctacttttgaaatcacgtagtggctacccctacacagcttacgaaagtagaggccactgttgaagaacggtgggagatcacgcctagaaggtcgtgggtactagcgctgggttcctgcatgatgaaatgttagaggaacttaattgacaagttggctagtcagagtacttactgagatgttccatatttcagcgtttgggtagaagttttgacttcaagttctcgttgtacttgtcaaacttgtatgcacctttactgttatcttgtaacatggtgcagacctttttagtttggtccgaacatgcttgctgtaggggatttgctgtcaaggaatattcttcaaggagtaattctcttgcaaagaatttctttccttaatctatttgttgacgggcctggtaactccttatgtgcagccatgctgctttgagttggcttggtctcttcttctttcccttttgtcaagggattctactagcaagatgttgtacctcttggtcacttaaccaaaagtatgagagcagactgctggtggatcggactagccagagcaagaccaggtggccagcctcattgagggagcattgcatgggtagttggatgaggccatggccggctagcatgtgaaggtggtggtcagccagattgtagattctatggctggccaacttactaaggacatggtcggccaaccttctaaaggcctggtcgatgctatggttggatcccgtctacattcgattggctttgccccttagcgtaattgtcgtatagcctttgtgcacttctatctatagctatacaacttctttcttggaaatgctccttggtggtattgggataccacttttgtgtgttatgctgtgtaggattggacaccttgtagccatcctcctagtccctgctctctagcaaggtcttttttttggaggtatgttaatgtaggtgtgtccgtgttggttgtctagcatgtctgttatttttggaacgggacttagttctttgaagaactgagcaggtagcaagtttgccttggttgtcaaggcgctagctggctaggtaagcgagtgtgtcggctgttgtgctgtctttgggggcttagccttctagtatagcctttgagttgtgttatagtgagattcctctcacctagaaaactcgagacaagactcccatttaa

SEQ ID NO: 339966 - DNA, 1230 bp, Cannabis indica
agtatatgaggtaattgcccattaattaattatttaatttaaattaaattaattttgtaaccaactatccaatgttgttatatgtttgtttgtttattgtttattcaaacttgttttctaaaacatattattgtttgattaaaattgctatggttaatttattgacaaatgattttaatcatagtccaatcggcaatagatcaaataaataatttgtaacaggtaaattttgtaattttctttcatctgtgtataaacttagtaacatgacaggatccatccaaatcattgtgtttacttgagcctgtatatctacttttgggccaagatgcatatagggagtccatttaatttgataattaaaatggactaggttgcttaaataaaataccactttgataatttttatttagactcaattagtagtattatgcttatttaattaataacaattctttaattaagattaaattactctcttttaggccttgtgtgagagttaggggcccattagtaatgagtatgacaatcggaacccaatcctctctcacatatgaacgaccccaactgtgaaagtccatttgctttatttaaataattgtactaggttaattatattaatttaacctaattaaaattgattagcaatataattaatttttaaaatatatgaaatttattttttatcagattagtttgaaattaatttaagaaaattacacaaagtataatgaaattaatttaagataaactgtatgtatttttctgatatttaattaaatgaagaagttataacttattagatttttctagatacttaattatatgaatttttttagaaaatatatttaaattgaaaaattaatttaaaatttttaaattaattttggatcaacttaaattagaatatttttgaaattaataattaagtagaattttttttgaaatatatttaagttaaaaattagttaattttagatcagcttaaattgtgatattttctaaattaaaatgattagttcaagatactttatttattatttaataaaaattctgaaaattatttaatttgaaaatttatttattttagaacagcttaaattagatatttgtatgtatttattttattttattttaagtaatttcaaaattatatataatattttatataaagaattttgaatttaacttgaaaattgaattaaagttgaaaattaatttattatttaa

SEQ ID NO: 339967 - DNA, 716 bp, Cannabis indica
attaattgtatatttcaaagaaacccaaatttccatgaatgtccctaataagatataaacaataaagttgtaaattaaaaaaaaaagtagcaaaatttcagttaatataagaaatagaacaaattgaagatttatacaatactggaatttgaactcttagaggccattagcgaaggggcgaaactcgttagatcccctagtagaacactaccttaatggtctgaacacaaaaattgtagaaatcaaaatatgaataaattagcatcatcaacaaaaggaaaattaaagggaaaagacttaataattacgtgacaaataattattaattgaattaaaaagttaagattataagattaattcaaattattgttcatatattgattaaggaacaataatttgaattaattttataatcttaactttaatcaaatagggtttaaaaaagtggcataaataatcaaatagggttagaaatacggtaattaaagaaaatcaaaaaccttatttttttttttttggatttaatgagatttattttatttttattttattatatataaataaaaagtgacccatgaatttctcataaaccattttatttttaataataaaccatagggttagaaatacggtaattaaagaaaatctagaaccctatattttttgttggatttaatggaatttattttatttgtattttattatatataaataaa

SEQ ID NO: 339968 - DNA, 561 bp, Cannabis indica
tcggaccacccatcggactaccatcggaccaaatctgctaccaattttttttttatgtttttgtacatacaaaagtagcatcaggtgaccatcggaccaccatcggactcccatgactaccaattttttttttttttgcactaaaaaaaagtatggaaaatttgagaggggtatttttggattttagataaagtggtcatatattttcaatgatgatatgtattagtttagaaataaaatatttggtatatgtaagtatagaaaatcaaatttcccttacgtaataatatactatcttcaaatctaattactatacttaaagtcaactgtaattttttttatataaaaaagatataagaaaattctacaatgcactatctttaaatagatatacgttgtagttgttcaaaaagtgtgttgcacccgtaactattttattttatatgcgtgtgaaatagattgtttgaacactatattgtaaattattccgaatttctcaaaattttgtaagatatcttaaataactataacgtaaataaaaataaaaatgaaaaaaaaaaa

SEQ ID NO: 339969 - DNA, 899 bp, Cannabis indica
aaggtgcttcataagtcacctggtcaccccccccttaaatagcttattgaggttttaagggattttcaggaacatagatgattttagctctccatacatatgtgagtggaaatacaaagaaagaaagctaaacaacaaaagactcccaaccccagtgaggtgcttggtgcaagacttgactaatgatcaagcaccaaggcatgctcatgttacaaaatggccccattgtgggtgtgccatggggcagcacaccacaccctgcattcatccctaaagtgcccttccttgttacaatagtaacatttcttcccactcttgaatttagacatggagtttggcctgtatccacctctgttcttgttatcttttaactctcttctttctgatcttcctttggagaacaacccttcaccatttgatccaagtctgtcctctgatttcttttggatctcttttgaattcagtggagacttcacttctgacatggttagagtatcttttccatacaatatagtgtcaacaaaatgctcaaaagatttaggtagagagcttaaaagaatgataccttgatcttctttatcgattttgacaccatgttgttcaactcgagtatgatcttgttgaattcaacaaggtgtttccttagctcctttgattcatctatcttgatagcatacaatttctttttcaggtacagtttattggccaaagatttcttttcaagtagatctttgccaatttgccctagagaccaatagttgtctcttcatcaaacacttctcgaagaacttcatctcccaaagatagcagtatggcactatgagccttgatgtgtatctccttcactttctttttgtcttcaatttctgaaattatagaagtgtcaatggcctctgaga

SEQ ID NO: 339970 - DNA, 683 bp, Cannabis indica
tttttttgcactaaaaaaaagtatggaaaatttgagaggggtatttttggattttagataaagtggtcatatattttcaatgatgatatgtattagtttagaaataaaatatttggtatatgtaagtatagaaaatcaaatttcccttacgtaataatatactatcttcaaatctaattactatacttaaagtcaactgtaattttttttatataaaaaagatataagaaaattctacaatgcactatctttaaatagatatacgttgtagttgttcaaaaagtgtgttgcacccgtaactattttattttatatgcgtgtgaaatagattgtttgaacactatattgtaaattattccgaatttctcaaaattttgtaagatatcttaaataactataacgtaaataaaaataaaaatgaaaaaaaaaaattagattaatttttttttttttgaatgtggaaataggtgagggtgcattagtgtacttcttttgaaggcgtgtattgtagaatcacccaaaactatatatgttcttttttataacggaaaatatcattttatatgggaaatttgagtttctatgcattttttatacccaaattaattatctaaactaatacttataactcttgaaaaaatagaactatttttacttaaaccccaaaatacccccctcattat

SEQ ID NO: 339971 - DNA, 601 bp, Cannabis indica
attatatagtatataaaataagaatttattaaaacgcacacacgtggcgttcctgtgatcagggcctgaacccagtcctagacccaaacctagacccgggcccgaacccagtcctagacccaaacctggacccgaacccgtaccctatgacttaaaaatggaaccgaaaccggaagtagacagggactcgagaacgggactagaaccaggacttgggcctagacctagaaccgtaactggacctagacgtagacctggaaccgtaacgagactaggaccggaactctaaccaagacctagacccgaactgggacccagacccgaatcccaacccaaacttggacacggtacccaaacctagacccgaactcagacccaaacatggaaaaatactcgggacagagaactggggccaggacctagaactgccaccccaccctcagtcccgaacaaaaactcggaccaggactcgggacctgaaccagaaccaaattgagacaaatgataaggatccagatctggaactcaggcaggtcccgaacccagaacaagaccctaacccggaccctgacccagacccaggacccaaaatttgaatttg

SEQ ID NO: 339972 - DNA, 647 bp, Cannabis indica
ccattttatttaaaacttatcttttctctttttaaatgccatcttttaattctaactctataaatatcaattctatctatttaataactttaattaattatcaaataaaattatcatttaacttatttattaattagacattttaaagtctcttaattaataaacaaatcctaaaattccttttctttttaaataagtcattgcttagtgaaaactcataaataagacatagtcttattcaaaattctaattgattaaataaaatcaattaattgagtctagaagacaatattatctcaactagtgtggggaccatggacttacataatcaagctcccaataagtagttctagaatttattaagtaaatcctctatcttattaattcctcttgactccactatagatttgaaattgcattcatgattatatagaacactctataccaagtatagatgcgctataaattatcctttgtttcaatccaaataatcaatgatcctctattgatgatttatatcgagtagggataaatttattattctacccttcaatgtattttatccttaaaatacttagctacttgtaaatgatatttcagtaactaatataattactgaaatgagtactccaccatttaaactcgtt

SEQ ID NO: 339973 - DNA, 1325 bp, Cannabis indica
gtgcatcttgtttttcggtagcccatcatgaaagaattccacagttaagcatgcttgacttggggtaatttcaggatgggtgacctcatgggaagttttcccaagaagtgtgcgagtgaggacaaagcacactggaaatactcgtgtaagttagtctgtagggccagtcatcagtccatgaagctgccataatgacgtactcgtgtataagagccatcattctgtgggtgtaagggcccaatggaggcttgaagcggggacgttacattagccatctcaaaaaatgccattagtgctgcattggtgtgagaagatggcaaaaactaaaaaccagtttattatataagcaaaaggttactgggggtagagccgagataccttccactcaaaaaacttgcacttagcttggtgcatgtttgcaaaatattgcgaccttattttcaagctcatcccatcaaagttttcatagaccaaccattgcgacaagtgttatcaaaacctgatgcattaggaaggttgataaaatagtctatcgagttgagacaatttgaaataaccttgtaatatcacggaaaattattatgataattaagtgggcatatgttattaaatatgtgattaagtgggtattagattagtattataatcctacttaggctaattatgagttaattagtaaaatgcgattaaagacacaaataaagcgtaatttattaattacggagattttattaaaatatgtgggtattgtggatactatttttgaaataaaatgtttttaggcccggtgatcgtgggaactcggcggagtggtcggaaatgtcacgataataaatgtggaccggaatggaaattatgctagactagtttataattttaagttattgatttggtggattaattagaattactaaaatactctaagtttgtttttgggtttaaggattacttaaggggtaaaatggttacctaagcttcaaggtaagttttgatatttctcttttgaatttcttaagtctcaaattatgtttgagctagggcttaaggaattttagggctggagagttgatttgagtttagactatgtttgtgggattattttaggatgtgcttgagcttagattaggtaattctagtggctgctagatttatagttagacattttaggttagaaactagatttttggttctaacttgcaattttgtgagatttgatcgattgtgatgaattaatgatttgaataccttatttttatgttattgaaccgttttgtgaagtttgggaacaattggttaggtttggagctgttggaattattttacca

SEQ ID NO: 339974 - DNA, 863 bp, Cannabis indica
ggctcgcctggtcgttgcttaacctcgaccaaatctcgcaaatgaaatgggagctggcgcgaggaggagaattgcgcatggaattccgaagagaaagttttccatgagctaaactttccaggaggcaacttgaaataccattgctgagcggcttccgacagagtggcggggaagattctgcagcatacatcccccagtactccttgcaaatcaatttgcatctcaaagtacttgagatgggaaagaggatcttctctcccagtatacatcttccacgtcggcattttaaacttgtgaggtagcggcaggagattgatctttggtaagaagggagtttcgcgtgctcggtctaactccagatcattattttgttgtccaaccatgccgtgaaacatatttttcaatttgtcaagccggacttgtacggctgggctgacctgctcggtattctggttgatttggactatgtcagcgtctttctgagcggggatttgagtacgggttccaggctgcacgatcgttgtagtattttgttcgtccgttccccttcttctgtttagatcgttccttaagtcatgggttgctcccaaccttttgaacacagaagagccaggttgccttagcgattgattcgcttggttgacgggtggaatggcaccattagtctggttggagccatcaggtatgacccctcctaatgaattaccggacaaagtctgctcgcctaccgctggccccacgagcggaactcgtgaccggggattaggcggctgaccattagtactctgagaagtattcatcgatgggtcctcctccgtttctcccaggggaatgacgttcggcgattgctgacctacaatttg

SEQ ID NO: 339975 - DNA, 595 bp, Cannabis indica
gtgttagtctacaagggtggtgctttaaatcatgtaggctatatcgactcaaatttctaggcgtgtcttgatgacaagtagtctacatctaggatggtatttactcttgggggtggagcagatgtttggagaagttctaagaaaaccgcaacgtcagactctaccatggaggtcgaatacatagctgccgctaaggctgctaaggaactagtcttgctaaggaagttcttcttaggacttgatgttgttcctggaatggaaaaaccactagttttactttgtgataacactggtgctatagccaacagtaaagagcctcgaagccacaagagaagcaaacacatagagaggaataccacatcatcagggaatatgtggtaagaggagacatactggtgtataaagtggatactgaagacaacttagctgattcattcaccaaaattttgacagtaactacatttgaaaagcaaagactgaatctaggattaattgaaagagtaatttgcggcataaatacctaaatttatcttccagttacaatttaatacctaagttaaaattttggcggcataaataccttccgttacacttt

SEQ ID NO: 339976 - DNA, 615 bp, Cannabis indica
atggataagttactttgttggaacgttcgaggggccaacaatcaacaaaaacaacagttgataaagcaatttatcaatattcaaaaagttgattttgttggtcttctcgaaacaagagttaaggctccaaaacttggaaccttatactcaaatgtgtttgcaaattggtgtttctctactaatatagcttggcacgcaggtgggaagatcgtcatagcttggaacccttggagatttacagttgacattcttaaatgcactagtcaattaatgcatttaaggatgacaactgtagatgggtttgacagttttgttactgtggtatatgctgctaatgatcgagctacaaggaaacttttatggaaagatctgtgtgatttgagaacaagtggtaattgggtggtaatgggagacttcaatgatattttggctaaagaggagaggattggtcttaggaccaaggcttatcctgacactgaattccttcaatgtgttaaccattgtcaattggaagatgtcaaatcaagtgggaatttcttcacttggacaaataagcagcacggggatgacagaattttttcaaaaattgatcggatcatggctaatcaagcatgg

SEQ ID NO: 339977 - DNA, 653 bp, Cannabis indica
agccttagaagttcattccactctcgccaggggttatggaaaaataatatccgaagaatttggcttctacccagactacccttttgccaaactgctacacatgaaaaataacatattcatgccaaaaaagatgaatgagatctatattggcacttggcaagttcatacactattgcggtcgagatccacacggtagggcttcggacatcagttcgtagctatatccaacgccctgacctagggccggcctaccaacatccaatggctatgttgcagtggggataggtgcgcaacaaaagaccagtgggactcaattgcctagccactgaaaacatggcaaacccattgcgctgcttcataattttgctgctcaggctacatgtcaatccagatatgtcatttacagcaagtgtcaaaatacacaagtcaagcgaacacccacttgtcgtgataggtagctcagaagcaagacagctggaaaaatacttgttttccattaacatgataattccagacgccatctggccaaaacctgaagaggacgcaccatgggaatactatccaccagagtatctccaacgactagaagaagatatgaatcattataaaaaatactacgctgaagaaaacgaggttgactggaatgatccaat

SEQ ID NO: 339978 - DNA, 1671 bp, Cannabis indica
ttttgggaaccctagtttttccctttttatgatatttagggtatttccatgttatttattaatagagaaacatttagtttcaagtttaagtccatggaaagtgatttagcgtgtcactcaccagttttacgaataatatgatttaggggcctataattcgtcgagcagttgttccactcaggttggtcggcacacctaaattcggaaaccaggtaagattagtataatggtatgcatatgtatttacatgtttagcgtgcatgtcagttaaacctgttagattacattagaaatgtatgttggcttaagtactattcgataatatcacatcggtacgcctagagtatgactagcgtaccaagtataggctgattttatggtcgatagtactgtactacttggcagtatcacatcagtacgactagagtacgactaacgtaccgagtataggctgatattatatttaatagtactatcatacgaacgtttcagactcagcaccgtgttgggcacggggataggattatgattgggggtatgggctcctaattataattcgggtgattgctatgttattatttatgcttttcttactgagtctgtcgactcacagttattgtttgcatgtgtaggtaagtgcaaggttaacgttgagcagccgtgagagcgagcagatggagcgtacggtctttgggaaatcagggcctatttcgtatagtcgctaggcgacaaacttttgtatatgttcaataaaacttttgtaaacgggattccaatttaatataagtacattattttggtgttcataattaattaagtaaaattttaattaatcacaattttcgataaactcgttgattagcaacgagctgcacaattagttaaaaatcatgttaacatgcctaaactagtagggtgttacgccgaaggcctaccccctttcaaaataacagtaaccattctctaggcaaacaagtcatttagctttgaaatatcccaatcgccattatcagtcaagagatgagccactttgctagccgtgaaggtaatcctttaggttttgggtaaatcctaaccatgagtcaataaagaaacttcacaaatgttgttatccttcctatcaaaaaccactttacacgctcttatctagagagtatgttagccttcacaatatttttctagaacaaagaatcgagatccttatacttacaattaagaaacttatttccataaaatattttctataactatataaaagtgtcactaatttttaggctttacatattaaattactattttaaccttttgttttattttttcattagaaatttttgtagttcaatataaatcaaattatattttgatatgttttttgttttaaattaattcctattgataattatatattagtcaaaatttaacaaattaatatataaataatcatataatacaatatacatatattataattttttttttaaaaaataaattcagtaactttattaactaatcatatatatatattataattaattaatcataaacattaccactaatagaatattataattataataataataattattatattagctaataatatataataaatcattataaataattatatttgtattaattacagaaataatatacatatattataat

SEQ ID NO: 339979 - DNA, 961 bp, Cannabis indica
aagattgtagaagaataccaaattgaagagaggacattctgtctcagatcttagtgatactctgcgacatacaggatacaagggttagagatctgagtggaaggagacatattattccgctgcacccaatgtaaggttttttgaaactttatatgtgtttaatttcattgttttagaaattcatattaggatgttaatgaaacatacttgttagtaaatctagatcctggtaaaacatattccaacagctgtctccagtgaatccgcaaaggttcaccatacaaggccttaatttcactttttcgagccccattggctttagagtctccttataaaggatatttaccgagctcccattgtctattaacaccctcttgatccttttattggcaagctaaatggttattacgaatggatcgacgtgaggatatctcacatttttcttctcgagcttgctaggttgctgggtttgcttctcaagcttgttgaaacattgctgggtttgcttcccgagtttgtttttcaacaagttcatttcctttcggtcttcttccttctggacaaacacctgagacctttcgttgaactcagtgatgcttctcaccgaacgtccttgcaagtcatcccacaactcaccccttatggttaatggatcagtagagatccccgcctgaagagttgtaagttgcgtgctgtcatccaaatttctaactctagccgcagccgtgctaaaacgacttaagtacgccttaagtgtttcgctgagctgctgctttatattggttagcgaggccgcttcaggtcgtctatccctagcaacctgaaattatttcttgaaatccctagacagctgctcctaggaagttattgaatgatgagtaaacttgttaaaccagctactcgctgctacaacaagcgaggtggggaacaaaatacagcgtaaattattcgtcacattact

SEQ ID NO: 339980 - DNA, 691 bp, Cannabis indica
taataaaaataggggagttatatttgcaccccataaaattataaatacaccccattattaaaaaaatataaatttaaataatttttaaaaattactctaaatattttttttaaatttttttcctcacattattttatgttaatttcaatacttattttgattttatttttataatttttctaactcatgtatatatttttttattttttttaaagaaaattttatataattttttattttaatttttttgtcataatttataaaatgtaatttaattttgtttgatatgtatattttttaagaatataaattgaaagaaaaaagttaaaaatacttagtaaaattaaagatataaattttataaaaaataaaaattattaaaatggagtgtacttgaaaaattttggggtgtaaataaaatttccctaaaaatatagtaaaaaatgtcaaaagtctatattaccctttttttgaatattttataattttaaaataaaagtaataggattattttggtcaatataaattttattctattacattctcatacaccaaacaaaacataataattcttttttttgtagggacaaaacataataattctgattacaatgttcattccaactacaaaccaaacattgtaaacaattcctattactattcttattccattaccattactattactatt

SEQ ID NO: 339981 - DNA, 527 bp, Cannabis indica
gttgtgtttatttggatgatttcatgttggtttatgtgcttatatgatgaatatatttgttgtatgaaatttttccttgaaaaatatttttttttctttctaaaaatattttatttggatcccttgtgaaaaattaagcaatttcggtttttacggaactcgattccgataaaaattacaaaagttttgaattttggaagtttcgggttgaatgggtgctcaatcgcacgagacagcccctcagacaacccaatttgcgcgcgcatcttcagaaaatccttgtctgaaggcgctgaatgctcagacacagagacacgcccaggacactgcacctgaccgaggtttctcggtcaaggaggctgcaaatgccgagatttctcggcgtcaccccctctccgcacgcgtatgcagcctcctgctgggcagccaagtgttttcccaaaaaagtgcgatttttgtgattttttccacaaattttggatttttcaaatttcaaaccacaaaattaaaataaaatattattgtta

SEQ ID NO: 339982 - DNA, 1406 bp, Cannabis indica
tattttatgaacacccctacttcttattattatttcttccacttctttcttttcaatttgagatctcccaagatgattactttattgggggagagagagaagagagagaaagttggagggtgagtgagataacttctatggatttttgacggatctggtacatgaagtggctcgctattaaattcggcaaagaagaagtggctcgccattaaatccggtaaagttgaatacgttatatcttgttgttcttcggaggtcgaagtgggatccgatggttcgccattaaatccggcaaagaagaaaaatgagaaagagggagaggaagagggaagcgggaagcgggaagcggggagctcgagacttgggtccattcggaccgccggagaaaaggctgattggcctggcagtggctccacttgagagagaagcaagctttcgccaatctccactccagattatagatctcccactgtcatatttttttgtgttttttgttcatagattaatatataattttgggaaattctaccgtgcacccccttaaaattgatatattgatgcacccttatcctgttttagcacctaaaactaattttttagtcaatttttttttacatggtcatgtacgttatagttatttaagacctcctgcaaattttaagaaatttggaaaaattctgaatttctcaaaattttagtaagataatcttaagtagactataacggtcatgagtacgaaaaaattagactgaaaattctctggatgccaaaacagtagagcgtgcatcgatacatccttttaagaggtacattctagaatcagtcagtaaatttttttccttcaaaactatcacgtttccataataacggtagtattacaattaattagtttattattttgttttcttttaaaaaatttagtggagtaattttttaaccattttttgttttgacgaatttatgtatcttgagtcaagatacataataaacattaatttggtctaatctaattctcacggtcctataataaaattaccaaaaaataaaatttatttaatacccattgacaattttattaacgtttaggaaaatgagaattaatattttataactgaagttttagtatatatattaaatcaattgatatatttttcaattaaaaataattgaatatataaaattataaatgtattttaaaaagataaatttaattggatgatccttagatgataattggatcagtttggttcggttattcactggatcggatgtcccatccaacaactgatccgagccaattgaattttcaaagtttacattcgatccgatctagttatgattgaatatttattctattggatcagttgggattgaattggtcggttgtaattgaatcagatgacttt

SEQ ID NO: 339983 - DNA, 1044 bp, Cannabis indica
gtgctttcattgagagctagaattaggaaccgctcttcattcaaaatctaatcacaagtacgatggtggtgcagactcgtaggggtctggttgatccagccaatccacaggcagtggatcctgcattgctgaacccaggaaatgcaagggttctgctagctgttaatcctgaacagccggcaaacataggtcacggtgtaacgactgttatagatgaaatcgcgcctggtgtgcaagtgactgggaataatagttcagcacccaaccagggcattcataacacagttgttccgcctattaccaacactcaaatgactattggagatgataatgagttacaaaatctttgtgctgctcttgggctcgtacagggtcattccaataccctacatcatgattaggaagatctccgtgctgcaataaatctcgcgttcgaggaacaaaggtgcatgtttaccgagtggaaagatagagagatggaagcgttaagggctcatcatacagagattgaaaattgtagtcagcaagctaccgtcctaatacgaaaagcctaccaaactgtaggtcagcaacctccgagtgtcattcctctaggtgagacaaacgaagatccagcgatgaatgcttcacaaactgcaaatggttagccgcccaatccccggtcacgagttccacttatggaccaagcggtaggcgggcaaaccttgtctagtaattcatcgggagaggtcatacctgatggttccaaccaggtgaatggtgccattccacctgtcaaccaagcaaatcaatcgctaaggcagccaggcgcttctgtattcgaaaggttggggataaatcacgacctaaggaatgatctgaacagaaggagaggagtagacgatcacactgtcacaacgatcgttcagcccaaagcccgtgctcaaattcccgctcagaaggatactaatgtgattcaaatcgaccagaatgccgagcaggttagcctagtcgtacaggcacagctagatgaactgaaaaaatatgttccaaggcatggctgga

SEQ ID NO: 339984 - DNA, 816 bp, Cannabis indica
tataagataagtttttgctgccacttttttttattaaggttgtatgtgtaacaattgtaaatgttaaagaacctatttttggagtatagtcgggaagtcaaaaataggttcatgacatacttcaaccattggagtattggtggagccttcatcgtaattaaaatcaaataactcacatgtctctctttcatcctcgatagtcatgttgtgcaatatgatacatgaatacataatatttttaagagcatctctttgctaggatcgagtcggacctcgtataatggcataatgagattgaagtatttcaaatgcttctatcacgaattttatcatttctttgaagtatggtcgggaagtcaaaaataggtccatgacatacttgaaccgttggagtattggtggagccttcatcgtaattaaaatcaaataactcatatctctctctttcatcatcgatagtcatgttgtgcaatatgatacatgaatacataatatctttaagagcatctctttgtaaaaatcgagtcggacctcgtataatggcataacgagattgaactgctctaaatgcctgctcaacatctttgcatacagcttcttgacattggacaaataatgttctcttctctccttgaggtaatggcatagttttaagaaacgtaccccattctgggtagatataatctgctagattataccccttagccatttatcataaactcagctcttacacattgctcctgtaagatgttagtgaataatggtgattgatttaaaatattgagatcattattggatcccagaacaccaaaaaat

SEQ ID NO: 339985 - DNA, 687 bp, Cannabis indica
gttttttaattgattaaattttatgtaatgtatttatgctaaaagttctgataacttgtacttgttattgtacatagtgataatgttccataacttttatggtccatattaaattaaacaaaaaataattgaaggacttaagatgtactttccaccatacggtacacttgcaaatgcatacaagtaatggtaaactaacattgcacaataaatatactaaagtacacaataatttatactttttaaacaattctttcattgtgattcacattatcatgttttatttttttttgttaccgttttattgctttttgatctcatttaatatcgatttcaccttatgatgtagtttatgccaacactaatgaaccccaacaacctgatgaactcttgatgtaattttcactttaattttaaatttatttttgctttttaattaattaaataaagttgattctttatactattttttttctttttgtgtgaatttattatttgttatttttattttaatatgttgttagagaagatataaaacaacaatattttattttattttattgttagttatatgaagaaaaaaaatattttttaagtaaaatattaaataacttactattaaaaagtaactaatctaaaataccaatccaatccgcattttgcagattggattagatctaaaatatg

SEQ ID NO: 339986 - DNA, 507 bp, Cannabis indica
ttatttctgatctttattaataggtaaatctgattatattgaaaggagttttatttagggcataaaactgaacagtattatggttcgtagctctgaaattatttatttgaagcatgagtttatggcttggttgtgcaagtttttgaagatggaattgtgttattttttagctcaaagtttggagctttttatggactatggctaatctgattttatgatgcttgtgtggatgagaataagcttgtattatgtaatttaatgctcgactatggtacctattaatccatggattacgattttgagttctatgcatgttttgggtggtttatgtgtgttttgtgcttatgttcgagtttgaaaattggggtttcttgggtttgaaacccaagtgctgtggccccactcattgggaaccgcagcccgccctcgctgaaagcctgggtttccaacccaggtgccgcggccctgtgtggggagtgtcgcggcccgcccctttgtttttgggca

SEQ ID NO: 339987 - DNA, 693 bp, Cannabis indica
ttgagagactgaaatcctttctttgtgcgaccaacttcaagaccaaggaaaaagcgaatagtgccaaggtctttaagtttgaatttgtcatgaagatatgttttgaagtgtgatatggcattgtcattgttgcttgcaaccactatgtcatccacagatgagaatggccaagaagatattgtttgtcttctttatgaacaaagaattgtccgagagagattgaatgaaaccatccgaaataagagtttgactaagtttgctaaaccattgtcttgaggcttgcttgaggccataaatgcttttgttaagtttgcacaccgagtttggaggtgctttataacccggagggattttcatgtatacttcttcatggagatctccatgaagaaaagcattattgatgtctaattgatggacattccaattgttcatggctgcaagtgctaaaaaattttgagagtgttgaatttagctacgggagcataggtttgggaatagtcaattccatgtctttgagtgtagcctttggccactagacgagctttaaatctttcaacagccccactttcgttatatttaactttatatacccatttgcaaccaacgactttatgtccgggtggtagcttggtaatgacccaattttttttttctaagggcggttgtttctttatccatggcaagaagccaatg

SEQ ID NO: 339988 - DNA, 809 bp, Cannabis indica
tgcgccactatagatttagaataattatatagaatgctctttatataccaaaatatagatacactatgaattattcatcattctaatccaaatattcaaagattctctataaatgatttaaatcgaatagggacaaatttatcgttctacccttcaatgtactttatccttaaaacacttagctacctataaatgatatttcagtaaactaatataattactgaaatgaggcctcaattatttatctatattaagctaagcttgaaggaaatcatcgtttcacttctaaatacttatagaatctatatattccatatctatgattaatgctctcactcaattgcactatcatgttcacaagatgtaagcattcagccgaccaagctttaacgaacaactttaagaatagagataatacatttaaacagaacctaaccatatcaggattaagatctattgacttacgatcaactaactaatattgacttagatagatataataacggtaagtttatgatatcttatccaagttcaatatcggtctaatattccaatgtatactccatacatccaatcctagcatactttgccaataccatggaaatgacataacacttatccaaggtgtaagtaagcacttatcgctgattatcatgtcagtctaaatccagtgtactgaaaaatcatgagactaaactttcaaacatataatcatgattatattctactatgttgacaacactataatcatgaataattatatgttctagatttaatagaatttatacattaaacatataatcatgaaa

SEQ ID NO: 339989 - DNA, 861 bp, Cannabis indica
ccccaagcctttggtgggaagtaaacgaggcttgcttaagtgcctccagctgccttattgactacctgacacgtgctttgggcgcgtgggatgcatttatgacaatcatcattacagtttttgctttttccaggcaacgattcatttcccatccattaatgatccgacgcatttaatgggtgtcagtcaaatactcaagcatttccaaccgccttgatgaacgcttatcccaaccgttagatctgcagaatgtgaaccaattaatattctcaccgtacgatgatgcttgatcacagctgcttcacacccgttctggcctataaaagccagtcttctcatttcatttggttactttcgccagtttgccaaatttcctcaaagcctttatagagagaaaaaattccagacaccatagatttcttgctactcttcctccgccgttgccaatcctcgttataccgtcgatcaacaccgacccccaactctcaactttcatgtaagttttctggatactttgtgctcgtttactgtttgtttgtatagcatgattagaatgtctgggttgagtgctgaatttctgggaaataaccttgaatgtattagctgtgtaatgcgtagaatctctcttatttgtgtccttgctattttcttttattgcttttttagagttgagtctctttcgtcgagataacgcttttagaaccaaaatactaataatgttagtgtaatgtgtttagattaggtggaatattgattcatgtgtttctcatgatagaaaagaattataatatatatatatatatatattatatttttggaaattttcatggggcacctaaatttggaaattatttacaaaaa

SEQ ID NO: 339990 - DNA, 863 bp, Cannabis indica
cacattatacaaactaagcatatcggtcaagcaaattcaaacaactaatagcgaggcatccatctcgcaataggaaggcacaatcgtggtaccttcactaatcagctccagacatcttacaatgagatcaacagctccatcgagtcagctctctcagatagaaggtgacattcaaatgatgttgactgctgaagttcaccttctcaccaagaactgcgattgtcagatggagcgctatgtcttcaagcacagaaacgacaaggtttacattatcaacctcaaaaagacatggggaaacctctagctcgcaaccagggttactgttgctatgttcctagcgagacatcccaaaatgatacgctttacaacataattaattcatgtttgcattgacatggtaaaagcggatcaatcagagctgtgtgattttcaaataataatcgcatttattttacgtgggatgtaatcaaatcccacaatttcaggggatgatggttgtaaaatatcagtcaaatttgtaattaacgggcctcctatgtaattataaataggaacaggttacactggaaaaaggatgaaaaattcattaaagaaaaagcccttgaattgtatcagaaatttaataagattgactcatggactatgcagaattttaattgcagaaccacttaaaaacctttgtgttcttactttttctttactgcttttattttctgtgctaatccatcacgattcgagctttaacatagttaacgaaaatctgcgttaacataattagacctaaatcatcaaaagaccataaccacattttagtatttatggcatttgcatcttgttcatagtggttttgacaagatcattct

SEQ ID NO: 339991 - DNA, 736 bp, Cannabis indica
gtattggtcacccaacaataaatcaagaagcaatcatggaaatagatggaaggggtatcttacatgatgacaagatggaagcaagaaagctgcgacagcgagctgcccgatatgtcatatatgatggaaggttatatcgcagaatttttagtcagtcgttactcaaatgtatcgacgggaaagactacaactatatattgcgtgaggtacatgggggtatttgtggcaatcatacaggaggtaattcccttgctctaaaaatcatgcgacaagggtattactggcctaccttgcgacaagatacttttacttttgcaaagaaatgcgacaaatgtcaacgaatagccacatatgtccatcaacctccgagcaacttgcattccatcacaagtccttggtctttcgcagtatgggggatcgacttaataggagaactacctaaaggaaaaggcggagtcaagtatgtagtagtcggagtagactattttacaaaataggctaaagccaaggcactcgcagccattacagcgactaagttgcgcgagtttgtctacaactccataatttgtcgattcggcatcccttacaagctcatctcaaataatggaaagcagttcgattgtaaagagatgcgacaattatgcgacgacttgagaattaacaaagcattctctgcagttgcttacctgcaaagcaatggaaaaacggaagccgttaataaaataataaagcacac

SEQ ID NO: 339992 - DNA, 500 bp, Cannabis indica
atttaaaatatgttaaatatcaaaatatctaatcttataattaaatatatataaatattaaagaagttaacaaatttttaaatcttaccataattggaaatatttaaaataggaaatatttcaaaaaatgaaatatttaaaattggaaatatttcaaattgggaaaaatttaaaattggaaatatctgattttgggaaacaatcccataaaaaattggatttttggggaaaaacccacaaaaattgcaatatgtgggttggctgcaggagaggctgcatgcagcagcccaggaggctacaagcagccccaaacgcgcgcggagctaggagattgcagggtggatgtgtggcattcttcggtgctggcagggtgatcatttgcggatcagcatgatgctcgcgcgcgtagcccaggttgtccgaagcaccgggtgcatgcgtgcacctagcttcaacaaccaagaatcccgattttcaaaattcataacttcaccaatttt

SEQ ID NO: 339993 - DNA, 810 bp, Cannabis indica
cttcgaaatcttcaggtaaaaatgtttttttattttcgttttcagagaaataggttttcataaaactaccatatctctctcctcgtatgtccgttttcagtgatctaggtaccgttttaaagataatttaagttctacatttttcatgaagaaactctttcctaattctgattatttcgatgtcaaaaaattcatgttttacactgactgtcgaattacagtttttttaaatttccttctgatattgccttagtaaaagtgtgatatctctctcgatatctattattttccagtgattcttgtactgttagaaagataattcaataatccatattttctttgaagaaacctttccctaattcggagttcttaccagtcaaaagttagtatctttactcggttatgatatttcgttttaagttttgtttcagaaaaagtgtcttcagtaaaaattcaatatctctctcacttttgatccattttaaaagatctttatctcgttttaaagcttaggaaaatagctacattttttatgaagaaagtattgtctagatcggggtgtaactatttttaaaacttttatttttgggctgtattcagaaatcggcatgatccaggattttaaagaaactgttttgagaaaacatgcataactcctaggttatagctccgattttgatgatctttataccgttagaaaggtctttcaattaactaaaaactttgtgaacagtaggacttctaattcaaacgttttatgagtcaaattctaggctaaacttgctgtacagtaagagtaataaatatatt

SEQ ID NO: 339994 - DNA, 740 bp, Cannabis indica
agatcctggtaaaataaattccaacaggaggaactacccggagctcaaacgatacgcagggggccgtaaaacacgaggaggtttgggaggttactcaactcccagctcaaaggccccggctcatggaccagcccattacattcacggaagaagacgccaaaacagtgcgctttcgtcaccatgaccctttggtcatagagacccccattgccaataagactgtggccagagtcttgattgacaacgggagttctgtgaatctgttattcaaagaggccttcactacaataggcctaacggaccgagacctttcaccaagtggttcccaactcacagggtttaacggaactacacttatcctgatgggaaaagtgaggctcccagtcaccttgtgcccggacaccccccaaagcaccttcaaatactgcacgtttgtggtggtggactgcccaacaacttataatgcaatcctcggccgaccggcccaggtggatttcggtgcagtcacgtcgatacggcacttgtgcctgaagttccccactcaagaagatggggtaggaactgtgaggggaaaccaaggcgaggctaggcagtgttacaacgttgctgcccacctacccgtcctaatggtccaagaagttattgagccagaaatggcggaagaagatgagctggatcgctgcgtgggatctgaaaaaattgtagaaccaatggaggacgtcgaggaagtgtcagtgtgc

SEQ ID NO: 339995 - DNA, 851 bp, Cannabis indica
gtgcccatggtcagcaaggggcattgatgcctttgcatcaatactttaataatgtggcggacttcttcggcctctgcccgacccagttcactcctaagggcatcaaatatctgtcggccctcttcgtcctctacgcttcctagaaatggggtatgccttgtcctcacgaagttgcctggttatttgatttaaagtccacccccaagcaaggcaggtcaaggtacttgtatttctctcaaccaggcttcaagtggttgatgggcacggacgattcgaccatcagcaagattgggcgttttgttgattagtacttcatggtggatggcacgggcatcactcgcactcggttccagcagattccgacatatcaccaccctcccctcactcttgctcccaggatagagcacaaaagcttactcgactacctggggaagaccggaatattatccaattgacctccgaggataattttgtgaagtatgggctctatccaaaggacttcattcctaagtccgtgacggggaagaaaaggaaatctggtgatggacgggccgaacgagctcattcggagaatgagttgattcaactagagcgtgaggctaagttaaagggaggtgcaagggccaagtagtatgctcaggagcccttgaatcttgaagatgaggctgaggaaaagcaggtgactccactaaagaggaagaagaaactttagtccccgcccaggcctgttgaacatgccattcgcataagggagcccatttcacctgctcggccgtccctcccgtgttcagtaagggaaagctgttatgtctgaaatagatcgatgtcaggtgatgatgaactttcgagtc

SEQ ID NO: 339996 - DNA, 780 bp, Cannabis indica
tcatcgaaccctatgggtctacgctgggtatactctcgaacaggagggacataatgaattactaaaggagacttaccagaatgtgaagtactggtgtcgggagcaccagtgttgggaactggggccacaggcttgggcctggagggcctccgctctggaggagcttctagacgaagattcctcccgactgccgcctgggccttgatgtaggccagctcctgttccctcctaaagaggtacttctggtaccggtcctctaccgaggcgattatgtccacccggagcgccctttccgcagccggagtccttacattcgggcagatgaccttggaaagattgaattcatccaccgactaattcttggatatcagcttggccttccggcagttctccgtcgtgaccaagtccccaacattgagggcattcttgtcatacgtggagaaagtcttggcctgctggaggaatactccagtaggtgtggtccgcatgtaaggagggatcctaacccactccgtaagaagctctgggcattttatggcctggaagctggaggaaaagaagaagcggtggctgtactccttcacgcgcttttgatggttgaaagggactgggccctcgttcaaagggtgggcccggaggccataaaatccgtctttaaatttgtccaccttcttggggacagaaacaagttcataaaagtacaaaatttcagccggactgggcaaaccccagctctgggcagcatacaaaatgaacaagcctgaaagcaggcggtaagct

SEQ ID NO: 339997 - DNA, 1049 bp, Cannabis indica
ttaaacattttgtttaccaatttttggtaggtagccccaccatttttagaccaaacgtcatgactttgtagcaatagagacccatatctgtttgaaaacttgtaagttcttggtcttgtggatgcattttgatttgattgtagcccgagtaagcgtccatgaagcttaatatttcatgccctgctgttgcatctacaaggtgatcgattcttggaagtggaaaatagtctttagggcacgccttgttgaggtctgtgaaattaatacagactcgccatttcttgttcggcttgggcactagtacggggttcgtgacccaagccgggtaaaaagcttcaataatgaagttgttgttgcctagcttttcaacatcatccttcaaggctactgctcattctttgtccaacactctttgtttttgttgaactggccgaaagttgggatcgatattcagaacatgtgaaatgatagaaggatcgattccgaccatatccgaatgtgaccaggaaaaaacgtctaggtttgctctcaaaatttttatcaattttgattttactttgagcaacagaccttttccgatctttagttttctcgtcgggatatctggatcgatttcgatctcttcgaatttttgtactgatccaacattacagcttgggtccccaagtcgaggatccacattttcatctacgccttgggaaattccctacttgggaaatttttttcccttgtctgtgctctggctgaaggatacttccttcttagccttggccactgcaaggttataacgttcccgagtagattgctggtttcctctcagacaccctaccccattctttgttgggaacttcagaaacgagtgaaatattgatgtgacaacctttaagtcatacaaggctggccggccaagcattacattaaaagctgaaggaacatcaaatattaggaactgtgccatgatagttatgctcgtcggagcttgtccaatagtgaggggtagacggatttttcctaggggttagatctttgacttggagtcccatcttttc

SEQ ID NO: 339998 - DNA, 530 bp, Cannabis indica
gaaaaataattccaagtttaaagaccgcttggccggccatgatgtcttgaaaaaaaggccttatggctgaataagatatataaaaaagaaggataaaaagagaagtagttaaacagctggagtcccaggctctcgggtcgggtcttctaggccggtaggagctggaggatctgttgtctgagcggaaggaacattaacattctggccagaggtagaagcagtcttctcaggttcaccataagccacttgggaagtgcaatactcgagaaacatgtctttggcttcacctaagtaatcaaaattcgcttgagggttagtctgccaaaaatcataaaagagctcgagaccggctgtctttaaggcacgaactttctcttccagcctcaccacctcagttgtaagctcctcctccttagacttcttctcctcttccagccgatggaagacagctcgaagggccgtcctttcatcttgaaggctattcacttctgcaaataaggtgccgatggtctcttcaagtcggtcagaag

SEQ ID NO: 339999 - DNA, 702 bp, Cannabis indica
tttcactttcggaggtaactgtaaagcccaaaaaaatttctaccagcttttgaaatcatcagaagatgattcccgattcttctcggagatagagtttgcaagatggaaacccgtctttactgtatataccccagtcgtgttgtggtgccaaattagccgatcttgtgattggtaaaagcttaagggaattgtgactatacgatcgatgtcaatttgagcaaaattatcttgaagaagaggcaaattccattccatggtgtcaagaatataaatatgataaattttattaaaatgaaaacaaatatatgtgaggatataaatttaaaatatatatattttataaaaataaatataaaaaatatgtgagaataaaaataaaaattattaatttataagaacaaaaatacaaaaaattaattttataggggtaaaattaaaattattaaaaaaaatgagaaatgtaagtaaatggtcatatttctaactctatagatagttaatgtccattttttaaaataataaagcaaatgtccttttttactttttaatacctgaaatacccttcattatatcaaaggtattgtatgttttattcctatggaaaacaataaatcaaaacctctctactgaatttttgtcaactattttttcattatataaaaggtattatatattttattcttttagatttttgctgctgtt

SEQ ID NO: 340000 - DNA, 734 bp, Cannabis indica
atatgtttagttctactagaaatactggattttttgccattgctatcgctgatttgctgtcgcaatagatctttgtagcttcttcttgtaattctccaatgtcttcaagtattcttttgagtcatatagcttggcttgtagtcattgctgctgcaatgtactctgcttctgctgatcattgcgtaacagttgcttgcttctttgagacccatgaaaatattcctgatcaaagtgtgaaggcatatcctgacgtgctcttcatgtcgtccatggatcctgcccattcattatctgtgtagccaacaagttttgagtcactagtaactccgtaccatattccgtagaattttgttccttgcaagtatctgaggattcgcttggctgctccgtagtgaacttgacttggatcatgcatgaatcttgataggagactaactgcgtacattatgtctggtcttgtagtagttagatatagtaggctgccaattagacttcgaaattttgattcatcagatagcgtctttgtatacttcttttgtgagatgaagattccatcttctttttgagttatttcgatcccgagaaagtagtgcattaatcccaggttggtcatcttaaaatttttcatcatgtcttctttaaacttctttatcatcttctcattattgcatgtgtagatgagatcatcaacgtataaagagacaattagtgtatcattcgcaccttgagttttg

SEQ ID NO: 340001 - DNA, 837 bp, Cannabis indica
tctttacatgttctggtgcgctgccggtttgctcaggaatgctggggcgtgtctcgtgtgcctacggttgctgggactgctatgacattcacggcatggttcgaagagggtttggacaactggacgatggctgagagacttgaagcttcgatggtctgctggtccgtttggaagcacagaaacgagatggtttggaactccacaatgccgactgttagtgatgttgtcacattagctaaactcaactttattgaatggtataatgcccaaaaaaataaccaacctactcctgaagataatggttcggttgatggtaacttggagcattggacccctcccaactttccttcaataaaagttaatgttgatggtgcaattttcaccaatgaaaggcgctttggaattggtttggtggcaaggtcttctactggtttagctattcaagccaaaagattaagcaaagtgggagctttgaagccacacgtggttgaggccattggaattaaggaagctttgagttggatcaaaaccaatggatggacaaatgtggtgattgagtcggattgcttgagagtcatcaaagacttacaaagatttaaaaatatggcttctccttatggccatataatttcagactgtatgactctgtgttcagatattgttgatgtttcttttacttttgtaaaacgatctgctaataaggttgcgcatttcttggcgcgatcttctctttcagaggctgattgtactttttctggggacgctttacctccgagtattgcttccttggtctcagatgatttgatttaataaaattcatcatttttcaaaaaaaaa

SEQ ID NO: 340002 - DNA, 802 bp, Cannabis indica
cgtatattatgtaaataaaatcaaaaaaaaaatcgtaaattgtttaaaattccgtgaaaccgtatttttgttgtttttttgttgttttttttgtggtttttgtgcatttgtgaaattaacccaagaaagtaatctggtggaaaaaaaaaataaacatatttcaacaaaaaaggtatgaaatatcaaacttttcattttacatatttataattaacacattcatatttaatttataaaataattttcatatttaatattcagttgctatgtaggctccaccctatgtccaacaattcttagtttcttaaacctatcacacaccataattttggtataccaggcatatcatgtattgggcaacgaacccataattttaaagaaactttacaaatggattgggagtttatccatactcacgaattttaatatagtattctctattttatgtttgatcttactatcttaatatgcaaaatgtattatttctctacttaagatttaaatgtctttaaaacatataaatctttacttttatagaaatataatttatgtgagtagtaatcgttaataaatgggatgcaaaatttgagttcatgtctacacaattaattgacttatatgattattatgatagaattctaatatacaccgattttgacttgttggaatatattttcttaataaaattcacacaagttctaaataaagttagttaaatcaagtgtaataaatatctctaccatttactaatatttattctatttatggagatatgttccataatctttggtgctataatgta

SEQ ID NO: 340003 - DNA, 838 bp, Cannabis indica
ttatacttgagttggattgttagggaactccaattcaactttttgagatatgtctttcatggatctaaaaattgaagtcaggacattagttttatgcaaattaaactgaatttccagttgaattttagtttcatagtagtttttctaaattttttttatgaattcgaaacagcccatgttttgattgattctggtcgtcttctcaggtgaagtcgccagaattaatggtagttatctttctggttgaattttcgtttcatttgcgttaggttgctgcgtagttgcacgatggttgcgtgatagttgcccaggaagcatggatcctgggttaaatgtgtgtgtaagtgatatttgtgtaattttttttatttgggctgtatatttgtttattttgccagttggaagtatttttataatattgttattttttttggttaaaatttgaaaaaaagcctaatataaatatatatatatatatatatatatatatatttgagaggagaggagaggagaggagagaagagggaataaaagataaatgtgtggtttgtggaaagggggggggtgatgagcatgagggaatatgcctccaataatttagtcacgaattaaacaaaacaaggggtgttgagtcatggtccgccaacgttaggttggtcgctttcaattcttaattagtggcggcacaaccttcaatcatatactctaccctcacacacctcaccttaattattatatgtatatttcattttattactattataatggtaaaatactaccccaacttcctaagtctttgattgttgtcatgcattatataatatatataaataatgca

SEQ ID NO: 340004 - DNA, 1392 bp, Cannabis indica
aatcacgtaatacgcctatgctagttagggtgttacaatcatcttttctcctagagcctcgtattgtctagatacatgatttaccaccagctctgaatcactgcagatttcgatgtgttccgctttcatctcccgagctagttttaggctagtgatcaaagcttcatactcggcttcgttattagatgccttgaatccaaacttgactgcagcgtgcagatgttggcccccaagtgtgacaagggcgattcttgtactagatagttgatttgtagctgacccgtccacatgtagtttccaattcggcttttcttcactattacttggttgatgtgttagtactagctcggggttgcctttcgagatgatttattctttgcctgtgcattctaccactaagtctgctagggcctggcctttgattgttgttcggggttggaaggtaatttcgtactgacccagctgcactgcccacttgagtaactgcccaaaagcatcaagtttttgcaatagttggcataatggttgatcagtgtatacccgaacaagacaagatgagcttgaaaatagggccttaactttcttgttgctagaattaggtagtaagcgagtttctctatcaacggatatccgcctttggcctcaatgagtctcttactgatgtaatagaccgagtgttgtatgttgttttcttctctgatcagcacgtcactcacaacatgtttcgtgacagccaagtatatcccgacttcttctccgttcagaggttttaagagtacgggaggctttgcgagttacatttgtagctcctaaaagctttttcacattcatctgtccactcgaattgcttatttcctcgcactcctcgcacgatgttgaagaatggaacacacttgtctgttgatcttgaaacgaatctgctgagtgcggcgatccaaccagtcaaactttgcacttccttggttcttgttaacgacttcatatccaggagggcttgaattttctctggattggcttcgattccttgggcattgacaatgaagcctagaaactttctcgagctgactccaaaggagcactttaagggatttagtttcatgttgtacttcctaaggactttgaagcattcgtccaggtcatctatgtgccccccaaccttcttggatttaacgagcatgtcatccacatacactttcatgtttcgtccgatctggtctttaaacattttgtttaccaatctttggtatgtggctccgacatttttcaaaccaaacggtattactttgtaacaatatagacccatatctgttcgaaaacttgtatgttcttggtctggtggatgcattttgatttgattgtaccccgataagtgtccatgaagcttaatatttc

SEQ ID NO: 340005 - DNA, 743 bp, Cannabis indica
tcttgcttttactgggtcaaaacgaccgtgtattaaacacgtctttaattgtcatatctgaatagaagcttggttccaataatcataatagccagctggggccattttttccttccaaggttgacaatacacatcttgtaatgaccgttgttcttatttacatgggattcttttaggctcgctttgattgttggcttctgaattattgggattgtaagtctcactgagaaaatatttgaagtcaactgaatgaagttataggaagccttcccatagcgagataagcacctcccttattaggtttcgagtcagcgtgattgtgacacttagtttgtacattatgcactaagttcttctgcagttgatatgggtctcttttatcttcctagaagtaatgtacttgatgcctcactatttacattcaacgcatatagtttctcgctaatatactaagcaacagtttgtatattgactcctcgcataagacgttacagttagcaggttataaatattctctgatacttacataattaatgagttattccataaaaatcgattgcatcgtccatattccttttatcatgacatgtgtcttccactgtgatggtagccgaatttcgggtataacatatatatattgattatccaataataacaaaaagtttatttttttaccgatctatagtatttttgttgtatttttaaaaaaaattaatatattttttacaaaaatatgaaaggtt

SEQ ID NO: 340006 - DNA, 693 bp, Cannabis indica
actttacctagatagggatccaaatacgaacatggactcggaccaagacccagactgggatcaaaatgctggacctagatctggactgagatcgtgacccagacctaaacatggacctagacccgaacctagaccctgatcggggttcagacgtggacaaaaacctagacacagactcggacccgaactcaaacacccacacctcgaatcagacccaaagctagacctggaccctgacccaaagtcgaacccagaccaggatcagaaccaaggacttagacccaaaactgaatccagacttagaccgggactggaacttgggattggacccaacctagaccaagacctaggacgcgaacccacatccaaagcctgatctggacatagactgacatccggacctgaacaaaaactcagaccaggactcgaactccgacccgaactaaaaccgaaactcgaactcagaatcgcaagtggaactagaactgaactaggactaggacaaggacaaggacctaaactgaaacctaaacccagatcaaaacccagactgagacctaaacccgaacctagacaaggactcgaagccgaacctagacagggacccaaaccaactcaataaccgggaactggacccataatcaggatagggacctggggaaaagaactaggaccgggacctagtacacgacc

SEQ ID NO: 340007 - DNA, 839 bp, Cannabis indica
gctcccaattcaggtctagttcttatttgggtccttttccggttacggttctggatcttggtccaatttcagttatgagtccaactccaagtcctagttcaagtcccggtcaacttcctgttttggttccaattttgggtcacaacgcacgggtttgggtccacttttaggtttgggactaggttcaggtcttggtgtgggttcggttccttgttagggttcgggtccaaggctgggtcccgaatccaaacaccaactacaggttttctccaagccctgggactagattcgaatgccaatctcgggtcccagtcttgttccatttatggtgctaggtcatgagctaggtcataggttcaagttcgggtccgggtcgtgtactaggtcccggtcctagttctgtttctcaggtccatatcttcattttgggtccaggtcccgattattgtgtgggtttgtgtgccggtctaggtttgggttcgagtcctagtctcagttaaggtttcggtctctgtttgggttttgatttgggtttgggtttgggtttaggtcatggtcctggtcctagtcctatttcgattctagttccatctgcgattctgagttcgagtttgggttttagttcgggtcagagtttgagtcctggtctgactttgcgttcgggtccagatttctatctacgtccagatcaggctccgggtgtgggttcacatcctgggttgttctggattcagttctcggtctaagtccgttgttctgatcctggcctccattcgtgttttggtccgggtccgggtctaaatttgggtcttattctaggtgtgggtgtttgagttcgg

SEQ ID NO: 340008 - DNA, 624 bp, Cannabis indica
aggggcatgtgttatagtgagatttctctcacctagaaactcgagaccagactcttatttgaaagacacgtgcagttagattttccaatgaaggctgagacgtttgtaagagactcctcgaagttttaaacctcgctcaagatagagtcagcgagatacagcgagcatgaccaaagtctgattgcatgattataactcgtattatgcaggacacgagagtaactcgcatgtagcgaggtatgtgcgagtatcctctttgtgttcatacataagcatagagatccactctcaataatgcgagttggtcccaatgacccaacagccttgataaaccgatatagactcgtatgtgtaggttctatcagctcgtcatacgatgcccatagaggcaactacataagaacgcagacatcctaaacgcaattaagagttaggcccgcgagcttaacattagaatatgaacagtcaactcgcatgttaaaagggcgcatacattgctgaattaagaaacagctattcatttattgatgtttacgttatttagtttattgtaattcaatgtgtaaacggattgacaatgaatgcaatctttgtataactaattggatacctgctttgtatata

SEQ ID NO: 340009 - DNA, 920 bp, Cannabis indica
acatcggaatgatgaacgttccgttgtctagagttagaacgacctgtggatgtcatcaatggcggaataggtagaggtaatgtcatacctctcaatctattccctaaagctgctggcccccatgtcggaaaaacttccacgccagcagcaacaatggggcactttccacccatcactccggcagcagtatccaagggaatcgtccagctcaccaccaaccagtataccgtgatctaagaccagctacgcgccctgcaggccgaggtagatggacaaaacagggcctgacgccctcctcgagcccccactactcgcacagaaaaccctcacgtaacaaattctagacgtcgtaataaccgtgttcgcagggaacgaagggccaaccccgaaggactcgacctgaatcagccaacctcgagagaccaatctgcgaggtatcccaaccaggagacacagatcgatgaagaccccaaacgatgcaaccctcgcagcaggccttcgcgagacaatgacgtagaatccacctcctcgtcctcacatggtcgcacacctagctggtacacgaggtccggttctgtggagacgcaggagggaggatgatatcaggttcataggggtgatctacgtgatcaccttaacgctgttttcagagcatgctcccacgcccctcgtgacgaggaagcaccccatgatccccaaatgggcgatcaaggtgtaaacactcgcacaaacctacctaacgcaccagcagcgactaccggggttaatgtcccagcaaacctcaccgcagtagccacagctcctccagtcgcagcagtgctggctcccttagccggaggtattgatcaaagcatgctcttgcaagctttgaaaatactcgaacaacagagaaagcccatatacaagctgcatgggacctc

SEQ ID NO: 340010 - DNA, 786 bp, Cannabis indica
tttagggcataaaacccagcatgcatgtcatcccatgtgattattgatcctggtggtaattgtgtataccaagtgaatgcgacccctttaagcgattgtacgaattgtcttatgagtaatggatctgactgagcagattcaccacatgctgagacaaagtacaccagatgttctttgggggacccatttatcccatcaaacttttcaaattgtaactttatgtaatttgggggatatggaacataatcataatgagacgggtatggtttatgatatccaagaataggcatgtttgttgtttcataacattcttagatactttccatgattagtgctttcaattcctgatgaggtattgaagttgatggtgtaggctcttttgaacaaaattttgtgttggcaaagttgttgacacttgccctagttccgcttgctcctgtatacttgattgttcctttaaaaaaggttgtgtttgcaaagttgttgacacttgcccctgttccacttgtttttgcttacttaaactagcttgtttagctaattatgttgtaagatattcaacttcggcgtctttctttgccaactttctttgcaactctttaatttgttcttccaaactcatcgttccattaacaaagactaacatattgttagattcaatgctgttacatatcactaacttccttgggaaagtcttctcattatttgtagatgggacattgcgatatgagtcactggaacatttaatgaagcttttggattgaactgctaagaaactggggcact

SEQ ID NO: 340011 - DNA, 320 bp, Cannabis indica
cccatagagcgaggattcgtacagacactaatgggggaaatacgacaaactgctcttagggggaaagaggagagcgtgaaaaagtaagtgtgacctcgaggtggtcaagaacccacagttgatcaactcgaagaggagaaagtactcaacgaggtaatgatcgagaaagtatgggaaccaataaatccgcgagtcactcaaagacaaagtctatgagtaggacgcgatctgtgagtaagacgaggtctgccggcaattactctcaaccggatatgcaagagcacttgaactggaagaaacctgtgttgggttttatgccc

SEQ ID NO: 340012 - DNA, 767 bp, Cannabis indica
aatcattcataaattaactctgactaaaaaaattcaaaaaaaaaaaatgtattacttttattaatcatatgaaagatagaaaactataggatgagtgcttttaattttttttgtaagagagagaaagagtgttaaaaaacgagatataaaaatgtacacttattatgtatatagaggaggtttcaatggttacatcaaatatgtaaccacggtggttatattaattttagttgttggatcattgttaagcgattgcgattaatttaaaaattaaataaaaataattaataaattacctataacctgatactagcctgattttattatttttttttatgatcaaaaaataaaaaaatatttgtaaaaattagttgtggaaaatgtcttattaaatattttaattagaaaactaatttattaaaagtatataattaattttaattattttgagtttaaaaatagaatatttacctgttagtagcttatttaggaggctatataaaaatgtaaccatcatagttacatttttaatgtaaccattgaatagtaactcatatatatatgggtatgctcttaatgggtattacccatctatgggtattttattcttgtaacgcccgtacttttataaaaatattaattttatttacaagcgttaaacgcggaaaatcgtaatgtcgcatttttatttaatacttgaaaatgttcacaactggccagttttcgtaaaaaaaaaacaaaattattaataactaaaataattgcga

SEQ ID NO: 340013 - DNA, 1157 bp, Cannabis indica
gtatactgttacctagtcatgcctttcagattgaaaaatgctggcacaacttatcaaagaatggttaacaggatgttcaaaggcctcctggggcgaaacatggaggtatacgtagacgacatgttagtcaagtctaaggcgtgcaatatccacgcggacgacttagcagaatgtttcgaagtggtctggagatacggaatgaagctcaacccaaagaaatgcactttcggggtcaaatcagggaggttcctgggcttcattatcagtcagagagggattgaggcaaatccagaaaaaattcaagctcttctgagcatgccatcccccaagaaacacaaagacgtgcagagtctaaccagaaaggttgctgccctgagccgttttatctctcggtccacagacaagtgcattcccttcttcaacattttgaagaagtgccagaagtttgaatggtctgacgagggcgaggatgcattcaaaaaactgaaagagcacatggccaagcctccaatcttgtcaacacccgttctcggagagcacttgtttctgtacttggctgtctccgagcacgcggtcagcgcggccttagtctaggaagaagagaaaactcaacatcccgtgtactacgtcagtaagcgcatgatgggggcagagacgcggtaccccgtcattgaaaaattggttttttgcctcctaatggcctcgaggaagttgagaccctacttacaagctcacccaatcaaggtgttgaccaatcacccactccggcaagtcctacaaaagccagaggcgtccggaaggctcctcaaatgggcaatggagttaagtcaattcgacttacactacgtaccccgtatttccataaaggggcaagcgttagcagacttcatcactgaatgtaatgaagccgaagcaaccgcgaacataccggcaccgtcggtcccagcatggaaagtatttgtggacggagcctccaacgaaaatggatccggagcgggggttgcaatgatatctctgagtggatttcgactccaagcagccctacggttcgacttctcagtttcaaagacgaggccgagtatgaagccttgatagcagggctgagattagcaaaggctgtggggggccaaaagagtagaagtctacagcgactccca

SEQ ID NO: 340014 - DNA, 568 bp, Cannabis indica
tgtgcaatttgatacaatttcatcactaaagaaaattatatgaattcttggatgtaattaaatgtgacctcaaaaatatatatagttgattaattatatttcaaaaatatttgaaaattataaagaaaatcttatgtagggtacacacatatataatatatttcttttaattatatgaaaaaataaaacatgcatgagcatatatagttgcactttttggaattttgttggttgccattcgtacgtaattaaaaaataataattaaaaagaaaaaaaaataactatgtgttgaagggaagacaaactaacttttaaaaaccaaaatggtcaaagtcaaccatctaccaattccatgagaagactgttagattgagtttgtgaggaaaaatatatattttgaccaaaatacccctacccttgtgttatgacttttgtctatggtaagagagacattggtacgagttatctaattaagtaggaattagtcacattcatatataaaataataattgcttcaaacaaaatatatatataataattttaggagatttttcatttttacacttc

SEQ ID NO: 340015 - DNA, 729 bp, Cannabis indica
ttttcgtaacacgagattgagaactcagttcagatgagtttagagagtttgagagagaaaagattgagaggtagagagagatatgctaagaaaaagagagagattgggtttgagtttttgtatgaagaatcttctatagatgaagaagattcttgggtaagagtgtgaaagttgaaacactttgagagaactcttcaaagaatcgatctcaactttattatacctattcttactcaatcaataaagagaatttggtggtgtttaagaactggagtagagccatatatataaggaggaggttctaatagttgcattaattatgtaaccatcatggttacatttttttagccattagattactattgaatggttgtgattaatttaaaaattaaataaaaataaataataattaacttataacctaatagtcacctaataatttatttccttataaaactttaatgaagattaattatattttaaaattaaattaattataattattaattaatttttcttaatttattattagataaggatcttttagcaaatttttctgtccttatattattaaaattttataggaactctttataatttaaaattatacacacatactttcataattaaaattttattacacttataacttcaatttaaaattattacacttaattatttagtttttttatttaaatatttaaaaagtaaaaagtgaaataagttgaa

SEQ ID NO: 340016 - DNA, 1019 bp, Cannabis indica
gactactgactgtcacaaaaaatattttaatgataaatgacttcatgtattattatgcataatataataatagaagacgaacatgatctaaatgcatcaattgaagagcgagtcgaagtgccaagttcagaagttgagatagtagaagatgattatgtttggttttaaaattttgttgctagacatagaaaaattaaggataaagaagctcacacttaaatttcgaaatgcattagtcaaatacttgtaagacgaatatgacaactcacaaaattagtatattataattaatcttttcaagtgtattttaggtttagtttgatttaatgtaatttctttcattatgaatgtaatattttttctctagtaatgtaatatttatgttattgtaatatattattttaacttatggagttttaccgattttacagtattattatctttaaattaattaataaatttatttaaattattatttagatataacaattgtggtaattttagtaaattaatataatattatttttataagtatttttttagtgttgtagttggaatagaaataattttggggtatattaaaaaatacctcttttatttatcaattaaccaaatttatttctaatttatatttaattgaaacatacatctttttatatgtactatactcaaaatatattgacataagggactcacatggagggtacattgaagtgacatgagtaaaattggtaaaatatttaaaaaaaaagtgaaaatgatagactttaaaaaaaaaagataaaaataaaagaggataatataaaaagggtataaaatctaatttctttaataatttttgacactaaatttatttaatgattttttttttttgaaaggaaatttatttaatgatagtgccacaccaaatataatgtcatgatcaaatatcaatttataatcccatttatgagataattacataagacactattttttgtaaaaaaaattatacatttacgttttaatttttttttttt

SEQ ID NO: 340017 - DNA, 623 bp, Cannabis indica
ggattatagtttcaagagcatatatacatatgtttttgtttaatttttttctcttatatataagaaactaggtttatctgttggcttaattaattgagttcatttgatttaataacaacctaattatataaacaagtttatctttattaaggttctaaaaagctttaacactttactcatgatatttatcatacggttttccttcttggagctatatgaatgtgaataattgctatgattttgatcaatagaacaaaactttgtgatcataatcaacgtcgtcgttttggtttgttgctgtgttatgtcattttggtgatggcattgtcgtttcactataaatataatcacaataaaatgatttgggatttgaatccactcacaaataaaatggattaagaaacgataataataaagtgattcaaattatcgatcccactaatatatctaatcctcttttcatttttttcattttttttaaggactttttacataaaaatcaacaaaaatatcgatttttatgttttatattttaagaaacgtatagtacgtagagcttcaaattatatatgagcccatttaaaaataaaaaaaaatattaatattagcggtttatttattta

SEQ ID NO: 340018 - DNA, 1332 bp, Cannabis indica
ggtaaaatatatccaacagttgtgtctggtgagtgggtaaagccacgagccttttacttgtaattttaatcttcttgtaaaactgtaaaacaagtggtccaagggagatctaattttaacaatttccaccttagatttctcctgggacacttgttcttatagtgcatcattcttcaagggtcttagctcatagtggtaatggtcatccaccattaccaacccctaataagtccatgcagtgcttgaacttggttaggggtagcaccttagtaccgatatcagatgggttctcttcagttgggaccttctctatctgtacagctccttgtgtcactttatctcgtataaagtgatacttaatttccacatgtttggttctgtcatgaaagacaagattcttacataagtggatacaacttttgctatctgagtagacaataggttcttcattaagtagctttagttcatctagtactcctttaagccaaatagcttccttaatagcatcagtaacagctacatactcagattctgttgtagataatgctaccacaggctgcagttgtaccttccaactgatgcaatttccccatagtgtaaagaaataggcagaggtagatttcctactatctctgtctcctgcatagtctgcatcactgtacccagtgatcattctgctcttgtcccttttcttgtagttaatccaacttcaatagatcccactaagtatctgaacaaccatttcattgcttcccagtgttgtttacctgggtttgtcatgtacttactaagtacactaatggcataggctaagtcaggtttagtactgaccattagatacaccacagatcccacagcactagaatagggcacttcactcatagcttccttttctgctactgttttaggacattggtctttgcttaggtagtaatgattagtcataggttgtttagtttcctttgcatttttcatagaaaaattttctatgactttctttatgtagttcttctgatgtagccttagagttccattctccctgtctcttgtgatgttaatccctatgatcttagctgctttgcctaagtccttcatttcaaactcttctcttagcaaacccttcataaggtcaattctagacctttctttgcaaacaatgagcatgtcatctacatacagaagtaagtagatgacttcttcaattttagtgcccttgtagtatagacaggtatcatagtagcttctagtgaaccctttcttgatcataaactcatcaaaccttttactccattgtcttggtgactgtttaagtccatagagggacttaatcag

SEQ ID NO: 340019 - DNA, 755 bp, Cannabis indica
ctaggacgtccctatcaccaccaaacaaaatttaattagaaatagactgtctgtctcaacgcattctaataaagatttctccaatgctgtcaacaacatggtgtagtcgacaacgttcaatatctcctccaaatatcgagtgtcactatcacccttggtgattacaggatcccctccatcctccacacccataacatctccgaacatcgcggcaaataagtgaatttttcttccatacaaatccagtatgctagtggttgggtcaacatgtttgattaaccaactcactagtcgggtgtcaatgtatgatgcatcctctctgatgaatgatccaaatcaaggatttaggatcacatctttctgctctaagttcaggttcttgcaaatccgaattaaacggttgaaggagcattgaccgtacataaacacttcttcagtttcagcggcaagctcttcctaatccacctccaccttcttccccttactctcaactgcctttgctttcctccttcttgtttacactggcttcttggcgggagtagggttagggtcatattttctccacttagttttctcatcgtcggtgaaacctttaaattacacttttaatttatcagtaacctgaaatatgagacaaacttacatcaactccagagtacatggaaagcatgttaaagtttttcaaacaagtacgatgaattaaggacaattgataaaaaaaattgagtaacagtcaagatcaaacctctttttca

SEQ ID NO: 340020 - DNA, 839 bp, Cannabis indica
ctgcctgacgaaaattccctgtcggagcagcaactttctccttcaaaaccccagcctccagtccactacctaccgtcgtagttgccaccttcaaaggttgttgtcttctccaagtacccctacgttgcttcccatttaactcccactcagggacatctccgttatcaatgataagcttagttacaccctttcccttcatagtaaaacaattggatctccccgtctctgatttaatacaggtaccatacatttgaacagcctctccaatcttggggatcaccatatccaaaggagcagagcattccttattccaatgagcaagtttcccgcagttgaaacacaaatgagggagtttctcatatttgaattggatccaagacttcggtttaccgtccgtagtaagaaaaaatcaagaaggtataggatgtttcagccgcacatccacatacgcacgaaggaaacctcgattgaccagttcctccttaggcttactgtccgttttcaagaaagagcccaccttcttccccataatagcagcattttcatccttcaaaaaccttgtaggaagtccgtggaactggacgcaaaagcttgccacttcgaactcggccacccagacctcaccctccactggccatgggttaagattcagtagcacactattcaccagccacggtctcttttcaagcacaaaagcacagtcatcttcctcttcaaagaagaaccccataacaagaattttgttggtttattggggtgtaatattcattccaagcattttgttgcttggaatatgttttttggggtgtgatatacaggtctggaaagtttggttgagt

SEQ ID NO: 340021 - DNA, 902 bp, Cannabis indica
ggacgaaatcctttttaggggggatagttgtaaggactgcttagcttaaatttggaaattaacaaataaatagggtttaattatgaaaattatttatttctatttaaataattatttatgttgatttatttgaattcataatgcatttttatgtcatatagtggtatttcataattttacattttcggtgcccggtaacatggaacacggtgtatggctcagtagaatcacaatctaatattttagtatagtgggacggttttgttaaacattgtgaatgtcgggattagctgggaatttagagttttctaaaatacccttaagtgctttataacccttttaatgtgggaggggcaaaatggtctttttgcccatttatgttttgtcctttagtggactttattttaagttaatagtcagatttcttatgtaaataataggctgaatatagtatgtaatgaagtcattttatcattttatcaaaaatcaaaagaaaggaaaaaccaattcattttcaaagctctttctctatctctttctttcggcccctttgagcactaagggtttgaggttttctttgtgaattcaagctgattttgagggaaatccaagttctaggtatagctcttgtagcctctctttagtttcttgtaatttacgaaagttattgttttgcatgcttggagtttatgcttgctgtgatttctatggttgattgttgttgtgttcagaggttaaagcatgtttgattgagtggattcaagctggttttgttgctattagttggatttaaccttgtgtaaagctttgaactccgaactttggtttttaatggtgaaatggtgatttagctgctgtagttgctatttgagtttgggtttgttttctaatgttatattatg

SEQ ID NO: 340022 - DNA, 525 bp, Cannabis indica
tttggttgattgtttgtagacattgcaggaaatcaatcgaaaaagaaacaattgagattgagcaagaaacgagagagagatcagcggaagaacacacagccttgccggagaagaagaacacggcttagctgggaaagaggatcggacaagaaagtataactttcctgctctaacaccatattacgaaaaggaattgagagcattttcattgatctaaattgattgaatacagagacaagatacaacactatatataggtgtggacaagtgaaagttagttaagtcactaactgtatttaaccgactctactgacacttaaaataagaaaaggaaagttacagtagtaactgtaataacagaaactaatagtaaccaatagaggaaataacaggattgcaaatcctaatatcatgcttgaagcttgggcagagactcgtgctgataacgtgttataaaataatataaagtaatattaagtagatgaaaagaaagaagaagatgaagagagaaagagaaagtgaatg

SEQ ID NO: 340023 - DNA, 708 bp, Cannabis indica
ccaaggtgaagtactaggtcttgtaaattttgaaatccatcatcccatgcaattggacttttaactctttcagctctgcaggtgccatcctgtgaggagctcttgatacaggctctgctcctggtattagatcaatctcaaaattaatttcatgtggtggtaaccccggtaactcctctagaaacacatccagaaatttcaaaccactgggacatgctccagtcccgtttgtggttccctggtaatatccacaacatttgctaagaaaccaatgcacccctcacacaacaaatctcttgccttaagcactgaaattaagggaatctgggatccctgcatcttacccacaaatacaaaggggtcctcgccctcaggctgaaaagttaccatctttcttttacaatcaatggtggcgttgtatttagcaagccaatccatccccaaaataacatcaaaatcctccagattcaattctatcaaatcaactgataactctcttccttccacaaatactggaagggatcgaacccacctgctggagataaccaactccccagtaggcaacaaggttccaaaacctctagaaagcacatcactacgcctattcaacttctcaattattctacttgaaatataagaatgtgtcacaccagaatcaatcagaacagtcaataaagtaccagcaacagaaagctaacctgtcacagt

SEQ ID NO: 340024 - DNA, 662 bp, Cannabis indica
tgcaaactttctactctcgtgataaagttaacatgcattaaacacaaaaaccctataaactatctaaaccatacaagtactctcgtactatatcgaaattcagttctatttcactatagcataattgacactcacttctcatttctcgcttcgaaatcataaaacagttaattaaggctagacaattaagagtattaagcacaaatgaaataaaatacatagaaattaggggaaaagtaaattatattaaaaccataaatcaatgttaaacaatatccatctaaccctaatcaagtgtttagttacacatgttcatggaagtaaaatcacacatattaactttaagaaagaaaagaagatagagaataaaatattgataaaaaccctttgtagaatgcctccaatattgaatttaatctcttaaatttgtactcctttttgcctctaaattgcttgactgatagtattttagccataactctctcgatattactcggaattagacgattcaagatgttccagaaagataaaagagagatctagaacttttgtgttttgactttttccaaaatttaatcagaagatagtcgaatttaggtttgaagttttagctctattttcttacacaattttctctattttacatatcatctttttgtgtg

SEQ ID NO: 340025 - DNA, 806 bp, Cannabis indica
ttattacgtgcaacacaaccaaaactaaatttttggtgagccttaaaagtcgcaccatcgacattcaccttgaccgtaaaaacatcaggtttacgccaacaattactatgtgaagtgtctcctatagcaaataacgcattaggggactcaaactttgtaattttccattggccaaggacatgttttgccgactttaccacctccaaagcagtctgagatttgttctgccattgcacttcattgcgagtattccaaatactccaacataacatagcagcttcaccaccacaacctcactgcagtcagcaagaaggtcaaaaaaccagctgctcaactcggcatttgcaccagcagtcgactggtatacagcagaaagtgcccagcaagatcgtgaaaaagaacagtccaacaacacatgaaatattgtctccacatgcatattacacaaaggacacaagagatcaacattaacatgtttagattgaagttgtaccttagttgggaggcaaccagaacaagctttccaaagaaaatgatgaactttagaaggaatgggcagctgccataaattcttccaacaattctcatcttgcataaacaaccaattccctctagatgattgaaggaacttgtaggcacttttaaccgagtaaaatcccaaagactccatatttcaataccaaccatccatagcccgagaatgactaagttgtatgcttctaatcaaatttatatctctctcttcaaacatatcattgagaatgaaaaactgtgtttttgcaaatgtcagttatatataagaaaat

SEQ ID NO: 340026 - DNA, 749 bp, Cannabis indica
tatagataaagttcttgacgatgaagtcaaggactttcctgcaggttatggatacgagggactcggcttccgtccatttagtgaagaaatcgactgctaccactgcataattagctccttctcgcccagttggtaatgccccaattaggtcaatcccccatatagtaaattggtagggcgaggtcatcattctaagttgggttggcggcacgcgaggtatttgtgaaaatttctgacatttatcacatttcttgacaaactcatgtgtgtccttattgatcgttgaccagtaatatccttgtctaataatctttttagacagactttgccaacccgcatgctccccacagaagccttcatgaatttatgtaatgattttgtttgcttatgcgggagaaatacaccgaagtataggggcattgaataccctcttctatatagtttgccttcgatcgttgtgtagtaaggcactgtatacaaaagtttttgcactttgttttgtgttatttggaggttgcctgtcgagtaaatagttgataatgggcgtcatccatgttagagagctatctatgatctcaacgtctttggtttcacatatacttagctctctcagcagttctacaggaaccaaatttacttcatctaggtctttctgtgaggtgagctttgctaaggcgtcggcattagagttttgttctctcagaatatgtttgattttaaagtaattgaatctttccaagttcttccaa

SEQ ID NO: 340027 - DNA, 921 bp, Cannabis indica
tgagtggccccaaagtaaaacaacatagaaaaataagagtttgaccgagagctgacttgttaccactgaagggctggcttctgcatctgcctgagttattgcaaacacccttgttggagtgggcttcactgcagtcttctgtgtcttagtcttgagttgggacaatccctttggtaatgccttggcataccacaccgaaagcatcctcgccctttacactcccccaaataatgctctttacaactggggcactctgggtaagtgtatcgggtttcggagccaccctgacagttgtctcgaccctggtaccctcggaacctcttgttctgacctgagccactggatgcagtaggcgcctttcttttctggtcaatggccgagccactacctcccctactaaagcctgatgtaggaggggtaggagccccaccaacaaccgtagtccctcgagactctaaggtgcacaccgctgcaccctcaggtggtgtgtcatcagtagtgatcattaagtcgtgtctgatctttgcattcaacccatccaggtatttctctttcttgctgaaatcggtcggcacgattcctgaggccaatcttgccaagcgatgaaactaagtcgtatattcagtaacactcatgttttctttttgagtcagcgggatgaattcttttctttttacgcttctaactgcctcattgtaatactttgcattgaacaactccgggaacttttcccaggtcatcgtagtaacatcttgggtcagggacaccatgtcccacaataccagagcgtcttcttgaaattagaaggtggcacaggccaccctatcattgtcagtgatgcccataaagtttaagattctggtaatcattgttagccattgctcgactttcatgacatcgggactgttggaaattatttta

SEQ ID NO: 340028 - DNA, 610 bp, Cannabis indica
agcttcccgatacacaaaagatagcctcatgattgtagaacctgttaataacttcctaatctgaagcaacaaaccatatcgaactgatggcagctttgattatcatttttttgcaatagttgaacagcctccctacaattcaattccaccccaaacgctgacaaacatctctgcaaccccacctgaaatcaatccctgatggcgcacaatttagccactaaaggggagctcttcgttggacaccaccgactggaagcgaacttaacactaccgcggtcattacgcaccacaataccaacacctgagcccatcgacagaccccaaacacatgcgtctacattgattgtacagtgaccacaactaggaaggatccatcttgctgtagcacactgctcctggagcttcttctgcagcccagcatcaccaaaatcatgcatgtaccttccacaccattctaacacatcacttgctctaggagccgaacatcatgaagtatggtgttccggatagaccacaaatgccaagaaaccaataggaattagtcaaacacatctacaaaccacactggttgtaatcctcccaaaaaagttacaactgttggaaattattt

SEQ ID NO: 340029 - DNA, 644 bp, Cannabis indica
gtcttatgcctgtaaacccatttgttcttaagagctttcttccctttaggcaacttcaccaagtcatatgtgtgattctcatgcagggatcccatctcatcttgcatggctccatcccactcattcttgtgctcatgtagaatggcttcttggtaagtttctggctctcccccatcagtgagcattacatactcatgaggattgtatcttgaagttggtttacgctctcttgtggatctccttactggagtctcaactggtggtggtggaggtgcttcttgatcctgttcagttggctcaccatcatcatgaacatcataatcaatattctcaccacgatcttcttgttcatctgcttcttcattgacatgctcttcatggttttcctgttcatctcccccatgatcatcatgcactatgggtgaaggaactgagctagtactcacaggaacattaggagggaacttttgcttctgaactttgtcactctcttcaaacatttgatcttcaagaaacaccacatccctgcttctgataatcttcttgttcactggatcccataatctgtacccaaactcttcatgaccgtaccccaagaaaatacatggttttgccttatcatcaagcttggatctctcatcttt

SEQ ID NO: 340030 - DNA, 815 bp, Cannabis indica
acatcagtagattcatgacggaggtgaccaaagtttcacgggtaactaaagatggaaagttatctgcaatactgtggggcatcgaagtcctcggttaactctggaaggatataaggaagaacgggccggtagactcaatgagtgattttcttgaccgtgccgaaggctttatcaagctcgaagaatccattcaacgagcggaaggtgagaaaaagcctggcaagtaataggctcttcctactggaacatccgccaaacttccccactacccaagtaatttgagctcaagtggtaagtgttccagcaacaaccacaagcaagggaatgggaagaaaggaacgtgcactgaaaaatccaaacaagctccctgggagaaccatgccaaatacactacattcactattctgaccccatataagtgtgtacatggaaactcagtcgctggccccatataagaagcccgggcccatgaagaaagacgccagcaagagggacatgacaaagttttgtcggttctacggagactacggccatgacactaaggaatgttacaacttgaagcgggaaattgaattgctaataaggaaaaataatccacacctgcagaagtatgttaagaccaatcagggtcaaagagacgacaataaccatgatttgttgcctccaccggtaggtggacatctgcaagtcattgttggaggcccgcacattgtttgaggttcgggcaaagctcaggagaggtatgcccaaacagtgcagcatgagcaagaagaggttatcctgactgtggaagaaaggaagcccaaagttccacg

SEQ ID NO: 340031 - DNA, 1034 bp, Cannabis indica
atgccccctgaactttttttgtcgttgaaaattccccttgaactataattaagtgattagtattgcattaggcatcaggcaaggtgatcatctctctctccctaccttttatttttctattatgagggtcttactagtgcccttaagattcatgaaaggcttggtacgtagtctcatgggtatatttgttgctcgcactgcctctgccatttctcacttgctttttgatgatgacaatctcctattcaccactgctacccatacttcttgcaatgcttaggagaatgcccttattctttataacctagcctctggtcaaaaggtttattatgggaagtcttccattttgttctcccccaacactcatccatccatcttgagctacttttatgaaaccttggggttgaattctaagctctttataagtaaataccttggggttctcaatgttttgggcgctctaaaaaaaaataattttgtattcagtctccaaagagttagtgcccaccttaatgtctggaacaacaaattttttttcaaagcaggtaaggaggtgctgttgaaagctgtaatccaggccattccctcttatgccatgtcctgtttcaaacttctgatttctacttctcgtaagattgaaaagttaatggcccatttttggtggggctctatggggaaggatcccaaaatttactggaaagcttggcatcaccttgttgtggtaatttcaacacgcaagtatacatgtcgtttataaataatagactcacaaagagtgaggtcgatcccacaaggattacagttaagtactttaaaaataaatctttacttctatttgattatgtcaaaattaaaagaaaattaaaattagaatcactaaataaatagtgaaattaagaatcaaaaagaaatttacgatgattaaagttagggctatcgatttcaattgtatctattgattatggcctaatataattatcttcctatttccaatttctatgcaataacaagtttactaaggtaatttatagtct

SEQ ID NO: 340032 - DNA, 530 bp, Cannabis indica
gtatcaaagaggagaacccttcatcacaaataataaagagatatgtggaaagagggtcgccttgacggattcctcgagaaggaacaacaggacctatggttcggccattgtgaacaacagtgtagcgaaccgaagacacgcattgcatgatcaaatttatccatctgtcagcaaaccccatcttagacatgatagcatgaagatagccccattcaacacgatcataggctttactcatgtccaatttaattgccataaaacccttttttcctttcatctttcttttcaagtagtgcatgacttcaaaggcaaccatgacattatcagagataagacgtccaggaataaaagcactttgagtgtcagagattaccttgtcaataatatgtcgcatcctattagcaaggacttttgcagctactttgtaaagcacattacacaaagcaataggacgaagatcagccatagaggagaaattcttctttttcggaatcaagacaaggttagtttcattaatcccagcaggaaaa

SEQ ID NO: 340033 - DNA, 1552 bp, Cannabis indica
cacacaaagccttcccttttatccaacgtgaaattattcttagaatcataatgaaaagctttgcatacacgttaaatataaaatatgcccatttggaccgtacctgaactttgagaacgcttgtcttctctgtggcagtaagcacactgtcctctgacctatccgaaagaaaccccgaaaccaaaacaaaagcagcgaaacccatgaatatcagaaagaaactggacccagctcccacccccaccgccggacccacataaactccacccccaccaaacccaaacggagaaggcccatagtacggcgccgagtaagaaaacccagaccgcgccgaaggtggcacagagtagcttctcgacgaagaaggcgcccccgagcgcgacgagaacgacctccccccgacccttccgcccgaagctgctaatgccatattgggatcgtacatcaacaacaaccccagcaaaaccaccgcaatcgcgggcttcttcaacgctttcaaggccttcattacagtattagccacaacctcaaatgggttcgcggggttttgtcttgtaatcgagttagagcaatgctccgggtcgaaagattgttttttggagtggaagaagcatttgatgctgagcttggtcgagccctgaatgtttatgattccggtgaacttggtgggtctggtgaaggtgaggctgtaattgttgggaaatggacgaggaggtagaatggggaagctttgtttccatctcaatggattgggttcgagcaataatgaagtagcagccgccattgatcgattggaattggagaattgtgaggttcggagagccgagtagagacgtgggcgcgcaaggaatatttgtgtaatgattgattcttaatatttggaagagaagagtagagatgagattgtggccagacaacaacctcatcttccgaacgagttctttcattggacattttcctatgtctctacgtgacctcacaaactaaaaaaaaaagttttactaaaaaacctttggaaaaataaaaattatgtttaccagtttccttttatatttttatataaattttaatttttactgttattttttaaaaaaatattattacataacaaaatataaagtgatactttatttataaaaatattttattaaggtgtgaacaatatttatacattttatgcgtttttaattaccaaaatacatcttacactatcacttacacaatcagacgatggttgcagggtgattggccgaacgttgcatcagacgaaagtttcaatcagacaaaagttgttggatggttggctgaaggttgcgttagacgagggtttcaatcagacaaactaactgttagcaaaatatctatgcaactgttataaaacattaaaaatcagattagtgttttcacatacgtaactctatctacatatcttttcatgatttaatataaacaaattcaccattagaaatatggaaaacaacgataatacaccaagataaatattttactatagtattgatgtaatttttttttggattatacttgagttaga

SEQ ID NO: 340034 - DNA, 1021 bp, Cannabis indica
aaaccgcgggtcatgcagagacgcgtcactggaggtgccagactgatcaatcttatcacgcatttttaacataaactcggcgaagactcccatatcttccggagtaatggatgaagtcggtccttgtgattgagctcgactttgagtactagaacttgtttccgagctgcctttcaatttataacccagtcctcttagatagtctgaccggctcccaagaactttattcatagcttttaattgcttgtatttgctagcagacccatcgctggaatcatcttctgtatccgtcatgctagcaacctcttcaagcattttctcctgatcaaataaaatattagaaacacaataacaacatcatgcattaattgtaaaaatattattaaaaaacatattgaaacttacatgtagttctttgcatgtctcgctaatccaagtgtcttctgttccttttctgaggtggcctctcttccaagtatgaattgcgtagtcttcagggacgtcctgttcaaaaatagagttagtttgtgtttagtaaaagaaattgctaatagaaagttgataattttacttacatattcattacgagacgctgccatcgacctcgagccttgcgtggacaaatactgcatttcccctctatttttcttgttttgatttgaacgcgcaatgaattttgggctcaaaaataagtcaatgatttgcttccaactctctgtagtgcagtgatcaggtacagcttcaataacacttgccaaatcatttggatccccagaataatgttcctgaaaccacgtgtgcctgatattctttctctcagaatatcttctcttcatctcatgataaagagttctcatcactctttcaggctcaggatggccatcaatatcgtacaaatactacaaacaaatagtatttgttaaaaaattatgtattaattgaaattaaatatttgaaacattaaacttgttaatgtgttttaccttcattttttctacaatttggtctttaaagtgttgag

SEQ ID NO: 340035 - DNA, 587 bp, Cannabis indica
tgaagatgtcagccaagttgttttgggaagaaacatgaagaagtttgatggagccttgctggaccttctctcgaacaaaatgacagtcaatttccacgtgtttggtgcgttcgtggtagactgggttctcactaatgtgtattgcagttgtattgtcacagtagagtgttgctggtggagagtgtgattccaaagtctttgagaagagcaacgatccaggtgagctcggcagtagcatgggccatggccctatattctgcttcagcagaggaacgggacacagtttgttgtttcttggatttccatgaaactaaagatttgccaaggaataggcaataaccagaaactgatcgtcgagtatcttgacaacttccccagtcagcatcagagaaaaaggagatttgaacattggaaggggataagctggtctctacaaaagctgttatagttgggaagtgttggatggaaaaaaaagaccttgtccaggtgttgctttgaggtattgcaacactttatgagtgttacgaaaattattaattactacgcaagtgcacacaatcaagtagtatactcacgcaagtgaggtc

SEQ ID NO: 340036 - DNA, 956 bp, Cannabis indica
aaatggagaatggaggactgtggagtaattgttgacaagatcaaaaagaagcttcacacatgggctacgaggcatctttcatatgcaggtagacttcaactcattcacactgttttgcttggtttgaggaactattggatgaacatttttgttcttccccaaagtgtaatcaaagagattgagaaacattgcagattattcctatggggacaatctgggaatcggtgtaaagtccactttggttcttgggagaaggtgtgcaggcctaaacacctaggaggtctcgggttcagggaaggaactaaatggaacaaggctaccttggctaaattcctatgggctattatgaagaagcatgatgttctatgggtcaaatgggttaatgttgtgtatatgaaaggagatgacatctggaactacaaacttggagtggatacaagctggtattggaagaagctttgccatttaaggaaagacttcagacaacagcagattatagctgcaggtaggaatggcaaattcagggcagcttttctttataataacatggtgtcttgtgaggaagataagtactacaaagctgtttggaacagatataatatccccaagcacagatttatactttggcaaactgtacacacccaactcttaactagagatcagcttgcaatttttcacatcaacattttatcatcagattgtccggtgtgtgggttggaagctgaaactcatcagcatttattctttgattgttgtttttctaaacaggttgtgtatgagatcttcagttggctaggctttcaggcttggaacttgcagttcacaagctggagaacttttttgtctataacagatagcaggttcaaggataaagtagtggtcatgctgcttgctgcggttgtctactatatttggctaaatagaaacaattgtacacatgataatagctcttacac

SEQ ID NO: 340037 - DNA, 805 bp, Cannabis indica
aacaatctgctcggcgaattacaggctcctaaattacaataatgacaacactgataagtgacacgctaaatgaattcccgggggacttgaaactaaaagttcccctatcgattaataacatggcaataccctaaataacacaaaaatgggaaaaactggggttcccaaatttgtcccaaccggtagtccggttccccaatcggaattccggttctgggaaaaattcctggaagccaaccgaaattccggttcctacaggcctccctgaaccgaaattctggttcagtgtaggaatgggtcaaaatttcataactcgaccaaatcaactccaattcaaaccaaactctccagacctgctatatagaccacaaagaacattttcaaagcaacaaacaaccctacacactcagaatcaaaatccaccatgtgagctccaagtttgagcttcaaagctcaaagcttggctaacaccactactagccactacaacaaacttaattcaacataaaacaacatatgtaacatccagaagccaaactcaaacacaaataatagccacaacagcaaaaacaccattaaaacccaaagttttgagttcaaagctccaaacttagttaaatctaactaactaacaacaaaacctgcttgaatccactcaataaaacataaccaagtttctgaaaacaacaacaactaatcacagcaatcacaataacaaaaactctattcatgcaaaatatcactttcttacaactcaagaaaacaaaagaaagttgttagagattataccttggcttggattaca

SEQ ID NO: 340038 - DNA, 564 bp, Cannabis indica
tggcttggattacactatgagctacttgaaacaaagaattgaagaagcaaaatcaaaagccctagctgctctaagggtggccgaaagagagagagagcttgagagagaaagagtgatctttttctagttttttctaattttgtaaaaatgagtaaaaggatgaatttcttattttattgaattgcttcagccaataaaaaccataaaaataaaattattaacataattaaaagtccataaaagacaaattacaaatgggcaaaaatgacctttttgtcctcacacactaagttgacataaaaagggttctaagggtattttgggaaattctaaattcccgaccattcccgacattctcaatgtctaacaaaactgccccgccatagaaaaatactaacatgtgattctactaagccatacaccgcattccatgttgtcgggcactgaaaatgcaaaattatgaaatttcactataagacatataaaatgcattctgaattcaaataaatcaacacaaataattatttaaatatcaataaaaaatttttataattaaaccctaat

SEQ ID NO: 340039 - DNA, 898 bp, Cannabis indica
gagatatacattgatcataagagtatgaaatacttttttttacccagagagatctgaatatgagaaaaatacgctggctagagtttgtgaaggattatgattgtgagatcctttatcaccctggtaaagccaacgtggttgctgatgccttgagtagaaagggacagagtcagataaatacggtgaaacaaatctctcaacaactagcaaatgagatgacccgagctatgattgagttggttgtagggcagttagttaatattactttgcaatctactcttttagagtgaattaaagaagtgaaaatgcaagatccagaattggtaaaaacccgagatagggtttcggctggaaagactagtgatttttcagtggataaaatgggaatgttgcgattcagaaatcttgtttgtgtgcctatggatgatggtatcaaaagagagataatggatgagtctcgtacgactccttattcagttcatccagggtcaacgaaaatgtattaagacctaaaggccatgttctggtggccatgcatgaagaatgacattgctgagtatgttgcaagatgtcttacctgtcagcaagttaaggctgacatcagaaacctgcagggttactgcagccactgataactctatgaaaatagagttatttatatctttttgggcattaaagtagctttgttctcaagtatttttagcttattttagtgaattttaattagttttgtttaattttaaataaatattaattttaataccttttagattagttttggttaaattttataatattttatcaatttagtttagtttccctttttataagtgtaattcttaatgttgtgtattttgtaaaaagattaaatgtatattttgaacttattgtcaaaatt

SEQ ID NO: 340040 - DNA, 539 bp, Cannabis indica
gtcactagccttattaattatagcgtactagctgcaacagaggggttatgccgtcagacttattgcttatggcagttccaatacgttttctcccatgcggcattaaatgtgaggtgactgttcaaatagagtccagtacctccaggaggtgccttaattatcacggttccgacccccaagagtatgtggagccttcatatctcctccgggaggtgtcttctcgttgacactcctgatccaaaaagacttcgtcgatttacctaagggtcatgcctcttagatccacgtgtcgttgtcatgttggtccacatattttgggcaaaaattaaggacaacatttaccccccaagcctcgtttgctgtgaagtaaacgaggcttgctaggtgcttccggttgtctcattgatttcctggcacgtgcttcaggtgcgtgggctgcatttatgacattcatcattaaaagttattgcttttggcaggaaacaattcgattcctgtctattaatgatccggtgcatttaattggtttcagataaata

SEQ ID NO: 340041 - DNA, 772 bp, Cannabis indica
gaccgtccatcgcccgaccaggaaggcttcgtctgtgcagatatgtgtgatgctctattcagcatatctctttcgagcagatatgtgaagtcgattccatgttttaccagtatgtgatgccacatcaaagtgccaaaattgggataaaatttgccccgaagtctgtacaggacttctgaagttccgtgtagacctcatccgagctgcttttgcatttgaatgggtgacacatgtttggtgcatctgttcgtgatttgatgcgaagctgaatatgcgtctcttcggttttcagctaaataatgctataacttaattagtgcctcgaaacccagtttttctcatcacactttgacgattacacttgattaattttaatttcttaatatttgcttttgggagggaattgaagcgtctgaggcattttgaaatgattacctcttttcaccagattgcctataaataaggctgggtcttcttcataattttactttgcatgttcaatttctgtgtttccattgtggaaaatacatgcgttcttaatttgttatagaggataaatagaaaatctaggctcaaaactttgtgattttctctataatagtctgtacggcttcacaatttacgatgtttgcctttaagcacacattgttcatatttcaccttgctcattcgaagctttgtgaaatttaaccctaaacccaaaaatttcaaacttttgggttttgacttgatttttgtacatttttcatccttttaatctgttgagtactcc

SEQ ID NO: 340042 - DNA, 524 bp, Cannabis indica
acagaggtcgagagttgataacccatcgatagagatgcgcagttgtggaatgaatgcatcaaaaaaagccaggagggctgtgaagaccgagcgcaagcattgagatggcgctagagtttgagtggaggccaaagggccgtgccagtgagacgtagtagtcatgtttgcctgcgaaggtcaagaagggtgctagagtttgcacgatggccagagggctacatcattggaacttagtacattgtgggagctagaagggcgtgatgcaagtgtgaatcagctggagggttgagcggacaatgcatgcatatgcaaatcgacatgggtgctatttaagatagttgactcgagagtcacatcctgcgggatgcacttttagatgacatggtgtgcacgaagagttggggcggtcaggcatttgcatgttggcatgttgtcgaggacgccaatagatgaagtgggggagagatcttcacggttcactcaacagactagttattcattacaagcatcgaaatgggtatcat

SEQ ID NO: 340043 - DNA, 793 bp, Cannabis indica
aaaaaaataaaaaggaatatgtttttttgttattcttattatttacctgcattggttatactgatgaaagccatgttgattgttcagtgcatattgttgtttcacaacctaacctctgtgtcatcataggtaaattgggtgtgtactcacctataggtaaaagacctagaatctgtacatggagtaaattgaatccgagctccgatattatagtggttatcaagtgcgactactcgatttttatcgttttctatgattggtattgagagctaagtgtctaatgggcggtgtgttatgcattttataacgccctaaataattaggcacgctacccaaaatacttataaaatcctaatcgcctaaatgggattactaatcaaaatagcgtagaatttaaacttttataataaactgaatgaaaataaaacttgtaataatttaaactttacaacatttgggaatcccaaaaatatttacaaactttattacaagtctttttctttcagctagcctaagcagcaaaatggaattttaaaatacatcactggtagacccttaacccgctaggtctgatgtggctctgacatgtacattcttcgcccagctcctgaactcatggctgatcagctaaagccttaccctttcctgcacagtatagcacccgtgagccaagccccagcaagacagtatataacataacaataataatatgatcatcatgctatttaaaaaataatgccattcacattttgcatgtgtgacatagaccctgcatattgcactcacatgcccc

SEQ ID NO: 340044 - DNA, 569 bp, Cannabis indica
gtggaattagaagtgaaatatgaatagattcctctggtgtgttacaactgctctgggattggacatagcactaaagaatgtaggaaaaaagaagaaaagcatgaacaaggcaaacaagtgtgggtgccaaaaaagaaaatctcagaaaaggatcagcagatagatgatgaggggttccaaagagtgagtaaaggcaagaaagtgatggtgaacaatgagaaagatgagactactgtgcagaacatgtttgaaactctaggagatgaaggggtaataaggaacaacacaggaggggaggaagatccctcgtcctcaaatggatagatttttatgttggaatgtaagggggattaatagccagcaaaagcctaatgaggtcaagcaattgatcttttcgaagagagctgggtttgttagtctcctagaaacaaatgttcaaaacaaaaatatgggaaccttatatactagtcttttttcaggttggtgctttacaaacaataatccttggttggataaaggaagaataatatttgcttggcagcctagtgtttactctgtggatattagat

SEQ ID NO: 340045 - DNA, 810 bp, Cannabis indica
aaaaaatcagttcatggttatttgtatgattttagaaaatataaggtctattttgtcatttaacaaaatagatagtccaattgatagtttttgtaaaatatagggttcaaaatggtagtagaagtgtttactattagaataaaaagtaataaaaatattaataaaataaaatattatattttggaattattatatgaaaaataaaaatttatattttatttacaaaaatacttttataaggtgtggacaatactttttatgtgcttttaattatcaaaataactcttacactatcacttacacaatcagatgatggttgctgtgtggttgaccgaaagttgcatcagacgaatatttcaatcagacaaaagttactgggtggttagccgaaggttacatcagacgaatgtttcaatcagatgaagcttgctgggtggttggccgaaggttgcatcagacgaaggcttcaattagacgaaataactgttagcaaaatatttatgcaattgtaatgcaattgttatgaaacattaaaaatcagaatagtgtttccacgtacgtaactatatctacatgtctcttcatgatttaatatgaacaaatttaccattagaaatttggaaaccaacgaaatacaccatgataaatattttactatagtattgatgtaatttttttagattatacttgagttggattatttgggaactccaattttgattttttgagatctgcattttatggatttgaaaattgaagttaggagattagttttatgcaaattaaactggatttccagttaaattttag

SEQ ID NO: 340046 - DNA, 631 bp, Cannabis indica
gtttactaaggtaatttatagtcttctcaaatatctaaacctcaaatacatgtaaattttctactctcgtgataaattaaacatgtaaaaggcattaaaaatagaaaccctataagttatccaaaccatgtaggtactctcgtcttatataaaaattttgttttatttcactatagcataatcgacactcacttctcaaatttcgcatcaatatcataaacatttaattggtgatcaggcaagtaaaagtaattaagtacgaatgaaatagaatatatagaaattgagggaaaattgaatcatattaaaaccaaatatcaatttcaaacaatatccatctagaccctaatgaattgtttaactactcatgttcatcatagcaaattcacacatattaatctaagaatagagaagaaaagaatgttaaaaatcctcttgaaaacgcctctaatattgaatttgatttccaaaattcgtactcccttcagtgcttttggtttccttctaaattgcttgatgaaaaccagtgaagtccacttcttttatagccaataagggattaaaaagatagaaaagatgttgtgaaaatttatattgatttataattgcgcaagtgtacacaatcacaaac

SEQ ID NO: 340047 - DNA, 517 bp, Cannabis indica
ccgtcaggcagtagggttccaaaccctgtatcatagctatcatgtggtctacctaatttactaaaaattctggctgccacataggaatgagtggccctagaatcaaataacatataaaagtaagatttgttgatcgagagctgacctgttacaactgaggggctagcttctgcatctgcctgagttaacgcgaacaccctagctggagcaggttttacagtaatcttctgttcttctttcttaaactgtgcgcaatcccttttgtagtgtcttggcaacccacactggaagtacccttgccctctacactcacccagatgatgcttcttacaattggggcattctgggtaactgtatcgggtttcggagctaccctgacaatttcctcgaccttggttccctcggaacatcttgttctgacttgagccaccggatgcagtaggcacctttcttttctggtcaatggtcgagtcactacctcccctactaaaacctgaggtaggaggagtaggagccc

SEQ ID NO: 340048 - DNA, 726 bp, Cannabis indica
ttgactcaaatcaattccaaatcataccaaaaacttctagacctgttctaaataccctaaagaacaagtctaaagcaacaaaaccatccagaaatctcagataacaaaaatgccatgtgagctccaagctttgagttcaaaactcaaacttggctaaagctcacaaacaaccatttatacttgatttaaactacataaacatccatttagaaactgcaaaaaaacatacacaaactcatgcaacaatcacagcaactaatttcaaaatttctctttgaaaacttaagcttttgaatagaaaattcataactttaaacaacaacactaattatgcattaccagcagttcaattcaactcaaataacctagaataaccttagaaattaaccagaacatacagcagcaagaaaactccaaaatcaagcatgcaaaccattcaattcttccaaaattccaagaaaaaccaagaacaagttaaaggacttaccaacaacttgaattacacctagattgattgaaaaagcttgaaaacttaagaagaactccctgccctagccaccacaccagctgagagagagagagagagagaggaaaagagcctttgaattttctaatttttctaagtttagaaatctttgaataatgagagaaagcatgcaaatataacacttatttcagccaacaattaacataataaaacacatattttccaattactaagtccac

SEQ ID NO: 340049 - DNA, 706 bp, Cannabis indica
ataaccttagaaaggttagagtcctccactgattggtgcgacaggatgagcttggccttccggcaattctccgtcgtgactaggcccccgacgtcaagttccacccggtcataagttgcaaagacctgggccctccggagaaagacctgagtaggttcggtctgctcatagggggggaatcctgacccactctgtgagaagttccgggtgctccactgctcggaacctagagaagaagaagaaacggtggcgatactccttaacatgagtttgcctattataagggaccaccccatcattggaagggtgggcccgaaatccgtaaaaaccatctttaaatttgtcccccttcttggggacaaaaacaagttcataaaaatacagaatcttcgccggactgggagagccccatccccgggcggagtaaaaaataaataagcctgaacgcaggcggtatgcttgaggaatcagttggtatggcgcgaggccgacaaaaactaaaaaattaataaagtagtcttgaagaggaagcatggccccgccatcaggagcgtcaggctccaagccccgaagccgccatagttgtggttgggcgtctccgcatctcggggcggccggtgatacgtatcggatgttgagggtttgatttcgaccacatctatgatgttctctaactggtgggggcaggttagggtggaatgaagct

SEQ ID NO: 340050 - DNA, 683 bp, Cannabis indica
aaagcaagaaatgaggctatattcaaaggtcaaattactaggattgacattgctaggaaaaacttactcactagatatgatgaagccatcctagtaagtaaggttgacttggaggcagcgaccgtgaatcgcaccccctgcaaagaaatttttctctatacctaaacccctatcttatctgtatggtggatgcttcctggaaagatggaaatgtaggcttagatgtaattcttcttgatcgtgttgcagattcatggaaatggtatgctaagagtgtgtagactgcctcggcacctgaagcagaactgatggccattttttgggcactgcagctagataaggagctgggtcatgactcaattgttgttctgtctgatgcacagataatggtgaaggccttggaggacaaacgttttccaccggtttgggaaaccagacctctagctttctcggttctcaatacttgtaatagttttagtttttgtcacttttgctatattccaagactagacaattctactgctgactttattgccaagaaggctagaactgatgatggttattcagttggccattgtattagggaggggtcccctgttgtgatgcccaattttctctgcaatgaactcttttttgttcttccaaaatatatatatatatatatatatatcgctaccaactta

SEQ ID NO: 340051 - DNA, 494 bp, Cannabis indica
gtttgagtctgtgtctgggtttgtgtccaggttctgaccctaatctaggtctagtttcgggtccaggtccaagttggggtcccgagtgcgggtccaagtttaagtctgggtcaggaccttggtctagacctaggtcaagcatttcgatcccagtctgggtcttggtctgagcccaggttcctatctggatccctatcaaggtccaagtctgtgtttgggatcgtgtcccagatttaggtctaggttcgggtctgagttccgatcttggtacacaaccgtgtgtgggcccgagttccaatctcagtttgggtctgaggctaggtctgtgtttggttccaggtctaggtctggtcctggtcactatcctagtcttgttctacggtcctggttcgacgattcttgttcaggttctaattttggttcctaggtttatgtcagggttcaggtttggttcttcgtctgggttcaggtcctagtctgagtcccagatctag

SEQ ID NO: 340052 - DNA, 751 bp, Cannabis indica
aggtaaattttgggacgaaatttctataaggagggggtaattgtaataccctggaattaagaaaatggagtagcgaaaccctaactagttaatttagtattattgtggaattatattattatataatttatgatatgtgaattaatatgagatatgacatgttaagacaccgtaggtgagccaggggcattatagtaattttgactcgagaagggtaaaatagtgaaattaatttatttacgtgcttatggactatattattatatagtatgcttgtgttgtcctttttcaggtgtgttctgacaagttggcgcggtatagtcacaaccgggtatttcgggccgaattgagttcgtggccaaaatacaattttgggtttaattaatggtattttatttatgtgggaataatcaaaaaattaattgagtttatttgtgtgtgcaagtgactgttttacccttgaagtgcttatgtgggtgttttatggtcttaagggaaattgtgtaattttgtcattttggagtaaggttcgtaaaagggattttaagcaaaagtaagatttaattttctgaattttttctcagccctttggctgaaccccctttcttctcaaaaactccatctaactcttgattttgggttatgcttgcttgaattcaagcttggggtttgtggcttttgtgattgagattgaaagagtcatttttgcattttaaaaagaaaaattcttggctttttcctctgccctagc

SEQ ID NO: 340053 - DNA, 610 bp, Cannabis indica
agcaaatttaagaaaaatgtgttagctgctgccataagttgtctggtttatacagtttggagagctcgaaacctttctgtgtgggaaagcacaaagccggatatagagaaggtcataacaggagtaaaacaagatgtgatctatagaattaatgcaatatggccaaggaaagtctctgtcgaagatactgaatggttccatagcttgtaaagaacacaaaaagtgtttggtaaagagaggatcaagaaatagaaataattgtacagattttattatattaggccctgtttttagggtgctattgtttgtaaaaaattgttgtgagcaatacaaacttcctgattcatcaaaaaagaaaaaaaaacattggagaaaaagtagaagaaatggggtgtttggaattttggctagcctgaggttctgagaaatatggggataatttttttttttttttttgggaacaagagaaatgaattttattccaccaactacttaattctggtgggttttatggatattcggtccaatttaatagacactgttcatgattacttattgaaagagtagtatcttgtcctactagtccttgatccttttttatgggtgattt

SEQ ID NO: 340054 - DNA, 649 bp, Cannabis indica
gaagctaacttagccagaaagtctgcgtgagcgttcttttccctagggattctttctactttaaagtttgtgaactcgtggagcagttcctggactattgctacatatgcggccatcttttctctgcgcatttgatattctcccgacacctggtttactaccagttgcgaatcgctgtagacttctactctcttggcacccacagtttttgccaatctcatccctactattagggcttcgtattcagcctcgttgttagaagctgagaattcgaatcgtagggctgcttggagttgaagtccgttcagggatatcatctcgaaccttgctccggacccgttctcgttggaggcgccatccacaaataccttccacgctgggactggtggtgtgggtatgtctgcagtagcctcagcttcatggcactctgtgatgaagtctgctaacgcctgggaaatgcgtggattgtagtgtaggtcaaattggcttagctccattgcccatttgaggagccttccgggtgcctctagcttttgtaggactttccggagtgggtggttagttaatactttgattgggtgagcttggaagtaaggtctcagctttctcgaggccattaggaggcaaaaaactagtttctcgatcaccg

SEQ ID NO: 340055 - DNA, 915 bp, Cannabis indica
ttatttaatcttcataattaaaattctccttattgattcttgttactattttttgaataataaattgataatagtcatcgtgagatcaatctgtatttacgttataatgaagtaattggcaaaatagaaataaaaattagtaaatttgttgtggtaaacgacatacatcaaatttttaatgtcgttgctggagactattttattcaatttgttatgcattttttttttcttgttactaactttttctcctagttgtggctttaattttcagatcattctttggaaacatggcgatttataatcaacaatactatgatccacattatgtctcgccataagtgcatcaatatgatctgttatcttgatttttgtcctcctgacgtggcatgcttatgtgggaaaaatcagtgtcacgtggcagtacaactcaccaataggaaggccaagtcagcacctaaacaaacggagatcccgtcactcaaacatgcatcaagtgacagactagctctctctcaggagcgggtggtcggccctatggccggccagccttagttctgcaccatggccagccagcctggcctacatagggacctgaccgaccaaggggggcttagcagggtttcctgggcaattctatacgtggacatcaacacatgggctgcgaattgggccttaaaagcccaacagaatggttgaataatatctagattcaagggcaatttagtcttttgtaaatatctaacaaactatgcaagtggtaaggcatttaaactgtaatctaaggttttaggcctcacatattaaggccttaaccttagcctagaaacctaagttgcatctaaacctgaaacctgcctccaagctctaagtgtttgacaaactctctctcttcctcacttcctctctcacacgcct

SEQ ID NO: 340056 - DNA, 769 bp, Cannabis indica
tctctcttcctcacttcctctctcacacgcctgccctggcaacatctcaacacttgagttttgccattattgattcatacgttgtaatcctaagggtgctatagcagattccatctatattgatctggatagtatttccctcggtataaatacaactaacaagagagtaggtcattacccgctatcacaagggggtcgaacctctataacaaatctattgtttattgcttttcattcttatttgtgcaaacacatggcaagcatcagatctatatgaccccgctgtcggttgatcactttttgaggtcaatagtttggtgctttcattaagagcgtggatattgaaatatgatcaaacgccatggtgaatagaggtgttcaacaaaatttataaaccgtccaacctgattaaaccgcccaaactaaatcgaataaactgacaaaaaatacaacccgaaataatacaatgaaaatccaaaccgctcaatgaatatattgggtgatttacaaattattctaaactgccaaattaacccgaataaacagaattaaatcgattaatatattttttttaataaaagtgtatataatatattacataaattatatttattagtcaaactattttgtatttaaagtttgaacattttagtgtttaaattaaaatctagactttatagttaataatttttgttatatttagaaattgaagttgaagtttaaaatctatacaatattattactttttttattattttattcaattatt

SEQ ID NO: 340057 - DNA, 805 bp, Cannabis indica
gtaatattaataattataatagaaatgttctattaaattttttcactaacaaatcagtgattttaatttgaaaaataaataaataaacattgtgtgaatgtttgattattttatttattatatcgtttggaattttgaagagaagagagaaattgatttcaaaaaaaaaaaaaagaagagagaaacataaagaattctaatgacttttgatattatatcatttgaaacaagatcatgtaggaggtacatgcaaacttattcaattgcttctcttaattttttaaattttattagcttctcatttaattagctttaattttattaaaaaaaaataagtaaccgaccaataaatatgttaataataaattcattaactaatgactttcgattgctcttcaaaattttaattttattaagttacttttgtcataatgttcttttatattcatttttttgttgttttactttttagtgaagttacaaactattaattttaattttttggtcataatattattcaagtaatgtataataaatatatagtctttcaagtttatacaaaaaatttttaagttgaattttaaattgtataatttatgtgtaatagtgattaatacactattttaatgtgtattaagtatattaaaatgattgagtttacaaatgtaatgtttaaaatatgtcgaaagagaaatatttgtaataaaagaagttttttgactatttttaattgattatgtgatcatgatactcatctttagcattaaaaaaattaaatcaaacaataataattcatctccaaaag

SEQ ID NO: 340058 - DNA, 540 bp, Cannabis indica
aacattattatatatatataaaaacacaaaccaccaacaaatatatttccataaatatgatacctttaacccaaatctaaagagagagattaatgatgggagacaggagacggggacacagtcggtggtggggatgggatggccggtcggactggaggtggccgattgtgattcttcattttctttaataaacggccggctagctgcaattattggagaaagaaagaagatgaaataaggaagaagagaagaatggggttaggtagggattctagggtttttatatatggaaaaaacttttaggggcgacataagtcgcctctaatagttgtacgataacatatttatactttttggggcgacaaatgtcgcccctaatgttattagcgggaaaaatcccgcctaaacaaattgggtatattttgattttattaggggtcgacaatatcgctcctattaattaataagtcgcccctaaaacttttagaggcgacaaaagtcgcccctaactctatacgaattaaaaaaaaaaaaaattaa

SEQ ID NO: 340059 - DNA, 766 bp, Cannabis indica
actagagtataacattatcattatcattatattagatcttaacaactcacagtactttaaaatttataatttaccaaacactcagcttagcttttttccacagttctgctacaactattttttctcacagcacagttacagttgctttttcccacggcacagctataccaaactggccctaaaagccagcattattaattctatttctttcatacactaaaaaaaatccccttatctttaggacaatctttcacacacaatataattttttttgactaaatgtgagtacttttagctacaacaaaaaattacttctgactaaaatatagtatttagatacaaattataactaattaaattttagtcataatatatttagtcacaactgtaatttttgtgactaatacatttagtcacgaatctttcacaacataaaaatgataatttataatcagtcacaatttttttactaaaatttgtgactaaaagtaaattattttttttttgtatatattagactctccaaaggtctatatttttgtggtgtgtttttgccttatctctctttttgcaatggactttttcttttctctaattcatatatatttgttcgattcccattctagaaaatattgcaagagtactcattactataaacttttcaatccgatcttcctaagttttcagttatttcaaatataacctgttggaactttgtatgaaattatgtaaaaaaaatagaaaagtgaagtgtgtgagtaggagt

SEQ ID NO: 340060 - DNA, 855 bp, Cannabis indica
attccaaagtttattccaaagagttggagcgacatcacagtgaggcgctctatccaaagcttgagccagataagccgatttacatgagaaacgcccatcactctccaaagtccacatccaactatccttgccaagacctggggggtttccatctttcagaatatctgaaacagtctcatggttgaaaagactttttagcttatcaatatcccacccacccttaggtgacaagagatcggccacatagttgttatccgttaccacacctccattcggtttcgggacgaacctttcaagtgagggatccaggagtccctccaaatactagtatctcttccatcagccaccctcttgcaagcctcttttcggaggattgcactggcttgaacgacatttttccaaaaccaggaattagagtctttataattacagttgagaaaatcccttcctctaaggtacttagcctccaggatcttgcaacataacgactgactaccagtcaataatttccaccccaagttagccataaaggcaagattcatttcctttgttttccaaaacccaagccccctaaagacttgggaagacaaagtttattctaggctttaaggtgaggccaggttcccttctcaaagccccaccaaaaatcacggatcaagccatcaatcctattcacaaggcggttagaaagtttagtggtttgcatggcatagattggcaatgacaaacccaccgacttaataagggtagcctgacccgcttttgataatgttttggccttccagccctgcaatttagaagtgagattgtcaagaatgaagttacagtcagcatctttttgtcttgatctgaata

SEQ ID NO: 340061 - DNA, 737 bp, Cannabis indica
ctctatggttatttttgtggtttgtttttttaatctggttctcttataaatacatttcacaagctcactaaaaaaaagttttgaggtgtgtggttcttttatgtttttctaagtagttatatttgctatttattttacatttatttttgtgttgttttagtagtttttttattctcattttttttagattgggcttgcaaatatagctgctattgcatttagtattgaggatgtgcaaaatattgttagtttttttaatcccttttcctttcttttgtttgatttgtttaagtgatgttttgtagttgttttgccatgattatttatttgatgtcgatttcactattttttctcaatctcacaaaaattaatggttgtttttttgattattctggtattcctgtggtggttctgtctatgggtgtggaagatggagatctcattttattttagtgtttacagtataaaaaaaaaaaaaaaatggccaagacaataaaaaatttatttctactatttgacaatatttttgtaaagattgagctaaaaatcagtatttttgtaaatttcccacaaattaataatatagaagtccattatcataatttggtaggcttaagggttagattgtagttttggactcatcaaaaaacttatttgaggaaattacgactctatacccttttttatagttgtcctctttcatttttacctcttttttaaaatctatcatttttacc

SEQ ID NO: 340062 - DNA, 613 bp, Cannabis indica
acatgggctaaagtccctccgtccctgagtacgggtgctgcaagttataggttttttttttttttgaacgaaatcacatatgtggtttttgttaattgcacctgcaccccgagatcatcttaaaaccgcaaaaatcatactgtagaaatatagtgtggtttttgttaatttatctaataaaattattacaatttaaaaaattaaaaatctaattaaatttttaacatgataataacacatgtattagattatctaaaaaatatatattaggttatctttaatagcatatatattaatcatcaaattattgtattaaatcatttataaaaaataaggtaaatactattttagaccctgtgttttgcaaaagttaccaattggaccctctattttattaaatgacaaaatggaccatgtattttccgaaattttacaaataggatcagaattgattttttaccaaaataaaactgaattataatccgatctagaaatattatgacaaaactagttattttttctgtatctgtttgtgttagaaattatcttaaagttgattatattaaaaaataaaattgttgaaaaattgagctcaaggtcctatttttaccat

SEQ ID NO: 340063 - DNA, 1393 bp, Cannabis indica
ttgttcgggttggaaggtaatttcgtactgacccagctccactactcacttaagtaaccgtccagaagcgtctgacttttgcaatatttggcgtaatggtttaatggttggtcattgtacacccaaacaggatgagcttgaaaataagaccttaactttcttgttgttagaatcaaacagtaagtaagtttctctaccaatgggtaccggccttcggcctcaatgagtcttttactaatgtaatagaccgagtgttgtatgatgttttcttctctgatcagcatggtacgcgaggctttgtgagttgcatttttagctcttaaaaagctcttttacattcctccatccactcaaattgcttatttcctcgcaggatgttgaaaaatgcaatacacttgtttgtttattttgaaacaaatctgctgagtgcggcgatccgaccaatcaaactttgtactttcttggttcttgttggcgacttcatatccaggagggcttgaatcttctatggattggcttcaattcctcgggcatcgacaataaagtccaaaaactttcctgaaattactctgaaggagaactgtaagagatttagtttcatgttgtacttcctgaggacttcgaagcatttgtccaggtcatctatatgccccccgccttcctagatttgaggagcatatcgtgcacatatacttccatgtttcctccgatctggtctttaaacatcttgtctaccaatcttgggtatgtggctccagcatttttgagaccaaatggcatgactttgtagcaatatagacccatatctattcggaaacttgtatgttcttggtccgatggatgcattttgatttgattgtacccctattaagcgtccatgaagcttaatattttgtgcccagctgttgcatccacaagctaatcgattcttggatgtggaaaatagtcttttgggcatgccttcttgaggtctgtgaaatcagtacatactcgccattttttgttcggcttgggcaccagtacgggatttgcaacccaagctgggtagaaagcttcaattatgaaattatggttgcgtagcttctctacctcttccttcagggctactgcttgatctttgtccaatagccttcacttttgctgaacaggtcagaagtttggatcaatatttaggacgtgccacattatagaaggatcaattccgaccatatcctcatgtcaccagcaaaaaacgtccaggtttactcttaaaaattttatcaatgttgattctacttcgagcaacaaaccttttccaaaatttttagcttcctagccgagatatctggatcaatctcgatttcttctagttcttccacaggtccaacattgctgcttgggtccccaagttgag

SEQ ID NO: 340064 - DNA, 1057 bp, Cannabis indica
ttttttttttgaataaaagtgtacttatcatatatggcaaatatagttagacctctcggtcgttacaaagtttttcggtatggaagagactgggataagaccaaacatctggtgagcaaaagcccatttagccacataaaattacaagttactaatattagaaaaattacaactataaaacgaaggagaggacttaatacaaaatgagacatagttttaagtgcccaatgagagtccttcccattgagagcattgataactaccctcgagtcattctccacataacaaacttggacccaatgtccaaagccaatgtcacagccaaagagcatgctgcaacttctccacataatgcatcaaaaaaatccaaccgatcgagacctatgaacacgaatcaccctgccaaaatgatttctagcaacaattgcagtacacatgctatctaaacctacttttacatcacaattcagctttatccagtccggaggaggaggagactaagaggctgtttggctgtattttcaatttttagttttttaaaaataatttttaaaagtgagaacaaaaaacaattttttatcattttaaaaactaaatggtgcttggctaatattttttaaaaacaatttttaaacaacaaaaactgtaaacatgtttggatagtaaaaacaacatacttttaaaaattactttttaaatatatatatttttaaaaacaaaaaaaaatattgctattattttttttagtgttgtgctgtttcttttttttttttttttagaaaaaataaacatcacaaattttaatttaattcaataacatattaatatctaatttgtttttttttaaaaaaaaaaacctaaattttaaataataagtgaatataatattatactgcttaaaaatataatcacaaaattcttaaagaaattttttaaatctaaaatagatataaaataaccattagtgtacaatatatccttataaaaataaatttaaatcttgaatgtatcatcaaatattaaaattaattgactaatttttattattataagtcgt

SEQ ID NO: 340065 - DNA, 1059 bp, Cannabis indica
aaaaaaataatataatataccgatataattatttttatatgaaaaagaagaatataaatcatattaaaaaaatagtaactttgtaatatatagtgcggtgcagtttgaaccacaattattaaatttaaaattgcaaactgcaccgcactgcgcgtggtttagcaataatacaattcacaaccgcactacaaaatttcaaaccgtattttttatgcggtatgggcagtttgtgcagtgtgaatggtttgatgaacacccctacctgtcaatctagaagaagtctggtagaaggataggttctatctgaaagtgaattctcaaatgactatcatgtctactttaagtgttaacctcaagaaagatagtcctccaattaggaagtgagttctttagggctagttgttcatccaggaagagcactaagagaattttttaggaaataactttgagaataatcaagtcttatattttttagcaagtgcttaaattggtagaaaactaggttacacaaataagatatctttatatagtgcttaaaattcacatttgatattacacgactattaccagtcgtaatagggcaataaattagaacgttcgctttgacactagaaatgtccttcatcaaattctcgaacattttgtaacattttcttaaaaaatggctccaagaaacgtgacatggagtgataccctttaactatatatcaataaaatatcactaaggtggtgtttggttcacatgaatgagcattggaatggacttgccattccttaagaaagctcaatcaagtgtttggtttctttattagaacttgaaagcccattccaaaggaattacaattcacctaaactaaggatttacttttccactataaaatcacttgaaagctaattccatactaacaaaagtctattttaccctatcaatcctcctcttctcactttttttggatgttaccatcatattactaattatttaatatttatatgtaattttattattttattttttaataattaagtttgagaatgtgcacatttccctcacatgataaa

SEQ ID NO: 340066 - DNA, 1018 bp, Cannabis indica
tactcagatcactatagtgatgggatttgaatagctcaaggttacaatgtaggaatcgaagttggcaaatctcaagtacgagaagagcagtgggtgtgtgggagagagagagagagagatgagttatcagacttagagctagggtttctgattgcagttaatgactttagacttaaggttttagggtttgaataaggatctttatataggagagcttaaacccttcaaatcacttagaaataggtaaaataagttgttatttacatattaaattagtaaaatacaaatgactaaaatgccccttgaaaatagatatttttcctctattttcgtgggttattaaggcccaattcccagtctggcttacggtccacgtgtgaagctacaaaccaaagtcttgtcaggccaatatctggccagccatgcacctacagattgcatgatgaccggtcctttgatgtccagaagctagccgtcctatgtaggccatagggccggccaagggtggctagtctgcctccttgaggtggctggttcatcattcgtcgtcccgcttgagtgctcggactctccgttagttgaagtgctaagtaaatgacttggccttctcgttggcgatctatactgtcacgtggcactgatgttgcccacgtagacatgtcatgtcaggtgggcaaaaatcggaataacatatgtattttatagctttaataatatttatatattgatttaaaaataataatatttatataactttttaacaatattttatagaaaattaaataaaaaattatttaattgataaatttaaatatttacttataaatacaaaaattttagagtagtttgcggtataaatacccaagtttaactccaagttgtaaataaaaacttaagtttaatttttggcagtaataatatctaagttatatttttggaactctgtaggtacctaaccattaaatattaagtcattatccacgtgtcatttttttattggtatatttaaattattttt

SEQ ID NO: 340067 - DNA, 562 bp, Cannabis indica
aaaaaaagaaaaatagttactttccacaaaatcatactcaaaatccaataccaaacttaaaagagcggcttttagataaagaataagattttcatacaccataaatgtgttcaacacaaccattcagagcagtgacaatgaatacttctcatctaaactaaatcaacatatataatcttatttgaatcatgggaaaagagtacgagacataagaactgtaccttgagtgaggaaaatggcgagagagtgacagccgccggcgacgaaaggagaggagataattgtgaataggtgagagagtgttttgatgatagggttttgggtagtataaattaaattaaaaaaaataataaaaaatatattacgggtcgggttgaacccgcccgtttctaggctaacccgtacccgcccgccaaacagcgggttaaaattcaacccaatccaatttttgcgggtttttaatgggcggtttccatacgggcggattctaatgggttaggcggttcccacggtttagcggtttttatgttccggcctaatacttattggaaattattttacc

SEQ ID NO: 340068 - DNA, 318 bp, Cannabis indica
cttagggggcatgcttgcatcgggcaggtggtcaatgcacctcttgagttcttattcttgctccttctctggctcctgatttactcccgaactctaagagatttagggatatatgcttctatgattagccataaagctagtgagagcttggcctttagtagccatgcttagttgtgaggtgcttttatgttggtcgagtctcaatggttcacttgagtagttggcctaatactcaaggtttcggtagaacctgcctcaactattgatcgatgtacacctttataggatgtatatggaagtatgtgttggaaattattt

SEQ ID NO: 340069 - DNA, 510 bp, Cannabis indica
caagcccctcgggcatggtatgagcaactcaaacagactctattgaagtggcaatttgtaaactctcgtgcagacacatcactattccttctcaagactcaaagatatgttatcatgatccttatctacgttgatgacattgtcatcactggaaatgacacacaagaagttaataagttcattgacagactacacaaaagctttgctttgaaggaccttggtgcattgattattttctgggaatagaagtatttcgggatgccactggtatgtacttgtctcagggaaaatatgtgattgaactcctcactcgacttgacatgatcaacataaagccatgctctactccaatgacaggtgggaaaccattgtcgatacaagatggtactgaactagaagatgcatcacaatacagaagtgtcattggggcattacaatatctcacacatactcgacccgatattgctttcgcggttaataagttaagtcaattcttaaggagtccaacca

SEQ ID NO: 340070 - DNA, 1010 bp, Cannabis indica
ttagaaaattttttgaaaataaatatctatataaaaatttacattaattttagaaaataatagtaataattaaaataaaaactattaaatttttaaaatattaatattattttattttttaaaaataaatatattattatatatatgaatataagtttgtgtgtgtatatatatttaaataagataactttatatgcatttgtatatacaagtagatgttcttttgctgactttgtttttttttttcaaattcgttcttttactgcatcggatcgctgctgcccactagaatttctataataatctttttgcaattcaaaggtttgtaattatttttatatttcttatattagaaaacacatagtagtttaatatatgtatcatcatatagaagagtttgaatatcttaaatatttatctgtagtacgatgggtggattatttttttatgcacatattattttgcactgatttcttaatgtttctgtaggttataaaattttgggtttatgattttttaagctgttatgctgttgaaattttgataaaaataatacaataagaaattaagtgaaactaatttttttataaatagagtaataacatttatatttttttaaaaaataaaaatataaaaaaatttaaagttagaaattgaaatgaaaaataatttaaaaaattaataattgaatattttaattaattaattaaaatgtttttttataaattaaataaataatctatgtaataagtgtttaatttttaaagtagaatagtaaaatttatatttttaaaaattaaataattattaaatatattgttagactaattaatcaatcaaaaaataatgaagtatacaatgtgaaatattttgttttctaacgcttttcataataatattttcgtaatacgtacattcaaattttattttttaaaaataagacaataaaattaactatgttgatattttaacatagatgacaatcgataagagttgggtatttttacggg

SEQ ID NO: 340071 - DNA, 858 bp, Cannabis indica
tctttaactgtgtagtcccatacctacacagcctcagcatcatcccacttgatcttcccaagacgatgtgggattgcacaggttacccactatatccccttacggatcacgggactactgactgtcacaaactgttcttccattataacccaaatgattagatttcacccttaaccaaaattcaacttaattatttctaataaaagagtagagcttaaaattatctatccattaacactaaaaaaaaaataaacttaagaacgtaccaatagctctatatgcctaatttattaaacctgaaacatacattctcgttagaaatgataatataacgactaaacttatttttttttccataacatactcaatttcagtcacaattcgttttttgagaacactcctcttaaactcttgatttatgaaaataagtagaacctatcaaaatcaaacttaatttatgtaatatagctacaccttgaatcatttctttaaattttctagaaaatatcccattgatcaaatcctacccacaaaattctaagacatattcttctaaacacaaagaaaatttctagtcacactaaattagtacacacaagatgtaacacaacataaaatatgtaaaactaacatgaacatattgacaaaaatttacagtacagtgagtggagctcgcctcatggcaatgaactttacatgttagggctaaccacattctttaggactgtattgctctgataccatattgtaaagccccgatttcccgagacgtcacacttactagtccgtttaaaatcatttaagatgaagacaataaaagacttctttaataaaaataactaagcatgagatctcatt

SEQ ID NO: 340072 - DNA, 773 bp, Cannabis indica
tccggtcaccgcccgacctcacgtgctggacaaatcagaagcccaagtgccggcgacctcaccccctaagcggcgccgcttctctcgctgccgttagcttgggatcgcaagtcaaagtttgggagttcaaactttgaatggatttttcggtcacctcggcgtccgtttgatgagacgttttcaccactaaactcagctcgtcgaggagagaaacctacactaaactatttttcccgtttcactactttttctagtgacatttttgtagctccgcccctttccggcgactttccggtgacatcgtgtaccgttttgacaaacggttggcatgggtgtgatctacccgtcgaggtggtcgttttgatatacactacccctatttttggtgacgtttttggtacaccaatttttatcgccaccgattgttaatgtgcaccgcttaagtgaggcttcggaaccccaaattttaaatatagtcatgttatatgtcgttggactcggttttaaatgtagaatgcgatgatgataattatttaactatttgagggtataggtgagagtaatatgtaagattggactaaacaattggagctcgggacttgagagcttaagattgtcttttggataaagtttaacgacttgggagaggtagggactcaacttgattattggacttgatttttatatgtgttgtataacattggacatattccaatttttatgatttacaaattgtttgaaaaattaaaacttaatctgcatattttctggac

SEQ ID NO: 340073 - DNA, 566 bp, Cannabis indica
ggtagaggtcccaggggcggggctcgtggtcggggtgatgttacctcgccacaggctgctcaagtcaatcaggaagcccagaattgggaaattaggtttgctgaaatgcaagccaggatagaggaacaagacttagagattcagagattgaggcagcagggggctcctgcaatgcctgtggcagaggttcccgtggcacccgcccctgctgctcaggctgaattggtagtcgcggctaacagaatggaacccttgtatgaaaggttccggaagcaagcacctccggttttctgggaggtccagatgtcatgaaagtcgagcagtggctaccagtgattacgaaaatatttaatttaatgagtgtgacggcatacactgcgcaatttgatccgttggcgaggttggcctcgggatttatgccaaccaatttcaaaaagaaagaaaagtatcttgatggacttaatgtgaagatcaagcatgaccttgtgatcactaccgatgacaagatcacctatgctgagatggtggagaaagcactgcgagctgagggcgcagttggatgtatg

SEQ ID NO: 340074 - DNA, 579 bp, Cannabis indica
ctcgcccactcttggactcgatcaaacaccttgtgccactgtcgctattcagaaccacccatggagtagtgccttcgcactagaatactccctccaacatgaactcttctgagtccatcacaacgtccctccagtcaaccaagtagcgcttgcaacactgaccctgaagctaccacatcctctgatagtagctcactcgccaatcgtccaatgcatactcctttcgacaatgactaagtatggtgcacccctcggggtgaggttcgcaaactaactgttcccaatagcacctacaaaacacgcttccactgaagccaagtccctctataaacttcacacgccaactccatggcgcaccatcatcacgatggcaactgagcaagacactctcatcgcaggataaaattaggtgcgtcccacctagacgaggttcacaagccaactgcacccaatgcagtaccaagtgcactcttggacataatactcttcgtgaagttcacaacatttgccctctggccctaccgcacacccacagcttcatgcaaaaggccccccggacccactgcatacttgctcctc

SEQ ID NO: 340075 - DNA, 473 bp, Cannabis indica
taattactcatctaaactaaataaaaatattaattagtttaattggatgttagatgtattagatttttggacatcccatccaacatctgattcgatccaattgaatatttaaaaataacatccaatttgatccgatcacaattggatatctaatgtttggtggttggttggagttggatcgattagttttcattggattggatcgatttatgcacacccataatcttgaccgtcaaatggttgtcgatcaatattcaacctagaatgtctataaaagcccgtgtctttttccttccaaagtttttacatactcatcatttttttttcttttttgagcttttccaatcttcgccaaaattccagactttccagactaccttctgctttttctttgtcgttgtcaagcaaagtattaccggcgtatgacggcttcaacactttctgtaatttcttcagcatgtaagtttcaactt

SEQ ID NO: 340076 - DNA, 958 bp, Cannabis indica
aaaagaaaagaaaggtctcattatccaactaatgcttctaaagactcttgacctagttttcttattgtcagacaactagtgagtttgagacttcttcttcttcttttccttctaattttcgaaatcctatagccttcttcacgaaaccaaatcagcctttagtgattgagtgcatggccacccatagcaagttagtcttcaatcatagtgtgtaagactgtaaagaatccaaacaactgaaggagtttcaggcttagatcttggtgatactctgcgaaagaaaggatacaagggttagagatatgagcagaatgagtcatttaattccgttcaaaccaatgcaaggtttctcataccttttatgtgtttattttcatggttttagaaattcatatttaggatgttaaaaacatacttgttagtaaatctaagtcctggtaaaagatattccaacaactggcctcagagccatggtaattgatttaatttcaagaaatatggatttaaaacgatgtatgtgtgatttggaagtgattcatgctgatctatgtgtttattgatgatgatttgatgtttgcaattttcttacataaaataaatagaatttaattctggtattatttttattcgattgtatgaaaaaaattaagcaatttactttttaagagagcaattttgattttattagaattagttatgattttttaaaaattcaaaaaaaaaaaatcaagaatcgggtgcaccacgtgcgagcacggacacgagtgatcaggggcggacccacattgtagcgaggggggcagtcgccccccctgaaaaaaaatagagaaaaaaatgtatatgtattttaatagttacaacatatatatgtattaaaagattatatttatagacataatagtagccttggtgtaattgttaaggtagttagtaaataggttagagggtaaaggttcaa

SEQ ID NO: 340077 - DNA, 1080 bp, Cannabis indica
cttaaagaaggagaaaaaagtttagctgcgactgcttacaacaaagaagcatgtagagttaccttgaaaaagtatattgtggttgatgagttgccctttcgacatgtcgagggggaaggtttcaacaaatttgtttggacctttcaaccaagatttgaagtcccttctagaatcactattgcaagggatgttctcaagtatttttgtgaagaaaaagagaaattcaaggatattttgaaaaatcaaagggtgtccatcactactgacacatggacatcaattcagaatctcaattatatggtgataacggcacattggattgatgatgatttcaactatcaaaaaagaattatcacattttgtatagttgaagatcacaagggagacacaatcgcggcacaaattcatgagtctttagatgcatggggcattactaaattatttgcaatcacagttgacaatgcttcttcgaatgatgttgctattcggagcttgcgacagaagtatggtcaaatgacagatggtctcatattaaatgggaaatttttacacatgagatgttgtgctcacatcatcaacttgattgttgtggaaggtctaaaggaaaagagtcattcaatttcagctataagaaatgccgtgagatatgtgaggtcttctcctgccaggttgaaaatatttaaagagcatgttgagaaggctaaaattgaatgcaaaggtctcttgaaattagatgtcccaacaaggtggaattctacttttctcatgcttaatactgctttgaaattcaaggatgccttcaatagttggttgaaagatttgaactacaaggcctattttgaggagtttgacaaagatggaaacaagagggacgggccgcctattgaatcagattgggagaatgcaaaggtctttgtgcgattcttgggagctttccacgaaatcactatgaagtttagtggctcaacatatgtcacttcaaataagtacttcattacgattagtggaatacaacaacagttgtataagttgtcacttgcagaaatgaagacctttattagtgagcatggctaagagcat

SEQ ID NO: 340078 - DNA, 474 bp, Cannabis indica
ttttatttttaccaaatactttgtactggtataggtgcccccccaggtgaccgagcagatgtatcactcttggtcacttgtctttcgcaaatatattgcttatctgttcggtgttttgggttcgactaaaccttttgtacgcactttaggtaaattacaatcatgctaattttttcgactcaatagaattggaaatactatctttattcatttattgatggaaaatatattttttaccgtagtaacttgcatcagagctagtgatctaatctggtcatttagcttaacatgacataaaaaaaattagaaactgtactttaaagtggtcttgccgacctgaatactttgtttctgaaacctttgcacgtagttcgcccagaaggccattcacttagaagcggatgttcatttagtactttaatgtggtatagccgacccgtaacaccttaactaacataggcgtattacgtgatt

SEQ ID NO: 340079 - DNA, 536 bp, Cannabis indica
attgttaaaatagagttgtaagaatcatcttttctcagaaactttaacgaatgaatcaaagaaactaataacatgaataagagttcatgataactcaagatttaggccgatctaatattgatcatcgttataaaataaattaggtatttatgataaatgatatgttaataaaggcagcttcattcatatcagtccttgtcatatataatctctattatatacagtaccttcacttagatgtctcactatatcagtaatccaaaccaagattacttgcactgaagatcgggtatcagtgaactgtactagcaactattgattaaagatttcataactttaatatgttgctgactgctttattcatagctaactggtcttagttatttgtatagctacaatccataacatcatatatgaataagaaattttctgattgaaagctcggttatataggtccatggtcccctaactagttgagatagtactgcttgcaaagtcagttaattggttttaattaatcaattataatttgaaaa

SEQ ID NO: 340080 - DNA, 777 bp, Cannabis indica
cactatcctgattcttgatccagctcaaagttattgtgtgggttttggtcccggtctaggttcaggttcgagtactagtctcgattccggtttagatctcagtctgggttttgatctgggttcgagtttgggtttagctcctgctcatgctatggtcctagttcggttctagtaccatttgcgattctaacttcgagtttgggtttgagtttgggtcggtgttcgagtcctggtctgagtttgggttcgggtgtgggttcgcatcctgtgtcttggtgtctgttgggtccgagccccaagttccaatcccgatctgagtttggattcagttctgggtctaagtcctttgttctgatccttgtctgggttcgagtttttgtccgggtccaggtctagctttgcgtctaattctaggtgtgggtttgagttcgggtcagagtctgtgtccgtgtttgtgtccaggtctggaccccgatctgggtctaggttcgggtccaggtccaagttcgggtcctgagtgcgggtccaagtttgggtcttggtcagcatctcggtacagatctaggtccagcatttggatcccagtctggttcttggtccgagtccaatttcgtatctggatccctatctatgtccaagtctgtgttggggatcgggtcccagatttaggtcaaagtccgggtctcagtttcggtctgggtacacgaccttgtcagggcccgagttccagtctcagtttgggtctgaggctagattttggtccgggtcctggtcacg

SEQ ID NO: 340081 - DNA, 844 bp, Cannabis indica
aatcttatggtgaaaacaccctagaataaaatacatctttcagctctaatctatgtctcatattgtagagttcttcataagcttcgaaacgatatatagaatgtctaaaacagacacccgagtgaaaagttatggctaaaatacaaaagtcagggattcgtgaaaattgaccatctggaattccggttggtgcagccctgtaccatcaagaattccagttcactacagcaggaactcgaaaatttcatctcttaaaagtctcaaaacttgctccaaacctaaccaattgttcccaaacttcacagaacagtataacaaccataatacaacatattccaagcttcaaaacacaacaattcaatcattgaatcaaattaacacattaaagtgaagaaaactcaactttagcttcaacaaaccaaactcaatcaagcagccatagaaaccacttaaaaccatcttcaacatactcaaaaacctattataaacacaccccaatcttagtctaatccctacagccacagaaaaagcaacaccctacctaaaaaccaactcaaaacttagagtttccaatcgaaaaggttgagaacttacctccaaactcttctaggctgacttggggcaagaaccagcttgaaaagaataagaaaatggctgaagaaaacattctaggtggctgattttaggttgcacgaaggggaagaagagaggaggttgtatttttttggtggttacttagcttctaagtaatttattgtaagggttcttctttttttttatatacaatcagccccctaaaataaaaatagaaagggacaaaacaagtttatttaaagaatgacta

SEQ ID NO: 340082 - DNA, 971 bp, Cannabis indica
gatttttatttttcatatttcaaatctaattatcagaactaaattaattattttttaattaatttaagataatagtagtttttgaaccttaaaaatagataaaattctaattttttgcttagttagttatcttatttttaaattttgattatcttatcttatttttaaatttaaggtcagatattttatattttgcattatttaattaattttataaaatgaccttaattgaaatttaaaataagattattttaatttagaaatataaattgtaaccatatatttttgctaactttcaaaattttgttattttatttaaatttaattataaaattagataaatgatatttatttatcattttattttattgaatatttaattttattttaataacataaaatttgaaaagttattagcatctttttgaaatagatatttagggttgttgaaaacttaatttttcaattttataggtttaattttaaaattaattgtataatttaaatttattttttttcgaagataataattaattattttgatttttcaaaaataatttaattatttaattaatttaaattaaataaatcctatatctatctatccaacttgttacatgtatgtgtgttttatatattgtttaattattaaacttgtttttataaaacctaatattgtttaatctaaattgctatggtgtacttgtttacagatccaatgatctgattttaactaatggttcaattgtcaataggtccaataaataatttgtaacaggtaaattttacaatcttctttcatctctgtgtaaacctagtagcatgataggatccatgcaaatcagtgtacctgtgtgagcctatatgtttgctttgggcttagatacatataggagcccatttaatttttgtaattaaaatggactaggttgctaaagaaaatgatcattattgatagattttatttaggc

SEQ ID NO: 340083 - DNA, 1277 bp, Cannabis indica
aatcaccattaaagctcaagctttgagttccaaactcaaacttgagcaaacctaaataacatgcaatcaaaccagctcaaatctacttaaacatgcataattaagcctctgaaaacaactacaaacatcaacaacatcacagcaacagattcaagacatttctttcaaaaatcatatttttgagctaaaaattccaagcttgaaacaaagcaaataacatgcattactaacagcttaaataacttcaaattatcatgcttacatctctgaaattatcaacaaaacacagcagcaacaaacatccaaaaatcaagcatgcattaaactattttcatcaaaattcaacaatttttaaaaagaaaagaagaagggctaacctagcttgaattgaaccttaaagagagatgaaatcacaagcaaaatttcaagaaaaaggccagctccttgctgctccaagagggccgaaagtgagaggaaagaaagagagagcttttccaaatttttttctattttttctaagtgttgatttttttgtaaaatgaattaaaagctacttaacatataacaattcatttcagccaaataaagcataaataaacatttatttttcaattaataaaatcactagaagacaaaatactaatggggcaaaaagaccattttgcccctccacactaaaaccacataaataacactaaaggggtaaataatttcataattaaacgtaatgaactgctaatttccaaattaaactaagcggtctttacagtatttgtcccacattactcttgtgtcactaatttgtgatgtttatattacacttagtaattaccaagtcttaactctataatagtgatttgataattaaataaatagtatgtttagtgtgattttataaaaataaattaataaataaataaaacattaaaaatttagcaaattaagacacaataaacaaaaacaactttaaaccaatacataatacattataaattaaggtaaattgcggcataaatatttaatatttaagattttatacatttaaatactttatttttatttttggaggcaaaaatattcaatcttacaattctcttacactattactaccacttctgttaactcataaatatggacacgtggagggtcgagaggcaatacatttatttattttattttaaaatttaatatttttaatatcaaaaattaaatgttacttgttaaaaaaaaaaaaaataagagatgcaataccaaagctgagtaccagtgcagtatat

SEQ ID NO: 340084 - DNA, 676 bp, Cannabis indica
acggttcagtaagcttttattgctttagtagtttatcttaatagaatgacttaagaatagcctgataagaagcatgttagtagcctgatagctgaataggcgcatgtcttaaatttgcaaaataagcagcaattagtaagttattcttgatcgcgatctgaccaaaatagctcttggttacgcgggctgttctagtagtatggacgccgggcgaaacaccaggagtcagtgtaactcggtcagattcagtggctgtcagggagttcagattcccccaaacgtttatggtcgaagcagaggccttagaggtagggcacgaggttggggtgatgttaactcgctgcaggttgcctaggttgcccaagaatgggaaaaacaggtttacatcgatgcaagccagaatcaacgaataagaggaagagatcagacgataaaggtagcagggtgcccttacaatccctgctttagaaatgttggtagctcctgcccctgctgtgcaggcaggaccagtcactgcagtgaactgaatggaacaactgtatgaaaggttccagaagtaggcatctccagtcttcttgagaggtctcgacgttatgaaagtcgagcagtgggtaacggttattaccagaattctaaactttatgggcgtcatcggcaataatagagtggcttgtgc

SEQ ID NO: 340085 - DNA, 831 bp, Cannabis indica
ttttgcatgccgcgacccgcccttttctttctgggcagatcctaatgcaaatttcgaatagctataactttgtgatccggagtccgttttgggagttctttataccgttggaaagctcattttgagctctatctgaatatttgtgttttcaatgccaagtatatattttatggatgtggaatcaggagttaaccctatgtatgtaaatcccagaattgttactaggattaccgacacttggtcacgagcacgcggggatttggaatctctactattgcgggacatcaagtaagacagtagttaacacatagagttatgcgcggtggtgcttatattggaaatgatatatgtgagtaattagtaatcgggattagggttattaccctaacctaagcggtttaatagcctagagttattaccctagtgatatatgtggtgttggatattatgccatgataaatttgttgggataaagggttatccgtctaagacataattaagctagactcggtaaactagtaccttgaatttaatttttaattcggtctagggttattaccgtaaaatgttataaaggtaagaaagcaacgatgtatggttatattgctaattaagtgaaggcataagttaaggtgaataccctcaataagtgttatttcgagcatgccgtaatatgttgtaggaaagattatttagtatgtaacttagggttattaccctaagattctatatgctttggtatttattgaatgcacgtatatatgtcaagagttatgtgcataagacgtaactgtacctagtatattactaggataatgttggaaattattt

SEQ ID NO: 340086 - DNA, 586 bp, Cannabis indica
atatggtaagcccttatctcatagggatgtctcgccaagaagggaaccaagatcactttgatagcgagcagttacttatcattttagcttctcgagaataatattatcttaattctactaactatacttctctggcgtcgagaggatcttcctcgtatgcataccatcttcttgcaagaaaaacacctcattgtctgctatcttggctcgccaaactacttacacttagtttgaatatcgtataatatacgctaagtatttttagtgttgtcactttctctttcacgcagcaaggttgaggcctcgtcatgaacgtgtgcacccacatggtttctcgtcaatacataggctagcagtttctatgtttctgtctcgcagaagactattcagccagccgagttataaacatactctgcaaattatatttccaacgagttgttccatgctaagcatacttttcgtttgcatgtttgagtctttcccagctaaacacgtgtcctcatctgatgtgcttaccgaacttcaggtgtaacaatttccccttaaaagttctttttaattaaaaaaagctttttaattaaaaaaa

SEQ ID NO: 340087 - DNA, 941 bp, Cannabis indica
aaaaaaactttttaatgattgcaaagggtattttcgtaacattcctctatttttgaaaagacgcattccctcttattttggcagttgtgtggttttgaggtacatcagaattaaatgaccatcttttcaacttccacttcaaatcacgtccattggatcaaatcatttttgaaatcactatcatgggtataaaataagggaaaggaaccacctttgaaccatttcagaaaattggagaaaaacccttacacttcttcattaaggatcaccattaaattcgtccatagacttgcatgccatccttatccttgaccattttctagggagtttcctccgacttcattttctcaaagcgatacttgctttgttcaaaggtttgtagacgaaattcctaggcattgccccaacccctaacttcaaacggtaagttactttcttttttctcatgctaattacatagtgtggatcagttacttgatttgtttgtatcattatcatctcatctggttttggtagttttttagggttaaaactattcatactagggttcaggaaatatgtaggttgttttaagatctccaactcattaccttctggtttgataaaattctctccagggattgggaatgctttttgctggtagcaatgtcccaccctggtttaggaatttatcgtccagaagctttagagtttgagtttcctacagaattggccattccatatgaacccaatccctcaaaacccacttccaaattagagctaaacgatgctagggctagggaacatacagtgagaacccaacaggaagatatttctagtcgttacagacgcttcttgcgagaaatatctgaaggcagacgccaattcttgcaagaagcagcctggccagtgttcggttttatgccctaaataaaactccatttcaatgtaatctattttat

SEQ ID NO: 340088 - DNA, 897 bp, Cannabis indica
aatctaaaaatttaattgggtttctttatgtgtgaaatgacatttttgcccttaagtgttatgtgtgtgcatttttggccctaggggcaatttggtctttttgaccctttgtattattttcaacaaataaaagaaattttgggaattaagggatgaattttctggttctttcaccttaaacccgaccccctctctctagctctttttctcaaaatctatttcaaagttagtgagttttgtgagaaattgcttggtgtgaagcttgataattgtggatcttggtgcttggttttgggtttgaattgaggtaacttttcatggcctttatttgtaattgtagctgaagtaaaaattgaaaatcatgtttttctaagctttgaatgatggttgcatgagtgttaattttgaaagagtttgagtgtgattgcttggttttgttgaaggttatgttgttgagttttggctgagatttcagggaattttctaggttagaattcatgttttatttagtgttatgctgctagaaaatagtaagattgaatggtttgaagctcaagttcatgagcttgaattttgttagtttggagcttaatattcattgatttgtaatctgaattttagtgtgttttattggggatttgatgcattttaactctctaatgtttctagcaactttatttagtgatttgagagtttggatgtaaattgggatgatttgggtgtgttgcgttgctgaattcgaaggtttgcatgctggtttctgggtttggaacccaagtgtcgcgacatgacttttagcataccgcagcctgcctctttgaatggaacctgggagttggtcccaggtgccgcggcatggcttttgcatgccgctgcccgccctcgagttttcgggca

SEQ ID NO: 340089 - DNA, 661 bp, Cannabis indica
aaagcttggagctcacatggtggtttttcattttatacatgaagcttggttttctttctttggaaatgttccttagggtctaaataggaggtttggaaattttggtgtgatttggggttgattggagtgagttatgaattttttgatcatttcctgctctgatctggaattccgattcagcaaccgatctaccggttgggttccagaaattcccagaactggaattccagttgtagaaccggtctaccggttgggaaaaaattgggaaccctagttcttcccatttttatgttgtttagggtattgccatgctttttatcgatagggaaacttctagtttctagtttaagtccccgggaagttatttagtgtatcacttatcagtgttgtgattgttatggtttaggagcctgtaaattgtcgtccagttcgttccactcaggttgaccggcacacctgaatccagaatcggggtaagattagtataatagtatgcatatgtattacatgtttatcgtgcatgttacaaagcctgttacattacattagatatgtatgttggtttcataccatccgactgtatcacatcggttaggctagagtatgactagcagctggagtatgcccagtgtaccgagtataggctgatactagggttggt

SEQ ID NO: 340090 - DNA, 1569 bp, Cannabis indica
ttgtgcatggaattctgaggagaaagcctttcatgagttgcacctttcgagtgtcaacttgaaatactactgttgggcagcttcggagagggtggcaggaaaaatcctacaacatacatcgcctcgtactccttgtaggtccatttgcatttcaaaatacttgagatgggataggggatcttcctttccagtatacatcttcaaggtcggcatcttaaacttgtgaggcaactctaggatattgatctctagggagaaaggggatccacgtgctcggtccaactcgaggacattgttcttctgaccggccaggccttggaacatattttttagttcatccaactatgactgcacagctggattaacttgctcagtgtcttcggtgaccagagtcacgtcagcatctctttgagcgggattttaaacatgggccccgagttgaccgactggcgcgacatgctactcgtctagccctctccttctattctgatcatctctaagatcatgagccattcccaatctattaaatatgtatacaccaggctgtctcaatgactggttggtttgaccaatctgttggtcggaaccattaacttgggcagagttattgggtatgacttctcctgacgaattactagataaggtctgtccacctacggcttggcccacacaaagaacttgtgaccggggattgggcggctgaccattcagggctggagaagcgttcactgctggatcttcgtctaactcgcccagggggatgatggttgcatgtagttgattggtagcctaataggctcttcatatcagcacggtggcctatcttgttcagtcatcaatggctacttgctgagccctcaaactttccatctctttatccctccgtttaacgaacatacgccttttctcttcaaatgtgagattccccggagcctggagttcctcctaatcatgatgaaaggtgttggtatgaccttgcatgattccaagagtagcacagaggttctggatctcggtgtcatctctaatggttgttcgaacatttgttgcgagcagaacttcactgttgcgaatgccctgattaactgctgaacttgtatttctattctcttgcacaccaggcgcgattccactcaaaagagtcatcacaccttcacctacagttgaaagttgttcaggattcgtggctagtggaacccttgcattccctggattctacagtgtgggatccactgccaatggatttactagatcaactacgcctctaggagtctataccaccatcatgtttatgattagatttgaagtaaagagcgagcttgagttcacgctctcaatgaaagcacaaaaatattgacctcacttttggccaacgacattgagtcttaattgtaagcgaaaagtagtataagatagatataagatagtgaaataaataaagacacagagctttttatcgaggttcggtcccgagcaattcggtaatagcctactccccttgatttgtattgacgtaagaacaaagaatgcgatgattccttttcttagagctcttacaatgatatctct

SEQ ID NO: 340091 - DNA, 405 bp, Cannabis indica
taagaaaacatagtttaatgaattatattctagataaactatatgtattttcttgtattttaattaaatatagaattataaccaactagattatttctgaagcttaatttaattatttcattaaatattcctatttaagttgaaaattagttatttctaactaatcaacttaaatttaaatatcttttattggttattaagattctttggatattttttaagttggtattttatcaaatatggataaacttaaaatggaattatttttttaaaattaagtggttacaacttaattttaatatttaattaaattagatttgaaaaatatttaagttgaatattttagattcttctaaacaacttaaataagatattttttcaaatttattccattatattttaatt

SEQ ID NO: 340092 - DNA, 692 bp, Cannabis indica
atggaggcttgaagcagagacgttacatttagacatgtactaattatgctttttgaaattttcaaatttttaaaaattctcctcaaattattaggattattagattcgaaacttctgtccaagttcgttcaattttaataacgtgataattttttatgtatcaaattctaccacctaaactttgatatgtacaccatatcatatcttccgaactttgatattacaaaatcgtgtcctctaaacttttattcacgtcaggtatttgttagtaaaattggacgaaaaattcttaaattcaaaaatcacaataattcgagaaaaaatttaatgacttaaaaagttcagtaggcaaaattcttaattagctaaaaataaataaaagtaaagtaaaaactcaaatatgaaaattaatgtttcccttctactaaagaaaagtaaggaaaataatattaaaaacccttaattagtaaaaacaaatataacttattaagtgtatggtatgaattcactacttaccttattttcaatccattttaagtatagtgtaaattagatttaaatatatttttatacctatattaaatttacttgtttgtatatttttggctcacattattcttgaaatttaacatggataaattacttttattgagtccaataccaattttaatcattaaggtggcgtttggtaa

SEQ ID NO: 340093 - DNA, 568 bp, Cannabis indica
aatactaattaatatatcatccaatggactaacattcaaattacaagaattaactttatcaacaatggttttacaatccatttttagaacatccactgaaagatgaagcaattgaatccattgaataacatgttgaattgccttggcttcagctatggcagcaggattacttccaacacaaggctttgctacgccagctttcactctatcaagctcaataccatagctatgcttcttgttatgatgatcaagagcagcatcagtgtaaatctgtagagaaccctcctgcaaagcatccaaaaccctattttacaaatgaactgaagcactaggatgctgattagcgtgttgtgcatctaagtatttgaaaaagtagctaacacaccaataaaaaatatcagaagttgggataacattgttatgttgaagatgattgttcctttgattccaaagagtccataaaaagcaaaacaaaatgttaacataatccttatccaaagcatcaaaagagcataataaaaattcactgatatcaaggtgtttatatttataataatgatccataaac

SEQ ID NO: 340094 - DNA, 959 bp, Cannabis indica
atcaaccattgatattgacttagaaagatataacagtaagtttatgatatcttatccaagattaatatcggtcccttccaatgtatactccatatatccgatactggtaaactttgcgaatgccctggaaaggacataacacttaagcaaggtttatgtatatcttattgccgatgatcatgtcagtctaaatccagtgaactaaaagatcatgggaattaaacttttgaacatgtaatcataattatattccactgtgctgacaacactataattatgaaaaaatatatatatttacatacgtgttaacggagattttcgttaaccaaatttgagcctcacattaacgatttcactcagaaaaataaatgatataaaaataaaagtatgaacacacaaggttttttacgtggttttgtagttaaaattctacatagtccacgagtcaatcttattcagatttcttattatttttcagggcctcctttctatgagttttttcgtccatcttctcatcttgcttgccactatatataataatatagtgagcaggtaattacaaacttgacggtaatctttacagcaattattccctcaaatcatgtgatttgatttacaaattacgctaagtaaatgcagtttttatttagaattcacacagctgtgaatatcccgcttttattgggccgagatgaacgcacattaacgatatacggtaagccttatttcatggggatgcctcgctgagttaactttgatggcatgctagagctcgtcatacaacttcccgaggttgatattgattttacttttattctgacaattatagtttttggtgtcgagatgatcttgttagcccaagatatgtttccaagaggggggtgaattggaaatttaaactaatttcggtaaattaaaacttttaacacaaaattaagcaattagtcacttaatcaaat

SEQ ID NO: 340095 - DNA, 684 bp, Cannabis indica
atagtatcttcttgaatgttttagaaaatttaattctctttccaatgacactaaaatcttagaaattagaattatattcagagagatattgcaattttaccaaaataatttttaaagcacaacattcaataaacgaatcacaggatacagaagaaaactaactttttgacataatatgactctgaattaacaaaaggtttcttcatgacacttatggaaaattgaataaaatttaaaactatatatagatcatcaaaaatggatgagaattgagagagttattatattttatgtgaaagtgcttttctagaatatgaagaaaaataaattacaacaacagcagaaacataacacagaattggtaaatagtttcttcataataattttagatcatcgaataagttttccaacgatacaaaaatttctgaaaaatggatcaatatcgagagagatatcgtaactttcaattttgatgtctcaagcccgcaagtcttgattaaaaatccaaaacattaagaaagaatgtagaaaaataagaagaagtatggaagagttaagaggagcaaccatgaagatgaatgaggctttgaataattagtttggagagaaaaaataaaactatgatagtttggagtttgataaaaaaaaaaatcctgtactgaagagtatgagatattgtattgc

SEQ ID NO: 340096 - DNA, 447 bp, Cannabis indica
attggagttttatttagggcataaaacccaacactaatcgcttaacctttttaagtttctttaatttattgtatatataaatttaggattataccggtataatagttataattgtagagaatgatgagtagaattgtctgtattattcatgtaaataatatatatttacaaaaccttagagaaactaaattaggaaagtaggtgagaaaataggaaatgaaatatgttataccatgattttgcaaaattagcaaagaaaatgataaaaaattacttaggtggtgataccatctctaatcacctaggcacctaggtggtcacatcatgtctaatcacctccccatggcaaacgtcttcacaggcaaacctcatcactttatcacctcaatactattttgagaatctcatcatcacttacactatgtttggtagaagggagagaaggag

SEQ ID NO: 340097 - DNA, 493 bp, Cannabis indica
atcctaagtatagggggtatatactataatgtactattgattatataaaaaaaaattcttggaaattcttcaaggcgttcttcaagtctaaattttaaagtttaaaatttttcaagtcttatgaaattttctacttattacacaaggttgtaattaaagtcgaaatattatagatattaaagcgcgaatacccgtgtacggcgaaaatactaaaaacagatatccccgcgaggatataaagttgttcaaaataaaatgcaaattggtctaagtacagagtgtgagtacccctgtaccgcataatcaaaataaaaaaaaccaaaaaagaaatagggtttaacacaagcaaatattaaaggaaaagtcaagcattgggagcagcaggaacagatccatccacgactttgttgaccgcctcgttctcgacttcctccacctccgcgacctcaatctcctcgagaagattccccccaccaccttgagttggcgtggg

SEQ ID NO: 340098 - DNA, 1087 bp, Cannabis indica
aaatttggaatgaaaaaacttctctaaaactaaaaatttcttttcaaacttgaggcgagcttttcctttagcttggactgatactaattcatcatttcctactttgagctttaactcccctagatttaaataatcccaagtttcaagcagctgcaatgaagaacaaacatggttagtagatccagaatcaacaatctaaaaggatttgttattctcgaaaacatatgattcaaaaacaaaagcgttacattcgttcgaattgtctagaagtctgggaaatctttcttcctgaagtcccttctcatcacaatatgaacattgaagagtacgactgttcattatttctattattgatcttgaagaaacagcattgttagaagcatcatagttaattctttttctcttactcatgtttgcgaaattggagggtggcctccttgcaagcaaactccgctcgtaagcacgcaattatgggtccagcttatctacgtcggaagagttaaaattgttgaccatgtaagatacaacaaatccattatactcaggtggaagactattaagaataaattgaacccattattctcttgataaatcaattcccagaaaatttcctttccagaacttcagattcatcatcattaggtgtgaattaatgctcttaccaaaagacattttcacactatagagttcatttgtaaagacatggaaaaggtgaggttcggggtgtgggttatccattttgacactacaaaaataaatcatttggttcactcaaaattcatacacaagtttagaaaataacaattaagtcaacatgtttgcaaaaataccaaaataaaacatattttattattttctaaggtttccaacaaactgatacagtgtcccgtttaggcgagagtcaaagatatcatctattgaatagagtagtcaactcatctaaaataaaaacatctagcaaccttttattcgatcaaaaagagaattcgacgttgtctcgtttaggcgagagtcaaggtcatcctatttcatgagcttctactattgtttctatacttttgtaagtcttactcttagtagccactat

SEQ ID NO: 340099 - DNA, 816 bp, Cannabis indica
actcttttcagatcataaaggtccaaaattgcatgccaactactgcatctctgagatagaacaacatacaatttgcattaagcaataatctaaaagtcacataagctatgtgaatactctcgtttcacatcaaaacctatgtctattcatttagagcattctcaatactcacttttcagattttgtattgagatcatagaacatgcaaaaggtgatcaagcttaaacatgaaataagcacaaatatgaataaatcacaataatataggaagaaagaacaatcaaataacattaatccatagaataatctcagtcaatatccatcaaatccctaaatagagagtttagctcataatcgaatccataattaaactaaacacaaataaaaacataaaaaatcaagagaagagaaagaaactagatggaggattgttgcagatcgcccatgctcgctccaagagccttcttcttgtgtttttagggttccatatggtctcccctctttaatttgcgaccctctttcctttaaatagagtttttcagcccaaaaacgagaaaagacgaagttatccttgacctgtacgaagtccgcgccgcggcggctgtagaaaagtgaaaaaatgggctttttgtagtcccccgccgcggccactggaccttatttttttctacttcgatctctttcagtaaaataggcataactttcttataccaactccatattcaagatgcgttggaaagataaaaaagagatctaaaccttttatgtttagactttgtccaaaatctgaagaacatagtcgaatttaggcttgaa

SEQ ID NO: 340100 - DNA, 476 bp, Cannabis indica
aaaattaaaataaaaattctaaaagaagtttgtagtagcattgtcctcatcactagcatctccaagaacatctggcatctgtgggtagtatggcagcatttgtgaacttgtcatcacttgagatgtctgctgcccatgtagtgttggcatcatttgagatgtctgctgcccttgtggtatcggcatcatctgagatgtctgttgtccttgttctgtcgacatcatctgagaagtctgatatcctggttgtgtcggcatcatctgagatgtctgctgccatggttgtgtcggcatcgtctgcgatgtgttctgatattgctgtcatggttgtgcctgcatcgtttgcgatgtgttctgatattgctacccttgtgtcgacatcatctgaacattttgcagcatttgtgatatttgtggcatctaaggctgtgacacatgaggcgtctgaggcgactgcgtcatcatattcatcaata

SEQ ID NO: 340101 - DNA, 790 bp, Cannabis indica
agttcatatttaggatgttaaataacatacttgttagtaaatctaagatcctggtaaaatatttccaacaaacatttatccgttttacattatgacataggcctacatttagcacgtgaatttccatttaggttgattgacacacttgaatcaggaaacgaggtaagactagcatagaatgtatgtatatgtgtatgtgtattatatgcatgttatttgtatgattcatataccactactacaaaccaagcctttagatgcacttttttcagcataatattgaagaaccgacgacatagggttgggaagttttggaaggaattttgacgccacttatggcgtcagttatttggaaataactgacgccatagggtccaccccaaaaaaccgacgccgaaagggtttataaccctagcccagcccatcgtcttcctcattcgaccagccaacccagaaacccccaaactagagaaaccccaaaccctctccgccaaccaccacgaaaaatcacccccatttcaccattttttttcttcaccattttagctcatttttgtttctaaatcttctatttgtcacacctaaaactatataccttaaaagatcacatttttctcattttttagggcaaaccgaaggtagaggtagtggttgtggtggttatacctccggccaccgtttttagtggagaaaacattgtatctcaacgtctattaaggtataaatctaatttctactaattttagtaatgtacattgctttattttttattttataaattttttttagg

SEQ ID NO: 340102 - DNA, 716 bp, Cannabis indica
gcttcatgttatacttttttaattaaagcattgcgaggtctaaggtatgatccttaccctttatcaattttaccaaatatcatcgacgtaaacctccatatttcaccttatttggtttgcgaacatttcgtttactagtcactgatacgttgccccagtgttcttcagtccgaacggcatgactttataacaatagagtcccatgttagttacgaagcttttatgttcttgatctgggacattcatttgtatctggttatatccaaaatatgcgtccataaatgacataagcttctacccagcagtagcatccactaactcgtcgatcttgggaagtggaaaatagtcttttgggcacgccttatttagatcaaacaagtcaatacaagttctccaagttctattgggcttcgggacgagaacaggattggctatccatgagggataaaacacctcgcgtataaagtcgtaggctaacaatttgtcaacctcctgttttagtgtcccttgcctctcagaatccaagggcctcctattctatctctttgttgggtagcttggatcaacatttgagtgatggcagataatattagggtcgatccctatcatatctccatggctccaggcaaactgatcctggttaccttcaaaaagtttattagctgctcgtactggttcttcccaatgtatacacattttgtgggatttcctgggtc

SEQ ID NO: 340103 - DNA, 1368 bp, Cannabis indica
ggggatggcctgagtattaatgcctttcgggacccttggcttcccagggctagaacgtttcggcctatttcgccttctcctcctgatagtgtgatggttaatgatttgattggcgtggatgggacgtgggatgtccactctttgtctcaatactttttggggatggatatcaatattatacttagtatcccgttgcggagtggtctctgtcaggatcgatggtgttggcattatacttctaatggttgttatactgtcaagagtggttatgcagttgctcttgaaatgtcgagtgaaaggaatggtagttcttctgtgaatcaagctcattggtggaatgggatgtagaatttgagggtgccacaaaaagtaaagatttttctttggagaatgtatcatcgcgctcttccgactaattcccagcttatcaagcgtaagcttcctattcagccgacttgtcaaaggtgtggtgaggaaggggagactccggatcatgctttagtcttttgctcttcattgcgacctttgtggtctaagcttcggatttggaataggctaactcgtggtagcactgggtctttagcggaattgctggtgtttctatttgaggtacttgatccgaatacttttgctttgttgtctatggtttgataggaactcggtgttgtttgggaaaaagccatctagattggatgtgcttgatgaattagctcgggaagcttttgaggagttttagggggtgggtgtgggggttggaggccagccgttgggtgcttctatggcttgtggagttttgatgggggtcgggtatggtgaggtggggcagggagtgatgaggaggggtaggtgtgaggagaggcgggtccattggtgcccacccgggataggggagtttgtgttgtctgtggatgcggcggtcaccctggggagggggttcgtggggtttgggggagttgttcgaggtggtgagggggtggtgtgggcggcctgggctatgggtgccgtgggggatttccaagtggcggtggccgagcttctggctctccgagcgggtcttgtgtgggctaacaggttggggttcaatttggtgcgtgtggagacggattcttcagttgttagttcttggattaactgttcggataatattcttatgtttaagccaattgttgaggagattatttctcttttagcggctgttggtggtggttcttgttgtgccatttcgcgtgatgcgaatggtgtggcccatgcactagctaagtctgatactagttctttaggagttcatttgtggacagatgcttgtcctagatttattggtccttcggtaacagctgatttactttgatttaatgacatactttcttt

SEQ ID NO: 340104 - DNA, 881 bp, Cannabis indica
gatatttgcagtcgtgagagtgtttgcaaaccttgttttcaaggtatcaaccatgctagacagcataaagtttcgagctttattgttatgctcaaacttttcgttgactgccttggtagctcaggagcttcttcagttaatacaaacggagagttttcatgcatgagagcaatataaatgttctcttttcatttgacaaagttagctctagagagcttgttttcgatcaatagtgacacaattgggttgttcatagtcatattgtaaactttaaatatcaataaatagaaatgcatccttttattcgatcaagttgaaaacctggcgttgtccagtttgggcgagagtcaaggtcattctatcttatgagattccaccacggtttcatactttgtaagccctactcttagcaatcactattagagtgatcattactgagaataaaagacttacaataatacttttctttcgaaattctacgacgttaaattgttaatgaatgaacatctattatggatgaatctcattaaaacaagaactatgtagaaccaataatggagatcgaatatccttatagtaaggatcattattttaaagtatgtattttaatctttatttatataatctatttattttaatatatatttaattatttaaaattactaattagataactataattataaattttaatttaataaatacaaaattatacttagattgatctaaaaacaaataaaaattatttttcttcttagtattaattctcaataaatattatgaaaattacttaatttaagttgttataaaatattaattaatgttcaactcaaatttaattttgtataaatatatatgactaaattcgaaatccaatgtat

SEQ ID NO: 340105 - DNA, 678 bp, Cannabis indica
aaaaaccagtaggtcggcctaggaagagcaatgcaggtagaagaccgacgaagcgtcgaccgtccaatggtcaggtggtagtagaacctcgtcactgctcgctatgtcacggtacagggcacaacagagctacatgcaaagctcgagtttgaaccatttctctaatatttaaatgaatatgtgttgtattgctggttgttgtttaacaggactatcgcatgaatatttaacaatatgcgacattgtgcgatttatatgcgatattgtgcgattttctcctagattaatactttttggtatgtttagcgacttttaggcgacatttatgcgatgtttgtgcgatgtatgatatatggtattttttgtgcgattttaacgatattatgcgattactgtgcgattttagtgcgatgttaactgacaggatcttaattttttagtttgtttggttctgtattttttggcgatattatgcgattaatgtgcgattttaatgcgattcttaccagaatcatttttcaagatgtcatcatttcccatagttaccgttataacaataagacaggtatttatcaaaaattaaaaaaaataaagaaattgatacaagcaacaatttaaatagctttaaatttacttgatgtatataattttggtgagattataatacaattacaaaag

SEQ ID NO: 340106 - DNA, 833 bp, Cannabis indica
agccatttctggctcaatggtttccaggaccatcagtatgggcaggtgagttgcaacgttgtaacattgccttgcctccccgtgatttcctctcaccagccctattccagcttcctgggtagggaactttaagcacaggtgtcgtatggacgtgactgcgtcgaaatctaccatggtcggtcggccgaggatcgcattgtatgcggtcgggcaatctaccacaacgaaggtgcagtatttgaacgtgctttggggggagtctgggcacaaggtgacaggaagtctgcatttcccattgggataagcgtcgttccgttaaaccctgtgagttgggaaccactgggtgagaggtctcggtccgtaaggcttattgcagtgaaggcctccttgaagagtagattcacggaacttccgttgtcaatcaagactctggccaccaacttattggcgatgggggtctctatgaccaacggatcatggtggggaaaacgcaccgtcttagcatcttcttccgtggacgtgatgggttgatccatcagccggggcctctgagctgggagttgagtaacctcccaaacctcatcgtgctttacggcccccgcataccgcttaaattctttgcgggtagttcctccaatatggggccctcctgagatcatggccactctcccattaggtctgggtggcagaccggggatatgctaggcatctccagtaggagcaactggagccaatactcctgctgcaccccttggtgctccctgcgacacaacccctgtcgcctgacccggattaaggtgaggcaaccgattcttgatccactcatagaggtg

SEQ ID NO: 340107 - DNA, 503 bp, Cannabis indica
actgcacacacttatgtctgacaagtgaattcaagtgtgtaagtctcctctactcaactaaaaaaaattatcgtgattcacattatttgtaatatgtgtattttttctcaacatctgttaagaatggttggttcttgagatactaattagttattctcttttgaaagcataacatgtatatttgtcatttgctatataatttgattagtcatttgatctagaataccttatatttactgtacatattttatttatttttatttattttgggttttcaaaaataaaaaaaaaagtgggaggcgttagtgacttgacttgtgggctaagaaaattttgtgttttatttggtaagtatcaacatttaatctaaattgatttattttgaaaagttaccatttaaatttttatatcatattcattgtattttgtcattgatcttgaaggattttcttaaattgcctattttttgaaagtatcttggttgttctagtttccttttattt

SEQ ID NO: 340108 - DNA, 595 bp, Cannabis indica
attaaaaaaaaaaaaaaacagccctccccctgcacatggtgctttcatgctcttcctctatttttaaaaaatctctcaaaatcttataaaatctctttaaatttgtagaaaattaatttataatacgcttacatatagataagatcaacattgttgtcaagaaagcgattacattcaaggtaagtgaatgaaccctaattttttaattttttattttgaatgtaaaaaaacaagaaaaattatatttttttagcttgattttttttcatatatatttgatagaaacaacaataaaaatatcatactagccatataattactattttgtagtttttgagtttaaaaactcatttttgcgaagtgaacccgaggttgaagatgaatcgtggggctcaattattaatggttgatctcgactatgttagttgagatggtgattttagtacagctcgactatgttagttaagattacagttttagtaaagctcgactgttgtcagtcgagatgacaaacgttacggtagagctcaactagatttaatcctgatttatatttttaattgttaaacttttttcatcgatgtttgctaaaaga

SEQ ID NO: 340109 - DNA, 669 bp, Cannabis indica
taagttgttttgttattccaaattttgcatcctgacatggcatcacacaatggtgacacgtggaaaaaactttacatatctgttcgcacgagatatgccgaacagagcatcccatatagtcgcacagacgaagtcttcttggtcaggaagtgagcaatccgaacagaacgccaacacttagcagttttaacactcacatcgtgagtcacagaagaaatccctataatttagggattatatcacagagatatggcaagttgtccaaaacccttaatcagtgtattctgtatttaatatgcaatcatgccaattatatctattttaatcaggagggaaacttcttccccacaacttctagccctataaatagtgtttcattctcactgggcaaaggggggagaaacttatctaataattcatattcagagatattattgtaagagctctaagaaaagaaatcattatattctttgttcttaagtcaatacaaactaagtagagtaggttattaccgaacagctcggggtcgactcggggtcgaatctcactcttgtgtctttatttatttcaataaattacatataaactatactacaatcaagactcactgtcgttggccaaaagcgaggtcaatattttggtgttatcattgagaggggaatcacagga

SEQ ID NO: 340110 - DNA, 564 bp, Cannabis indica
aatctggagatgtctcgacaaatcttgattatagtgatcccaatagtgagctgggaccattcttctttccgacgtcgataatgtatgtcttacgtcgatcgcgggtataaagaaatcttctcacttgccagggttatgagcctcggtcctgttagttagatgaagctacaggaagtcttctcatagcgagatgttcatctcacatacttattcttcgagccgatacgacttttacacttagtttgcttattgcaagctaaggtatgtgtcacttttctccggtgcctcgctattcacctttagcgacatatggtttctcgctaatacactaagtgtcagtttgtacattgatccctcgcctaaaaccttaaagtcggggggttataaatatactctgatacttacgtaattaatgagttattccataaaaagatattgcactgattcatattccctttatcttgacacgtgtcctccaaccaaatttcgggtataacaattaccccttaaaaagttcttttttagtaaaaagagctttttaataattacggagggaatttttgc

SEQ ID NO: 340111 - DNA, 893 bp, Cannabis indica
atttttagggttcgtcggacgatttttcccctggccatacgggatctcaccgcggccacattgttcctcgccgctgccagataggattccaaaaacaacgtttctgttgtgccactatggctgcggtgagggtgtatctcgccacggcgactggagcgtcaagtgttaggcattctgccttcgagttatagccgcggccacagtgatctagccgcagccagaagtgcgtcacgcctaaaattggtgtttttcttggctctgctcgtcttttactgcacttttacatcccgaggcctccattactccgaggaacctgaaaacatagaaaacaagcataattctgtcctaaaacaatgaaaagcgaccgtaaagttgatccaaaatataagctaaaagtaacctaacaaattcccccaaactgaatctttactcgcccccgagtaaagctaagactcaaactaaaattaaacagtgcaatagataactaaactttcaaatgattgaactgctaccaccacctgcacaacttcaagcaatcaataaccagaatttcaactcgacaactctaagaactaacttggttgcacaattcagaagtaagcaattcatacagtcacaaacacctcttttaacattcatatcacaaccattctacactcttcgacattccgctgacccatgttcaataagcttgaacgacatacctctctccaccaatgttgacaattcttgctcagaatcaaaaggtcttttcggtaataatagcatggcttaggtaaaacgggtagatgagaagtcatttaggctacattataccataagcacaattataccaaacaagcacccacacttatccattgttttctttttcatatatcccaaagaagatagta

SEQ ID NO: 340112 - DNA, 1144 bp, Cannabis indica
ggaatttttggtaagtatgtgtacagttttatcttggaaattattttgggtttaaggtgttgtaatagttagactatacaaataaatgttgagtgagtggggaatagatttctaaaatgatttagagtttaatcatgtagttaattgttgagtggaggcagttaaggttatttttcagttatggagctttgagcttgagctttaatgtcactttttatttgggagcatgattttgatttctgctacgtagagaatattgtatgggtattattaagtgttctgtgaagtttaaaatcaattggttagattttggtagaatttcgagaagatgaaattcgattttttcgtccccgcaaggaaacggttaactgtttttgttatttttgggagaatccctattcgtattttggccataacttttcacttgggtgtccattttggacgttctatatattgttttgaagcttgcgacgagctctacgatatgatgtatgttttagagccaaaatataagtgtattttagtgtatttgtattatggaattcggtgggaaaccctaagctgtcatttacaactattaaccagtgtttttgaataaacactaaatagtttattattgttatgacatagggcccaggatcatcgatcgttctccaagaaagtcggccaacatacctgaaccagaagttgaggtaagaaaagtataatgtaccacatggcatgatgggttccaaaattatcgattgtctgattatgcaatgataacgtagtgatactaatggacataatatataagcatcatctgattaggtgatgcaatattcctggtgacgtatcgggcgtaggtacgggcgtcagtgacatatgataagtaccgggtgtaagtatgagatcgtttgcttagacgatgcgatatattagtgcgaagttgtggcacgggatcacttgattaggtggtgcaatgatattatattatgacacgggcttgcctgattaggcaatgcaaaatatgagcataactatttctatgcatttgactggtgacattacttactgttgaatgttatactttaatcattttgtgataatgaaatatataattagctatttatgtatcattttttcttgttgagtctatgtgact

SEQ ID NO: 340113 - DNA, 584 bp, Cannabis indica
ctattatttccaaatctcttactcaaattattccccacttacaacctttctttccccccaaacttgattaaggacttatggcataatcaggcatgttgagaaggaaaatagttaagaataacgaattcagcttagttaagtggcaaaaatttttgaaataggctaagggtcaactttgggtatactaaggataaaaccttttaggtaggcttgaaaggctcaatcgatccaaagaaaacttgcctaaatcattttccaaacaaaaatcaacaagaatttcgcttcaagagagtatgtcaaacaaattctattccatgtcaagccaacattccacaatccaagtagaacaaaagtgatacgtgtcaaaaataaatgttttacatctaaatgaacaaccctctaacacacatccaatttaatttagaaagttatgactcaagcacacggttaagattacaatccattgcacaagtgaatacagtggttcaagcaactttccaacttagctatcaacacacgacactaaagatattaaaactaactgaaaatgaaacgaaaaaaaaaactgaaataagctgaaaaaa

SEQ ID NO: 340114 - DNA, 1269 bp, Cannabis indica
aactagtggtttttccattccaagaacaacaccatgtcctaagaataactttctaagccagactagttctttagcaacctttgcggcagctatgtatttggcctccatggtagagtctgatgttgcggtttgcttagcacttctccaaacaagtgctccacccccaagagtaaataccatcccagatgtagacttcctgtcatcaagacaagcctagaaatctgaatcggtatagccaacgggatttaaagccccacccttatagtctaacacataatgccttgtatatttcaaatatttcagaatatgcttaactgcagtccaatgttcctctcctggatttgtctgatacttgctcacaattcctactgcatagcaaatgtcagatctagtgcataacattgcatacattagacttccaactgttgaagcaaagggaacccttctcatgtcctctatctcttgagggtcagcaggacattgttccttagatagacggataccaggtctagaaggcatcactgtccttttggtgtttgtcattgagaatctctctagcacctgatcaatgtaagctatttgagagagagcaagggatctgttctttcgaattctgatgatttgaataccaagaacataagcagcttcacccaaatctttcatttcaaattgagtatcaagctattcctcgatgtcagttattttcttgatattgttaccaataatcaaaatgccatcaacataaaggaccaggaatactaccacttaattatccttgagttggtaaacacaaggttcatcatcatattgttaaaagtcataggttttgataatttcatcaaaccctttgttctaagaacgagaaacttgcttagtccataaatggacctattgagtttgtaaactctctcttcctgccctggaagcttatatccttttggttgctccatatagatggtttcttcaagaaatctgttaagaaaagctgtcttgacatccatttactgaaattcataataaaaaacggtagctatggagagaagaattctaatggatttgagcatggcgaccagactaaaagtatcctcatagtccacaccttctctttggatataacccttagtgacaagtctatctttaaaagtctcgacttctccaccaacacctcttttcttcttatagacccacttacatccaattagatgataatcattaggtgcgtctacatattcccacactttgttctttttcatggaatccatttctgaa

SEQ ID NO: 340115 - DNA, 939 bp, Cannabis indica
aaccacttccaaccattacatcaaagaaagttcaagacttcattttgaagaacataatctgccggttcggattgccgtggaaaatagtttcagataatggaaagcagttcgacaaccaatccttcactaacttttgtgggaaccatggtatcatcaaaagtttctccgcagtggcacatcctcaagcaaatggtcaagttgaagcagtcaacaagaccttgaaggatacactgaagaaaaaactcgaagatgccaaaggaattggccagaagaacttcctgaagttctatggtcatatcggacaactgagaaaacggcaactggacaaactccatttgcaatggcatatggatatgaaggtatgcttcttgtagaacttaagccaccatcccatagaagattgacgtacaacaaagataccaatcacgtactcctggccgaatcccttgatgaaattgaagagaaacgagccacagcaaacataaagttgatagccaatcaacaaaaagtagctcgatatttcaacaaacaagtgaaggcccagaaattcttcgtagaagatatggtcctaagaagggtatttctaaacaccaaagacagcacgacaggtgtactcggacctaactgggagggacaatatcaagtggtcaaagttgtcaaatctggagcatacaaattaggtaagtatgatgaaaaaatgcaacttgttctagtaccacggtattggaatggggaacatttaagaaaatactaccatgaaagtacaaggtcagactgatacgaaccacaccaacagttgtgatgaaacccgacaccaaatatggccgactctaagaattcacgaaatttggatgaggaactgcaactcaatgcttagttaagcattaaccttggtatgaaggaagacgccacaaacggtggtggaaatctgtttgataa

SEQ ID NO: 340116 - DNA, 716 bp, Cannabis indica
ttctcccccacttaattgttcgggttctcgactgcatgatcttcagtcttctgcataaactcttgcaagtcctctgccttctccaagctgatctcgtcatcagtgaggcccttccatttgaccaggtactcttttctcttctttctcttcacatgaacagttctttcggcaaggatatcttctagttttctgctgctgcgtcgttgaatcttgatgttgtccttggtagattggttgcgcgctggatcctctagatcttcttgatacgacttgaggttgttgatgtgaaggaccgggtgtatcttcatccaagaaggtagttcaactttgtatgatgctaggccaactttggagatgactggaatagggccctcatatttgcgcacgagtctgacgtccttgtcccctcagaatctcaaatgttctggccgcagtttgatcaaaactaagtcacctgctttgaactccagcggttggcatttttgatctgcccacttcttcattcttcgtgaggctttctctaaatatgcttgggtaatctctgtattcttcttctagtcttttgtaaaattgaaggcccgtagattttgtctgtggtattcatccactgtgcggggtaacagtggttgctattcattcacaactttaaaagggctcttatttgatgaagaactcttattagagttgaaataaaattgagctacgtctagtagttg

SEQ ID NO: 340117 - DNA, 627 bp, Cannabis indica
tcagcttccttagagccagcagcaacagctttcaggaacaaggtcattgactgcgaagccaactccacagaacgcggaacaagctcctcagaagggatcttctccgccttggatatgaactcctcacctacgaacttctcctgcatagccaggaagtcgcgggctcggacggttggctcgatcaggactttcttccccttgtcctgcgtggtcttagccagcttctttgaagagtctgcggcaagggtagccaccacatcgctcttcctcttctgggcgacaacgggcgatgtcgtcgctgttccgctcttcggcttgattttaaggacaggcgcggatttcagaaaagtcatctctgcgaagataaataaaagataagtataaataaaactcaagacatcagtttatgacaagagataaattacctgagactggtcgagaagtttgcttggagaggcgtttgtctatccgctcttgttgcctctcagacggttctttgtatactggctctctttgaagacttgcgttctctggaatcagctggtgttctcgcagcttggcagtcgtacacagtaatcgccagtcgcgatcttgtaccggaaggctcccaaggatttcggctgtttc

SEQ ID NO: 340118 - DNA, 470 bp, Cannabis indica
ttcatttgtgacccaagaagcttaaatagttcaaactagaaggtccctgtgaattttcaatctcagtcacttactatatttttggggtactccccagtactttactatatgcttaaagaaaagttgagctgtctcttctgccggacactacttcgacactgagatgaaggttgcatacttgaaaatctgtccacgatcaccaagattgcattcagtctccagtcttcggcagacttgtaatgaaatcaagcgagacactctcccatggtctgcttgggaccaacaaaggctctaacaaccctggcatcttatgcctctccactttatcctgttggcagacgagacaggtccttgtgtagtccaccacatcttcccacatctgcggccagtagtacccatgcttcaaaagggcatgtgtcctatgccacccttgatgacccgcccataacgtgtcataacactcactcagc

SEQ ID NO: 340119 - DNA, 997 bp, Cannabis indica
agagattttttctttcgaccatctttcgattgttaatacgatatataaggaccgctactacaaatagtactacatatatatatatattctaaaaaaaatataaaagttattggatgatttttattttttaacggaatgcacagtgatcgtaatctaattccctagaaaattgtaagcttgatagcgataatgaaactaattctcctaaaattgtgattctattcgtacccttcatatcccattctaacgttgagattagatattaaaaagacttttaagaatattttcgtccttcttttctccgacgaaatcctactcactattctcgctaagcttcccctgtctcatcgcaacaccaactcaatcgtctgcaaaagatggcccagtcttcaagatcgtctggtacggtctctcaagcttctcgattggggctttcttcagtcgggtaggctgacccttaggttcccaaatttgacccatgttgatttgttttctgggtctttgatttcgaccctgaattctgatattttgttgaaccacaaaatgttttctgttcaaattggttctcatttttcggcggatgctcaagctttccaggcccatttgcttcctcctgaggttattgatagagggcttccagagctagccaacggttgcccaaatcttcacaaagtggcattggttggtgctactgaactgggtctgttaagttaagccgaagaattctcgactttgcaagatttagaattgcacaagtacaacgacaaagtcttgcgtggtatagcagcatgtgagaatttacaggtactaaagttggtaggcaatgtgaaagagttttatagctcaacggtctctgtttgttgttctattatacaaattagaataaagattaacaagtgcataaatacttattatgtatagtacggtaaattaattaagtattttttttaccatttcacaattttattgttaagtccataaaaaattaaaaactcct

SEQ ID NO: 340120 - DNA, 568 bp, Cannabis indica
ctttgatattagttgttttcttattgggctttataagctcacccctattttctctccttccaggaattcagtttgatattagtggatgaagatggtaccgttgaggaagaaaatcattattagttttgtcttattctacttattaaactttcaatgaaacttattttgtatttaagctaaaattgatagtctggatgacttaaattagctatgtactagttagaaaagaggaaagattgatgctagattttatttgggtattttatcgacctattaaatctatctatttggtgactacataattgtggagatattattgttctttcatataaatgagtggtcgtaattttcttactaatatttttttatcaatatgtgagttaatctattatttttaaataagtattttgtgatataaattaaaggatcatttataagttttatcttcctacaagggtcaaagtgtgacctttgactatccaagttatggatattacatatctgccacggcctagggctcaggtcgtgacattttctgtaaaaaataatagagtgtcacaccacacca

SEQ ID NO: 340121 - DNA, 664 bp, Cannabis indica
ttccaaccttttgcttcttgggtcgccgtactggttgcttctcaacaagcactcaaactgtcatgttcttttttgtcatctggcaattcccaatcatcctcatcaccaactggcataattgtaccttcatatgtgctcctccaatattctgttgtgtaatatggcgagcatagtgcatacatactaatacttcatttctgagctgcagcacatggatgaggacaagggaacttcatgcactggaacaagccgcaagtgcaagtctatttttgcaagtccactacgccaccggtctgaactgttcctccagggtgaacctgcaacgtgtaaggtccacatgtgtcaacattcaaatattgagatttttcaaaatgcaatgccaagtcctcctccatttttggtgctagggtcttcgtccacttgtcatctttttcttttcgtgtagcaaaccactgttggactttggacctcaggaatgctacaacagcagtgatcgggaagcctcttgcgtccttagttgtgttgttgaagctctcagcccagttgctcatcattacattgtaacgtacccttggaaagtatgatcgaacccatttttcaaatctaatttccttaacgaaaattactcccactcaacagcaggtgtctggtctaaggcatacaa

SEQ ID NO: 340122 - DNA, 608 bp, Cannabis indica
actcagtactttcccgtacttgtgttggtatcactatacattactcataaataatattcactataccaatgcactttataccttaactgtacaagtgttggtagtgcaactgacatttaagcatgcatatacacatagcatatacatacactcagatattgatatcacacattatatacagttcttaccttctttcaagattcaggtgtgttggccgacctgaatggaaagtctcgcgctagatggatgtcctaatcacataataaaaccgagtaaatcacatgatcaaaaccctaatctgggaaacccaaacccacaaccctaggttctgttatactctctaggggttactctaactttagaaatagggaaacgcccaactacaacactaaaatggacacgaatgcaaccaaacctggctagttagtttgcaccagttcaccccaaactttcaatttcttgctcaatcctccaccaaatgcaaccaaaccttccagagaacctaaacaatgcatagacaacattttctaaccagtatttcacagaaaaactcagtgtaaacaaatatgccattattgatcaaagcattgaactcaaagctcaaactt

SEQ ID NO: 340123 - DNA, 740 bp, Cannabis indica
tatagttcacaagatctttgaccacttaccttaatggtttcaccatttctagaaattcatgaaatttctcaaatatttcaaatttctttgcataaggtatattctagagagatcgtctaagaatttaacgataactcatatccacccctgaatgtacatccatatgttcaaatacagatgatcctacttccaagtggatattggcatgtttttatctttgcacataatgatcttgtcaaaattactatgaacaaattgaaattccatagatgtattattgtggttgtggtctctgatgattcgaaggttttgttacaacaaagagttcttagaataattcaagtggattctggtcacagaatataaaactcataatcaatacatttaaaatacagtttggatcgattcatagaaaatagatattaaaaaattgtaaaagttatactgtattgtctaatgtatttaggaaactgaaatttaaaatttttatttggcgtcaaaaatttaaagtcaaggacataaatttatactaaatatttcttgagtaattattctagcttagaattcttttaattacttattcaactctaggtttaaatagctttactaagcatatataagaaggagatgtttctaagatagaggaataatatcattacgggatagaatatctagaatatagtcatctgcgtcactcatctttataaaagaaaatagatcgagtgacatcataagcagat

SEQ ID NO: 340124 - DNA, 758 bp, Cannabis indica
aaatattagattaatttatattaaaacaaaataatatattaaaaaaaactaaccggttagaagagatgcgatgttgaatcggtggtgaatcggtgcaaaatgatggtgaattggtggagaatcagagcaaaatggtggtaaatcaatggtgaaaaggaagagaaagtgaaaaaaaaaatgaaagatgaaaaaaactgaagaagggaaaaattgggggaatcggttcattgctcttacttatagaaaaactattaccggcgggggcccgttggtaataataagcccgccggtattaataatattagcggcgtaccccgccggtactagtccgccgctaaagacatttaaatgcataaagcaggaattttcccgcacttatttttccttcactaatagcagaaggctatccgccggtattaacctaagcccgtcgctattgcatttaatattttttttaaaaaaaattaatttaatacacaataataccggcgggtcccaatatccgctggtattaatcccattattaggggcggatgtggcccgcctgtattgggtccgccggtaattgtaaaatttgttgtagtgaaagtcatgcttcctgagcctcgccgtctgcagcgcaagatgacacgccgccgcctcaccaatcagagggtcactgaagttgagataggacgtagcagtccacacaaccacacctgagtgatctctggccagggccgcaatgcacatggattctccaccaactttaacatcac

SEQ ID NO: 340125 - DNA, 617 bp, Cannabis indica
aaaagtttaaattttgcgctattttaattagtaatcccggttaggggattagggccttataagtattttgggtagcgtgcctaattatttagggcgttacagttttggtgggagacttatgtctctgcatcatatctcataaacatattgcctacacctataaacaactaactatcaccctatgaaaagttatacaaacttgcaccagattacaacattgttaaggtctttagatgctcttgtttttccctcctaagaccctatcaagcacataagatatcttttagatccttaaaatgtttgttcataggatatagcatgaatcaaaaagggtatagatgcttacatccaagtggtagaatatatgttgcataggagtgttcaatttaatgaatctgaatttccttacaaaactctattctccacgataaatccaccactattccatctgtcacaattctaaaatcccaatgattataaaattcctaacatcacttgcctaaatccctctacatctgtccctatctcacactcccataggtttgcacccaaatttacccccagcactcagttcatctaaacaagtcatacctcaaaactcaattaccccctcgccc

SEQ ID NO: 340126 - DNA, 610 bp, Cannabis indica
tatattgttagcgaggccgctttgggtcgcctatccctagtggtttggaatcgcttcttcaaatccctggatagctgctcccaggaaattattgaatgatgagtaaacttgttaaaccagctactagctgctccaacaagcgaggtggggaacaaaatacagcataaatttttcgtcacgttactcactcgcattattgtgttaaagttactcaaatgcgagaccagatctgtggttccatcataggacgagacatacgtgtttttgaatcccgaagggaaaggggtattcataatatttgggttatacgtctcaagctcctcgtcagaattgtatccagatgattttcttaattcccccacttgatatctcctgaacttgtcctccagctcgtttatctacaatttgattggatcctcttgctttggaccaagctgttggtgaaggtcaggtttcttctaattcaagtgctctcccagatctggttgggagtaattgctgggagatctcgtcttactcatagaccgctcctactcatagactttgtctttaagtggctcacggatttacttgctcccatactttcttgatcattagctcgttgagtact

SEQ ID NO: 340127 - DNA, 479 bp, Cannabis indica
gcttagacttcacttaaaaagatcaaagggaaaacatcacggagagtaggatagaattcaagcagtcttttcaatctgggaatgagggttgaagacgtattgtaccccaatgatctttctttcacgaaagacaacgtgcatgcgagattcatgttgaatttttatgtaacaagcttcagctttcaggaaagaaggctaaagttgtataaaaattcatgcttaaacttcgcttgaaagatcaaagagaaagcatcacagagagtaggatagacttcaaacattccttccaatccgggaaggagggttgaaaacgtatcttacccccagtgtctttcttgcatgaaaaacaatggcatgagagagtcatgttgaatttttgtgtaacaagcttcgacttccgggaaggaaggctgaatgtaacaccctaactaggataggcgtattacgtgatttttcaacatgctgtgcagctcgttgct

SEQ ID NO: 340128 - DNA, 572 bp, Cannabis indica
actggaattccggttcagtgcagaaattttttaaaatttcataactcatgcaatttgttatcgcaaaattggcactttgacgtggcatcacaagaatggtgacacatggcatcaacttagagcacctggtcggatcaacatgccgagcaggattcctcgcttgcatgtccataatggaatactcaccgagccgtgcagaatgagcaccacttagccaattcagacaagcacttcgtgagtcaccagctcaatccctataaatcagtgatgaacttgcgtggatatggcatacacacaattccactatcggtgtatatggcctcaatcccacgatcctagcattcagcaatgatcccacgatctttgtgtttatgcgctttgtaacgtgagaggaaactcttcctcctcaaatttcctgccctataaatagtgaggaatgttcactgggcaagggaggagaaattatacgccgaaacgctataagctaaggctatctaagaattatatattcagagatactattgtaagagctataagaaaaggaatcttcttccttattcttaagtcaatac

SEQ ID NO: 340129 - DNA, 518 bp, Cannabis indica
attttgagcgttcgtcccctacgtcgccctagtcgaggctgtctcacgttctaacttagcgtttcgacgctacgcctcttccagacggcgtctcaggcgaagacttttcgtttcataagttctttctcccacagattgggaacctccacaattgagctcttcatccctcgtccctagattctgaccattcgcacgctgagttctcctcgagcggttgtccgcgtactaggaccaacgtcgggtttagttctctggggacgtgcggtccgagcactggggccaccctcaggttgagccctcctggaattagtggtacttctggactacggattggtagatcttctggagcccatgggctcttttctagaacgatggttagtttcctcatgtggggtgttgatattctctggatttttagccatgaaggaaaaggtttttctttaaaagaagggagggtttttttttttgagctttttgtacagaggctctcaatgaaagcaccaaactgttaacgtaga

SEQ ID NO: 340130 - DNA, 871 bp, Cannabis indica
aagactcacctgggttcatctacaaaagaaaacacataagatgagtgttggacggagtatcaaacgaaaaacaagcaaatatgccgatcaggagtactcaacaaattaaagaacgactatgtttaaagaaaagttaaaaagtgaagaaatcagaaagttttcttgagtttaggcaaaaaagttcatgaagcttggaataagcaagatggaagacaaacgcaatgcagttcaaaaataagccctaaagctgaaagccaacataaggatatggaaaagaagagtcgtagaagtttctaaccctagtgtttcctaagcatcctttctaaagcatagttacattcaaagcataaacatgcaaaggaaatcataaagggaatcagaaacttacttaaagattcaaatgtccgagttcaagcaagctagcaatcgtctgcgggcgcttcggcaaccttggagccagaaaactctcttttttcgctatgaagtttacttaacaacgaagggtgataaaatgagtaatgtgccagtgcaatgggtatttataggtaaaagaggtaactgcatacaaaaggaaccttagacgcctcgacttcctacctcaaaagcgaatatgggaaatcgaaagtaatcgagtgcaaccgtcaaccgtggagagagaaatttagattttcaaaatattaattgtcagagcattaattagtcaaaaaccgaagggatgcccagtcagcttcacatcgagtcttgaacggtcatgctcgacacgtgtccccatccaaaggcagagccaactcggaataagtctacatgcaacctcagaggtcacgtatagacttggggggtaaatgttatcccaaatttggcactctgacgt

SEQ ID NO: 340131 - DNA, 875 bp, Cannabis indica
ccatttcttgccaactttgctcaaatttcccagagagaaaaaattctcagacccagaaaaacacttttgaacactttgcaattttttccagttcttcttcgtttgctactgtcagtccttcttatcttcatttgattcacagcaggacccccagtctcaacacttcattgtaagttccttgcaccctttgctttattgttaatatgcatggcatgctgttacttatctgcttgttcttttctgggttttgtattcgaagtttctgggaatgcaaatgtttagattcttcatataatcggtttgggttcactgctctagtgataggattactcttgtcacgcatttgttgttattttttgtagaagaccatacgttcttcgtataatggtcgcttagggcataggatagattgttttctttctactttctgccctttctttttctttagtgcgcaatgccgtcttctgtgaatttattgcacccgactcttgtccagggaatccttctagggtttcctgtatgacaggtgtccggagggggcctctttccagcggttaggggacccccattccctttttcttggtttagggtttggtatggggcctaactgctggaaccttaattctttttacagaatcgaaacatgtctgcttctggctcaaagtcatctaagaagagcggtaagcgcctggctaccctcgaggaggtctcgctgggtcctgttgcccaggaggggtacaagtctcgggcaaccggatgggaggcggccgagcttcactccactctaacttgtccccatcagctggaaaacatcgtggaggtagctggaatcaagccttccacatccgggacctaccaccggccacctcgtgatg

SEQ ID NO: 340132 - DNA, 1311 bp, Cannabis indica
attagttatacattttttaagtctcgtattgacaaaatatacctctatataagaataattacatcttgataaaatatatacatatatcttataaatttatttacaaaaaattaataattttattccaaattacaatacatctataaatattatatttactctaaaacaattctattatgatatagtattaatgattgtttattcttattattgttacattgatattttttggtttttttaattttttttctagtataactctatttagttataacatttcaattagaatataatttgtctgtcccgagtatattcttaaatagaggttctatcccatttcctatcccatttatgtccccaatttcctatcccatttatgtccctccaataattaactgccacctatttttttttcacatcatttgcttactttttttctaaacgtttgctctgttagttagttctgtttatttcttaattttcccactcacaaccttttctacattaattacaatatttcttggttttaaaaaaaatatttacaatatatctccacaaaattcaaaatcgtttcaacttcctttatttatatcctacactattaagaaaccatcaatacataacaactaatattaaacacataattatataattatgcaaaactaagttgtttgagctacctagattaatatgcaacattctaaaaaaaaaaaaaactatcaacataattatataagaactaatattaaaaatattaataattttgtatctaaagttaaatatatatatatatatatatatatatattatgttttggttttattttaaaacataccaggagtatacataaatttttgtaaaccgcataacccaaataaaactacaaaacaaaaaacccgacaaaaatgtaacctgcccaatctttatattgggttagttaaaaataataacaacctgtcgaatcaacccgaactaacctgaacaacccgattaagagggttcttatatatttatatatcatataagttatatgactatttaaaaaaatataaagctcaaactaatatgtttttttttatggtagttgatttgaactttgaattcaatctatatatatatatatatatatatttgtttcattattacaattaactaaaatataacaattcatgaatgtaaaaatttaacaaaaaaattaaaaaagaaaatattaatggtcggtttaaacgagttaatccgaccaaaccactaatttcattagccggttagtactattttcttttttcttaattggatgggttgcatataaat

SEQ ID NO: 340133 - DNA, 764 bp, Cannabis indica
ataaataataattgattaactctcattaatatcttatttcccaagaattaaaataaatattattttcaataaaataataaatttatctttttaatattgaagaataatattatatttaactaattaatatagttttatcaaataaaattagatagttaaatactatttaattatacaattcataattgtcgtaactattcaataaattattatttcgctcataaaaattgatgtcacatagaaattaattctcactcaaatttactcatcaaataaaaccttctcatgtacaatgtagtataaagctaacttggggaccatgaacctatatttcaaagctccaataaacacttgattattatcgatctctacgatagaataatctagttcattaattctattgttaatctattataaatatggaattgcaactctttgataatatagaattatattaacataattcttatttatagtctattgatataatcaatataagtagttcgccctccaattattagttcataattatagttggtcaaaattattattttacggttctaattatctcttaaccgccttacataccattaattcaatgtgaacagttcatctataacttattatagatttagatccaactattagcactcctagaattaccattataagagaactatatctgatccgttaggaagcttgcattctatattgtatatgttgggattttatgtccctaaataaaactcatttcaatacaatct

SEQ ID NO: 340134 - DNA, 1421 bp, Cannabis indica
tctaagctcaaataagcaagaataatttacttctaactccagaattaaacaacatattaacccaatacacacaaccatctagaatcttaatcccatattaaaaatctaacctaaattacaaaaactcaaaaaggaagcagggaaggaatgattaccttggccaaaacactctattatcactaaaattccttgattccactcaaattacaccaaccccagctgctgcccaagagaatcgaaagaaaagagagagagagttgaagaaagggtaaaatgatttttctgtaaatttctttgattccttctaacctaagtaaataaaataatttcttttaaaacattagcttatatccagcactaaaacaagcctagataagacaaataatgtcttgcccaaagacctttttgcgcttctaaccaacataaaaaaatcacaaactcccaacggtaacttagacattttcaaaccccgaaaattccaacacctccaatatccaacaatgatatctcgctaataatattctaaaatatataaaatgcgactctctaaaggcccaacgtcgctttccacagcttccggacacagccacaaaaattgagaaattacataaatagcataataaatagatataaataacttaaataaatttccacaatatgcattttataaataataattaagtctcatacataaaccttaattatttaataatccagagtgttaaccatgtacggtcataacaattatccccccgttaataggatttcgccctcgaaatctaacccgaataactccatatattgagtcctcatctcagactctgattcccaagtggcttcctccactttactattcttcaagagtactttaaccaacgctatggttttggttcaaaggactttctctttcttattcgaaattcgcactggttgctcgtcataagataggtccggttgtaactccaatgcctcataactgaggatatgcattggatcagacacgtacttcctcaacatgaaaacatggaatacattatgcacatctgacaatgatggaggtaaggctaaccggtaagaaacttgtccaaccttttcaagtatttcaaaaggtcctataaatctaggacttaacttatctttcttcccaaagcgtctaatttctttcattggtgacactcgcaggaagacatggtctcccagctggaatgtaacatctcggcgcttggggtctacataactttctgcctgctttgagaagctaacatccgagctttaatcttgtctattgcctcatctgtcttttggaccaaatcagggcccagatattttcgttctcctatttcgtcccgatggattggggaacgacattttctgccatagagcatctcgtaaagagccattcctatggtactttgatagct

SEQ ID NO: 340135 - DNA, 812 bp, Cannabis indica
ggtgggcacaagtaaagttgagtgcaattcgtccgcctgccagccagtggatcggcaggtgtatttctcctggatcacgggtcttttcatcacctcttctagggtggctaaggtcttggaccctttgcctgaagattttgctctggttgtcgggatagacatgtcttgggattggtaaaatgctgaaatttcttgatcaaagctaaataaatagtgctcgtgaaggtcgcggagaacctcactcatctgaaaaagagaaatctagcagtgagcccccaaaccaaaccttaacataaaaggagggaatgggggtcccctaaccgctagaaggagaccccctccggaggtctgctagaaatgagaaattcagggattctcctaggcaaacatcgggtgcaaatatcccaaaggcggtgaaagtagagaaaagcaagaaaaaaaaagaagaggaacataagtatgaaaatcgtttcatactctcgagagtcccgaagcgaagaagttttttgcaaaatcaaaaaacaaaaaaaggaaacaacggaacacagacaaggaactacgatgcacgacggtcttcaccatgaccatttcactatagaaatcaaatacgattaaaggcactgccctaaaccttgccctaacatgcaaatgaacaataaaagcgaaatgtacccacaaaacttgcacaatgataatgagctagaagttgatgttgtttgacggtagaacttgttgggttttgtgccctaaataaaacccatttctatataatcagatctagttaataaagatcagaaataacattttatgtt

SEQ ID NO: 340136 - DNA, 576 bp, Cannabis indica
gatatacaaactgttgctttgtgtatcaaaaagaaaccatgtaacctcaggtgtacaagatgaggcactaacctcgttacttggatgagatataatgactatgaaaacacttagcgtataatatatagtatacaagctaagtataacagacgggtgaaccaaagaaagtgatagcgaggcgtccacctcgtcttaggaagacatgctcgcggtatcttcacctttcaatgagattcataactccgacgagttagttctctcagatagaggctgacattcaaatgatattgacatttgaggaccacctcgtcaccaaaaactgcgattgtcagattgggtgttatgcttccagagtaaaagcaatgagatttacattatcaaccttgcaaggaaataggaaaagcctcagctcgctatcaaggttaccgctgctatattcccagcgagacatcccagaatgatacggtttgcaatttatctaatacccatttattttgacccagtaaaagtagactaatcacaactgtgtgatattcaaataataactgcatttattttacgtgatatgtaatcaga

SEQ ID NO: 340137 - DNA, 777 bp, Cannabis indica
gcatgctatgagtgttggttataagaccagttacagtgggcagtgtactttgatcactggttgggacagtggtactggtatggggttgtacacaggggagtgttgttgctgagatggttttcctcctctggttccagcatttgatcctcttcccatattcatggaggaggatggacctcgataaaaagtgccaggataaggggcacgattagaagagtaattcgagaagttagaaggggagaaatttggataagtggagtaatactgacctctttgaggagcaggatatctgaagtttctgttgaagtgagcaacatttgcttcgagttgcagcatattttcagcagatcttggtgttgactcagtcacagcaagattaacatttagatccatttccttatcagatttctcgattcttgattctgaagctaagagcaaggcttctatctcagcaacagaatactcttcaatccgagtattagatgagattatgaacgtgtcataatcacttggcaatcctttaaaaattgctgcaatatgatctcgagcagataatgtttctccaacagaggcaagtaagtccacatgttgctttactttcaagagatactcatctagtgacaatgaacctttcttgagattttggagtttagttctgaactccagaatcttagaggagacttgtaaggtataatgtttttccaaagcgtaccaaatctgtctggcagtgttgcatccgactattcgaatgagcaggctctcattcatggaagataa

SEQ ID NO: 340138 - DNA, 1560 bp, Cannabis indica
cgcttgtgctcagggttgctactgtcggtccccttactgatataccactagtaggagggtttgatgccatgacggcatcctttgcagcctgctctttcattacttgctgctccacctcctcatctattagggccaagtctacaactctcttatatagagtgtcatgtgatgtggtaatcttcaagtcctgactgattgtagcatcagtcctcgaacatacttctattttttggtgaaatctgtaggcactagatcagcagcgaattttgacaaccgatcaaactccagagtatactcggccacagacatttttccctgagtcaacttcataaaatcttcttgatgtgaagtcctcacagcaacattataaaacttttcctcaaaaagtttcttaaattcttcccacgtcataacactgacatcttggatctgactcactatatcccaccagacgcgggcatggtcttgaaacatgaaggccgcacaattcaccctctcagttcccgtcacccccatattatcgaggatacgggtaacagtgctcatccattgatcggccttaataatatcaatgcctcccagaaaagccggaggttgcagcttcacaaaccgctcgaacacagagtcccggtgcggcataatatacccttggttacccaccactggcacaggagctggtggtaacccttgattaactggggcagcctgttgccttaaacgttgcaactcttcctcttgacgaagtatgacacttcgcatttcatgaaacatctgctgccagtcagcaggaggattagcattaacggcccccgcattatcccccggattttgcggaggtggaggcggtgctggtggatcggttcgggtaaccccgggctctacttgctcgccctgtggtctagatgattgcggagggtccattactagtacccctgtaatcaacaaccccagcgagttaagcaccaataccacacttacgcacttattgccttaaaccctaactcatctatttacctcatacatatttacataaacaaatagcatttatagcatggcatcacataacacatacatactctagatgcttgcatactgcctaaaatggaaagcggtaaacagatgatcacacatacagtcaagtatttactctcaatacttactgcaccatgagtcgagcttatctctgacgacgaatgtacatgttcggccggtctacaggaagtttaaaaaccttggcgctctgataccaaattgtaacgccctaaataattaggcacgctacccaaaatacttatgaaaccctaatcccctaaccgggattactaattaaaatagcgcagaatttaaacttttatattaaacagactgaaaataaacttgtaatatatttaaacttttcaaaatagttgggatcccaaaaatatttacaaacttattacaagttctttcttactagccgacctaagcggcaaaacagaatacaaaagtcaacactgttagacccttaacccgcttggtctgaagtggcttgaacatgtacattcttcgccctgctcctga

SEQ ID NO: 340139 - DNA, 588 bp, Cannabis indica
atgagagcctaaccataaaaaaaatatgaatcgtgcataaaaatatagatgtgtaacaattttagtaggcggagcacagcgtatgaacccgcaagcttggtagtatcatgttgtgctcagatttatattgtgatttatttgggtgacttgtttttcttaaatacacaactctttttttttttttataggggtttaaattcatgctttatatttttatttttattacaattgatgagttaattaataaaatatatgtgcatttataattttaattagttttatattatttttcaatcatagttacacacaattacagtagaacttctatacaagaatactcttgagatcaaataaattatattctaattaagatgttataactaaatagaattatactagaaaaaaaaaatcaaaacaccgaaaaatatcaatttaacaacaataataacaaacaatctttaatattatatcataataaaattatttttgagtaaatataatatttagggtgactatttaatggttacatttttattgtaaccatatggttacatttttttttacatgtaatagcaggttacgaatagg

SEQ ID NO: 340140 - DNA, 1440 bp, Cannabis indica
gggtggtagtttcttttgcaggactgcactgcactcctcagtaagtgccaccatctcaaattcttccaacttccttctcttagatagaatgtctttcatgaacttcaggtaagttggcatctgttccaaatcctctatgaattgaatgttgatgtgcagcttattcttgtgatgtctttgaggatagggaattttgatgtgatggtcaatactgataggaggtgaagtttctttttgttgaagaccgtcagtattcttcttcttctcttgtgttggtgctggttgatcatcttcttcatcctctggcttgtcttggctcggaccagcataattattaccacttctcaaggtaattgtcttatagttctcttttggattgacttcagtagtgctaggcaagttacctagagccctgttagtgttttgagaagccaactgccccacttgggtttccaagaccttaatggaagacttaatctccgtcataaattgcagcaacatgtctaattgagaattagaccctccactagagtcttgttgttgttgatactgttggctttgctgagattggttttcctgttgataaaacccttattgttgttgattaggaaactttttttggaagttttgctgatgacccccttggttgaaaccataattattctggtagtttctaatggcttgggcttgctccattggcaaactatctacatctataggacaggtgttagtagtacgagatcctccacacagctcgcagacaacttaagcttgtatggcttgtgtagtcaccagctttgttaatgtctccacctgtgctgtcaacttgattatagcatcgacttcatgcatacctgcaaccttttcagattgacctctctctgttgaccattgttgattagttatggccatctcttcaagtagttcaaaggcctcattagcacttttcctcataaaagccccacaaactgcggcgtctatgagtgttcggatgttgctcaccagtccattgtagaagttatgcacttgcaatcacttttcaatcccatagttcaggcacttcctcaataaatcctttaatctctctcaggctttataaagagattagtggtcatgctaggtgaagttgttgatgtcagatctcagcttggcgatctttgcaagaggaaagaatttggaaagtaatttcaaggccaattcctcccaagtgttgataaaattgggtggcaaagataccaaccaactcttggctcgctcccttcgtgagaatgggaacaacctcagcctgatggcttcatcgctaactccattcatcttgaatgtctaacagagttcttcgaagttagcgagatgcatgttttggtcttttattggcagccccccaaactggactgaagattggaccatctacagtatggtcggcttgatctcaaaattgtt

SEQ ID NO: 340141 - DNA, 553 bp, Cannabis indica
agatgttccacctcaaccacagacataaatttctttcttttttaacatactatctttacgagacagtttattttatgtttgtcgagctatttttatccaaacttaaatattttaaatgtagttcccttgaagagcatcaacccttaaaattatctaacaagacaacacacaggaatcaaagctcaaaggaatgaataaagtacataagcctgaaagctattatattgcatagtggaccaggcatataaaattgtctccgcaaaataaagtaataatggtcttctaaattatagccccatggaccaggcatatataattcaacctccattgcctttagcagaaaaaggtctttttttccatcttgccttttggaaaagatttgtgtacttgaagagtttcaacatttaattctctcaaaggaccatcctttgttaaacagtttattctattaaggccaatgtcgcttatgcttagattgttgggttttatgccctaaacaaaactccatttcaatgtaatcaattttattcaacatcaataaagaaacagaagt

SEQ ID NO: 340142 - DNA, 595 bp, Cannabis indica
ctcaatgattgtgtcccgaatttctttttttcaagttacttacggatacctgtcggtaataaacgttgtaacaacacataacaatcataggatatgagcccagaaatcttgcatgtattcaaatttacatttttgtctaagtttgctgcaaaaccgtccggaaatactttataaagtctgcaaattcaatctgttcttgaacactaagtgtgtaactagctagaggctttttccacttcccatttcggtcttcatacaaccacaactcatgacgtatttgcaagtcttgcaaatccattctcgccttgtcagtatcctttgacttcccgttgatacttcgaagagtacctactaagctctcacacacatttttctcaatgtgcattacatcaagattatgtcgtaaggacaaatgcttctagtactcaagctcaaaaaataaacttatttagaccaatttagctcttcactagaacgcttctgtttcacacccccgaactgttgtgtttctaggcaacgaaattgaatcggtctaatttcaataaatatcatccccgtccaatacaggaggtggtgtctctcttcacacggctta

SEQ ID NO: 340143 - DNA, 605 bp, Cannabis indica
gaagaagaaagaaagagagaaaagagagagaggggtaatggtaaaatggaggggtatttttagggatatttataaaatgtgtcatatccccacaaatatttaaacattatgagattatgagtttagggggaaaattttaagtatatgtaagcataaagaatcaaatttcccttttagctattgtgcggattagattggatccaaaaaataaaatctgcacttagtgcggatcggatacactatgaacaaaatagtacgaattggattggataaacacccctagttgtatggttacaaaatgtgttttcttaagacgatgaagaatgagtcttctatctctcccaaaaaaggggtctctccccttgtgttttcttaggagtacttataggccaaattctttgcatgtgctgccttagatggatcacacagttggggcaaaatccgaccgttcgattaatatgtggcatttttctcatatggcatttaagggcgtcaagtcgtacaagctggccttggatgcatgtcatcccagggcttctcctttttgaatttccctgatccctagctgctggatcatttggtcaggtacacaaggacacgcatgc

SEQ ID NO: 340144 - DNA, 1228 bp, Cannabis indica
aatcatgattatattccacttttttgatgacactataatcatgaacaaataagtatgttgtggacttaatagaatttatacattgaacataatcatgaaataaatcatgtgaaccattcaacataaaattgatttctgatctttattaattagtaaatctgattatattggaatgggttttatttagagcacaaaacccaacactccttagccggccaagacttgtacggatctaaacatgtgttttttcaagagctcaaatgtgttcttcatgactcgaagagctatgaatcacaatgaatgttagattcagatctttttcgtctagaaatcacacattacatatcctaaggctatcatgcatatcaaaatattgaaaggacaacaatctaatttaaaaattaatggatgttcaaagcaaggaataatattcatgcattcatggaaaaaatcaatcaaatcaagtaaaatagcgggaatagaaagcttacccactacaagaaactactaaggaagaatgtgggaagcttagattgttgaaacgatgtaaaaatcttgggagaatggtgcttgatgggtttagccctctagagagaaggaggagcttcttcaaatgtaaatttctattgagagaagtaaaatgtaaagagtgaaaagtgaaaagggctttttcccccaaaagcacctatatcgtgcatgtgggaccctttcttcacttacttcacctacacaccaaagagacaattaaagcataagtttactacagcaaataggattgaacagttaagacaaagtatttcaaaaggctaaaaacacaataacttctattcagtaaaggctacagcagtcccaaccgtaccaactaactagtaagtccctatccgtacaaatgtctgcacaaggacttagggggaaatgttatcccaattttgcacacctgacatggcagtacttatgtagacaaaattagttgcatgtggtagtacatctcaccaacaagaaggccaagtcagtacctcaacaaatggggaccccgacactcaaaggggcatcaaatgtgtaacaccctaactattaggcacgctacccaagatacttacgaaaccctaatcccctaaacgagattactaataaaaaattagcgcggaaattaaactttaattacaaatggaaggaaaataaacttgtaaatttttaaactttataaactaaaagttacatgtttcgg

SEQ ID NO: 340145 - DNA, 1237 bp, Cannabis indica
aaacctctgaaaacaacataaaatcacagcagcaacaacaaaccaaaccaagcatgcaacctactattttccttaaaaaaaaatcttcaagaacaaaagcaagagacttaccaagagttgagaccactagtaccttgttaaattcatctagaaaacacacaaagaattcccccaaccctagctgctctaggccgaaagagagaaaaaaagattttgcttaatttttccaattttcacaaaaatgagaaaataaatgtttttccttattttacacattatttcagccaaactagacttaaaaataagatttaaaattaaataataaacctttactaaagacaaaactgaaaaaggcaaaaagacccaaatgcccttgcccaaactaaagagtcacacaaatcactaagggtattttgggaaaactctaaattcccgaccaatcccgacattcccaatatttaataaactgtcccaatactaacatgctaagttgtgattctactgagcgaaacaccgagttccatgttgccgggcatcggaaatgcaaaattatgaaatttcactatatgacataaaatgcatttcagaattcaataataacagcataaataattatttaaatatctataaacaattttccataattaaatcataattaactgctaatttcaaaattaaactaagcgatctttacacatgacctagaattggccgcgataatatttgctttgaaaatttggcggcattatctctacagagatagatgtgaaatttatatcgaccataagagtctcaaatatttctttactcagaaagatttgaatatgagacagagacgttggttggagttagtcaaggattatgattgtgagatcctttatcatcctgggaaggccaacgtagtgggcgatgccctgagcaggaagggtcccgaacaggtagctagtatgattcagatttcaccctagttagctgaggacatggtcaaatctagcattgatttggttgtaggcaagcttcacaacttgacgttgcaatctgatctgttagaacgaattaaagtcgctcagatgactgatctagagttagtaaaaatcagagaagaagtttcagctggtcaagctagggattttacagtgtcagacagtgccatgttattgtttaaagccagggtttgtgttccaaatagtgtggaacttagaaacgaaattctggaggaggctcataccactccata

SEQ ID NO: 340146 - DNA, 544 bp, Cannabis indica
gtaaaataatttccaacatcctcaacaatcgattcaaccaaggtaatggtcctccaatctttgaactaaacgaattacttacatatcttcatcaaggcgatgattcggttagtgcttatttcactaaacttactgctatgtgggatgaaatccatcaactaagaccacagataccctttacatgtgctgctgctgcacaaaatcaagaacagattaatcatgatcaagtcttgcagttcctaatgggactaaatgattcttatcatgttattagggatcaaattctccttattgatccctgtccatctctaaacaaggtgttttcaatggtaattcaccaagaaaggcaaagaacattgggaaatcatcatattcccccaattactgctgctgcaaccactatccctgctgctactgaactagcagccaatccaacatcaaaaaataagccccctcgacctcactgtactcattgtcaaaagcccagccattacaaggacaaatgttattttttacatgggttccctcccggatatggcaagcc

SEQ ID NO: 340147 - DNA, 528 bp, Cannabis indica
agagagagagagagttgtttaggggtattgatgctttggtgtattgaaagggaagtagagatgtttgtatttatgtaggcgtgagtgaatgagttaatgagtcaatgagcacagtagtcgaatggtcaagaatgatagtcatctgagtgggagtgggacctataagactagaccacaagtttgcaaccttcccagaaagtgttacaatacaatgtttttgaattcatttttaaaaatgattattaaatcatttttagaatatttaaattattaaaattatttaaactaataaaaatgtcacatatacaccttgacaatctcaattagtattgggataattgcggcaaaagtccccaaaaacttgaggttgatgctgattagtcctcaacctcaaaaattggcggtgaaaatccctaaagtcgtcatatttgtaagtccgttgatacccaatttaacagacctgttaaatattgacaataatgccatgtgtttaaagattattgggccaactcataattttaattaaaa

SEQ ID NO: 340148 - DNA, 1196 bp, Cannabis indica
tctccttcaacctatccacctcgccgaaagctcctccttggcttccttttcctccttcatacgatgaagaactgctcgaagagaagtcctctcgtcctgaagactgttcacctcagcagataaggtctcgatggtctcctcaaaacactcagcagcctcgagatccttagtcagcacagtgattttcttctaagcggcaaacagcttcttgttggcttcacccaattctaaccgaacagctccgacttctacccaggcttcttcaggatccttcctggccaagtccacctccgcctttaaggtgtcggacagagccatgttcttggaagcaggagacttagcccaagagtaagtgtatgccaacttcagactggcctgcacaaggaaaaaactttagcatttgagctaagtgtggaagatcaaagggaagtattaagaaagacttaccttggtgaactccttcaagactccgcccaccagcaattccaaagaagagtcattgtcagcacaagccagttgctcactgacctcaggaactagccggttcatgtaatgggccagcatctccttgccctttttggcctttggatgcaccagcaaaggtggagtaggtgcccgcacccgttcaggatcattcctgaccagttcagacccaaccgtcggtggtccagactccttggacttggcagctttgggggtagaggggtttgcagcagtcagctcctcggaaagatccatgacctccccggaaggcctcttttccttagtagagaacccctcactgcccttagacttcttggtcaaaggagaggtgctagagcttctgcccattctcttcttcaaagcctcaaacatttaccgagacatgtctgtacataacaaaaaacaacatggttagaaaacagatatcagaaacataaggcatgaaagtcaagaagctcaaaaacaagacaaagtagtatgcaaggtgactgcccaaacaagattcgaaagttcatcatcacctgacatcgatcttatttcagacataacagctttcccttttccgaacacgggaggggatggccaaaaaagggaaaatgggctccattatgcgaattgcatgttcaacaggcctaggcgaggccgagagtttcttcttcctcttcagtggagtcacctgctcttcctcagcatcatcctcgggattcaagggc

SEQ ID NO: 340149 - DNA, 553 bp, Cannabis indica
aaaatattagatagatcgatctaaaaaatattaggtctaaaaaatattgaataaactcaaattaaaccaataaacatatatgaaatgtatcaaatggatagaactgatccaatctaacatccaattggatgattgaaattaattggatcagattagatggtaaaatctaacatttaatatataattggatcggatctgaatagacttaaaaacattagatgtggttcaatgaacactcctaactataatttacatgactataaaaaaaaaattactaaagaattatttcaccttctaaaacaaataaacatggatagatgcctttttttttttattatttaaacgtttatatattacaaccatattttatctaggactcgaatctagatctccaacacacccacatatggccacttgtgcattataaaatggataaataccattttggaccctttgttttgcaaaagttaccaattggaccctgtgttttgttaaatgacaaaatggaccctgtattttctaaaatagtacaaataggaccctgaattgattt

SEQ ID NO: 340150 - DNA, 1144 bp, Cannabis indica
taggccaattctcactacttcatcttctgtgggtttaccataattccgcttttccgacaatatgccccaggaaggatacttgtgacagccaaaactcacactttttgaacttcgcatagagtttatgatctctgagtcgttgcagaaccataggaagatattgttcatgttctgcttctaaccgagagtacacaagaatattttcgataaatacaattacaaaattatcgagaaaatccttgaataccctgttcaagagatccatataggctgccggagcatttgtcaacccgaatgacataaccaggaactcataatgcccgtacctagtatgaaaggctatcttcggaatatcttacctccccgaattctacaaattgaatgataacccgatctcaaatcaatcttagagaataccgtcttgccctgaagttgaccgaacaaattgtcaattctaggcaaaaggtatttgtttttaatggttaacttgtttaactctcgatagtcaatacacattcgaagggtcccatctttcttctttacaaatagaactggagctccccaaggagacacacttggtcgggtgaatactaaatccagcattccatgaagttgtaatttcagttcttttagttttgcaggtgccattcgataaggtgcctttgaaacaggttctgccccaggaattagatcaatgataaaatctatctcccgttgaggtggtaaccctggtaattcctcaggaaacacatccaagaattccttaaccactttaacctcttcaggtccaagtaacacatgtttactagaatcaactacaaccgctaagaatcctacacacccactgcgtagtaaatccctaactttcaatgttgagattcttgggatacgagaacattgaactgaaccaacaaaaacaaatggttcctcattctctggttggaaagttaccattttctgtttgcaatcaatactaggagagtatttggacaaaaagttcatcccgagtataatatcaaactcggccaatggtaactccacaagattagcgctgaattccctgtcttcaattctaattaacaccgatctaacccactttcttgaaataattagttccccattaggcaatagggttccaaatccc

SEQ ID NO: 340151 - DNA, 705 bp, Cannabis indica
tccttctgagtgaaaaagtacttgagacttttgtggtcagtatagatctcacaccgctcaccatataagtagtgtcgccaaattttcagggcaaacactactgctgcaagctccaggtcatgagttgggtaacgttgctcatatctttcaattgtcgcgaagcataatctatatctttatctgcctgcattagtacacagcgcaaaccctgccttgacgcatcgcaatacaccacaaacttctcttgatcagatggctaggctaaaataggagctgtaatcagccgttgtttcagctcttggaaacttccctcacacttatctgaccttataaactgttagttcttcctagttaactcgaataacggcattgcaattcttagaaaaaccttccacaaaacgccgataataacccgctaaaccgagaaaacttcaaacttcagtggctgttttgggtctgggccaattcttcactgcttcaatcttccctgggtctaccataatcccgtcttttccaacaatatgtcccagaaaagatacctgtgacaaccaaaactcacattttttgaacttcgcatagagtttatgatctctgagtcgtgttcttgttcgacttctgaccgagagtacacaagaatatcatcgataaatacaattgcaaaattatcaagaaagtccttgaatactctattcatgagatccataa

SEQ ID NO: 340152 - DNA, 629 bp, Cannabis indica
ttatgagcggcaaaattacatgttctactgacataagagaaattacaactattaaataaaggagatgacttagtacaaaatgagatatagttctctaaagcccaacgagatcccttcccattgatggcgtcgataaccactctcgaatcattctccacaataacaaacttgtagccggaatccaaagcaattgacacagccaagcagcaagtcgcggcttcaccacacagagcatccgagaactcctcccgagctgtatgaactctaatcactctgcccatatgatctctagccacaacagcaatacacatactctccaaacccactttcacatcgcaattgagcttaacccagtccagaggaggaagggaccaggcatttggtaaagcaggagtcggactggagagcaaggaatcatacatatctgcataggaagtacaaataatatcaaagcatttgttaaaatcaacagagcagttattatggatcttgtcattacgcaccctccatatagtatccacaataatagaagcatacaagaaaatatcatcaacattagctcctttgtatttaagatcccagatgaacttgacccaatcccagacacgaatacccgtgtcacagaccgg

SEQ ID NO: 340153 - DNA, 678 bp, Cannabis indica
taaaaaaaaataaatgaattaaggaaaggaaaaatatattttatattaattaatatatatgaaattaataaaaaattaaagaaaagagagaattaaggaggaaaaagaaagatgactttaaagcacttttaagccgccacgtcaccgcttcatatttctcctttatatatatatagattctttttaaatatcttttacaaaaaaaatatcattactgagtatttgttttaaaagaaaaaggctaaaaagtattattgatgtttaatattatttttgaagtcatattattattagtgtaattaaatattgtgtgacatataaaaataattttcaaaaaatattactaactaattataaaataaaatgcgcttgacactactaaaatctaatatctaataataatatattttttttacttcaataataaatatttaacatgtccatatgtcaacatgactactttaaagcattttagtttggcacaactgtgttgtgggaaaaagcagctgtagcagaactgtgaaaaacactgagctgagtgtttggtaaattataatttttaaagtgctccgagttgttaaaattctattataataataataatattttaatctaattcattataatcacaaatatatatataaaaaatatgttatataaaatttttattttttatat

SEQ ID NO: 340154 - DNA, 868 bp, Cannabis indica
aattcaatcataaccctaagagagtttaaaaagaaaagaaaggtctcactatccaactaatgcttctatatctcttaaacctagttttcattctgttagacaactagtgttttgagacttcttcttcttcttttctctctactaatttcaaaattcttagtgttcttcaccatcgaaatttgagctttagtgattcagtgcatgcccacccataacaagttagtcatcaatcatagtgtgtaagaatgtgaagaattcaaacaactgaaggagtgtcgggctcagatcttggtgacactctgctacagaaaggatacaagagttagagatctgagcaaaatgagtcatttaattctgctgcaaccaatgtaaggtttctcataccttttatgtgtttaattttatatcgttttagaagttcatatttaggatattaaaacatacttgttagtaaatctaggtcctggtaaaataaattccaacagttatatatgcttaaaaagttccaaagatgtaaaaaagacttgttagtcctaactaataagcacatcacaacaagtggacatatacaaatccacacatgtgggccccaacatcaaccacaactaaaaagtgtagagcaagagaattcaactctgttcacgatagaccttacttgccaatcaacttgagcaagagatttaactctactcaaggatgagtttgacaaatggatataactctactcaacactcaaaacataagcaagacattttaaaactccgtaaaagtttcaaatttaagaaagagaaataactccactttaaattaaaaaacttaagcaaaaagttttaaaccttgcaaaagtcccaaaatcgagcaagagaca

SEQ ID NO: 340155 - DNA, 749 bp, Cannabis indica
ctacaacattatggttattagaggcggactatataatatggttttttagtttttatggctaatgtgctttttggttttgtaaggcaatatgtctagttttgtaaatggtttgtttttattgaatttgtaaggccaatatggcttctttttttatatggccaatgtggctagttttctttatacggccaatgtagctagtttttgttttgtaaggccagtatgactagttttggttttgtaaggctagtatggctagtttttggttttgtaagaccagtatggctaattttaattttgtaaggtcagtatgactagttttaattttgtaaggttaacgtgactagttttagttttgtaaagttattatatggatagttttaattttgtaaggtaagtttggtttaataataacacatcaaatataatagtgtagtcaccgtcagcaatggagatgaaaatagataagtatttacaccagagaattttacatgactatttatataaaatttcatattttttttttctatttattttgcaggtgttttactagtagttcagaagtgacaacagttttgaggttttcttttctgatattatggttttattgtttagttctcctagaatatctctgcgtgcccttaggataaacaataaactgttatagatggaagaaaattctccgctaattacgtaactttgttatctttgttattttaatctgtatcggtttcccttaaaaaaaaattatt

SEQ ID NO: 340156 - DNA, 525 bp, Cannabis indica
agaggcaatgctttcgatggcgaccaagaccaggaggatagcttcatcccgacctcgatctcagaagaggagaccccaattgctggagatgcggagctgggcccgttatcctccgcagatatagaaaggatggttcaggagctcgctaaaccaggtacaatcgagattcgtgatagctggtctacggtgtcagctcgtgaacaccttgttcattccaggcatgctcatgatgccgaacttaaggagatgggcgaggactaggaggctccagacagcgagccagaggaagaggaggatgcagaagggagcgggactgactcagtggtggacaacactcaactggacgatcccttctcatgcgaggattcagtttcgcgagtcaccaagtccgacctaaccgcctttacaaggttaaatttgctacacctcagtaccatgcgtcctcgtcctacccagagaccgcatctacctttcaccaatcctgcgataatacctatagagaatgtggttgtttctatacccatt

SEQ ID NO: 340157 - DNA, 507 bp, Cannabis indica
tcattgcacaaccatagaacttcgaattgcactcccagttatatagaacgatctatatgttccaagatattgtcatatgatgataatttttcttcttgtaattgtttactcaaaaggatattgtgttttacctttgcaattttcgtaatgaagcttttattatttgttgtttttatatttaatttttgaataattattatttttgcctcttaattttgaccaatacaattttttttcctatttataaaaatttaatttttttattaattttaaaacattaatgtggaaaattgtaaattattcttaatttttgaatggactatcttgctgttgacctaccactaatgtgtatgaataagttgatgttgtgtttctacaactgatattaatttttctacccttgctaccatctcaacatctatttaaggcagtgtgaaatgtttgtcatgtcatatactgcaagacacatgaaatagaaatttcgtgtcaatatattgttttagagta

SEQ ID NO: 340158 - DNA, 576 bp, Cannabis indica
aaaaaataatatgtgagtaattcccctaaaatatattattacagactttatttatgtttattcattaattattttacatgaaactttataatatttagtaacataattaaataagattatatttttacttttatcaataaaaatatcaaaagataaaagtatatttcaaaaataaatatatatatgttttctttactataaatatatattagaatttgttacaaaaattatattatgttcataagaatgtgttaagaagtgtaatttatagcatttgactaaactaaaatttgtgtataaataaataaaaaaaagtgtataaatccgagttgtatagatagtagatttaaagagagcttcaaaaatagacttaatcttgttcaaaaaagaagttgtctagcatgaataaaattgagtcgtaagtttctcttttgaagaggaatcctcttgtggatgtaattggcttagtttgattaataaatattatctttcttgacaaaaaatgaataaagcaaattaatttaaaagataattatgatagaattatgtatctaaataaattaatagcgacttaag

SEQ ID NO: 340159 - DNA, 540 bp, Cannabis indica
aaaaatccatttgcagcctattagtttctgccctggtggccttgtcacagttttccaagttttgttcttgtgcagagaagtcattttttcatcaattgcagcaagccatttcttcttatttcttgagttgattgcttcctgatatgtagtaggtattgtggtgtcaatctcttctgctgatgcaagagcaaatgctgtgcaatcagcaaagccaaatctctcaggtggcttaatctgccttctttctctgtctctaaccagttggtaatcattaggggtgttcatcaaacttcctgcactgcaaaaaaaatgcggtttgaaattctttgcggtgcagtcgcagtttgaatttttcctaaatcgcgcgctgcggtgcggtttgcagttttgaattgttaatatgtggttcaaaccgcaccgcaccgcatattataaaaataccaatttttatatttatttaggtccaatatgtgaatattcaacttaaagtctactattctttcaaaaaaaaaacttaaagtctactaattattgtattgt

SEQ ID NO: 340160 - DNA, 687 bp, Cannabis indica
attttgagattaatgctacagtgtaatgtaggcacgacatttttttttatatatttaaataatatttatatatgtttataaatattagaataatgggtaatttctctttatattattaaatgtattggtaaatttaattttttatccttacattaagagagaattttccccttaaacttaaaataccctatattggtaaaataggacaatatttacttaattcccacataaccccctcattcaaatctgactccacaagcatcggacccaacacaatttttttgaaaaatcactcaacacaagtatcggacccagcatcgggtgccatcggaccccatcgggtcttcgtcttccccaacccattcacatggagcatcggacctacatcggacccggtggttcggtcgagatgggttcgtggtggaggaggtggccgatcatcgtgggttttcgttgtggtcaattttcgtggtggtcacagcgtcaagcggtgcagtggttgtggcggtcgagcggtgcggtggttgcggcggtcgagcggtgcggtggaggaggtggattggcgtgggttttatgcagtggaggggatggatcgacgtgagttttgtgcggtggaggaggtggctcgcgcgtggaggctttgtgggttttgggtttgatttgagagagaaaggaggaagagagaga

SEQ ID NO: 340161 - DNA, 595 bp, Cannabis indica
tctaattttcttacagctctctaactttataatattttattagttgccgaaaacctcggtcaacaacggcgatccaactccttcaatattctcgcaagctctgttttcttcatagcggattataatgaatctttcactgtaatttctctcaatgaaagcaccaattgataggtaatagtcctcttcgagacaagacaaatctcttaaaatgtactcttcgagtcagtgctaaactccaattgaaccaaagttctattttctatttccatgtcaatagctgcacaattacatagtctttcatcctctttacaaattactaataaacccctacactatttcatagtctaacataatactaagttctaggacgaattttattaatttattttttctgtaaggtcccgcacgatcttctaagatcataaacattaaggtggtgtttgattgggaggaatgaaaatataagaataggaatgagaatgagaatgaaaataggaataggaataggaatagaatagaataaattttaaaatgcataaaaaaatttgataaaagaatcattaaattttttctcttgttatattggaatggtctt

SEQ ID NO: 340162 - DNA, 1410 bp, Cannabis indica
gacttgttcgatcaacttcaaggaaaaataattttctctaagattgatttgcgctcagggtatcatcagctgagaatttgagaggaagatattctgaaaattgaatttcagactaggtacgactattatgagttcttggtgatgtcatttaggttaacaaatgctctgccaacctttatggaccttatgaatagagtattcaaggatatcctcgataattgtgttatagtatttattgatgatatccttgtatactctcagtcagaaggggagcacgagcaacatctttgaatgggttttctatgaattagagatcacaagttgtatgcaaaatttaaggagttttgattatcattagtgtcctttttagggcatattgtaggagaggatggaattattattgatcaggggaaaattgaatcagttgagaattggctgagaccaaagacagctactgaggtttgaagtttccttggattacgggatattattgatgtttcgtggaagggttttcttagatttatatgtcgctaacagaattgactaagaagaattaacggttattatggtctgacaagtgcaaaattagttttcaagaattaaagcagcgattgatttcagctccagtgttagctttgccatcaaatcaagagaaatttatggtgtattgtgatgcatccaagtaaggtctcggatacattttatgcaagctggcagggtcattgcttatgcttctcgtcagttgaaggaatatgaacagtgctacccgacacatgatttagaacttgctactgttgtattccctgaagatttggtggcattacttctacagaaaatagtgtgagatttataccaataaaaaaaatctcaagtacttcttcactcaaaaagatttgaacatgagacaaatatagtggttggaactggtcaaggactatatgattgtgagattttctttatcatcccaagaaagccaatgtggtggcggacgctttgagcaaaaaaaaggtcccggacaagtttttagtaccacaatgatctctcctcaatttgttttcaggtatggttaggactgttattgaatttgtggttggaaaactacataacctaatgcttcagtcagatttattagaaataatcaaagaggtacaattgaaagattttgagttagtctagattcgagaggagatattagctggttgggctaaggatttctccatctcaaataatgggatgttactttataaggatcaagtatgtgtccaagctatgatgagctcaggaatgaaataccgaatgaagcacattctacaccttattcattacactcgggttgtaacgtccccgcttcaagcctccattgagtccttccaccaacggaatgaatggctcttatacacgagtacgtca

SEQ ID NO: 340163 - DNA, 620 bp, Cannabis indica
ttgtcttttcaggtgtgttctgacaggttggcgcggtatagtcacaaccgggtatttcaggccgaaccgggttcgggcccgaaatgcaaattggattgtttatttggcattttatttgatatgggataatctgaattttatttgaaaaatatttgggtatggaatgacatgtttacccttatgtgtatgtgagttgatttttggccctaagggcattttggtcatttgacctttaattactatgtttgacaaaatggaattttgaggaaaacaaaaggaattttctggtttatgaatctctctcactcgacctctctctctcactcaaaccctcttgatcttcaaacttgatttttggaaagaaaagcttgatcttggcttgctttggagcttagttgttgttgaatcttgagcttgcttttgaattgggatttgaggtaattttctttggtttaaactttgtttatggctgaatttaattgtgagaaaagcataaaaagggtgtggtgttcttgattatgcatgttgttgagtttgatgtttgattttagtggtttgggtgtgaataacatgaattttgttgttgatttaattgtggtgttgtggctgagatttttggg

SEQ ID NO: 340164 - DNA, 992 bp, Cannabis indica
aaaactaatttaataaaattgtatattaaatatgtaaaaaaataattatattatatatgtatagtgtataatatatatgttcggtcagttttcggtttaattggtgagtttgccattgatactaaaatcgaccgtgcaaaggcggttttaaccgaaggtggtttttttggtttttgattttttcaatgtttgttttttcggtgtttggacggtcggtttcttaaatattttgatcacccctagctcattttattataatcagaaaggattactagcttaccaggctagctcaactttttgtagaccttgcaacaagccttagaaactgaacttcacttgagtactgcccatcatccacaaacagatggacagtataagaggaccatacagactttgaaaaacatgttttgctcttgtgttttggattttagaggtagttggggagaacagttgtgactagtagaattcacatacaataatagctaccaagccagtataagcatgctccttatgaggcctagatgggagaccatgcagatcgccattgtgctagacagaaccaaatgagcatgtcattattggaccccagattataactaataccactgaaaagattaagggaacccaagaaagacttaaggttgttcagagtcgtcagaaaagttatgtcgatctccatcaacaggaagttgagtttgatgttggtgattatgtcttgttgaagttacttcaatgcttggcataacgagatttggagtgaagggtaagctagtcccgaggtatgttggacctttcaaggttatcgagagaattggggaggtcgcttaccaattaaatttactacaagggttgggacatgttcataatgtgttctatgtatctatgatgaggaagtatactttagatccatcgcatgtcattgagtatgaggctatccctcatcgggaagatgtgagttatgaagaacaacctgtcaaaatcttagcgagaga

SEQ ID NO: 340165 - DNA, 639 bp, Cannabis indica
gtggcacctgcccctgttgtcctggccgaacctacagttgtagtgaatcgaatggaacctctgtatgaaaggttccgtaagcagacacctccagtctttctgggaggcccggacattatgaaagccgagcagtggctaatagtgattaataagatactgaatttcatgggcgtcactgggaacaatagagtggcctgtgccacttttcagtttcaggaagacgcattagtatggtgggacatggtgtccatgatacacgatgtcacaacgatgacctgggaagagttccaggaacttttcaatgccaaatactacaatgaggctgtcaaaagtgccaagaggatagagttcacccacctgacccagaaagaaaatatgagcgttactgagtacacaacgcagtttgattggttggcaaggttggcctcgggaattgttccaaccgattttagtaagaaggaaaaataccttgatggactgaatgtgaagatcaagcatgacctgatgattactacagacgacaaaaccacctatgctgagatggtggaaaaagcactgcgagctgagggcgcagttgggtgtatgactgagtcagttaggactccagtgagtggtggggctcctacccctcctgcatca

SEQ ID NO: 340166 - DNA, 650 bp, Cannabis indica
ggtcgagaatcttgggttgcatataagcaagaagagcaaatactcaccaagaacattctctgtatttatgaggacaacattccctcaagtgtggaatctgtattaaatacatccataaataacaaagactcgtggactaaggctcattaacgccccaaccacgtaaaaatcctcatctcgctttcttacagctcactactataatcatattttaatagtttccgaaaatctcggtcaacatataggattgaattagaaaatatggtattattgaaagaagaataactggttgaaaaaagtggcaaaattttaactagagaatggtcctttatgtggccggccataaactgttttttgcccaatattttatcctttttcaatccatataatccaaccctaaatcctagttcaaacactataaaatgaacatgatgctctcatctcttccacttgacaattgaataattgattttcaacctgccgaaaatctagttttctctgtcagacagctagtagatgagagagatccttctatagtgatttcacctccttcattgttcttcaccatatttgaacccttagtgaaagagtgccattcccacacatagcaagtcaagaactcaatcatagtgagtaagacggtggtaacc

SEQ ID NO: 340167 - DNA, 796 bp, Cannabis indica
tattatttttttattaattaaaattagttttagatattagtaaatctagatcctggtaaaacataatctaacatgaccgtaggtcatggtgtgacgtctcctctgaatggaatcgcacccggtgtgcaagagactagaaataacagttcatcagccaatctgtattcaatagactgggaacaacttatgatctcagggatgatctaaataggaggagagggctagacgagcagtatgtctcgccagccactcagcctggggccgtgttgaaaatccttctcaaagagatcctgacatgactctggttagccaagagaccaaacaagttaatccatctgtgcaagcacagttggacgaactaaaaaacatgttccaaggtttggtcgggcagaagaacaacgaccttgaattggattgagcacgtggatcccctttctctccagagatcagtgttctagagttaccccacaagttcaagatgctgacttggaagatgtatattgggaaggaagatcccttatcacatcttaaatattttgaaatgcaaatggacctgctgttgggattttatgccctaaataaaacctagttcaatctaatctgatttgttatcaatataatattagatatcatttatgtttacatgtagtttttcatgtttacggtttaatatatacaaaatatgttaagtccagaacatatagttattcaaaattacagtgatgtcaacacagtggaatgtgattgtaattatttgcttcaaaagacaatgtccctgattcatcagtgcactgga

SEQ ID NO: 340168 - DNA, 730 bp, Cannabis indica
agttgttttgagaagcactaagcaaaccgcaatatcaaactctaccatggaggccgagtacatagtcgccgatgaggctgctaaggaacttgtttggctaagaaagctcttctcagaacttggtgttattcctagaatagaaaaatcgctggttttactttgtgacaatactggtgctatagccaatagtaaagagattcgaagccacaagagaagcaaacacataaagaggaaataccacatcattagagaatatgtgggaagaggggacgtactggtggagaaagtggacactgaagataacttagctgatccattcaccaaagtattgactgcaactacatttgaaaagcacagattgaatttaggattaattgaaatgtactgatagttttatgttagtgcaagtgggagtttgttgggctttgtgccctaaataaaactctatttcaatgtaatcttttctattcaaatatcaataaagaaacagatttaatttcattacttgtttaatgtgttatttggttcatgtgatcatctatttacttatttgattaataaattcatccaaacccttatcacattgatattcttgtttattgtgttgtcaacacagtggaaagtaaacaagattgtgtgattaaatgtattcctagatttatcagtacacaaggtttaactgatatgataatctacaacgtagtttacttgcaccttggataagtgctat

SEQ ID NO: 340169 - DNA, 412 bp, Cannabis indica
tcacaatttttaaaaattctctcaattagggggagagaaatgtagttgggatcgatgatgattttttaaaattgatcgttacacaaagtatataagaatgatatagtttaaaatgatatataccaattacaaatcaatattattcaaagttgagttagaatgattgaaaacacctgaaacataaataaaaaatgtagaaattattgataatttaaaaatgataaccatgatggaaactgtaacacactaactgctttaggcatgttaacgtgatttttaactgactgtgcaactcgttgctaatcaatgagtttattgaaaatcgtgattaattaaaaaatttcttaattaattgtaaactttaatttataatactgttggaattattttaccaggatcttatatctactca

SEQ ID NO: 340170 - DNA, 406 bp, Cannabis indica
ttgaagggtgtaacggtaattttgtccatactcaatgtaaatcatctatagaggatcattaataattgggattataacaatggagttctatagtggtgcaatgaggaattaataagttagagaatttacttggtaagttctagtaagactcagttaattgattttagttaatcaattttaattctaaaattagactatgtctagtttatgaattttcactatcttatggcttgattgtgaagaaataggattttagggttaatttattaattaagagactttgtggagtctaattaataaatattataaatgataatttatttgataattattttaattattaaaaaaatatttttggcatttatagggttgaaattgcaagaagttgtatttgtaaaaaatagat

SEQ ID NO: 340171 - DNA, 497 bp, Cannabis indica
gaaggcttcttgaataataaattcacagaactcccgttgtcaattaagattctagccataatcttgttggcaacgggggtctctatgaccagggggtcatgatgagggaaatgcactatcttagcgtcctcttctgtgaacgtaataggctgatgcattagccggggcctttgagctgggagttgagtaacctcccaaacatcactgtgctttttacggcccctgcgtaacgtttcagttccttttgggtagttcctccgatgtggggtcctccggagatcatggctacccttccgttgggtctcgacggcaggccaggaatttgctgggcttctcctgggggagcgactgggccaatgctccggctgcaccccctggtactccttggggcaaaggtcctcctgcctgaaccggattgaggtgaggcaaccggttcttgatccattcgtaaagatgtcccaatcggatcaagttttcgatctcgtccttgaggtttt

SEQ ID NO: 340172 - DNA, 566 bp, Cannabis indica
caaagttcagtgacaagaaagccaaagattgggaaatctgacggttggacgattggcagaatatgaaaagacaattcataatgatccttgaaattatacaaccgccagaatcaaaggttacattttttctaataaaggattttggtgaaaatgtcatctgtaattattaaaagttctttttactaaaaaagaactttttaaagggacattgttatacctaaaattcggctgccacttccacgttggacacgtgtcaggatgaagggaatgtgaattaatgcattttctctaattgaataactcattaattacataagagtcagagtatatatgtaacccgctgactataacgtcttaggtgagaaatcaatttacaaactagcacttggtatattagcaagaaaggatatgtcactaaatgcgaatagcgaagcaccaaagaaagtgaccatctcgctatgggaagacttcctatagcttcatccagctaacaggagcgaggtttacaaccctagcgagttagaagacttctttgtaaataatcgtgatcgacacaagacatacat

SEQ ID NO: 340173 - DNA, 587 bp, Cannabis indica
ccaaaaccttgatgtaaatccaggatctctatcagaaacaatgcttgcaagcactccatgtagtcgaactatattgtctacataaagtcgagctagcctagtaagcctataatccttctagattggaataaaatgagcggacttagtcaaacgatcaaaaataacccaaacagcgtcatatgcttcaaaggtgtcaatggcaatccattaacaaagtccattgtaatcttgtcgcacttccattctggtataggaaaaggttgaagtaaacgtgagggtctctgatgcttagcctttacttgctgacatactatacacttagctacaaagctggccacatctcttttcataccttcccaccaatattgtctctttaaatcttggtacatctttgtacttccaggatgtaccgcaaatttggatccatgggcctcaatcaaaatggtctccctaagattagggatatccgcaacaactagtcttcccatatggtatagatacccttcaccattaactgtccacctgtctaattgctctttgtcctaaattcggttgtaaaaagtcttagcttttcatcttgccactga

SEQ ID NO: 340174 - DNA, 525 bp, Cannabis indica
ttaaaaactctttttagtttttaaaattagaaaacaattttcaaaaaataatagggggttgtttgacaaatttttttttaaaaacttggttttaaaaaactaaaaaacagaaaacatcaaactcttattttcaattttcaaaaacaatttttttttgtctaacatattatattttatattttttgcttacagactcggatcctaaatccagactcgaattagttcatattatggtatggtgttaaaatattgatttcttttagcaagaaaaaaattaaaaatagatttaaaaaacttgtgccaaacactataaatttttaaaatgacaaaaaactgttttctattctcacttttgaaaacacaattttaaaaactgaaaactgaaaaacacaaccgaacaagctctaatattttaacaccataccatgaaatgaacctattttggtccggtttcgggtttggttcgggtctaggatccgagtatgtaagtaaaaatgtaaaaatataatatgttagacaaaataa

SEQ ID NO: 340175 - DNA, 626 bp, Cannabis indica
actcgaatttagtcaaaatatattttttagaaaaataactagatttgagaagtccttgcaaaaataatcgacaaaatattttagtcatatcaaaaaaaaatattttgagaaatttaagtccaaaaatataattttaactattttacataatacaacattcaaaaatatatttatattaataaaaaaacagtgttcaaaaagataacaatacaaaacacataatcttaaaaacttatttttttttttgtctatgaatacatatagttaattgaaaattatttttatttgttttataaagaaaattaaggttgctactacaaatctcaaataaaaattatatcaggtaaatataattttggatcctgtattttacaaaagttaccaattagtattttttattttattaaataataaaatagaccttatattttttaaaattgtacaaataggaccctgaactgatttttatcaaaataaaatttaataataatatgatccgttatgacaaaactagttatatttctatatttgttcatgttagaaattgtcttaaagttggttatattaaaaaacattttaaaaaaaaattgaactcaggatcttatttttactattttggaaaatat

SEQ ID NO: 340176 - DNA, 681 bp, Cannabis indica
cctatgatcccacgagatacataccaattgtcgagttggaaaattgtaacctcaggcgacgtctggaggaggcaaaccgacgaaatgctgagttggaacgggggcaaccgcagccatggcggcataggaaaacaacgcacaaaaccaacttgatcttggagtgaggagaccacgaggcagacctcgctcacgaactaggacgcaagagacggctcaagagaacgctcagaaataacaacctggggaaactgagggtccccctcaaaatgaacaaccaaatgaccaatcggagccttctcacagaaatgagaatggaaggtgacccgagactagggaacaagaaatcccccgtgagaacaagggaaatcctggactcaacctaggacgggtgggttgccatcgaggtttcatcaacgtccttctcgaacaaatagggaaggggcacgtacaaaccccagctgggggcatgcaacaacccatacccaagggagaaggcatgtacgtgacgaggcgagtgccagctcgggacgcacaagaactcgtagtcgatcaacgcgaggagcggatggaacccgtcgcggtactgatcgagagagtacaggcacaagtacaactgaaagttactcgaggaagaggtccatgagtaggacgaggtccatgagtaactatgaccagcaacag

SEQ ID NO: 340177 - DNA, 741 bp, Cannabis indica
aaatcagcagtgtttttcattactccaaatgactttctttacaacctattcagcacttttttataaaacaaggtctgattttttccttctaattatgtacattggttacaattcattaaaccatgttgtatcccctattgaaaccttcctaggccatacactttgtattctagttttacaaatatttttaatcatctatacaatagtcttcgggtcttcttttgtttgcagccacagtctattgttccttgctctccaaatatggtataataatgctgcacaggcagcagtaagtacctatcttcggaaagcagatgtggatctcttctctataactcgcactagatcgtttaagttagttgctagagtcttccatcccaaccaactcttgacctggtttagacattcaatagagaaagggcagtgaaaaaacaaatgctcacaagtttctgcactccccgagtggagcaaacatgagggatctgttgcaatttgaaatctgagaaaacggtctctggttttcaatctattttgaatagcaagccagaatacaaaactgtgtttaggagtatttagccgattccaaacttccttactccaattgaccctagttaccgtgggacacagccacttgtagccatctgctactttatattttgtagtgaatgtgataggatcaactaagttcagcaacgtaccttttagagctacaatcttcctccaataccagctgcctgtttg

SEQ ID NO: 340178 - DNA, 630 bp, Cannabis indica
taagttttttttgataaaaaaaattataaataaatatgtaataattctttcatttaaattcttattaaatttaaaatatattaaaaaaatcaaacttaagaaaactaataaaaaaatcttatctgtctaaaattatttatcccaccctgtatgagattatttattacaccttgttggatgagataaataatatcagacaaatgagattagctgaaattattattcaaattttttagttagtttatctaatacagtccaatctgcgtaccaagcggatcttatgagttctttttagtatttctctaagtatagaggtactcattgtaaggaaagaaaaaaaaagaggatgaattgaattctctgcttctcgggtaggagtgtcaatgggtcgggtcggatttgattcggctatgatccgacttgatccagatcatgtaaggatctgccccgctctgtgttacgtgcagtctatgatggcacgttacaagctaagagatgcccacaaggtggtcaagtggtggcgcatgttgtggtgcatgcaggtggcatgctgatgcttagtttgtatgcagtggcattttcgtaaatatcttcaatattgtccggaatgggacgagacttggtattcgc

SEQ ID NO: 340179 - DNA, 825 bp, Cannabis indica
aatgacgagaggatcaacatgcggatactacacatgttttgtgtcttcctccgagaagataatcggaggttcatataatttttttttctttcaagtggttctagagcaaacactaattgtccattctttatttcattgatatatctttctgggcattattactgtttctagcgagatatggccctcccgaaatgaccagtatatccttgccctcaacaaggggaggttgtattctctagttatttgggttattagggtttgggctggtttggctcgtttccttgatgtcttacatattatctaaaatatccacgcgagatcagactctctatctcgtctttcagttgtcgacattcttcagtagtatgccccatgtctttgtgaaattggcaatatttgttgagtctcgcttatgtctcgcatgcctcatgggctcaggcttgcaaaatgcaatcttgttttcatttgtgagaaatatattttcacgagtttcatttaactcgatgtatattgaataaatcgagacatacttgttgtgctttttctttttgtttttatttttagaagattcttttgaatcatcttttctttatgtgtttgaaccataggattatcctccttagtggagattgtacttgctattgcagtactcgtgctgggtttacttcccgaggaagtcttcaacaacttcatctcgtttgtagctttttcttttagcacaaatacttgcgctctttcattaattcattaatgttcctcattgggagaccttgtaggtcatcccacaactcgcccagccgtagataggtcagttgtgatccctgc

SEQ ID NO: 340180 - DNA, 907 bp, Cannabis indica
gtgagtagatctaagatcgtggtaaaataatttccaacaatagcctactccacttatattgtattaacttgagagaaagaacaaaatgttttcctctctgaaagctgttacaattgatctctaagtaattctctgagatcactattttttctctagaatctctctctaaagcaattctttcgatccccttcctagtgaggctaagccactatttatagggacttaatgtatgagggatggtttcccttttgcgtacaatgcgtaaaataggaaattacattgattacacaattataatacataaaatgggaaactagaacatgttgccatatttctctgatttaatcccacgattgtagggattgtcttcgtgtctatgcattacaagaccagtttgaagtaattaacttcttgtaagtagctcggcaagccagacttctacctggttggattctttgtcttctactctggtcgagtaatcgacaattataaatgttgatgtattatgtagaggctattcaggacatttacctcagcccaagtgccagatatgtgagacacgtgtcgcttggtcctcttcccacatcaatgtgaaaaaaacttgataacatttggcccctaagtctgggcaagacctttgtggtcgcacgtggacttcactcgatcaacagtcttgtccagatgggtgacacgtgtcctaggtgtcgattgatgaaccgatgtgatgttgggttttgtgccctaaataaaacccatttcaatataatcagatttacttaacaataaatatcaaaaataacatttttatgttgcatggctcacatgatttatttcatgattatatgcatataatgtatgaattctattaaagtcctgaacatatgaatttgttaataattataatgtt

SEQ ID NO: 340181 - DNA, 685 bp, Cannabis indica
gtaggtcatcccacaactcgcccagccgtagataggtcagttgtgatccctgcctaaagagttgtaagatgaatactgtcattctgatttctaacctttacagtggctgtgctaaagtgacttaagtaagccttaagtgactcacatggttgctgctttatgttggttaagaacgacgctttaggtcacctgtctctagcagcttgaaattgttttttaaagtccttagacagttgttcccaagacgttatagaatgatgagtaaatttgtcaaaccagttactcgcagctccagttaaggaagtcgggaataacatgcaacgcaaattatttgagacattgctggctcgcattagagtattaaatttgtttaagtgagcgattggatccgtagtcccatgatattgcaaaacatgtgggtttttgaattccagaggaaattcagaattcaaaatatcagggtgaaacgaatttgtctcttcatccaaatcgtaaccaggcaattttccatgttttccatcctgatactttctgaacttatcctctagttcaattatttgcaattggatgggatctatctgctgctgattagcattaagttgatggcccaaattaggtgcattttggtttgttttgctcgagaagatcaggttgtcttcgattcaggtgctcacaaagatcaggt

SEQ ID NO: 340182 - DNA, 770 bp, Cannabis indica
atgacctataccgtaggtatcttaggggttaggtggatataatcctttatcccttcttgattgatgtgatccctcataaagtagctgtcactagccttattaatcatagcgtaatagctgcaacagaggggttacgccgtccgacttattacttatggcagttccaatacgtcttctcccatgcggcattaaatgtgaggtgactgttcagatggagtccggtatctctcggaggtgccttaccatggttctgacctccgggagtatgtggagctttcacatctcctctgggaggtattttctcgttgatactcctgatctaaaaagacttagttgatttatctaagagtcatgtttcttagatccacgtgtcgtagtcatattggtccacgtattcttgacaaaattaagggcaacagaataaataaagtatcaagttattataacgttacaaattacttattatttatttagttttaatttttaaattaattacaactatttgataatagtaattcaatggctaaaaatatttaatgtaaccattgaaactattaaaacttgccccatatatatataatttttttcaaatagtatgaatcacttaactaaataagtaacatgttgaattatagtatatatatggcaaccaattaattttcaaataattttgatttaaataacaataagatattgttttttttttttagcttttttatttttacacttcaaaactagttttttttctttttttttacatttttatgaaa

SEQ ID NO: 340183 - DNA, 854 bp, Cannabis indica
tttatgtggaatgtccttattgccttttgactgacgtgactcttcgcagtgtagccgtcaatagacttaagtgatcatagccttgtaggtgcagatcgggggttgtgtcgtcagactttattgcgtgtggcagtcccaacacgtttcctcccatgcggcattaaatgcgagatgactgctcaggggaagcctgacacctcgcggagatgctttgatgctacttaggcctccgggagcataggggacttcgtatgccttctccgggaggcaggtcccggatgctgcctttcttcataaagacttagcaattaatttaaatgttaagatcttttggtccacgtgtccctgtctggttggtccacgtatattgggcaaaatcaggggcaacatttacctcccaagccttgtttatttaaaaaatgaacaaggcttgttcagatgcctccggttgactcctcggtttcctggcacgtgcttcgggcgcgtgaaggcgtatttaatgatcatcattactgcagcgattcactttttgcaggcgttgattcgtttcatgcccattaattgatacggcgcattaatgggtgtcagacggatactcaaacgtttccaccgccttgattacaaatcaatctaaccgttggatcttgggaattcgaatcgtgcgcctccccagccgttcgattggtaggtgattgcgcctgttccacatgcagcttggcctataaaagccaccatccttccttcatttggttactttcatcctttcaccaaatttcttcgagtttttcagagagaaagaaaaccctcaaaccttcaaacactataggtttcttattaacctttgttcgttactg

SEQ ID NO: 340184 - DNA, 535 bp, Cannabis indica
tatatactaacaactctactaaaacaatctaaacaactcaacaactagctaaagacagcggcccattattcatatgccaactaatgctgacctgccagaaataagcaaacaccgaacccaaaacaacaaaaagctagatgaactaacaaccaattagatgaccaatcacacataattttccaaacatgacaaactggatcttacattttctttgaaaacttgacaacaattgacagtcaataataaaaccaaaagtagaaatcaatattacttataatggcttgaacaaccaataagcgagttttcaccataatcttcatgaatgactgagatttaagccaactcactacctccttaatcctaagagcctcagccaccactgattcaataatgtcactacgagcatgagtagcaactaccaacatctgctccgtcgagtcccaaaccacaaagcgaatgttgggattttatgccctaaaaaaacctatttcaatctaatcttatttgtaattaatagaagattaaaagtaattta

SEQ ID NO: 340185 - DNA, 848 bp, Cannabis indica
ccagagtaccaccagagttcattcggactacctgttctatgcctaggttaccccaaatccttttgagaaacccctcaaacactttgaacggggggttagcacccaacacaaagcagacaatagcatttttccaaaaagaagcttctacttctatctcctctaggtcaagtttagccacaatttgatctcccaccttaatcggttcagtaaaattaagtttagtagagggagtaggtacctggttcgatttaaatttgctccataggtctctggcatccgcttggaaattcgcctgttcaacctcttcagcccagtttccaggaatcggagcaacacgattcaactctggttcatttacctcaatccccaattctgaactcaaattctcaatcgtatcatggaactcttcaactagctccgggtctgtcgcttcctcctggattgaagggagttcttgatcctggtcgacgatctctgtagcagcactggcaggcttccggccaaccctcttcttcttcgccatgggagaagagcgggagacactttcgcctttgatttgtcttagtttttactatatttaactgctagtaaactagatattttatttagtgttgatatttgtgttaggtaccaatcttgtcccaaggaatcccccttaagtgtcgttaagagaatctttagatacttgataggcataattaatctaggactttggtatcccaagaactcaaactttgaaatagtaagctactcggaagccgactttgccagttgtagacatataggaagagtactagtggaacatgtcactttctaagaaattccctagaatcatggtttagcaagaa

SEQ ID NO: 340186 - DNA, 539 bp, Cannabis indica
acctggagtgttcggtctcgggacattaggggttatattttttagtcgctgtgcgacctggataatatgtatttttgaatattatgtttaaaaagtttgaaaataggatcccagaacttgtaaatactttagtatagtataaagttttattaattaatacaaaagctttaatttgacacatatttcaagaaaattctttcattagcaaagacaacactgtagttcaaaaagcactgtagcgtgccttagcaatagggcgttacacatttatttatcgttacaagacattatacctatattatttaaataatcgaaaagggccgacccataggctttgcaatacaagcagatgcccagggccaaaaaggtaagaggtcccaatttatttgtttgtttcttttttcatgatgcataggctcaatatgttattggggacttttcataaatgtgtaaattgagggtatagtttacttttttatggcataaataaataacactatagggttatggatttttttttacatttatatgggtttttt

SEQ ID NO: 340187 - DNA, 1043 bp, Cannabis indica
aggcttggcctttgattgctgtttgtggttggaaagttatttcgtactgacccaactctactgcccacctgagtaaccgtctagaagcatctggcctcaatgagtcttttactaatgtaatagactggctgttgcatgtcgttctcttctcagatcagcacgacactcacgtcatgtttcgtgacagctaggtatattcccaattcctaatcgtccagaggttttgaaagtacaggaggtttcgcaagttgtgcctttagctcttggaaaattctttcacattcttctgtccactcgaactgtttgtttcctcgcaggatgtttaagaatgggacacatttgtccattgattttgacaaaaatctgctcagtgcggcgatccgaccagttaagctttgtacttctttggtttttgttggcgagttcatatccaagagggcttgaatcttttttgtattggcttgaattacttaggcattgacgatgaagcatagaaactttcctgagctgactctgaaggaacactttaagggatttagtttcatgttgtattttctgaggacattgaagcattcgtccaggtcatctatgtgcccccagcctttctggatttgacgagcatgtcatccacgtacacttccatatttcgcccgatctgatctttaaacatttactttaccaatcttaggtacatagctctagcattttttagaccaaacggcatgactttgtagcaataaagacccatatctgttcggaaacttgtatgttcttggtctggtggatgcagattgtggcctgagtaagcgtccatgaagcttaatattccatgccctgctgttgcgtctacgagttgatcgattcttggaagtggaaaacagtctttagggcatgctctgttgaggtttgcaaaatcaatacagacttgcaatttcttgttcggcttgggcactagtacgggattcgcgacccaagtcgggtaaaaagcttcaattatgaagttgttgtttcgcagcttttcaacttcatctttcagggctact

SEQ ID NO: 340188 - DNA, 682 bp, Cannabis indica
aatatctaattaacttttctgatccattaagtaaatattagctcatattttgagatcacgtaccaatctattatcctttactctctagaccctcttctgaagcctcatatccttgctctcaactatcatagttgcgttttttttttcttgatacttaagaaaattttcaataaaataaaaggttaaaagtaaaccagcaattgagattttgagggactcaaatttgttgattggaagcctttgtcacagtattcaatttctaaggtatgaaactgttccttgttgtgaaattttcgtcaagtatgatttctttttcgttttcagagaaatagtgttttgtaaaacaatcgtatctctctgcttgtatgtctatttttagtgatctaggtaccattttaaagataatttaatgatctacattttttgtgcagagccttttccctaattctaattatttcggtgtcaaaaattcatgttttcatactggctgtcgagttacagttttttttcttcagattttcttctgatgttgcctcagtaaaagtgtgatatctctcgatatctattcttttccagcgattttgacatcgttagaaagataattcgataatcgatattttttgaagaaacctttccctaatttggggttcttacttgtcaaaaatcgatatctttactcggt

SEQ ID NO: 340189 - DNA, 547 bp, Cannabis indica
tcgcaatacaatgggactttggatcccgttgctcacgttaataattttaataccataatgcgagccagcagtgtctcgaataatttacgttgtattttattccctaccttactgactgaagcaacgagtagctggttcaataagtttacccatcattcaataacttcttcggagcagctgtccaaggattttaagaaacaattttaggcagcaagagagaggtggcctgaagcatcctcccttactaacataaagcagcaaccaggcgagacacttaaggcttacctgagtcgatttagtactacctctactaaagttagaaacttgaatggcagtattcaacttactgctcttcaagtagggaatatgactgacctctcaaaagttgggggcgagctgtgagagcgccaatgtttttgcgcaaagaggaagcgaggaatgagatagaattgctaaagattggctcggtaagtaaatgtagcactgccatagcaagaaccatctcgacaaaggatgacaatacagatggttcaaacaccaagagaaa

SEQ ID NO: 340190 - DNA, 937 bp, Cannabis indica
cggccatactccatacctctgtggcctccggtatttgcacgctctgccgctatcatggtaagatttagcttggtcgacattcctgctaactcttcccgaatggctgtgacagacacattacaatcctcgatcgtatcattgagggagtcttgtaatgcagcctgcccattttgtagcacagtgatagcagcctgcatgtctgctgttgcttgttctaatgccttgatgcgatcctccatctgaggtgcacctgatgttccggtagcagcatctcttctctcgatcgcagctaccctggccaacaagttagcatagtcttgagccaacgaggcaacttgttgttgtgtcactgttggccctgagttctgattgttaggggctagatccctgaccctctcgtccaggccatctaattcccctatgcgcctctcaagctcttgaatcctttgggtgttgctcaccattatgtcgtgttaccaagcttccctttctcttggctctgataccaactgtcacgggccgcctatttggacacccccaagtaggtggaacgtgcggcacttgctggcacaccgagctagcaagtcagcctaaacgcgcctgcaggcaaacaagttcaaaggttaggcacgatacatgtctcgcacatgttgagtgcaaacaagaagcatgagcaagcaaacacaaagcgtccccaaggaccaatctcacacaacccacaagcaaacatatagacaaatggcacgcaatggcccaacaaaggcaacaaacaggcatcacaaagaccatatagaagcatacaagcatggataaacatcgttttattaatatatggccttgatagggcaagggagtacacagctgggcccctatcatgctggtgacaaggtgcttcataagtcacctggtcacccccctaaagagcttattggggttt

SEQ ID NO: 340191 - DNA, 731 bp, Cannabis indica
ataaaactaaaatgatttatacttttcataacaaatatgtaattttttatagaaaaattacttacatactattttttaatatttttcttttaaatttacgagttaaattttgattgtgatttaaattacccgttagttgcaatataatttttgtaaaactactcttttgaaatgtaagaataaaaaaatctctattttttttagacatgaaacccaacatggtcatactccttcaattaggggtgggcatcatccaattcaatccaattgaaccgatccaatccagtccaattaaaaaaagttggatattcaattacaattggatgctaaaagttagattttaattggattggatcggttattggatgtcaatctcaaaatccaattaaaaaccgatccaatccaattacatttatatatattaaaaaattatttatataataaaaaatattgaaaaatataataaatatttattatatttttattagatttttttgtatgttgaatttataacacttgattgtttagtgtatttattttcatgatgttttgttctattttattacttagaaatgttattgttttatttatttaaaaattttagctacaatacacttgtaagaatagtatatttataaagtattaaacttaaataaaaagtaatacttagtttttttttatgtatttttctttatatatttaagctaatattgaaatttaggtgtgtaatt

SEQ ID NO: 340192 - DNA, 1690 bp, Cannabis indica
gaaactaggttcctatattgatcactcccactgataaagtcaattcttaattctacagttctagtgttgcgagatggaaaataaaatatgtaacccttaaaccttatagcttttcagatgaaaaatgctcatttattgttttgggctgttaagctattttttagcctatattttggatcaactttatgttcgcttttcgttgttttaggacggaattatgcttgttttctatgttttcaggttcttcggagtaatggaggcctcgggatgcaaaagtgcaataacagataagcgaagccaagaaaaatgccaaatttaggcttgatgcacttctggccgcggctagatcactgtcgccgcggccataactcgagaacagagaaggggatttttgaagtcccaatcgctgcggccagatcccagtcaccgcggccatagagtcctttacagaggcacggttttcagaagcccatctcgccgcgacgaggatccttgtggccgcggcgagcgcccgtacggctaggggcaatatcgtccgacaaaccctaaaaaattagttataaatagaaaattgcgattggaaagagggagcaatttggagacctaaaacactgtagaaagcggcaagaacagcagaggagatcaaagtgaagatccagagtcattccaccaacagtctctttctctattcctttttaatttctttatgctgaatattgttataggaatggttatggatttgattatgaactaaatttcccatttagggaggatgatgattgttgtttaaagttttttcctagttaatgaataattgccattcctccattcttgatggtgaaattatctatatttgtgtttaattccatgtgtaagcttgatcaccttctgcatgttctatgatctcaattcaaaatctgaaaagtgagaattgagaatgctaaaattggataatcgatgttctatgtgaaacgagagtattcacatgacttatgtgacaagtagattattgcttaatgctgatttcatgttagtttaattaagagattaattagagaacatgtgatttagaacctaaaagatctgaaaagagttaggttaatttataatctgtcattcacttcaagaaaaggatagcaattaggcattaacaattaggtaaacatacaacaggattctcctccctattatctcatcttgatcaatttttcacttgtgttatttaagtttcttgaattactttcattcttttcgaatcgaaaactattgacttgccaaatagaatcataagtataatttagtagtaattaatccaattccctgtggttcgacctcacttgcgtgagtttactacttgattgcgtgcacccgaagaattaaaaaatttcgtaacaagtttttggctccgttgccggggaattgtataagattaatattaaaattatacaaacttctactttggtttatttttcttgctaaatttctaatctgtttcttgcatattgttttttatttattatctaggtatttttgagtgtatgcgccgtcaagggcaagcggtcatattacccgttgatcctgaaattgagagacttgtaggagaaacgagaaggaacaaaaggcaagagagagtttcacgcacctgctgaaaacaccagaaaactcactggctgacaacgataaatgttgc

SEQ ID NO: 340193 - DNA, 683 bp, Cannabis indica
attttagtatgtttagcaagattcatggtaactaattactggtgtactatattaattttatgcctgcagagatctatcatacaataattttgtgggaagcattccttcttgggtcaacgatcaacacaatttacagctgtaattcgtaaatttgttactttacaaacgtttaattttagtacctttgtgttatattcattcttgttttactgcatagtaaagacttagatgaagactaaactagtatttataccactttttttgatgcaggaacttggttggcaacaattttactttagataattcaaacagcaggtattttgtttctgaagctatgttgaataactaggctaagcaaatcaataaattatctaaattttgttgttgaatgattaattcaattccattattgatctaattaatttattcttatttttttatagtaattttcttttaggtttggactgccttcagagaaattttccatgtaatcgagatctacccctctgtaagtagagtttgcacagtttgtttactttattaatacttgcactttctgataataagacttagtaaattttttatttgtgtttgttgattctgcagatactaactttgggatcaactgtggtggtgaacaaattacctcttctaatggccttgtgtatgagaaagatgatgag

SEQ ID NO: 340194 - DNA, 749 bp, Cannabis indica
ttaaaattaaaaaaaaaattcgagtccgaacgatatttccagaaaattcttgagatttttttgttttttaaattggttttttcatgcttaaaatgatctataatactatatgaatgtattgatgtatatagaaattcaagtaaacatcgaaaaatgaaaactcaaattggagcaaacggaccgaaaactaaacttttatgtatatatatactcgtacacaatgtatataccatataagatcatcataaatgtatggaaagagagtattacatacaattttatatttaatgtaaaatatatatataaatatataacgaaaaagatacatatacaaccatatatgaatgtgtatattatatgtgtatatatatgaacaaaataaaattctaaatataattatatatatgataatatgaatggacataaatatgaaagtatatatacatgaaaaaaatatattggtacaatcgaatatatatatatatgtatatatgaaaatcctagatataatcaaggcagagataaaaacggttatgatactaactgttagactataatataatataaaaaataaaacatatactaacgatatgtaatgcggaataactacaaacatattaaaaatatatatgcgatgaaaggaccaaaatacctccagctattgatgtttgagcttcaatccctagaatagcttcagtatgagaattcaggtttcctcgctctctcaactctatttagatagaattttg

SEQ ID NO: 340195 - DNA, 799 bp, Cannabis indica
aaaatcatcatataattttaaaacaactatcatcaccgtatcacatttgtagtcaccactgtatttaaagttgattttatcaccgtatctcacttgtaatcatcattaatgttctttctaataagtttattttgtacataaaataaattaaacaataatcggtaagtatttacttttattatgtgagggaagagagggtgataaacataataagtttagaattttcataattttggcatattaattaataatttcttttaataaattaaatttgttaatattaactatatctctctctaaaaaaattatatgtagattaatttttttaatacatatatagttattaacaggcctggcccttttcgtgtgcaaccaaatctatttcacagggtccaccaaaaaaaaaagcccaattttctctaatttatttttagttttttctttaaagctgacttcggtcagcaacctattcttaacctaaaaaaaagttatttattttaaaggcccacttttcaaaaatatgttttggcctttttttttttaaaagctaactttggaagtcagcaagcttattcccaacaaaaagaaaaattattagtttttaaatcttttaaaatatttttatttttttataaaccaatttttacttagtcaattaattacaaaatttccttgattctagtaaaataagggtactaaatttattaatgctatttaattctttttttttaacaccttttatattcacctacatgactatatatatatatatattaaaagtgtctatctaacggcattt

SEQ ID NO: 340196 - DNA, 503 bp, Cannabis indica
attctcgacccctgccttaatgagtttggggggtatttatagtgtttttcgggggtgatccccagaattgaggtacatgtctttctgtaatatacagtaagggcacacattcccaatgaatgcatcataggaaacgcatggtctaatccctaggctttttaggtgtttaatggatgtaatacattatcttttcttgactgatgtgatttatcataaagtagccatcactaggctcattaatcatagcgtagtagctgcagaaggggcgttacgctgtcagactttaatacttatggtagtttcaatacgccttctcccatgcggcattaaatgcgaggtgactgttcagataggatttgatacctcccggagatgcttcgttgtagccttggtctccgggagtatatgaaaccttcatgccttctccgggaggcatgttaaatgttgatccttttgattaaggagacttagtcgaattacctcagagtcttgcttcttcagtc

SEQ ID NO: 340197 - DNA, 766 bp, Cannabis indica
ttacctgatgcaaatcattggcaagagggaagatttggcagagtttaaatcgagcttaaaggatttgaaccaagtgagaagaataacaacacatacacagctccaaatgagactgaagaacaaccagatttgtctgactaccagcttgctagagatattaccagaagcgaaatccatataccgccaaggtttgtagaagttgatctgatttcctatgctttgtcaatggatcattcatgtgacataccagaacaattgagttagaagaggctttaaatggaaaatacaagaaggagtggtctcgggctgtggatgatgaattaagctcgcttagaaagaacaagacatgggtattggttctaagacttgatgacaatacggtggtctcgtacaaatggattctaaagattaaagaaggtacgacagaggatgagccagtaagattcaaggcaagattagttgccaaaggtttcactcaggtggaagggatagattacaccgaggtgttctcatctgtagtgaagtataagaccattagacttatgttgtcaatggcaattcagcaaggtttagaagtggagcaacttgatgttaaaactgcgtttctaaatggttatctagaagaagagatatacatggagaaaccacttggatttcaggtggaacaagatggaaaagagatggtttgtaagttggaaaattccctatacggccttaagcaatcaccacgacaatggaacaaaagattcgacaactatgttcagga

SEQ ID NO: 340198 - DNA, 862 bp, Cannabis indica
attccgacccatagtgcaaggaagacccagataaagactatttggcggggcctcaatcatacccaaagagaacacattctagctttgacaaattctgtagtattcgaactaaaaagatggtggatttggcaaaattcacctgctgaccagatgcttgttcaaataactgcaacaatctaatgacattcaaagcttccttatcgatagctttacaatataggtagctatcatccgcaaagagcatgtgaaaaataaccggagctccattacacaccctacatccatgcaactctccccgagcctcgaaagacttaataagagatgacaattttatatcttaaccattttttttaaaaaaaaaaattacaccaaacttacaattttttaatgaggctaattctgtacaaattcctattaatctaggtggcagccattttctttgaatgttttttaggctaattaggaattatgtctcctgaactcttaaggtggttaaaattcttactgaactattgagattgttagatttaaaaacttttgtctaattttattaaaaaaaatttaacatagatgaaagttcagggggcatgatttagtacatatcaaagtttgagggacatgattttgtagatatcaaaatttggggagcatgatttagtaaataaacaatcactaaaacagtaaaattgaatgaaattagacaaaaattcttaaatctaacaatctcaatagttcatggggaatttttaacggctaaaaaagtttagaggacatgatttgatacatgtcaaaatttagaagggaaaatcctaatcagctgttttattactgatattttgtgtttttttattattatttttgt

SEQ ID NO: 340199 - DNA, 1200 bp, Cannabis indica
agttgaaaaaataagaaattaaaacaactattactccccctccccctttgttttgttatctaagggccaaagacaaaaaaaagtaatgaaaatatgtccaacaaaaacataaatagaaagaaaaacttatgccccataaatcttgatcaatgtggacagctgcttggacatctcttgctgaacctcctccatggcaggaagacgattgttcacctgaagaacttcctgcttgacctcctagacatctgcaggagcagaactggaacttgcaccagcagcagcagcaacaacaacattagaacgcttgggaaaggctccatcaaagtactctaagggttggaagatggtgctagtaagaggaggctcaagtgtctcatgagaataggtcacatccttccaagaggaaagaatcttaaagattaagctataggtgaacagttgcttaagctataggtggtaatatatgctttgtattattataacgttatgctttatgtgatgatgcattttatcttcttttcttattgagtctttgtgactcacgtgtgctctatggtgaaggtaaagggaaggggaaactggaccagccatgagtcaaaggtctctcaacaatgtacatatcaactgtcatattttggtccttagtggataggatcttcttttaatttgttgtgttttgaaaatgtaacagtattttgtaataagctattttatgatattttgtaaaaagtttataattaaggggatccccgaatatagtgatatttttaatgaaaagctaggttatgatttaaaattttactaaaagttttaattaaaccacaattttcttaaaccattagtttattattataaactaaatttaaaagcacacatgtggcacccttacggttcaaggcgttacaaattaagagattcaattagtgctgtcactgattacaaattgcaatgaaatttagggacatacaacacattagaaatggagaaattaggataaacttgaactctaccaagacaagagactttagcacaagaatttgtaggtgaattcacaaatttcatggttgaattagaatagagatcagtaaagagagaaatatcatgacaaacatggtgagttaggggtgtgcagaaagtcatccaatccaattccaaccgaccgatccaatcccaaccgatccaatagaatcggatatccaa

SEQ ID NO: 340200 - DNA, 661 bp, Cannabis indica
aatcaaagaatattattttttttataaaatatagaaccaagcattaataatttcttaccataaaaaatacatgatattaaagatgaaagaaattattttaagaagcgaaaatcataggcatatattgtacttagaatcaaaataaaaataaatacttaattaaatacactaggttttatcatccgccttaataataagagaacttagaaacccataagaaaattaactaaaaaaacggtaaattaatacggccgcttcgagcgttttctctagatttttctatctgaaactctgaaacggtattgaattctaaaatcctaaacttctattaaaagaagggtaaaaggactaatatgcagttaaacttattacaaattgcatgtgggtaaaaatataaataccaataattaaaatcggagtgacaagtttggtggatgtggtaaactactgccatgtgtcgctatttgattggctgaagcaattttgactcttaatggctgaagagaatcggaccagacaatgcccagtcgcggggcatggcttgagacgcacgctcagccagggtgaggccgtgtgcctcacccgcgcgtggaagggagagacctgccggtgctggcgatggcagctatgggcgaatgggaagaggccacgtggctgcctt

SEQ ID NO: 340201 - DNA, 632 bp, Cannabis indica
tcttaggggttagtggatataatcctttatcccttcttgcctgatgtgatccctcataaagtagtcgtcactaggcttactaatcatagcgtaataactttagaagaggggttacgccgtcagacttaatacttatggcagttccaatacgccttctcccatgcggcattaaatgcgaggtgactgttcaaatggggtctggtgcctcccagaggtgctttgctatagctctgtcctccgggagtacaaggacccttcatatcttctctgggaggtattttcttgttgatactcttgatcgaaaaagacagtcaaattatctcagaaccatattccttaaatccacgtgtcgcagtcgcattggtctacgtattttaggcaaaattaagggcaacataggcaatcaaagatgtataaagtaattcacaggatgaattattcaaagtatgtttaagttttcttaaaacggattataactgtttacgcaaagtagaattgattaactgctcgtgaaaggaaagcatagcagatgacaactactcgcatacatagtagattattaactacttaagtaatattaagagaaaaacgagaccaattgaaatgctcacttaaagtatcttaagtttgat

SEQ ID NO: 340202 - DNA, 847 bp, Cannabis indica
cgcctaaggtagttagggtgttacagtactcaaccaccatcccacaaatacatagataatatgaaggaatgaaaataccaaaatagcctcaatccgacaacatggacccactgcatacagtatttttgtactattaactgccaggaacaatgaagtatgttgtaccttttcgtactataactaacacctacagtcacttgattgtaccttttttgtacctttctatttttaaattaaaaaaaaaattcacaaccggttaacacacctacaacaaccggttaccacctaaattaaaaaaattaaaaacatttttaggtaccgtgggacccacctgttgtacaacggattgcaatccgtgttttccacatatgggtacaaaatcggctgcctatattttagatatttatatcatcatatatgtatgatgtgtagttactaatttagttacttttttctaaaaaattaaataaaaaaattacttttatcttggttatcattttttatacaaaaaaaatatattttccatattccaaaatatagtttaaaattgttaaaaaaaaaaggtaacatcaatatatcttaaaataatataatataacctaaaaattaaaaaataaaattatagtttcaaatttaattaatcaaaataagtaactgcaagtgtatgaaataaaaaattatctcaaaataattttttccttaataaaaaacgtaactaattgatatattttttatatcaaaagtaatcaaaagattaatatatttttctcacatattaaatggttattttattatttatctatgtgtaaaattctgaaataatttttttactagaaaagtaaccaat

SEQ ID NO: 340203 - DNA, 555 bp, Cannabis indica
cggaattttatatagaaattcctgttacaattagccgagcaacctaaattgcaaccaaaaattatatagcaacacatatagaaattaccggaaaaaccattttaaaaactcaaactgataggaatgtacaattaataataataaaagtcaaatttaataaaagtactactaatctttatatttttgacaatcaactttttccatatacaatcttttgtagtcaagatcataagccatgtggtaattttgttgagtcaccgctccaatgaccattatttttcccgaatcaactattgttacgcctatcataaagcaaaatgctctcttggtatgttgtttgaacaaaatacgacgatccaattccatacttgcctccccttcaaaacgaatcataacttttggaaattctttaagatcctcccttaaatcacctctgaagcatagcaatttgccagtagcaccttcatgttcttttacacctaattcatacaacatttctttcacatatgtttgaagactagtcacaaaattctcaggcaatgtagtggatgatga

SEQ ID NO: 340204 - DNA, 708 bp, Cannabis indica
atttgtttgtttgttgtttttttggtttcccaatttataacaacataaaataaagacccaattcaagttaaaatatccaataaaaatctacacacttgttgttagtggtctagtacctcgaagattaattttgtggcttaatttatcatttcacaaatttgtttaaactacaagttttttttttaaataatgaatacaatgaaattatgttatatacaccacttttgatttttttgataaaacccatatcacatcttatgtcatcaaatgtttgggctccttaatttatatgtgctctacttagttgttaccactcatttaataatgtcactttagcttagaatcagcataatatgaatgtaataactacttgctttatacataaaatatttatatttttgacttagtgccttccttgactccaattatatgaacaactaaaaagaaaaagagacacacatgatgtgattggggcctctcctcactcccaccattgacaaaaatgctttccttttcctattgtgatataattttatggtgggcattgttagatttcattctagtaagaattttgattgattggttctttccatattaggaatctcacagagagggaaacaacataaagtgacaatatacttctgtttgattctttttttttttttctgcttactactacaagttgctactacttcatttttagtcatt

SEQ ID NO: 340205 - DNA, 542 bp, Cannabis indica
atatcattaaatgcaaaatagaataattcattaaatatgaaattaattgagtatattcataactcattgactgtgcagtcttaggcaagacaaggatacactaactatcaattcatatattaacgagaaaccatattgcctcgaaaagcataatcccgagggagctacggataatgcatagcgagacatctaccttgctacatataagaaagtattgacgatgcgaattggctattggaacacttattgtataattcacgttataataattaagtgtaacaacttggaaacatggaggacatgattgtccagtcagcaaggccttatggtcaaagagcagttcttaagtttgctcagtacactagtgctcatgccattgctggaaggcatatgaataagccaagtcattcatctatgtacaaagcgaaatacctctagcgagatgctcctatcccacgtcagtgtccactaccttaaagataggaataacaaacggttatacgaatttttaactatacacgtgttaaaatgggacgtggtca

SEQ ID NO: 340206 - DNA, 517 bp, Cannabis indica
ttattcagattcagattttggtggttatgtagatgatttaaagtcaacttttggcttgttggtgctgctatttcttgaaaaagtgttaaatagactttaatcacatcatctactatatatgttgaatttgtcgtatgttatggggcatctttgcaagctttatggttaaagaatttgattttagagatacgactagttgattctatttcctctcctatactaatctattgtgataataatattgttgttttcttttcaaagaataatgagattagtagtgcttccaaatataaggaaataaagtatctcactattagagacttggtcaagaaaggagacattgtgatagaatattgaaagaccaagttgatgtttgcagatcctctaaccaaaggattaagtgccatattgtttgataacatgttgttgatatgagcattttataatcttttgttcctttgggttagtgggagtttcttattttatcttttgagattacatttatatgtaatttact

SEQ ID NO: 340207 - DNA, 442 bp, Cannabis indica
ctctttcaccttctaatgagactgattttgtatttaagaacaaatggatggtctggatgacttaaattagttatgtactagttagaaatgagaaatgatggatgctaggtaatattttggtattttaatgacttattaaatctatctatttggtgattacatgactgtagggatattattgttcttttatactgatgagtggtcctgattttgttactaatattttcttattaatataggagttaatctattacttttaaatcagtatttactaatataaataaaaggatcatttataaattttatcttcctacgagggtcaaagtgtgacctttgaccacccaaattatggatattacatatgtgccacagggtcgtgacagtgttagagtagatccattacgtagcttctttgacaaggagcatattgttgggttttatg

SEQ ID NO: 340208 - DNA, 504 bp, Cannabis indica
agtgtatcatgtcatgtcacaagaagtcctttatttaaaaataatattttagtgttgtatgaattgaaaaagtacaacaaatgaacagtgtacgtccaattatacactggaatacactgggtccttatcaacatttatgtaggagtgctacactgaacatcctgttacaatctcttactcattcttcacgccgaaaaatacatgtccgaatattttttttttaaattttattttttcacaggggtgttcgttatgcgtacaacatcatccctgtcaatttttaaaaaattttgaatagtttacaatgcccacaatacgtttattttcagcaatccgcgctgagcgaccaacacttagcgaattcagctttcgcatcatgagtcatcagcaaaatccctataactcaaggatcagtttacgtggatatggcatacacacgatcccgctatcagtgtattcagcctcaatcccatgatccttgcattcagcattgatcccacgatc

SEQ ID NO: 340209 - DNA, 425 bp, Cannabis indica
atatgataactgtattgaccgcttaagatcaatattttggattattaaatgattagggttaattgcaatattgagttattaattatgatttacatgtttatggagatttatttaaattcaaaatgaattaattatgctatatatgtgaatttcgcattttctgtgcttgtgttcggtaacggtggaaagcgacgtgggccattagagagtcacgttttgtatgatttagaatgtcaatagcgggatactattgttaggcattggagatatgggagatttgtcgagagtggtaaatgactaaactacccttactgcaattaaagagttttcaattagaaataggaggtccaattcaaggtataatgcttagccttcttctttatggttttctttagctcaagataggttaattgcatgattttagt

SEQ ID NO: 340210 - DNA, 536 bp, Cannabis indica
ccctatctctaagcactaaggggaactctaatggaaatagtttttgagaattatcaagcctttttagggtttctaacaaatttgttaataggaatttgttcatccatatgagcacactagactcctttatatagtattttagatatcaccatttaaaattctaattcataagtcatagcctccatggatgttgtggactcaataaagagatgtaactcatgcacaccataactcctatagagatgtaactcatgcacacaccataactcatatagtattaagaatttcaaattaaaatgtgtaacacattttacactcttaatgttggtgataatggtgaaggttactcatagtaacaagtaacttccccaaaatgttacaaaaagatgacaaataatatactttgtcatatgttacatattattagtttattacacatatttaacctatatatattatattattgtaaataatataacaacacaatataataaaaaataaataacctgaaagaaagatggcaaaacaatccatat

SEQ ID NO: 340211 - DNA, 793 bp, Cannabis indica
ggagtaccaaccgagtgaagatgttcttttgaaggaagcggagaactgttttaccatcattctgtggtgttgctgcagcttcaacccatttcgacacatagtccacagccaataagatgtacagattgctaaaagatgaaggaaaaggacccatgaagtctattccccacacatcaaacaattccacttccaagattcccgttaaaggcatttcgtttctccttgagatattacctgtacgctgacaacgatcacatgccttcacaaaagtactagcatctttaaaaagtgttggccaaaagaatccactctgcaacaccttagcagcagttcttgtcccactgaaatgtcccccacatggtaaagcatggcaatgatttagaatagagtacatctcctcttcaggcacacatcttctaattatctgatcagcgcagtgcttgtagaggattggctcttcccaataataatgtttcacctcagaaaagaacttcttcaattgttgacgagaaagctcaggaggagttatttttgcagccaagaagttgacataatcagcataccacggtaccatcaggttttccctcacactaaagagttgttcatcaggaaattgctcatttatctgtacctctttcgtattctggctctcttccaactctagtcttgacagatgatctgctaccagattttcagtgccctttttgtcctttatctctaagtcaaactcctggagtagaagtacccaccgaatcaatcttggctttgcatccttcttggtcataaggtattt

SEQ ID NO: 340212 - DNA, 579 bp, Cannabis indica
aatggaagggaagcggaatctattcgtcggattcttcagtgttatgagagggcttctggtcaacaagtcaattttgataaatctgctatcacattcagtccgaatgttctacctgcggatcgtacaagtgtattgggtattttaggcttgggatcagttgctactcacgataagtatttgggtttaccgacggttattggaaggaataagaagcggacttttgctagtatttgtgacaaagttcaaaagcgagtgagagggtggaagcgaagtttcttttctgctgggggaagggagattctgattaaggctattctacaagcggtcccgaattatttgatgagtatgttccagttgcctgtggcgacatgtgataagcttcgttcgattgtccttcagttttggtggggtactaagagtgataagagaaagattgcatgggtgaagtgggagagtgtgtgtcaaccgaagtctaagggggggttaggcttcaaggattttgtgctttttaatcaggctatggttgctaagcaagtgtggagattgttacactcgcctaattctttgcctggtcgggtt

SEQ ID NO: 340213 - DNA, 857 bp, Cannabis indica
caatgcaaattgaatgtttattttaggaaaccttttcatatgggcttaggtcggtttacaccgtgtattagaaaaagagtagggatgatttagaccgtattggctgctaggattaggttaactctttctcctttgatcatatattgtaaatctttttttagtttaaaaaaaagtctttattatgtaggaaataaggtgttcacctattctaccatatttaatgtctttgtaattgttttgagtcatcaaacaagtctacaagaaggaagaatgaagtgcatacaaggtttttcaaatgttgctttgggactcttcaagcatatcggagttccagttcttggagtttcagcaatgtttattttcaaggtggaatacatcaagcttgcaacatataattagagggagtctattttcatgatcttactaatgaatcttatctctctatggtgctccatgaactactagcaatatgtgaagattactgataccacgtataaaaactttatattttttaatttactacacttaagtaattctttactagtttgatggtttgtagttacaaaatcttgatctgtaactatagaatatctgttagagtatatcaattttattattattacggaaattcacatagcaactcattaagagcaacttaaattgtaatccaaatccacatgatataactatcgaagtaacataaaccgtaataataataaaaaaaattagaaaatactataggagatgattcccataaaaatattagtattaaaaaaaagaggaaattacactctataccctttttatattgtctacttttatttttaccctcttttttaaagtctattatttttacc

SEQ ID NO: 340214 - DNA, 780 bp, Cannabis indica
tctccaaaaggtggattaggtctatgccgatcagaattgacgatagggagttaagtgctgacctaatagaaatgagcttagtagattttgatatcatactgggaatgaatttcctatccaaatattcagccagtattgactgtaagaggaagatggtaatcttccaaccagaaggtgaacaaccgtttgtttttgtcggttcggttcagggatctcggatcccggtaattttggccttatcagctgaagaattgttgtgtgatggatgtctagggttttaggccgtagtagtagacaccactcggcctaaccctattcaacctgaagacattcatgtggtacaggaatttttagatgtttttcctgaagaacttccgggtttaccaccttagcgggaaattgattttgttattgaattagcacctggagtggaaccggtttctaaagccccatatagaatggctccagctgagcttaaagaattaaaaattcaactccaggggttacttgacatagggtttatttggcctagtgtgtcaccctggggagctccggtattgtttttcaagaagaaagatgggtctctgaggatgtgcatcgactatcgggagttgaataagttaacggtcaagaataaatattgtttacctaggatcgatgatctttttgatcaacttcagggaaagacggtcttttcaaagattgatctctgatcggggtatcattagttgagaatccgagaggaggacattccaaagacgactttctgtactaggtatg

SEQ ID NO: 340215 - DNA, 508 bp, Cannabis indica
aaaaaaaaaaaaacaagcataaggttatcggttttaccactaagcttttaacttagtttctaacatcttttagaatgtttattttttcacctaaacattatattaattttaaaattaaataaagtgctttaaaagtaaaatagtgttacatattgtttagatttttttttttgggaacaaattgtttaatttttgaaatatatgatcatacttataatcttaaagaatgttaaataaggaatcttaacatcaatgctcaacgggtctgggtggtgtagttggttatcacgctagtctcacacactagaggtccccggttcgaacccgggcttagacatttctttactgttttggcaaaacccatgtgaactcgaaattatgggtcggcatccgatccaatccgacctcaaaatctaattacacacttaaattttactattagcttaaaaatataaagaaaaatacgtaaaaaaaatttttactgttttggcaaaacccatgtgaactc

SEQ ID NO: 340216 - DNA, 617 bp, Cannabis indica
taaaaacaatttatcttctattcttttttctttgtttttgcttttcagcaagagcggcaagaaatctggtggccttttttttgtgttgctgaaacattaaggttgatccttaggggtctaattttataggcttttgacaaaataagagagagagaggagtgatatatttaagattatttactgaaaactgtcacaaattagttgtttatacattgttctcatgtattaaaatggttgcttaacaaaattgaaaaattgatacattagtttcagttatgaaacctctgcaaattttggtacagagcaatagtcattaagataacaacaagcattatgttgattacgaatcaagtggagaactagtatcaagagattgtacttttgttgaactagtaccaataataatggagaaactacaatgcaacagtagtgaaacaactcaaaaacaactgaaggaaggctgtcaaccaccccaactcaaggatgacaaaagtttgatgttttacataaagctattaaccaaggaaatcaattttacgcaatatctattatgtgtgtacgcattcagcaacacagaatcacaattttttttggcagctacccaaataaaagtgtgc

SEQ ID NO: 340217 - DNA, 617 bp, Cannabis indica
tgcgacctggattatgtattttgcttattttgcaaaaaaattagaaacgggatcccggtacttgtaattgattatgtaaagttataaagtttaatattcaatataaaagttttaatttgatacgatttttcgagaaagttctttgattagcaaagatagcactgtaattaacaagtcactgtagcatgccttagcattagagcgttagaccttcagattatagtgttatcctagatatacttaataagaagttgggtaactagaaacttctttttttgttggtagagcttaaataattcattctatcctcttaggtgttcaaaactattggatgaccctcatcattttgcctcaaaaaattacaaaagcattagacaaatgctgcagggactttctctgaggtgttattggaaatagaagcaaactccagctcacatcatgggagaaggtgtgccttcctaaaagcgtaggtggaatttggttttgaaaagggaagaaatggaatctagctttgatggcaaagtacctttagtcaatttctagcaagcaagataacctttgggataaatggatcaataccttacttgaatgaccaagacttatgggaaattcctatt

SEQ ID NO: 340218 - DNA, 1007 bp, Cannabis indica
taaccttaagagagctatatcagatcccacctatagtgatctgaaaagtgttatctctcagtatcaatataactaaaagaggagtaggtcattacccgctaactaaagggatcaaacctctataaaaatccttgtgttcttttactttctagttctaattgtgtaacacgtgggaagcatcagtgttaatacgactccgctatcggttggccaaatctgaggtcaacagtttagtgctttcattgagagcgagttgatatcatacctagtcaaacaccatggttaacacaaggagaactccagttgcaccatctacatcatcgggtcttcctcaagaccctttgactacagatcctgatgtctatgttccaaccacgattggaattcccatgaacactatagatgtggcaattctgccacctcggtaggcacctcgaatttggccactacaaccagccacagtgacacaaacatctcagtggatccaaacaatcaaccattgcctccgagggaggactctccacttgcgtctcccactgaaggaaggacccttggggaacatcccctaagaacaacaactagaccttgtccccgatactatgctggagagacatgaccaggaattggtgagcctactattagcgagccccatgtggacttgggagaagatctcgagttagccagacaacgctggactctgatcgtgatcgaataaaaggttgctagaatgtttatcattttagatgagttgacaactctattcaatggatggtaactttgactctcgcctaaacgggacactgatatcagtttgttgaaaaccttgaaattatttaagattgtatgttttagtattttagcttgtcattcctatttgctaaatgcttaatgatttctgaattgtgtgtgaatttacattgaaccttgttattttctgttattagttgtagtttaaattttgaatcttcattgttggtctaacttggcttgttgttttaatgggacaa

SEQ ID NO: 340219 - DNA, 586 bp, Cannabis indica
catacatcaacaagtaaacaacccaaagaaaatcccttgtgaagtttttttgtgttatttttgcgtcatcttatttcacattgaaaataaaatcaagttattttcatattgttgtaaagtttgttatggatattttatacattacagtggttgttcaacaattaaagcaaaatagagttttacatgttaaaattaaaatttattttatcaaaataaataatagaatatacatcatgttgatttttaaataagtgggggcattgatagaaagagattgtaagtatgaaaaaaaaatcaacacacacacaatgttgatttttaaacaagtgtgggcattgatagaaagagattgtaaatatgaagaaaaatcaacacacattaaaattaaaatttattttatcaaaataaataatagaatatatatcatgttgatttttaaacaagcgggggcattgatagaaatagattgtaagtatgaagaaaaatgatcacacacacacaatgttgatttttaaacaagtgtggccattgatagaaagagattgtaaatatgaagaaaaatcaacaaacaaacacacacacacac

SEQ ID NO: 340220 - DNA, 1402 bp, Cannabis indica
cttttgatttagagacctagagaggaagacttatggcgcgtttactaaactgtaattagaatcaaaataattaatgggagaaatgaatcggtttaaaatagaaaataatcggaaacaatattttattacgttgtttactaaactctctagaaataaaactagaatcatattattttatttacataactaggaaatgtaatcgaaatactttaatttgacaaaaatgtcattattagaacatttaattattttctgtttatagatttttaaaagacatatttgtctttttcatttttaattaataaaattaaaataaaaataaattaagaggaaagggaaaggtattccctataaaaataaatttgttttctccataatttgtgtgggtcctactattttctttttttccaaaatttagtaaacaattgtacgagaatcaataccataccattgattcctattccctttaagtaaacatgtcattaatgaatagtattgtactatcaaattgtggtaattgttatgaatctatcagctacgcatacctaattattatctattgttattgtgttctatattatatacaaattgatcttgcgtttatcatttatttttctaacatgtggtattagattgacaattgtatatgaattaggacctataattttataacaattaatatgtatatgttaattttctccaattacatattaatttcgttattattttctgttaaatttttttcgttgtttaatcttaaaactttaggggttttattccttattaaaatctatttctgttgatatattacatgcttaaaattattaagtaaattaagagaattttaaaattaaactttaagagtttatatatttttcctttatgaaattaatttcgtgtttttcaattctattgattataatccgaaattgattgtgcatatctcattaataattgtttagaatatttctacacgtttaatttccgaattggatgagataattgggttactttgcttttttagttttcggatgagtttcaaattagatctacctaagtttatgtgtttttacatgaaattaatgtcgtagatttattagaaattgtaccccgaccaaaacccctaagtttccactcatttctgtgcgtttttttggctgaaaaacaaattagacccgccaaacttttggctgaaaaacaaatcagacccgccaaactaaaactgggttgcctgacctgtatggaaaaccggctgaaggttgaagatgaactccagccgtgaagcccactctcgcagaaggcgcgtgggggcgcctgagacccctctagtcgtcatttttcgacgtttcttttttccagtgtgcttagaatttattttctgatttttctatgatttttaatt

SEQ ID NO: 340221 - DNA, 848 bp, Cannabis indica
gctgaatcaggatataacttggttcgatgctaggtgtgatctggtcattgttcactgagttttacttgtttgaattctctttctgtgcatccttttataatattttactttttatttttccactccccataattcttatgtctcgaaatagacgttttgctgttatattattcttcttttcttgcatataagatgctttcttttttgtttgttgtgttgttgataatatttatccattaattaatgtccacaacctttacaataaaacactaacagtcaaaagaaaatcattctagttgaaattacaaacgacaaacagagtacatacattctacgaccattaatccaaaaacgaggtgggatggatgtaagtaatcatatcccttcctaaactctagataattaattaataaccaaaacaggccattaccctcttagaaatgatataaaacacaccattaaccccaacaaaaacaaaatcaggaacaaactatcatcattgatgattccaattcacatttttttaaaaaaaaaaaatgcagtggagctttcttctccagtcgaggctcttaaaaagaacaagtactgtgttttgtagctgctctggcctgcatatagaaatcacacagtgatgaaaactaactcaagatatataatagattattgtatataaaaagtatcacttcaatatttgttaaatgtaacacatttacctctacattagagaaaaggtttctcatctattttcaatcctctagctttagtttttgtgctgtcagattgtttattgatgacagagtagagttactctagctgcttcttatgcgcccccctactcatggggtgag

SEQ ID NO: 340222 - DNA, 778 bp, Cannabis indica
agtaggagatttctaagatcgaggatttaaattattttgagatagaatgtcgggaatatagttatttgcaccattcaacttcataagagaatttgaatgacatcataagcatatgatttataaaccattcatccaatgatatactattcaagcaaattcaaaatgaaaaagctaagaggaataattaaaggataattttgaataaaataagaatccaacaatgtcccggtaggcgagagtcagagttattcttattttataaatttcttcattatttcatattgaaaacactaatctaagttgtcatctttggatgtacaactagatgttgcatttacaaatacttatctgtcgagatctaacactattatgcttgtctaatagatgacaatcctttgtgatttgtcgcgttcaaacaacaagttaagttagaccaacaatgaagattcaaaattatactacaacattaataacagaaaataacatagttcaatataaattcatacacattcagaaattattatacatttaccaagtaagaaagacatgtgaaaatacaaaacaagcacatcttaaataatttgtaaggtttccaacaaactgatataatgtctaggtaggcgagagccaaagtaatcattcattgaatagagtagtcaactcatctaaaatggacaccattctagcaaccttttattcgatcaaaataagaatccaacattttcctggtaggtgagagtcaaggttattcttatttaatgagcttctaccattgttt

SEQ ID NO: 340223 - DNA, 1343 bp, Cannabis indica
aggacccatatggagctaggtatagtctactccttttcatggacagcccaggacaaaccagtcccagtcttcatcctatggtttcacacccaaatcgggccagcagtctcaatatcaacatcagttcaggccacaaggttcagggttcaacatggggtactcacaaggtttccaaactcctgctcctaataggagtcaaagagggtacaatcaaggtggagggtctggtgcaagtacaagctatcctagtcagggaaggggaaaggcaaaagcaaagtcatccgctcaagcctacgctcttgggattgatgatgaacagggcggtgctgaccagggagatgttgatggtatggttcttatctcacactcttgggctcatgtgttttttgatactggtgcattgcattcctttatatctttgatgtttgctagtacgttgggtttgagttgggaaacttttagttttgcattgcatttgagtgtacctatgggggacacggtgaggtatcctccatatgtaggtcagttggtattgtgttcgagggacacaagttatctggaaacttattagtgttgcctatggggaaatttgatgtaattattggtatggattggttgtctaaataccaagctattgtggattgttcacgtaaaagagtgactcttttaacccctagtggtgatttcattgtttatcgagtcaacatgagtgcagtgagacaaaatcctatcttaagggcatgtttaggtggaaagagaaacttagagtgttatgggaatctgtctgcaatcgatgatgtgtctaggaatttagactagttccattggatattagtggttagtggttttccagatgtgtttccagaggatttaccagggttaccacctgatagggagatcgagttttgcattgatttgattcccagagctcaaccagtttctattgcgccttatcgcatggcacccgcagagttggctaaatttaaaaaacaattaggggagttattggataaggcttacatcagacatagtacttctcgatggggagctccagtcttgtttgccaagaaagctgacaggactttgcaactttgtgtcgactatagaaagctgaatcagatgacaattaaaaacaaatatcgtctaccgaggattgatgaattatttgatcaacttggtggttcaaagttcttttcaaagattgatttgaggtcagactaccatcaattgaggattagggaagaagatatccctaagattgcttttaggacacggtatggacactttgagtatttagtaatgccatttgggttaatgaatgtacctgctgcatttatcgatct

SEQ ID NO: 340224 - DNA, 1151 bp, Cannabis indica
ggtctacctcgtggtcttctcactccaggttcaggttgattttgagcattcgtcccctgtgctgctctgggcgaggccgcatcgcattctaactttgcgtttcgccgctgcgcctcttccagacagtgcctcaggcggcgagtttccgtttcataggttctttctcccacagattgggcacctccacaattgtgctcttcatccctcgtcccggggttctgaccattcccacgttgagttctcctcgagcgtgttgtccgtgtactaggaccaacatcggttcgagttcttcgagaacgcatggtctgcacactggggccaccctcaggttgagccctcttggaaagggtggtccttctggactgtgggttggtagatcttctagtgcccatgggctctttgccagaacgagatgattggttttctcatgtggggtgttaacattttttggatttttagccatgaaggagatggtttttcttcgaaagaagggaggttttttttctgagctttttcacagaggctctcagtgaaagcaccaaactgttaacgcagattttcgttaactaaaattgagcctcacgataatgatttcacacagaaaaaataaaagctataggaaaataatatatgaacacagggtttttaacgtggttttgtagttaaaattctgcatagtccacgagtcaatcatattcatatttctgatatttattttaggaactctcttgtatgagtttttttgtcccttttttactcttgtttgtcactatttataattacacagtggacaattaattacaaagttgaccagaatatgtttatagcaattatccctaaaattgtgagatttaattacatatctcgtagtgtaaatgcagtttatgatttgaaaatcgtatagctgtgattttctcgcttttactgggtcaaaataattgtgtattgaacacatcttaagctgttgtatctagagatgtctcggcagaaacttggttacattgatcccaaaagcgagctggggccattcttctttccaaggtcgacaatgtatgtctggtgtcgctcgcagttgttatttacaaagaaccattctgactcgctagggttgtaagcctcgttatcgttagcgggatgaagctataggaagt

SEQ ID NO: 340225 - DNA, 743 bp, Cannabis indica
tccatatgtttgaatacaaatgaacatacttcaaagtaaatatttgcatgtatttccttgcagaaaattatcttgtccaaactactataaacaagatgcaaatgccaaagatgtattattgtggttgtggtcttttgatgattcctaggtttagttataaaaaagagttcttagaatagttcaagtgaattctggcaacaaaatacgaaactcataattcatatatttaacatagagtttagatccattgatagaaaatggatattaacaacttgtgaatgttatattatagtgttcaatgtattctggaaactaaaatttaaaatttctacttggaatctaaaatttaaagttagggacataaatttgtaccaaatattcaatgagtaattattctagcttggaccaccactaaagtactaatttaactctaactttaagttgcctttagtaagcatatataaggaggagatttttctaagatcgaagatttatatcattacgggatataatatctggaatatagtcatatgcgccactcatttttatagaagactatagagtgacatcataaaaagatgatttataaaccttcttgcccaatgatatatttgttgggttttgtgccccaaataaaactcattacaatataatcagatttactaattaataaagatcaaaaatcattttatgctgcatggttcacatgatttatttcatgattatatttaatgtataaattc

SEQ ID NO: 340226 - DNA, 845 bp, Cannabis indica
gttgtcttattagacaataagatatatgtgtgtcggggtaggatatcgatgttgccttattaggcaatgagatatgtggatgtcgggtgtcttattaggaaacaatataaatagttgctttatgaaataacagatatggcttgttttattatacaagtacttgagtattacttgttaaattatgttattatcctgaattagatacctggttgttatatactttcattatttactttttatgttgagtctagtctttgtgactcacgggtacttgtggtgcaggtaagggcaaggagaaattaggatagtcatgagacgacaatcttttttgaaaaatgtacatatcgacttattcagcttgtgtgctcgagttgttaagagttgttttggaatgtacttaatgtatattttgacttactgttgtatataatccttttcttaaaaattttgtaacaagaaattctcgaaacaaatttttaataatgtcatcctgtccattggggattaagtaggaatgggagtagtaaatatggcattggggttggcattccttgttcattatccatccaatttccattcataatgccatactaatatttcagcattctttaaaaaaaaaaattaatgttttaatatttattttttctttattatttaaattttcaaaaatataatatcactattttacaaatttatttatttatttaaatatttttgttattatttaatttagtttttcataaatttagtctcaattttttaaatagtcaatatcgaggaatgaattaaatattttttgtactttagaaaccaattttttgtattttcacataataaatttaaga

SEQ ID NO: 340227 - DNA, 685 bp, Cannabis indica
agcaacgtcaagcaagctgcagttgtatgaaggcactacgacaactttgaagccagaaaactctcttttcgctctgaagtttacttaacaacgaagggtgataaaatgggttatgtgccagtactatgggtatttataggcaatgaggtaattgcatcaaaaggaacctcagatgcctcagcttcctgcctcaaaagcgaatatgggaaatcaaaagtaatcgagtgcaaccgtcagctgtggagagagaaaatcgaatttcgaaatattaattgtcagaacatcgagtctcgaacggtcatgctcgacacgtgtccccatccaaaggcagagccagcttggaagaagtctacacgcaacctcagaggtcccgtacaaacttggggggaaaatgttatcccaaattttgtactctgacgtggcatcacgagaatggtgacacttggagcatctgctcgtgaagaatagaccgagcaggatgcctcgctggcacatccaggatcagatatccagtaatccgtgcaaagcacccaatacatagcgaattctgctttcgcatcatgagtcatcagctcaatccctataactcagggatcaacttacgtggatacggcatacacacgatcccactatcagtgtactcaacctcaatcccacgatccttgcattcagcattgatcacacg

SEQ ID NO: 340228 - DNA, 1742 bp, Cannabis indica
atatagcaacgtttttatgaaagatgttaccattttttatttatctataattattaacaacacttatttagaagtgttactgtcgcttatttatatttaattttaaaattataagtttaacaatatgagagttatttagcaagtgtgtcaaattacaaatataatcaaataaacaacacttttttattaagtgttgttgaataagcgttgccaaatgtaaattttgtagtaacttgctcaatcctatgcacaaaacccagaaatttcacccacacacacaaatttaggtttagtaaatgaaaaacaagagtaaaggagagaaaacaccagatttgtttcaaagttcaccccaaaaaattaggactacgtcttcgtcaagctcgtctcagagattagcttaatatccactatcaataatatcagattacaagttggagcttcctgtcacagaaaaacgatcaggtaagctcgattctctctttgtacacttttgattttgttcttcactgatttgttctcgatctaactctctttcttgttgtttgtgcatgtactttccccttctacctcctcaccacgaaaacttggtttctcatctctggatcttggagcagaagtcttcaaaacaagggtgtatgtactgtgatgtatttgctttaatttgatgtttatatacttgtattgagtcggttgatcacagatctaggagttagttacaactgttattgtaactaactcctatttcttgatccagtagaagcgaagccacctaggattgagtcctttgttttatatctgttgtaagtgtgttgatgtggatatttgtgtgtaaagggacttggttataagtagactttacttcaacaaatcctaatagttaaattaataatttgactataaaattctcttagatatcaaaataaatagggaagcattagtgtaccctttttaagcatgcactatagaattttcttacaattagcagtcagaatattgtgtagttaatttttcggccctatgaaaatttcactccaaattttgaatggtcaacgacatttaaagattaactattttgaaaattgaattacgagttaaaagtgtaatgactgaaaagggataattttatggaaaataaaattgcctttaatgcaaaagttggaatcccaaacatcttgcagaaaagtaatgttgcgaaaacataaaggtttttatttattccttcttgaagcaaaacatatagaagttgttaaaagaaaacaaaagactgaaaaaagtgttgttgaaagacatgaaccacctcttaaccctacaaatcgtgtttgtcacattatgcataactcggactacccgacaccatccttaggtttttcacatacaaagcacagcaactgatgagttatagaaacccaataaattaatcgcaactgtatgtatataactcaacaaccaaaaccgtaatcatagtcataagtactgttaatgcaattatatgacaccaaatgtaacgtccccgcttcaagcctccattgggtccttacacccacggaatgaatggctcttatacacgagtacgccactctggctgcttcttggattgatggctggccctacagaccaacacgagtgtttccaacgtgctttgtcctcactcgcacgcttcttgggaaaacttcccaggaggtcacccatccttaaattactccaggccaagcatgcttaactgtggagttctttcgtgatgg

SEQ ID NO: 340229 - DNA, 782 bp, Cannabis indica
ttttgcgaattgaaatgcaaaatacccttaacgatcagaactaccagaatccgtgggatctaaacttggaccccctgtcggattggttcaatcgtttcctcgggcccaccctggctccctttgccgcggagatgaccggcgagtttgcgtctcagctcacccggtgtgcacccaagcggttcgctgcttgtgcatccttgaactccatctttcaagtccaggatctcagccactccctgactgtggtaagtatttcgtagtttacttttttcctcattattttctcttaaggacttttactcatacttgtatccttttccagctcgctgccgaggccggccgcctttccaagaacctaattaaccatggcttcgtcctgtccgactttgggggcatggacgaagtcatgaagatccttcaggatttgactgctgaaaggcggacgtaccaggaggatgctgagcgccgggaggcccttgccaaggccaagttcgaggaagaggccaggcggagggaggcacaagcggaggcgatgatccgggatgaggcccttcggagggataggctggaggccaagcaccaggaggagctgagggcggagggcgaggctactgccaaggccaaacgtgagcttcgggaggctagggaagccttggatgaaatggctgccaaggtgaagtccctagaggaagttcaccaggcagacttggagtctagggccaacttggccatggagctgaaggagctcaaggacttcaaagccaagccttgaagaaggctaa

SEQ ID NO: 340230 - DNA, 769 bp, Cannabis indica
atggaatgttaatgtgcagtttcctgaatatttcaagaaattttgaaaactgcttgtcgaggttgttcttgcggagtctttgagggtaaagaattttaatatggtgatctatgttgatcggaggcgaagcttctttcggtgcaagaccctcagaagttctcttttcctttggtgcccgtgtctgtgcctgttgatcccgaaccccatcttcaactagttgcttgccactaggtcccttaaaactctttccactccttaagaaaattgatgtacattgctcttttccttttgcctcaatagtgctaggtgaatttccttgagcttgttttgccacctgagtagccaattgtttcatctgagtttctagagttttaatagaggctttagtctccatcatgaattggagcaataagtcagcttggacacttaagccttcactagaactttgttgttacagttgttgttggttttgttggggctgatttctctgctggtagaacccctgttggttgtacccataattatagttttgagaatagttcccaatggctttcgcttgatccattggcaaaatgttcacatctactgggcattcctcatatgggtgagggcccccaaaaagctcacaaacaacttgagcctattttgcatgcacaactatcagttttgtcagggcctcaacctgggttgtcagtttgttgatggtatctacctcatgcttaccagccaccttcttcgtttggcttctttcagttggccattgttggtt

SEQ ID NO: 340231 - DNA, 559 bp, Cannabis indica
taaatatagggtctcggtctccaagttcttcactcattccgtgcaaacagaaaaattctatctaaagagagttcagagagcgaggaagcctgaattcccatactgacgctatcacagggattgaagctcaaacatcaatggctggaggtatttcggtccttttattgcatataagattttgatatgtctgtagttattccgctttacatatcgttcatatatactttattttcatattatttttagtctaacacgtgctacataatatataaattaaaagtgaaaaattaaatcattatagttgttgtctttatacgtgttcatcaaactgctcatactatataaattactcataccacaccatactgcatagaaaaaatatagtttgaaattttttatagtaaagttacaatttgtatttttgccaaactgtgtggtgtggtatagtttgcggttttgaatttaataatcgcagttcaaggtgtccttgagggtcttattcatagcttctacctacccatttgcttgaggatggtccatggcagagaagcttttgatg

SEQ ID NO: 340232 - DNA, 859 bp, Cannabis indica
aaaaatgcgagtgaagaagctcaagtgcgtgagacatgtaagccatgacaggtggaagaggtttcacaatggtagtcaaatctaaaaaacccgttgaagaaactgcaagcaagccacaaaaaatgtcacataaaaaattgattacccattatacccttgagtaatataatcaaatgggtacccaaaaaaaaatcaaaagaaatgaaatttatgagatggggtattcatttaaacactggataaacccaaattggacgaaaagatagaggaaaagaacctgaaaatttcgatgaaaactgtaacggagctctgggtcgatttcgacaagggaatcatcgaggtcttggtccatggaacgatgtgacttcttaccaggggacgtgcatggttgaagagccccctggcttggtggttaccttgagcttggcgtctttgaactcgtctttgggctcctcgctcaccctccatggagctgaagccattaactccttctttgccttcgtcatctttctatcccttcaggttgtggtgttgctctttttcatttttatctttaaaaaaaataaaaagaactaaagaaggttttttctttaaaaaaaaattagtaattttattctatgaacttacaaattacaataatattaattctgccctttaaaatataaaatttattaaaaatttcattgaacttttatatttataaaaatttaatttttctattaaatttcgtctcattattccgtttaaatattgatattttttttataaattaacaattgtacttttgaatttttgataatactgatttttccctttaaaatataaagcttgttaaaaatttctctgaatttttacattt

SEQ ID NO: 340233 - DNA, 605 bp, Cannabis indica
tgcgatgttttgtgtttgtatgaattgcttacttctaaattgtacatccaaattagttcttagagttggcaagttgaaattctggttattgatggcttgaagttgtgcaggtggtggtagcagttcaatcgtcggaaagtttggttatctattgtgttgtttgtttttagtttgagtcttagttttactcgggggcgagtaaagattcagtttgggggagtttgttaggctatttttagcctatattttggatctattttatgtgcgtttttcgctgtgttgggatagaattacgcttgttttctatgttttcaggttctttggaacaatagagatctcgggatgaaaaagtcgaataaaagacgagctgagccaagaaaaacacttttatggagagaagatgcatatttggccgcggctagatacagcttggccgcggctagatcacaggctacagtcgccgcgacggaagacaccatcgccgcggccatttaagagttacagaaccatgcttattttgcaattatttggccgcggcgagatcatacttggccgcggcgagattccgtacggcccaggggtatttttgtccatcgaaccctaaa

SEQ ID NO: 340234 - DNA, 561 bp, Cannabis indica
ttttttaattaaaattattattcggaccaataaaaaattgacacgtcgcattttatttcagtttaacggatcagttaaaaaggggaccaacggactaacaaaaaatctcaccttgaggactattaccgccaatttttgaggttggggactaatcggcatcaacctcaagtttttggggacttttgccgcaattatcccattaattcttatattacttttaaacattaattaagtaatttatcttttcgttaaaataaaaaagtaaaaataaaaataagaattgatttgccactttcttttaatataatattatattatatttatagatattgcacaatagaaaaggtaaattaaaaaatcaaaataaatttgataacatatatatatatatatacaccagggagctatagcatattgtatatatgtatatatttcatagaaagatgaggaagccatggcccctgtacaacagaacatccctcccctcctgcccttaactatgtctaatccaattatattactcagtgcatagaaaaacaaatgaagaagataaatcgtatt

SEQ ID NO: 340235 - DNA, 1010 bp, Cannabis indica
aaagtcgatgtcaggtgatgatggacttctgactttctgggcgggcagtcactctgcactttacttctttttaagcttcttgactttcatactttgtattttttgctggtttttgctaacaacgatgtttttgctcttgtgcagacatgtctcggcagatgatggacgccttaaggaagaggatgagcggaagctctagcgcctccccttcggccaagaagtctaagggcggagagggatcttcagagaagaggccttttggagaggtcattgacctttctcaggagttgggtgcatcaaatccttccactaccaagtcttccaagtctaaggagtctgggccaccaacatctgggtccgaactggtcaggaggattcctgaacgggtgcaggcaccaactccacccatgcccgtgctgcctgaggtaaagaagggcagggaggcgatggctcatcacatgaaccagctggttcctgaggtcggtgagcaacaagctggtgctaacgactcatctctggatgtgttggtgggtggagtcttgcaggagcttaccagggttagtcttttcttttcgacacttcccttttcgcttttcatacttagcttcatatgctgaccttttcctttgcaggccggtttgaagttggcttatacctacgcccgggctaaatctgctacttccaagagtacagctctgtccgacacgttgagggcggaggcggacttggccaagaaggaagctgaggaggccagtgcggagactgcagctattcgccatgagttgggtgaggccaacaagaagctatttgccgctgagaagaagatcaccgtgctgaccaaggatctcgaggctactgatctctttgaggacaccatcgagaccttatctactgaggttgatcgtctttaggctgagaggacttctctgcggcaggtccttcttcggctgaaggaagataaggacgctcaaacggccgacgcggtccgcttgaaggagaaagtcgatgct

SEQ ID NO: 340236 - DNA, 1173 bp, Cannabis indica
ggaaacgattttgttaggggtttcaattttgttggttttctgggttttcactgcttgtaaaaccggttactcggattttgcaccagggggttaaaaccggtttttcagcctgtcgtttcgtgtcagttacaggtttctaggtagttgattccctgctagtttgggatattattatattaagttgcagtagatagggttttggttttaaacctcagtcccggttgtgatttagccagtcatttatgtgtattgttatcgatgtgatttaggagcctataattcgccgagcagtggttccactcaggttgaccggcacacctgaatttagaattgaggtaagattagtataatatcatgcatatgttattacatgtttagcgtacatgtgttattcgttgtttgattacattgatagcagtcatagtgtacgtagagttgcactgattactgataaatgtatattgactgaaatactgatcgatgttgtcacatcattatggctagagtatgactagcatattgagtataggcttatattatggtcgatagtattgtcttatgaacattctagactcaatactgtgtcgactcacaatgctatttccatgtgtaggtaagggcaaggctaaagccgaggaatcgtgaggacgagcagatgaaggttgtacatgtcagggcggttaggcctggagcgtacgatctttgggacatcgaggcttttgatgtatagtcattgggcgacaaacttttgattatatgtatagcaaacttttgtaaagtatttttgtaaacgggatcccggaatattatatatgtaatactttaagtttttaattaaataagaaaattttaattaatcacgattttcgataacctcattgattagcaacgagcagcacagtatgtttaaaatcacaataacacacctacactagttagggtgttacaatttggtatcacagcagccaggttgtcttctgaagatcgtcacgacatgtacaatcatcatcaacagtcagttcatttcacggttcagtaagcttttattgttgggttttatgccctaaataaaactcatttcaatataataagatttacttattaatatagatcagaaataacatttaacgttgcatggttcacgtgatttatttcatgattatgtgtacataa

SEQ ID NO: 340237 - DNA, 488 bp, Cannabis indica
tacatgtatcgggatcccaaaaatattttacaaagtattattacaagtctgtttccactagccgacctaagcggcaaaatagagtcataaaattcatcactggtagaccccaacccacttggtctagtgtggcccgatcatgtacatacatcgtccaactctcatactcatggctgattagtaaaagatttacccttccctgcatagtagagcacacccgtgagccaagcccaacaagacaatataatatatcgataaacatatttaacatactatataaacattcatgccattctcgaatgcctgtatgacacaaacctacatgttacagtcacatgcctaattatgtttatataacatagacctacgtgttgcgctcacatgtctaaatacaataaggccttagaacggttcatctcggttctagttaccaagtccaacctggttatgccttgaacacataaccctaaatctcaatatattcatat

SEQ ID NO: 340238 - DNA, 816 bp, Cannabis indica
ataccaagttgtaacgccctatttcattgggaggccacgtgtgtaattttataaactagtttaatactaatagatgaattaaatattaaaaattgtgataatattaaaaatttgactaaaataaaacactaaaaacatacattataacgacataaaaagtgtgttctgaggatccctattataaaagttttacaaaagaactatatatgacgatgcctcaaaatatataaaccaaaatacacaatagatacagtccaaaacaactctcggcaacccagtacgcaagccgacgaggtcaatatgtatattgcaggagaagattgtcacctcatggttaatctagcttttctttaccttatcctgcaccacaaagcacccgtgagtcataaggactcaacaagaaaagtaataataatcatatagtttattattcaaatactgtcatttatacataatcagattcaaaccatcacgcattgttcataagatgaaatccgaatcactattggcatctgccacgaataaacatcagcataaaatatttggtaatacaaatcattataccaataatagaattaatattcatttaataatataaattatatatatgtatgtgttacctcataaagtattacataatgttgcctaattaggcaagtcgatgctttaatctgataatcatgtattgtattgactaatcagacaagcccgtgccatagcttgacacccatatatcgcataactacgtcacttaattaggtgagcccgtgctaaaaacttagcacccatatatcacataattgcatcacctaatca

SEQ ID NO: 340239 - DNA, 1153 bp, Cannabis indica
gtactccatgtttctcacaaagatcggttataattccggcaagcccaagtccaccaccacaagacccctcaaccattatatcaaatgtcactcgaattatgtcccccacattcaaattgtaacctttcataattccataaacccacttaatcctgtcaatctgagcatcagaaaaatgtttgttcgggagcatccttgcactaacgaagtatagccatgccttggctaccgggttgagttcacaccgatacaattgatacggttctccatcaatttcatggaacctaaggccaggataccctagagtttcggctatatccacataattcaaactccttgcccgaaattgctgcttcaagggttgctgttctacagtgaaggttggtagctcataaagagcatgaattgcagctgttaaagcaggcactttaaccccctagctctcactttgtcatcctctctttctggccagttggctaagaattctaaagctaaggtttggttgctacgcccagtgacatccacgaacttagtccactgcctatttaagatttgatctctaatggatgcaaatacaacaggaatgtttgcagtttggctcaagttaacaatgtctatccctctatcttcaatgaatgccctatctttcaatttcaaaaactgctcttgagcatttaattagtaaacctcactctatcaagattagagcgacccctcggtgggttggatgatgaagctcccccttgttcactcactcttgatcttttaagacccatctcactcaaattttctaacactcaagatttttaaaaatttcggcagcacttcccgggaattaacccactcacaaacaaaccaaatcctaatcacaacaactatattgaacaatgtattgagcaaaaatcccaaaaatccaacaaaaattccaaaattctccaacaatcctcaaatttttcaataaaaattgtatagagagtcttagaattattacctcaatgagaatccacctttagtcaacctccattgtaggaaaacttgaagctcttgagaaggaagaagatgaatagtggtttttgaaatttgggtgaggttctagggatttggggttgattttgagagggaatgagtgattgatgagaggaataatggttta

SEQ ID NO: 340240 - DNA, 624 bp, Cannabis indica
taacttccaacagtacgacaggcgtgcttggacctaactaggaaggaccatatcaggttgtcgaagttctagaatcaggggcatacaaattgggtaagtatgatgaaaaaatttaactcgttctcgtaccaaggtattagaatggggaacatttaagaaaatactaccaatataagtaccaggtcggatgaccatattaagtacgaaacaaaagaacatttactcttaagtgaatggccttctgggcggaccacgcccaaaggttcagataaaattttcaagtactcaggtcggatgaccactattgaatttcagcaatttgttttatttcatgttaagctaagatcagagtagatcaatataatagctttgatgtaagttactacggtaacatacatattttcgatcaataaatgaataaagatgtttattccaaaattcaaattgagtggaatctattagcatgttattaatttaccatcaagtgcatacaaaaggtttggtcgagcctaaaaccccaggtagacaagaacgtatacttgtaaaaaaaagtaatagaaagtgaccaagagtcataagtctgctcggtcacttggggggcacctatacctgtacaaagcattt

SEQ ID NO: 340241 - DNA, 711 bp, Cannabis indica
ttgctaatccatttcttaactttatggtattacactagtgatctggtgcctatagatttcaccaagaaacagaaatatgtgagatgactgaatgccgcaatcagacgggacttgaagattaccactacccatgaaactttgtataagaaagtggtagagcaagccttaattgctgaggaggctgagctacatgtaacaaaggagcagactgcaaaggatgctgccacgacatcgaatcctcctactagtggtaatgtcagtaagggaaccgacggtggtaacccttatcacaaatggaaggctgatgcttccggaacatcagggagtaacaaaaagtttcgagggaacagaggtggcaatcagggccgcaaatcttcattctaatcttatccttagtgtccaaaatgcaagaaacaccatcagggtgaatgtcgggccaagacttgtttctagtgtagcatggtgggccacttcattcgagattatcctcaagtcaagaaacaggagcctaagaagaatactactcagaacccgagatgactttttatcatgactcaggctgacgcagatgctagtctgtcagtggtgataggtcaattatctataaattgttgttcctatactgcattgtttgactcgggagctacccattcctacgtgtcgaatagagtaattgaaagttttcataaaccatgtgatatttatgcttcg

SEQ ID NO: 340242 - DNA, 595 bp, Cannabis indica
ggcaattcctgcaccagatagctgatttgtagctgacccgtccacgtgtagtttccaagttggcttgtcttcactgttacttggctgaggtgtttctaccggctcggggtagctttctgataggctttcttctttccatgtgcgaacgacaaagtctgctaaggcctggcctttgattttagttcggggttggaaggtaattttgtattgacctagctccactgcccacttgagtacccgtccacaggcgtccaacttttgccatatttggcgtaatggttggtcagtgtacacccgaacagggtgagctttaaaatagggccttaacttcctttttgctcgaataaggcaataagcgagattctctatcaatggatatcggcctttggcctcaatgagtcttttactgatgtaatagactggctgttgtatgttgttctcttctctgatcggcatggcacttacatcgtgttccgtgacaacttaatatattccaagttcttctccgtccagaggtttagagagtacgggaggctttgcgagttgcatttttagctcctgaaaagcttttttcacattcctctgtccacttgaa

SEQ ID NO: 340243 - DNA, 601 bp, Cannabis indica
gaagaataagtggttgaaataaagtggcaaaattataactagagaatggtccattatcgtgtacggccatgaagtgatttttgcctatattttattattttttaatccatataattcagtcctaagctctagttgaaacactaaaaagggaacaagatgctctcatctcatcctcttgtcaacttgactattcaaccaacctagatgagagagttccttccctagtgatttcagacctccttcattgttctcaaccatttgaaacccatagtgaaacagtgccatgcccacacatagaaagttaagtatgttggaattattttacttggatctagatttactaacaagtatgttattaacatcctaaatatgaacttctaaaacgatatgaaataaacacatataaagtattaggatccttacagtggttgcagcggaatataatgtctcatttcacttagatctctaactcttgtatcctttttgtagcagagtatcaccaagatcttagtccgaatctccttctcttgaaactggattcttcacagccttacacactatgattgagtaccacttgatgagtgtgggcactcactctttc

SEQ ID NO: 340244 - DNA, 321 bp, Cannabis indica
ccgctgcacccaatgtaaggttttctttaactttatatgtgtttatttcatcgttttagaaagttcatagtttagggtgttaataaacatacttgtgagtagatctaagatcctggtaaaataatttccaacacttagatagtaaattttgctaccaagtaggctaccgtcgacatgtgtcggctccacaacaataccctatatatgtacaatcaattagggtcatcccaacaacaacatgtgtatgatcaatttgggtcattactgcagcaacaacctgttagaatttattttaccaggatcttagatctactcacaagt

SEQ ID NO: 340245 - DNA, 575 bp, Cannabis indica
atatgattaaatatagtatagagttttatttttgacaatattcattatatttgaatataacatttggacaatattcattattcacaatgaattgttacaactactttctttttatatttttttttaatttacaatcaataaatgtcattactgtttttgaaatttaatagaaacaatagaaacgaaattgataataataatataggataagaacgaaatatgagagagatgcatgatgaagatatattcttcttaaaagaaacaaatgaagaagcgatgaatattaacattaaaatttcatatttatctttattcaaaaaaaaataataataaaaaaacgatattaaagtgatattaaagtgatgaatattaacattacttgggagaataagcagagagaaaaatctggagaagaagagaagtggtgtaacggccaacaaaaaaaaattagagggtatatgattctgttatatatattggaatgaaaaaatagagagaagagatgagatataaatgggttttggattgatgacatatattattattctcagcaagctctgatataaattagaata

SEQ ID NO: 340246 - DNA, 873 bp, Cannabis indica
acttcatcgctgattatcacatcagtgtaaatccagtgcactgatgaatcagggactttgtcttttgaagcatataatcacaatcacattccactgtgttgacatcactgtaattgtaaatgactatatgttctggacttaacagattttgtatatattaaaccacaaacatgaaaactacatgtaaacataaatgacttctaatctttcattgataacaaatcagattagattgaaatgggttttatttagggcataaaatcccaacaaactcccacttgcactaacataaaacaagtagtgcatttcaatcaatctattgtcttgatcttgagatcaagtgtagtatatttgactcaacccaaatttctggaactatgttcataaaacattatgcaacattatttgctatatgcattactcattaagggatactgaattccttactgcttataaagtgcatctgaataaacagaagacgtatctctaattctatccaaaatggaatagagataacacagtgtagaattttcttcagttgaataactttctggtaatttcgaatttacaaagttatatatcttcactgatggagcttgaattattatagatggatttttacactcttctagaataactcctccacccccagagtaaccaccatctcggattctttatgagttggtgtagatataaggacttctaatatacatccctattatctaacatataggtcactttcagaaatctttcttgactgtctccttatgttccttgtttgattacatcttagatagctcccactcaacagtaggagtctggttaaattcatacataaaagtacatttaacctcttactattgttttgaggga

SEQ ID NO: 340247 - DNA, 772 bp, Cannabis indica
gagtatcaccaagatctgagccgaatgtccttctcttgaatctggagtcttcacagccttacacactatgattgagataccacttgaagtgtgtgggccctcactcactcactataggctcgatttagaagagaggaagagagagacaaagtggtttcggctagggtaggaagtggaggctcaaatttatctgaaggaatgagatgcatcatctttttcttgaagccatcactacctatttatagtaaaccacctagggttaggttagaattattagacattaaaataatgaaaaagtaaatggtaaatatgcatataagtggccggccatgatatggattgggcgccactttgtaattttgccattttgtcctttctccatctcattttctcagaaacgccaattttccaatttaaccacttaaatgccaattctaattgtttaataactaaaaattaattattaaataatattctcatttaatatatttattaattagactaatcaaagtctcttaattaacaaataaatcctagaaactctttcttcacaattaagcccttgcttagtgaaaattcataaacgagacatagtctaattttagaattataattgattaatcaaaattaattaactgagtcttacaagtagtattgtctcaactagtgtggggaccatgggcctatatatctgagattccaataagcagctccagaatttaccaagtaaattcactgactggttaattccttattgcatccaccatagaac

SEQ ID NO: 340248 - DNA, 499 bp, Cannabis indica
attatctaattagggttttgcgaatccatttcttatttctagggtattacaccaattataagaactctgatggcacagtttgtcgtaatcgatattccctcagctttcaatgccatgataggcttaccagccctatacaacctgaaagtgtaacatccatctactacctttgcctaaatttaccaacaaggcataagatagatgttgagaggagatcaacaatatgcctatcactgttacaacttgatccaaagccaacgtaaagaagatgcctccaccagattaggagcatacaacctttatgacaaacttaggcctgtactattgcaaagtcacgcctttcagggctgaagaatgcaagggccatatattagaggcctgtgaacaaaatgttcaatgatcctatcgaccgcaacatggagttgtgtgtagatgacatgcttgtcaaggccaaaaaggtgttggaatttattttaccaggaccttagatctactcaca

SEQ ID NO: 340249 - DNA, 802 bp, Cannabis indica
aagataaatcatattttttcaatgcattttttttagaaacttcaattttttctatgatataactttgtaaaaaattcacatttaaaaaataaacttttttcaataatatatagcttattatttttttttaagaccgcgcaacacgcggcttttgttttctagtatagaataaaaggaaataatcaaacaaccaaccatagcgacaacaaccatataaccaacaatcgcaccataagtcatagggtcaataaaaatttgagaatctcctagatctgaacatggataaggatagtcagagcatctctaatgaagtactataaaaataatgtatatgtacattatgttatagaaaccggttctattttaatttaagaattattacatagaaaatataaattaatactttatttacaaaaatactttcataagctgtggacaacatttataccttttatgtgattttaaaaagactacttacactatcacttacacaatcagacgatggttgcagggtggttgctgcgtggttgcgcggtggttgcatcagacgatggttgtatggtggttgctgggtagttggccgaagattgcatcagacgaaagtttcaatcaaacgaaagtttctaggtggttgctggatggttagccgaaggttgcatcagacgaagattttaatcagacgaaataactgttagcaaaatgtttatgcaactgtaatgcaactataatgcaactgttgtgaaacattaaaaaatcagaacaatatttccacgtacgtaactctatctacatgtctctttat

SEQ ID NO: 340250 - DNA, 579 bp, Cannabis indica
atctaattttaaccaatggttcaattgtcaataggtcaaataaataatttgtaactggtaaatttagcaatcttcttttatatgtgtataaacctagtaacatgataggatccatccaaatcagtgtgcctgtgtgagcctatatgtttgctttgggcttaaatgcatatagggagcccaattaatttttgaaattaaaatggactaggttgctaaataaaatgatcacttgtgatagattttatttaaattcctctcctttgggccttctgtgagagttaaggggccatagtagtggtacgacatactgaacccagccctccctcacatgaacaaccctaattgttataaggcccatttggctcatttgaataattgtactaggttaattaaactagtttgacctaataaaattgatagcaacataattaattttgaaatatatgaaattaattttttcatttgattattttgaaattaaatttaaaaaaaaataaacttagtttaatgcaacttattcaacataaactatatgtatttttcttgtatttaattaaataaaaaagttataactaatta

SEQ ID NO: 340251 - DNA, 768 bp, Cannabis indica
caaaataacatttttcgtccttatggtattttcctcttgattttcatcttgactgggatctatgttggcctttgaaatgatcttttctgtagtgatctctgcccctattgttgtctcttcctctggccaggtaagcttcatccttgacattgtctttctccttggccatttcttgttctttgggtttcagggctccaagaacatcatcaagggtaagagtatccctccaatacttgataacagatttcaatttctgatatgcaggtggcaaagatctgagaagaatgacagcttggctttcttcatcaacagtgtgcttcaagttagccaatcctataatgatttggttaaatatatcaaggttatcatctaaagacaaatgagaagacattttaaaaccatataaagattctaacaaattaatcttgttagttagagagggtttcatgtaaatctcttcaagcttgctccatagttctcgagctgtcttcatattctgaaccttccttctcactgtattggacaagtacattatgacagtgtagtatgccaattcctccatatcttcaagttcttccttttgtaacttgtcagtgaattcttccttgggtttcaatgctttggcaactttttgatgaacaagaattcccttcaaactttctctccataggccaaagtcccttgtcccattgaacttctcaagttcaaatcttgctgatcctgtcatgactggttgcagatgagtcttgattgaatcttgattcttga

SEQ ID NO: 340252 - DNA, 849 bp, Cannabis indica
gtgacccccgagaggtcctcgtctagtgttcctttaggcacgatagtcctgatagacgaggagggggaagtggaagaagatgagggcgagattgcaggcacccttgagcgcaagaagaagggtaaaatggttgagaccgagccttccaagcagccccggaggaaggacactccggctgttagcaatgactccgacggcatcgtgctcaccccagtccccgtagacgaggaaaggcaaatgctccggatcgccaaacataaatacgccttggacgagttcagccggggaaatgttgaggtggaggccttgaagaagatcgtgcgggaggagcaacagaacaccttgcgcgaggacgccttcaggaatccttgggacctgaacatggaccctctgacggattggttcaatcgcttcgtcaggcctactcttgctcccttcgcctcggagatgaccagccagtttgtctcccatctgactcaattcccagccaagagatacgctgcttgcgcctcagtgaactcggtttaccaagttcaggacatcagcgctgctctggctgcggtgagttcttgtgatttattccctacttttatattttgtcttaaggcatctgatttcattcttgtttcttttttcagattactgtcgagaccagccgcctttccaagaccctgattgatcacgggttcgtcatgtccaaatttgggggcatggaagaggctgtgaagatttttcgggacttgtcggctgagaggagggcattccgggaggaggcccagcgaagggaggcccaagcggaggcgaagcactgggaggaggcccagcagagggaggctcaggcggaggcga

SEQ ID NO: 340253 - DNA, 679 bp, Cannabis indica
taacctaggaaagttctcttaactgatttaggttccagtttgtcaatatattggtgtacatatgcactacatccaaatgttcttaaatatgttaggtttggggttctattgtaccacattttataaggggttttcaagcctataacatgttttgggcttctattagtaaggtatgttgcagttgctagagcttctcccaaaatagtttctctaattcagaattgtactgtaaacatctaactttgttcaacaaggttcagttcatccattcagcaacactatttttctctaggatcttcactacagttctatgcctagtgatcccaaattcctaacacaacttgtcaaattcagaggtgataaactctaacccattgtccgtcctaaggttcttaactttaaggtcggtttggctttccaactgagttttccaaattctaaattattccacgcactcattcttagttgctagcaaataagtctaaatatacctactataatcatcaactatagaaagaaaatattacttacctgagtgagttggcactttgtatggtccctaaagatcagcatgcacatattcaagtatcttcttagttgtgtgccttactggagtgaatttcagcttatgttattttcctaaaacacgagcttcgcaaaatggtaaggcacaagaatt

SEQ ID NO: 340254 - DNA, 700 bp, Cannabis indica
gcccatcacgaaagaactccacagttaagtgtgcgagtgaggagtaagcatgctagaaacactcgtgttggtttgtagggtcagtcatcattccatgaagtagctaaagtgatgtacttgtgtataatagccatcattttttgggcctaagggcctaatggaggcttgaagaggggacgttacatggttgcttgacaaagagcgcgcccaaaagctcaaagatgtggtcaaaaggctgagagtcaatgacttcataataaggcattctaccctcagtgcgtatcgaacctattactggtgcctaaacctaacaagaagtggagagtatgcatcaacttccccaacctaaacaaggcatgtccaaaagtctgctttccactccccaaaatcgacgagcttgtagatgccacaactggccatgagattctaagtttcatggacgcgtattctgattacaatcaaataaagatgtatccaccagatcaagagcacactagctttatgacagatataggcctttattgctacaaagtcatgcccttcgggctaaaaaatgtaagggccacgtataaaaggctagtgagcatgatgtttgcagatctcatcggtcgcaactgttgggttttgtgccctaaataaaactcatttcaatataattagatttacttattaatacagatcagaaataacattttatgtt

SEQ ID NO: 340255 - DNA, 1035 bp, Cannabis indica
agatagttgactatgggcgtcatccatgtgggcgagctatctatcatctcgacatcttccttttcacatatacttggttcgtttaacatctccaccagaaccaagttcagttcatctaattcattctgtgaggccagttttgctaaggcattagcattagagttttgttctcttggtatttgctcgattttgaaataatcaaactcttccaagttcttcctaactttctctaggtactttgccatttataagcccttagcctagtatttcccgagaacttgatttagaatcacctatgaatcactgtgacacatgagatttttaactttcaacactttagctatcctcaaaccagcgatcaaggcttcatactcagcctcgttgtttgacgtgtcgaattgaaatctcaaggcatagtgaaaaataaaccttctggagaaattaatatcacccgtgcacctgagccatgctcattggatgcaccatccacgtataatttccaagtatctgcatctcactaaacaagcagattttcctttagagttattcattctatcaagaaatctgccaaggcttggcccttgatggatgtttgtgggtgataagttatgtcaaactaccccagttcaattgaccattttatcactcttccagaagcatttggtttttataaaacttgtctcaggggttgatcagttaacaccttaatcggatgtgcttggaagtaaggtcgtagcttgtgagatgcgtggattaggcataaggtaagttttttaagagggggatacctcgattctgcccatagtaacctcttactagcatagtaagcaagttgctggtgctttccctcttcttgcactattgtagcactaatcgaattttccaagacaaccaagtagaggagtaatgtctctccagttactgcttttgccaaaacttgaggtgtcgacaaatgccgttttatgttcttaaaggcctccttgcactcttttgtccactcaaattttttgttgcctcacaatacattgaaaaatg

SEQ ID NO: 340256 - DNA, 784 bp, Cannabis indica
gtgtacttggggtgataattgtttgcattattgtaatcattctttgcataattgaataaagggaagtgcctcaatggctgaactttgattccattttcaagtttaagaaaaagaaactacactgactaaagctacagtacaccaatatttattttctattttttgaaaaaaaaaaaactttcgaatccaatttttttttttatatttttttttaaaaaaaaacttactccaaaatgctctacaattacatattatatatataatagtaataacaacctaatataaatcacattcctccctaaattaattatagtcgctccaatattgttattcttcgataaggagtgtcatccaatctaatcctattttggtcatagtacatccgatctgtactaagtgcggattttatttttttggactccaatccaatccgcaaaagtgcggattggatcgattattttggattggttactttttaatattaaattatttaatatttatgaaaaaatattttttttacataagtagcaacaaaataaaacaaagtatagttattttatgtctccaaacaacatatcaaaataaataaaataacaaataataaattcaaaggaataaaaaaatttgtataaaaaaatgtttaattttattttaaattatatgtagaaaaaaattatacataagaatataatatacatttaatctattaagttttgaaatataattgttttatatgtattagatttttaaattattattttttttatattaaaatgttatttgt

SEQ ID NO: 340257 - DNA, 1273 bp, Cannabis indica
tttcttatgtctgcaattttttttatctcatgttaagctaaaagataagattagatcaaatagctctgatgtaagttactatggtaacaatacacgttttgatcaataaatgaatacagatagttatttcaaaattcatattgaatcgaaattatcagcatgtttctaatttaccatacaatgcgtacaaaaggtttggtcaaacccaaaacaccaaacagataaacaatatatttgtaaaagacaagtgaccaagagtcatacggctgctcggtcacttgggggtcacctatacttgtacaaagcatttggtaaaaatgaaacaatcacaattacacaacaattataaacagagaatgaaattcattaaggataacaaaagcacgtaataccgggattaaaagctgtccggtcagcttgttgtctaaaaaatgaaaaataattcaaagtttaaagaccgcttggccggtcatgatgtcttagaaaaggccctgaggccgaataagacataaaaaaaataaagagataaaaagagaagtgtttaagcagctggagtctcaggctcttggttcggttcttctgggccaatcggagcaagaagatctgttgcttgaacagaaggtacatcagcagtctgaccggaggttgaagcagcagcctcagtttcgtcgtaggccacttgggacgtgcaaaactcaaggtacatgtccttagcatcacctaagtagtcaaaattggcttaggattagccttccaaaaatcaaagaagagctcaagatcgactgtctcaaaggcattgaccttctccttcaaccaggccacctcggccgaaagctcctcctccttggcttccttctcctccttcatccgatgaagaactgctcgaagggaagtcctctcatcctgaagagtgtttacctcaacagataaggtctcgatggtctcctcaaaacgatcagtaacctcaagatccttagtcaactcagtgatcttcttctgagcggcaaacaatttcttgttggcttcacctaactcgaatcgaacaactccaacttctgccatggcttcttcagcatccttcctggcgaagtccgcctccgccctcatggtgtcggataaagccgtgttcctggaagcagtagacttaccccgggagtaagtgtaggccaacttcaaaccgacttgcacaagggaaaaactttagcatttgagctaagtatggaagattaaagggaagtatcaagaaagacttaccctggtgaactccttcaag

SEQ ID NO: 340258 - DNA, 491 bp, Cannabis indica
aaaaaaaaatcaaaacattaaaacatattaatttaacaataataacaataaataattcttattaaaagaagagtgagaaagaaaagtgggcacatatgaagagtgagggagaaaagtgggcacatgttagatacaatttgatataatatggtaataaaattatttttgagttaaatataatatttgtatatatatatatatatatgataatttgaaataaactattaataagatataattatttttaataaatttataattaattataatttaaaatttattcttatttataatcaacctaaatgagatttaataattttataataaattaaaaattattcttgaattaaatattcttacatactataaaatattttttaatggtatcaatatattactcatttggctattaaaaaattgacatctatatatacataaatatatatttatatcaattttagaagtattaactaatgatggatataaatgat

SEQ ID NO: 340259 - DNA, 903 bp, Cannabis indica
ttgaacttgtggtacaacgcttgaatggaatcatcaaagagacaatcagttgtcgcaaaattcaatgtaacagcagaagaatatttaccttttttcctaaggtaatagaatatagtgttcatatgctgaaacaaaaacatgacagaaacacaaatcaaaaggttgaacaactatttaaaaactttaatacagtagctaaacttaaaaacatttaaaaagcaactgaaaaccaactatcataaactataatggaaaatagaaactttaccgagtcattgataaacatgtcacaggtagccaaatgataaaaccatgttttatcctcaacataatcaacacctaatctaaaacccggggaaaatttcttcgcaccatcaacataacaattgtaatgcctaaaagaacaaacaaacaacaaaaaaacaatattaaaatgaaatttgtaataaaaaactaaaattaaattgaaaaataaaacagaatagaaatacagaaataataaaaatagtcacctaggatgtttaagcaagccttgaccaatccacgcgtcaaactttgcctcaatttcaggagagacgggatcaacaaatgaatcattaagagcataaaggcccttcacataagtaaccatcttaaaatccttctcatcccctgctgagtgagaacctgaggacattacctccattggagtgctcctcacatcatccgacccgaaatcaataaaaggagatttcaatgctggtgcacgctttctcttatccaacaaaggagtatcagaaacaatatcctcagtttcttgatcagtatgaatggcagctgacttttcaccaacaacatctggattgggttgtgggacctaaaaaaacaaagtataaaattaaacagttgcaaaacaaacattaa

SEQ ID NO: 340260 - DNA, 446 bp, Cannabis indica
ggtacccgatacttaattagaccaatagcgatattgacacgtaggatggtgctaagcaccactgaaaccctttaagatttctctatattgggtatcctaatgtttaagttttttactaaattaatgttaaatacaataaacgtatgcttagtttttattttaaatattataattttacaataccaatacaatttgtataaattagcttattataaataaataaaaaaaaaagtaaaaagagaaacaatcaacaattcattaaagaaaaatcttacaaaatttaaaaggttgaaacaaatttttacaaaatttagcatccaaacatttatatatgttggaaaattgttgtgctccaatatagaaatatcaaaccaacaagattacaattctattacaaataatataaagaacaaaacatgtataaataatgttacaacactaaataa

SEQ ID NO: 340261 - DNA, 1030 bp, Cannabis indica
cgtgttcaggttctggttcgagtgtcattgctagtctgggtccaggactgggtctgaacccgaaatctgggctaggttcggtctagttctgagtccgggtcaaggtccaggtcacggtcccggtcctgttccatggtcctgatcacattctttttcaagtttcagttttgggtcccaggtttgggcctgggtctaggtccttttccagcttcgggtccttgtccgagtccctaatcaagacattgactatgggtcgtgtccaagccccggttctctaatcattggacaagatctgcatcccaatcacaggtcctagtcttgtttcaattcatgtcctaggtcagggtctaggtttgggtctaggtccaggaccgagactggggtccagttctgggtcccgagtcatgttcaatgttctggtctgaattcaggtgtaggtttgtgtcctgagtcccagttcgggtttggatctagattttggacccaatccaagagtcagtctttgaccgagtctgggtcctggtccggttatagttttggctctatgttcatgtccttgtcatgttctttttcttgggtcctgatccgcttctagtttcgatttcagtttcaagtcacggggtacgggttttggttgagtttggatatgagtctgggttcgggtcgtgatttgggtctgaggcaaggtttaggtccaggtttcggtctcaggtagggttcgaggctgggtctcggcccaggtcccggtcccgttcaaagatcttggtccctttctaatacatgtttcgatttttgttcttgagtgtgggtctgggtcttcgtatgtgtccaggtcttagtttgagttcgagtttgggtttgagttctggtctatgtccttgatccagacactgagtactggtcgggtccaagcatcgagtcccggatcccaggttccgaggtgggtcctatgtccaggtttgggtctggggtcgagtccttgatcccgatcaaagttctgagccaatttctggtcctagttcgggggccc

SEQ ID NO: 340262 - DNA, 726 bp, Cannabis indica
gggagaaagaacttatgaaatggtaagtcgctgcctgagacgccgactcgaagaggcgcaacatcgaaacactgtgttagaataagaggtagctttggccaaggtagcacaggggatgaacgctcaaaatcaacttgaacttggagtgagaagaccacgagccagacctcatggctcacgaaccagagacaggaaaaggcctgggaagaacaacccggggaaaatgagtcaccacctgagaattaggatgagcagccaaaaaggagacaaccggaaactgatgaacgagaaatccctcatgagaatgaggaggatcttggaactcagccgggagaacagaggtcacctgctaggaatcaccaacgttcttcccaaacccatagagtgaggactcgtacgtaccctgatgggggaaatacgacaaaccactctagggaggaaagaacagagctggaagaagaaagtgtgacttcgaggcgatccagattccatagccaatcaactcaaagaggagaaagcactcaatgagttagtgatcgggaaagtatgggaacaagtaaatctgctagccacttaaagacaaagtctatgagtaggatgcagtctatgagtaagacgagatctgccagcaattactcccaaccaaatctgcgagagcacttgaatcagaagaaaactgaccttcaccaacagcttggtccaaagcaagaggatccaatccaatta

SEQ ID NO: 340263 - DNA, 1636 bp, Cannabis indica
atccattcccagtataatatcaaaatccgttaaacccatttctattaggtcaccactcaactccctatcctcaattctgatcggcatagacctaatctactttttggagatgactaattctccgccaggcagtagggttccaaaccctgattcataactatcgtgttgtctacccaatttactaaaaattctagttgccacataagagtgagtggtcccagagttaaataacacagagaagtaagagttattgatcgagagttgacatgttaccactgaggggctggcttctgcatcagcctgagttaacgcaaacacccttgctagagaaggtttcgctacggtcttctgttcttccttcttaagttgggggcaatcccttttataatgccatggcataccacactgaaagcacccctgccctctacactctcccaggtgatgtttttacaactagggcattctaggtaagtgtatcgggtttcggagccaccctgatgattgcctcgaccctggttccctcgaaacctcttgttgtgacctgaaccactggatgcaataggtggctttcttttctggtcagtggtcgaaccactacctcccctactaaagcctaatgtatgaggggtaggaaccccaccaacaacctgagtaccttgagactctagggtacactccactgcgtcctcagctcgcagtgccttagccaccatattagcataggttgtattatcatcagtagtgatcattaagtcatgtcttattttcgagttcagcccatccatgtacttttctttcttaccaaaatcagttggcacgattcccgaggccaatcttgccaaacggtcaaactgtgttgtgtattcagtaacactcatattttctttatgagttagctgagtgaattttttcctttttgcacttttgattgccttgttgtaatattttgcattgaacagttcctggaacttttcctaggtaattgttgtaacatcatgagtcagggataccatgtcccaccacactagagcgtcttcttggaattggaatgtggcatgtgccactctatcattgtcggtgacgcccataaagttcagaattctggtaatcactgttagtcactattcagctttcataacatcgggacctcctaggaaaactggaggtgcctgcttccagaacctctcatacagtggtttcattcgattcactgcaacgactagtcctgcctgcacaacaggggcaagagctaccgttatttctggaacagggattgcaggagcaccctgctatctcaagtgtcggatctcttcattttgttcattactcctggcttgcatttctgcaaacctattttcccaatcttgggcagcctgtgatgggttaacatcaccccgttctaccttggccacgaatatttaggggaatctgaactccctgaccaccactagatccaactgagttaccctggctcctggtattttgcctggagtccatactattagaacaacctgcgtaaccaagagctagtctggtcagatcgtgatcaaataaaaattactaattgccgcttatttggaaatttaaaaagacatgcccctattctactatcaggctactaacatgcttcctaaca

SEQ ID NO: 340264 - DNA, 270 bp, Cannabis indica
agattttctaagtatagaaaatcaaatttcccgtatattatgtgatttactatttaattgtatgatagtaatgtatatgatatatttatatatgggttatatatatgtgacattgttgctataatttatacacactacgcaagtatacgcaatcaagttgtaaaactcacacaggtgaggtcgatcccacagggaattggattaaataccactaaactatacttataactctatttggcaaatcgaaaacaattatgatttaagaaaagt

SEQ ID NO: 340265 - DNA, 1356 bp, Cannabis indica
gcataaaacccaacaagttgatcaactcgaaatggagaaagtattcaacaagctaatgatcgagaaagtataggcaccagtaaatccacgagtcactctaagacgaagtctatgagttggacaaagtctataagtaggacgcgatctatgagtaagacggggtctgtcagcaattactcccaaccgaatctgcgagagcacttgaatccaaagaagcctgaccttcgctaatagcttgatccaaagcaagaggatcccatccaattgcgaataaacaagctagaggacaagttcaggagatatcaagtgggggaactagggagacaatctggatacgacttagacgagggacttgagtcgtatcatccagatatcatgagtaccccttttccttcgggattcaaaaacccgcatgtcttgtcatatgatggaaccactaattcagtctcgcatttgaacaactttaatacaatatgcgagcaagtaatgtcacgaataatttacgctgtattttgttccccacctcgcttgtgggagcagcgagcaactggtttaacaagtttacccaccattcaataacctcatgggaacagctatccagggatttcaagaaacaactccagactgctagggatagacgacctgaagcggccttgctaaccaatataaagcagcagtcaggtgagacacttaaggcatacttaagccattttagcacggctgtagctagggttaggaacttggatgacaacacacaacttacatcctttcaggcggggatctctattgatccatcaaccgcaggggccgagctgtgggacgacttacaaggtcgtctagtaagaaacatcattgagttcaacgaaagggctcaagtattcgttcggaaggaagaagctcgaaaggaaatgaatttgttgaaaacaagtccaggaagcaaacccagcaatgtttcaacaacatctgtttccacgagaattgataactcggagcttctagttcaaagagaaaggacgattctaaggaatctcgaaggataaaaagaaatagaagaagcacgataagtacgtgccagtgtatactaattataccgagtttaatgaaactcaaaagaatatttacctcgcacatgggcaaaaggttgccatcggcaagcctgagcccatgaggaatgcgaggagcaaaagagatcataataggtattgtaaattccacaagaatattgggcatacgaccgatgaatatcgccaattgaaagatgagatagaaagtctcatcgttcgaggtcacttttgttggaattattttaccaggatctagatttactaccaaatatgtttgattaacatcctaata

SEQ ID NO: 340266 - DNA, 443 bp, Cannabis indica
atcgcttgagtctagttcttcagatgaaatctttagggtcaatcaaagcaatttagaaggacttaatcttaatgaaaggacatcaattcaaatcctggatttttgaattgagagagatcaagaattctcactatttcttagattcatggacccaatttaattcagtgatatttttgattcacatatttttccatcaaaaacgttttataaaactcttggactctcaaatttggagtatcctactttcacgcaattcacattctacaaggttcaacgagcaattgatatttcacgatcaagggtgtagtactatttgtagtagcggtccttatatatcgtattaacaatcgaaagatgaatcaaaagaaaaaatctctatttgacaaggcttcttctatacctatgaattacaatggacccataaatgatacattggaagaatc

SEQ ID NO: 340267 - DNA, 563 bp, Cannabis indica
ttggaatacgagaattttccttttggaaatacttacatttcatgtacttacaacactcataaaaccaaacttgaaatacatgaggaaaaccaatcaaagtgtaagaaacactcggcctcttccttgaactctttgcctttctaacactttcaaccaaactctcaagcttacccttcaaggacgaaatagtcaattcaaaagaactgtgtccccaagcaaattcatcgtacctcccactgtctacaacatctaaaatagacctaggtacatttttatgtttagtaccactaagcaaaaaccattctacaataaaaaactacgaacttaacaacatcctcatcagaatcactctacctctttgtggtgaaatattccctaacagattctttaataatagaggatgaagttggccaatatttcttacaaagactattaacaacttgcttaaaatccaacacactacaatcaccttcacaatctaaaccagttatcaatgcaaactcttcaatactaaacctaatcctaacaccatgtatcataacccacaattcaacatcattagg

SEQ ID NO: 340268 - DNA, 737 bp, Cannabis indica
tatgacttatcataaattatttcatcacattaaggataattaatatatgagcatgaatatactgagataaactgaatgtttattattaataacaatgtgtatatcataagttatatacacaattatggtattcttaacaagtttacttttataaaacacatcgtttaaaaaataatttacaattagttattgaattcttaaaaaaacactagaacttaaataaaactaatatttacgtgactcgccacgtaactttcatctagtatatataaagatgcatatatagactgtttcttacattacaaattacactactacaaaaaccccctttagaggcggtttttaacccctttcagcgtcggtttttgcgaaattcgctacccacactgatcagagcgacgctaaagggtttatatgaaccgacgccatatgtacccctatggcatcggctattagctcataaccgacgccataggggtacctatggcgtcggttatgcgctaataaccgacgccatagggggcgtaccaaccgactccaaaagcaagagatttccagttttttcaattttttttttaatttaattatataattttaattacattttaattatatatttattaatttatatattattttatttaatttaaattacaaatttattttttaaaatgtaaattaaatattatttaaatttcggtaaatacataattttatttcataaaagtaattaaata

SEQ ID NO: 340269 - DNA, 577 bp, Cannabis indica
tttttttcttttctttttttctcaatcttgcaagttcttccctctatctctttttctctcacactaagtatcttcgctcccccaaactaattgtatagcttatgatatcattgataaaatggtgaagataaaattaggagtgtggatatatatttttcggttcaatagatgagaaacaaaacaggcttaggctcaagagggtcaactagggataaaaaatttaagtgtaggcttgaaaggctcaaactatccaacaaatgcctatattcctattgaacattgtcaaggatttcgcctcaaaagaataaaacatgcaagttctaagctatcctatcaatcttaccacaaaccacagtaaaacaattataacaattttcacaggtaaccaatcgcattcaaacacaagtttctaagcatccaaactaatccaaagagttaacagaattaagcacacaattatttttacaatttcagagtacattacactaagcagcagcatacaactatcttctagcttattgccattcctaactaaaacataaaaaaaaaattaaagcagaaaattaaaatgcagaaa

SEQ ID NO: 340270 - DNA, 505 bp, Cannabis indica
gaaatggctgctgcaacactcttcggttgatctgaaaaacgccacacgaaatgggcaggttgacccctttatttatagtgttgttgttgactgtgatgtgttgtgttttgagctgagaaaacagtcagaaaactattattgagttttccttgtgttgctgaaagtttgttggagtcttgagaaggttttatttatttcttgtatagtaaagagctaaaagatttaagcctatgaaactccaagagttataatggtcagttgaggcttgtaaaaaatcttactttatttttcttgtaacttttttaatgtatttttcatgtgacagttagtatggagatttatccaacaatttttatctatattaacagtctaaaaaagtatttgcctttgctgtatttatttgttgctgtctttgaggctcattgcttgattaagtttccatttaccatcttgtgtcaactgctaacaggttcatacaatgcttgaacttgttgagagtcaccac

SEQ ID NO: 340271 - DNA, 595 bp, Cannabis indica
attaatgtaagaataattagtaattttaccctgaactttcgacaatactgatcatgctccctaaactatacggcttattaagaatctcccatgaacttttatatttacaaaaatttagtctttttgttaggtattgttctattattccgtttaaatgctgacgtgcctttgtaaattagtaattttgccacctaaactttgacagctattaaatcgtaccccctcaaaattaaaatgaaaaaatataacatttttcagtaaattttaaataattaatttagatcttaaaaattattttgaatgattaagaaaattaaaaataaattaaaattttaaaactaaataatcgatttaaaatattatttatttttattaaaaaatccatttagatattaaaaatacatatattaaaaaatttaattttggtaaaaactaaattttacggcaacaagtttgagtctattttttctctaaaaatctaaatttgtttaagtaaacataatacttttttagtttaatttttaattctttttcaaaataggttatatttttgttattgaatttttaattattttcctttatttttttgaataat

SEQ ID NO: 340272 - DNA, 510 bp, Cannabis indica
aatgataagtaatcaaagttcgtctccacaggaactttttactaaataatgcaaaatcaactaaaagcaattcgaaaatttcaaataaaaataaagcaaagtaactaattaattcaaaagaaaaaatcttaacctaaattctagagttgagaaataatattttaaactaaataactaaaaataagaagctaaaagttattaaagtggtgataatttcatatttgaaaaatagacttgggtgattaatttccacttgtatgttctagttgatacagcaatgattcagcaatcctggaagagttaacaaatttcaaaaaaaccagcaagcctttttcaaaacttacaataaaccattcataatctcaacaatgcattcctacatcagattagatcacaaatattccaatatagcatcaaatctttagttatgcatggtacaaaatgtgcctatttcactaataattaacacctaaaagagggttaaaaatcatgcatcaattagaggggttc

SEQ ID NO: 340273 - DNA, 734 bp, Cannabis indica
gactgtcacttcatggtacgttggccttgttattataattatattattctatctctttttttttacacctctttcatatccatctatttgcaattctccaggcttctttcgcttcttttgcttccaaccgattactctctgagcggctttagtacttggagggcgaggtccacaaactactatcataatgcaaggtcgtgagtaagcaccgggatgactcccaacagaagaatacctgcctccagcaagaagctgagaaagcgaaggtggaaaccgagaaggcaaagaaggaagccgagaaggcaaaaaaggaagccgagaaggcgaaggaagaggccaagaaggccaaagaagaagctgaagaccatcaaagccaagctgatgtgtttgagaataagcttcctgaaaaacttgccgagaaagaagttgagaccgtagaacggtgcgataaggttggttttcgcactgtatatcgggcctggctttggaaccctaatatggatgccagcttcttagaggagcaggaagaggaaactttagctctttgcaaaaagaccaagatggaggaagaagatggcgaggtcgaggaagaagaagaagatctgtctaagtccccagcatgtagatttggtttttttttatctcccttttctctttttaggagatggcccttttcgccgagacaatggtttgcccctagcggcacttttttgtaaagacagatttgcaaggtt

SEQ ID NO: 340274 - DNA, 504 bp, Cannabis indica
gatttatttttcaaagggatattgatttgatccgtcgtatttcgttgtctccttcttcggttgaggatgcttggttttggatgttggagacttatggggattattctgtcaaaagtgtttatcgcgccttacaggtaagcaatgttaagtggaatactcaagacaatttgggtttttggaggaagttttggaacttgaaatttccacctaaggtgaagaattttctttggcggggtcttactaattgtcttcctactcttgtgtctttgtggtctaaaagggtgcatgtgagcgaattgtgtccaatgtgtaaccgggaggatgagacaatttatcacataaaggttagctgctcttttactaagagttgtcttgataggggctgggagggcggttggaagggtgaagctgctatttttggcagctggtttgataatatttgtaagtttcagtctatggatcgtattgagaggcttgctatgcttctttggggagtttggagag

SEQ ID NO: 340275 - DNA, 548 bp, Cannabis indica
gtttccatatctttgtccctccattcagcgaacatgcgcctctgctcttcaaatggaagatttaccacgatgaaaagttcctcctgatcatgatgcaaggtgttggtatgaccttgcatgactccaagaggagcacagacattttggatttcggtgtcatctccaatggttgtttgaacattggttacgggcagaatgacagttttgggaatgccttgattagctgctaaactgttattcccagtctcttgcacaccaagcgcgattccactcatacgagtcgtcacaccgtgacctacaatcgagggttgtttaagatttgtggttggtggaacccttgtgctccgtaggttctgcaaggtaggatccaccgcctgtggattttctggatcaaccacgcctctacgagtttgtactaccattgtatttgtgattagatttgagaacgatcttgagttcagctttcaatgaaagcaccaaaatgttgacctcgcttttagccaacgacagtgagtctaaattgtaagcgacaagtagtataatgtgta

SEQ ID NO: 340276 - DNA, 739 bp, Cannabis indica
aattatggtatctacgatacccacgtatttcaatacaatctccgtaattaatcaattacgctttattattcatttactcatattttcctaatcaactcgtaattagtttaagtaggattataatcctactctaatacccacttaatcacatatttaataaaatatgtccaattaaaatatcaatatatttttcgggatattacacggtaagtctcctttagcagcacattacgttctttccgttagcgaatatgccagccttaggcctgtagagttcgatgagcgtcttcataggtttaggatgccctcgacccggtggggagaccatatgaaggattattatttttccaacttaggagatttcctaggtcgatcccagatgggttctggtcctccggagcccgttcccttggacccttcggcctacatttcttccagctggttccggccttcggacagctatctcggggatgatgcagccagcgttaagattcggaactttgctagggccgaattagagagtcagggtaggactagcttgattgctttattcgagtgtttactgtttccatggatattctaacacttgcctcttttcttttgttgtagcaggtaattccatggatgccattttggccgcacttgccggagctcacactcctgacgctccccttcctttaacttcctcccaggtggccactcccttgaaagcttcttccagtgcccctccagacactat

SEQ ID NO: 340277 - DNA, 503 bp, Cannabis indica
ctttatgccaaattcaagaaatgtgaattttggctatctcaggtgtctttcttagggacatagtcagcaaacatgggatcaaggtggatccagggaaaatagaatccgtcagggattggccaagagcgaagatagtgacagaaaattagaagctttttgggtttagccgggtattatcgtcggtttgtggaagggttttctaaaatatcaacacccttaaccgaacttacgaaagtgatttgtgtggtcagataaatgcgaagctagttctcaggagctggaacaaagattgatcacggctccagtgttagctctgccttctgacatagaaaagttcgtggtttattgcgatgcatccagacagggtaaggggtgtgtactgatgcaagtcgatcgggttatcgcttatgcctcccgtcagttaaaggattatgaacagcgatacccgactcatgacctagaattggccgcggtagtttttgcattgaagatctggcgacatt

SEQ ID NO: 340278 - DNA, 915 bp, Cannabis indica
caatttcgggttggacatacccaccattttacttcttaaaagcttctaccatggttccataatgatctcgagctacacaacccattccaaaccgaccctcttgctcaaataaagccccatcaacattaactttaatcttgtttaacacaggtgcaatccaacactcacaatttcgtcctcattcaaaggagacaacgaaaggcccttcctttcctgagcaaatttgtattgatcaagcatgattctagctaatgttacaatatttgaagcaagacaactcttcttttgccaaacaaagtcattccgcgcacgctaaataacccaactcaccatcgttgcttcctccatttcaacttcgtgccccctggtgaaaattctcaacaaccagctgctgaatgttacagccccagccccgacgtctactatgctgcgatgccaagcagcctttgcaaacgagcaatccaccaacgcatgttgaatagtttcagtactagagttacacaaagggtagtcggcgttgacaggaacgtgtcgtttttggagttgaaaacaagttggaagcacacccgaagtagctcgccataaaaaaattactgatcttaggaggaacttttaatgaccaaagccgcttccaaaaatcagttttggcatcttggcaccaagcactcttagattcttgcaagaatttatatgcacttttaaccgaataattcccacaagtctaaagtcgccaactccaaccatcattagcggccgaatcactaagctgaatggacaaaataaggtcctgatcacgggcaacaaacagatccctcacaacatcctcatcccacatgcgagtaccgacttgaaagaggcagatgaccgacttattcacaagagcagggtgccgtgagacaacatagttgtttgagt

SEQ ID NO: 340279 - DNA, 815 bp, Cannabis indica
tttaaaataaattttaaaatttaacataacacgaacatgacaagatgacattaaaatcaacaatttagtttacaacacggcaacacgatatgcgattttgtgtgttcgacaagatacgaacttattcgagttttgttcgtgtctgtgttttttaatttttttgtgtcacgtgtcgtgtttgtgtctgtaattttttagtaaatttaagacctcatcacaacacgaacacgacacaccaacactcattgccactctaactgtaaagcatgacgagcacaagaaagttcaatcccaatccaaatagcacatgtaacattgtttacaatgcattattggctacaatatgtgctacttgattagtatccctacaaataaaattcaaaccaattacatattcatattcatttattttaatatgaattcaaaaatatttattaatttatttttgaataatttgcagcgtaaatacataagttttactctttattgcagataaatatctaagtttaatttttacggtaataatacctaagttatatttctagaacttttcaagttacctgaccattaattgtcaagttattatccacgtgttatatttttattggtatatttaaattattttttaaataaaaaataaaatttaatgatttagattaattaaggtctgccatgtagccattaacttaacacttaattgccaggtaccaaagaaagttccaaaattttagcttatgtattattaccgtaaaaaattaaacttaaatatttatctgcaatcaaaagttaaacttagatatttataccgcaaatta

SEQ ID NO: 340280 - DNA, 567 bp, Cannabis indica
aaaatttattccattgctattcctattctcattcacattcctatgttttcattccttccaaccaaacgccaccttaattacttaaacggtctaaccacaacagccacagaaatcacggatctttgagggcacatggcatttccaaatcactgtagaccatacaactgtttattagggatgtctcctgtcagtatttaaagattatcttgcatgaaaaatctcacttacccaaccaaatcattctatcttccattcttgtgcaatttttttaatttctcagcctatgaatcgagttaaaacaaagagggacttctctatccctcaaattttgcttgaaatgaaaattccattcctctaacacacaaaattcagcaattattagagttagtcccacattgctaatatgtggagataaattgtcatatataagatgaatgggctactccttccattgccaattggttttgagatggaacctcattcatctccccaaattctaacatggtatcagagccacttgtgatccgttggagcccaaagtgctaccggtccaaaaagtcgtttgtg

SEQ ID NO: 340281 - DNA, 789 bp, Cannabis indica
cctctcttccacggccaggatgacttcttcttgctcgtactgagctgttcgggcatatctctctcgagctttgcccgtgtctccagcgatgtgcgggcctccaataatgacttgcaagtgtccatctattggcggaggcatcagatcctggttattctgaccttggttggccttgacatacttttgtaagtgcgggttgtttttcttgatcagaagttctatttcccgcttcaagttgtaacattcgttggtgtcgtggccgtagtctccatggaaccgacaaaatttcgtcatgtcccttttgctggtatctttcttcatgggcccgggcttcttgtacggaattaacgactgagtggctatgtacacactctctatatcttcagttaagatagtgaatgcagtgtgtttagtgtgatcacggggagtctgtccgggcttttcggtgaactttcccttcttcccgtttccttgcttgtggttgttgcctgaacgcttgccacttgaactgctggaatagtggggaagttgggcggacgttccagtggaaggaaccttcgttttgcttggcttttgctcaccttctgctcgctgaatggcttcttcgagcttgatgaaaccttcggcccggtcaaaaaaatcactcattgagtcgaccggtccgtttttccttatatccttcaatagttcgccaaggacttcaatgccccccagtatcgcggataactttccatcatcggttacccgggacaccttgatcgcttcagtcatgaatctgctgatgtatgc

SEQ ID NO: 340282 - DNA, 581 bp, Cannabis indica
acttaattaaaaaaaaaatcaaaaaatacatctttttacactatattaaaaatatatttatatggaaaaacatttaagtcaaatttaacttttgttatcattttttttgccgaaaaactttttttttattattttttttcagctgatggacggatcccaatctatataatgtaaaaatgagaaatttttctaattaaatagaaaaattaatcataaaaactcaaaattttctaatattatacattcatgggtaatacccattaagaaagatcgcgtgggttgtgcctaaattttaaaaaataaataaataaataatacaaatatttaagtaaaaaaaatctatcacaaaagtgacataaataatccatcgaatttctctagttcgaacctagccatcgacatcctccttcaatttgtgttcttgtagaattccttgatgaattcttgatgagttcttggtgaggaagcaagtgatctttgaatttcccttgatgattgaagaaccaagctctgatttgtaggaaatttagctctgatacatggaaattaacttttgtaattccagcttcaagatcacactt

SEQ ID NO: 340283 - DNA, 659 bp, Cannabis indica
aagaaattgaaattgacccaaatattccgactagaaatctcaaaattggaaaaggtttgctgctcgaagtaaaatcatcactgataaaatttctaagagcaaacctacacatttttgcctggtcgcatgaggacatggtcagaatcaatccttctataatttcacatgccctgaacatcgatccaaacttttggctcgttcatcaaaaaagaagtctgttggacaaagaacgagccctagcaataaaagaagaggtagaaaagctacgcaacaacaatttcataattgaagctttctacccgacctgggtagctaaccctgtactagtgcccaagccacacaaaaaatggagagtatgtattgacttcaccgacctcaataaggcatgccccgtggactgttttccactttcaagaatagattaacttgtggatgcaacagtaggacaagaaatattaagcttcatggatgcctattcagggtacaatcaaatcaaaatgcatccaccagaccaagaacatacaagtttccaaatagatatggttctatactattataaggtcatgtcatttggtctcaagaacgccaaagctacatacaaaagattggtaaaataagatgttcaaagaccagatcggacaaaatatggaagtatatgt

SEQ ID NO: 340284 - DNA, 887 bp, Cannabis indica
ccccagtctcgatcccgaacccaaactcaaaaatgggaattgggacgtgaaccagaaccagaccgagacccgtgacagtgatccagatcttgactcgggattcgggtaacagggcctagaacagaccagtagtcagtgtctagatctgggactcaaactaggaccagaacctagacgaagaaccaaacccgaacccagacctagacatgggacccaaaattagaacctgaacaagaatcgccgaaccaaaaccctagaacaagactagaaccgtgacgaggaccctgacccaaacctagaaccgagcacagacctagcctccgacccaaactgagactggaactcgggcctggacacggtcgtgtacctagatcggaactgagacccggaaatggacctaaatctggggccggatcccaaacactgacttgtatctagatagggatcctcatacgaacctgaaagcgaaccaagaaccaaactgggatcgaaatgcttgacctagatctgggcagagatcttgacccagacccaaactttgacccgttcttgggacccgaacttggacctcgacccgaacctagacctagatcagtatccacacctagacacaaatccagaaatagactcggacccgaactctaacccacacctagaatcaaacccaaagctagacccggactcagacccaaacaagaacccagaccaggatcaaaaccaaggacttagacccagaattgaatcaaaactcaaatcggtattggaacttgggactcggactgaacctagaccaagacccaggaggggaacccacaaccaaaccctgatctggacctagattgaaacccggacccgaacccatactcagaccagtactcgaactccga

SEQ ID NO: 340285 - DNA, 515 bp, Cannabis indica
cctacttgtatatgtttactttacccaaatttgacttagagtcatattagtagttgtggtccaagctagaataattattcatgtatatttggtataaatttaagtctttgactttaaattttagattccaaatagaatttttttaatttcatttttcagaatacattgaacaatacaatatgactttcacaagttattaatatctattttctgtcaatggatccaaactgtatgtttatgtattgaatatgagtttttcattttgtgaccagttaccacttggagtattctaagaactctttattgtaactaaaactttttcatcacaagacgtcaacaacagtttagaaatctatggcatttgtatcttgttcatagtggtttttacaagatcattatctgcaaagagtaattatgccaatatccacttggaagtaagatcatctatattaaaaaatatggatgtacattcaggggtggatatgaataatcgttaaattcttaatacgatcact

SEQ ID NO: 340286 - DNA, 802 bp, Cannabis indica
agaggccagctaagggcattcaaaagaaagggaagaaggtcgtgattgacccagcggttcgagcttgcaacatattgtctcttcaggagaaatttgtaagtgatgagttccaatcgaggattgacaagactcttgccgaggagctgctgcctcgctccgcagagttagcttcgcagttcattgctatgttctcgagggcttttgttattgggtccaaggaggttaaacttgcgaagagacaccttgctcagcttcaggaagacaataagaagctgaagcaagatgcatcttctaaggacaaggagctcgaggaacttcacaaggctaaggagcaagtcgagctcgaggccaagaacgctcagaagaagattgaggagatgtctcgcgacttggaggttgagaaggagaatggaaaaaggcagtatgaccaggcggtctcgaattacatctacaccactctctccaagattcctgacttcgacttttcaatccttggagcagaagccgttgaaatggctgaggcttttcgcgccatgtcgcccacacaaactcaaggtggtggagggaatcttctcgaggtagtttaggttgcggatgctgaagaagtcgagaatgaagccgtcagcaaagtcgcggatggatctgttcctgctgctcccaatgcttgactttacctttaatattcgcttgtgctaaactctatcctttttttgtttatgcggtacaagggtactcgcaccttgtacttagacaaatttacatttgtgtttattttgaacgactttatatcctcgcggggata

SEQ ID NO: 340287 - DNA, 537 bp, Cannabis indica
tttgtaaacacctttatataacccatgatacaacatttttaatggtttctaaaccatgtgggatttttgcttctcctaaaaaaccctagtgcaaggcacgtatactaaattttatattaagtattttctactttatttaaaagtgatacaattaaaaattaaagaaaaaatattagtggttattaagtgagattattattatgtatatctaaataatataatttataattttgacaattaaaagtaaacactggatgcaatatattagtgtttaagaaagcttgataatttaaatatgttcttaaattaatccaaaaataaactaaaaattaatcttcaaatacttaaggaaacataacttaaatgtgtgtaagataaaaaagaatattaaaaattaatctctaaattgttgataattaaagataacacatgtataaaaatggtagataagaaaaataatgatacacatgggtggattttaatcttcctttgcttcgacagagacaatagtgtaatttttgtattttgcacttttca

SEQ ID NO: 340288 - DNA, 1212 bp, Cannabis indica
cggcaataatcggcaaaagggggattattcagagcgggctctcagtaataaggagtactaatgttggtagattggttcatactttctgaattgccaaacacatacattcacgatatcaagatgcaaccatatgtacaccaactatcattctaatagatatgtcatacatctggcaaagataaaaataaacatttacgtatgtatgtgtgctatactactcttacctcaattctaatttcaggtgtgccggacaaccttagtggaaatagctgctggtaatcgaaggccctaagtcacatttccaaaaaaataaataagtgttgtcctaacactttcggggacttaaattgacaactaaaagtttccctattgatatacatcatgtaaataccataagtacatagaaaacactcaattggggtcatgggaaaagtcttaagatggacccccaaattctgcctaaatcggatcgcccgaaactccactatcccattttaaaacttgaataactcttgaaattctaagaaaaaccttacaaaaattttcaaggaatctaaaaacatcacaatgaacatttttcatgaagacacctcagtaaaattctcaacataaatcaaaataaatggctgtccgaaaactgcctaaattggatggcccgaaacctccctattcgagtttggaaatcatataactcatccaatactgatctaaacattaccaaattttgtgaggaacctaaaaaaatcataatgaacatatttcatggcgaaaccttaacccagttcgcaacataattcaagttaccataacctagttaagtttgacttctttcaactcaagcttgcataacttttgctacaaccacccaaaacaattcaaaccacttcacagtcctaaataaccttaattatcatctcataaccttcctaaacttattcaacattttttactataaacagccactaaaaactaacaaaaatcctagaaaaccaataaatttcaggttaggttttaccttagaagtttggaggagctaggggttgaactccttgatgaattccagctaggaagagacttgaaattgtggaaaactctgagttttggccctggttcagaagccacgaagtagagggagaagaagaaggtgatttggtgtttttttttacttttcttttgcttttgactttgctttttttttttttggttcctttt

SEQ ID NO: 340289 - DNA, 868 bp, Cannabis indica
catccttcttctttacaaataaaaccgaagctcccaaggcgacaaactaggtcaggtgaactagatcaaacatcccttaaagttgtatcttcagctctttcaattctgcagctgccatgcggtaaggtgattttgaaataggttctgcttcaggtatcaatttaataatgaaatctatctcctgctgaggtggtattcttggtaattcctcacgaaacacatccaggaattccttaaccactttggcctcctcaggtctgagtaacataggcttaccagaatcaattacaaccgctaggaatcctacacatccactgcgtagtaaatccctagctttctacgctaaaattcttgggatacgagaaccttgaactgaaccaacaaaaatgaatggttcttcattttctggttggaaaattaccgttttttgcttacaatcaatattggcagagtatttggacaaaaagtccattccgtgtataatatcaaactcggccaatggtaactccataagatcagcacttagttctctgtcttcaattctgattaacacagatctaacctactttcttgaaataattaactccccattaggcaacagggttccaaatcccatctcaaaaacatcactaggcctaccaagctgattaagaactctcattgtgacataagagtgtgcaactctagaatcaaataatacaatataagtggaatcgttaataaagagcttatctgtgaccactaaagggctagcggcagcatccgcctgagtaatggcaaatacacacgctggtgcaggtttagcttctggcttaggttcatctttcttcaactgaggacaatctttcttgaggtgcccaactgatcc

SEQ ID NO: 340290 - DNA, 995 bp, Cannabis indica
tctttgtgtcggctcgggtttaggtctctttctggattttggtctgggttcggatttgggtttaggtcctcgtcctggtgctagtcctagttcggtcctagtctgagtcccagatctagacaccgcctactggtctgttccaggccccgttacccgaatcctgagtcaagatctggatcaatgtcacgggtctcggtctggttctggtttaggtcccaggtcccatttttgagtttgggttcaggatcgagactggggtgcgattctaggtcccgaccctggttctctgtccttagtctggttccatgtttgggtctgagttcaggttcgggttaaggtcctgagtctaggtttgggttgggatccaggtccggctcccaattcgggtctagttctgatttgtagtccgggtcctggtccagttacggttttggatctaggtacaatttcagttatgattccaagtaagtcctagttccagtcccgaccaacttccagttttggttccaattttgggttacagggtacgggttcgggtcctatttcgggttagggcttcggttcaggtctgggtgtgggttcaggtccttgttagggttcgggtccttataagggttcgggtccaaggctgggttttaaatccaaacaccgactacaggttttgtccaagacctcggtccagatccatgtcccaatctcaggtcccagtctggttccatttttggtgcagggtcacgatctgggtcataggttcaagtttgggtcttggtcgagtactacgtccaggtcctagttctgtttcccaagtccctatccttattctgggtcaaagtcccggttattgtgtgggtttaggtcacggtctaggttcgggttcgagtgctactctcagttcgggtttaggtctttgtcttggttttgatctggtttcgggcttgggtttagttcctggtcctagtcctaattcaattctagttccatttgcgattctgagt

SEQ ID NO: 340291 - DNA, 613 bp, Cannabis indica
gaaacctcaaagcataatgaaacataaagccctctggagaaattaatatcacccctgcacacgagccctgctcgttggatgcaccatctacgaataacttccaagtgtccgcgtctcgctgaataagtagattttcttctggagttattccttctaataagaaatcttccaaagcttggcccttgatagatgttcgagggtgatgagttatgtcaaactgccacagttcaattgaccattttatcaatcttccagaagcgactggttttgataaaacttgtctcaagggttgataagttaacactttaattaggtgtgcctggaagtaaggctgtaacttgcgagatgcgtggattaggcataaggaaagtttttcaagagggggatacctcgattctgcccccagtaaccttttactgacatactaaataggttgctggtgctttccctcttctcgcactattgttgcactaatcgcgtcttctgagacaggtaaatagaggagaaatatttctctagttactggttttgccaaaattggaggtgtcaccaaatgtcttttaatgctttgaaaggcctcctcacactcctctatccattcaaatttcttgtt

SEQ ID NO: 340292 - DNA, 522 bp, Cannabis indica
gaaattcgaatctaccaattttgcaatagtttatatctcataactaatcatataaaatatatttagatttttctgagtaatctaagtatttttcctaattaatttaacacataaaccaaataattcataataaatcaaataattgcaagaaaattcccaaacttcatagtagacctaaaaatacctaaaacaaatcaagtataagaaaaaatctggaataaaacctttaaaaacccctgaacggagcttcgccggagtttcgccggcgggtcgtcttctccggccacggtgagttccaaactcccgtttttcttgctttcgacgcctcctttcaattaggaatgatccccacaatgcccagaaactcaaaccgatccaatcttgtccaaagaaacaactaaatcacgtcctaaaagagttgtcttctttagctccggtgtaccgccttttatggtgtcaaaatattggttctgtgtttttgacgtcaaagctccattatttttcgtccaaaccgagccttag

SEQ ID NO: 340293 - DNA, 865 bp, Cannabis indica
ttctagactatttcggagagtatatgttaggggacattggttttcattttctgaaaaggacattgctcaagctttgcaactacccgagaatgtctccaatgcagtgatgtctatggatcgtgaattgatgctctctgaactcacgggtgcacgatctgaattgaaatcaggagagagtcttcgaatcacccatcttacctttgctcatgcatctcttatgcggtttgctctaagcaattgggttcccaactccaacaagaccgtagtgtctcaagatgtggcatcattcttataccgcatcacctctggagcttcaattgatttggcctcccacattctgaaccagattgtttcattccgaagaggtaaaaagccaacctttaaacttgtttttccaaatctaatctttaaggttttatcctctcagaagaatgtggcccaatcacatgaaacacttgagcccccaatcactggacctacattccaaccctcggaatactttgatggcgtgtttcaaaaacggcctaaggctggagctgctgctgctgctgctgcaagttcaagttctgctgctgcagaactccaggaagtcaagaatgaagttcagcacgtgaacaatcgtcttgctgcaatggaggaacttcagcaagagatgtctaagcagttgacatccttggtcaaactctaccgagactaagtttttggtttctttgcttttgattggacatatttctatttatttttctttgtttcctttggccctccgataaacaaaaagggggagaaatatttgatttttacactgcttgtttgttttgcccaactctggaccctttttccagggggagtttgttgggttttatgc

SEQ ID NO: 340294 - DNA, 772 bp, Cannabis indica
tttttttttttttttgagttatatcgtgttatttgatcttatagaatgagttttatttcaattataattagtttgagttattttgtgttatttatttttatttattatgttacagaatcggttatattttaattataattggtttgaattattttgtattatttatttttattcgttatgttatagaattgattctatttttgtttatatatgagacatctacttttggtgattttttcagtaatttttttcggtgatggtaactttttcagcgattattctgtcaacagtgacttttccaataactttttcagtaactttttcggtgacattaacttatttattatttatttaggccataaaaaaaataaactctaataatttttccaatatattctgtaatttcttatgaaagacctttcgtcttgttgtatttcaatttctttttctattttatgtttaatgtaaagtgtggttcatacaaaataaaaatgggctccacataagttcaagctttttccaaattaaaaaaaagcccaacaacaacatttttcacatcaacaataagttgaaaaataccacttttattaatcaattaatcaaatttacctctaattttatatttaattgaaacatacctctttttatatgtaatgtacccaaaataccctgacataagagagtcatatagagtatcttagagtcaaaggggcaaaattagtacaatgtttaaaaaaaaagtaaaaatgatagactttaaaaaagaaggtaa

SEQ ID NO: 340295 - DNA, 1028 bp, Cannabis indica
tgcaaccaatgtaaggtttcttatactttgtatgtgtctattttatatcgttttagaagttcatatttaggatgttaaataacatacttgttagtaaatctaacatcctgttaaaataattccaacaacttctcctttttccacgaaagtgcgacatgctcaattgcctaagggattttgtttgtctgagtctctgaaatataaaggtactactaacccgatagactatctagaaaattttaatactattatggaagtggaccagggaccccaacttgcgaaatgtcgcattcttgcggcaaccctagaggataatgctcacattggttcagccaattgcctgaagaatctatatcgacgtgggaaacctttgtcgacctttttctcacacactttcaggccacaatgacgtataggccaccctataccactctgactaatattaaacaagaggtcggtgagtccctgcaagattactttaaacgttttaatgctgcagtaacaaaagtagagaaggccgctgagtcttcgttggtttgcatgttaataataggtgtcctaccaagaatcgactttttgaaggagttgtaggctcgaaggcctgaatcgttggtcgagtttttcgctatggaaaaaccgcataaaaggattgaaaattctcttgtcgagctaaaaaaaggaaaggataaacgcgagtcgccagtactgcgatcacgatctcgcagtcccagagggaaaaattccagaggaagaagccctagaagacgcagtccccaaagatagcaaagtccgaaattggccaaatcccatccaaagaaagagtcgtctcctaagaggaagggaggtccacgttttgtgaactatacagaattagcagtcccatgggaccatatctactcaatcaaagaaaataagggggtcttcagaaagcctcccccaatcaggggaaaccgtgacaagagagacccaaaaaaattctgcaagtatcacaaggatattggccatactactctggaatgttggttttt

SEQ ID NO: 340296 - DNA, 1140 bp, Cannabis indica
atgtacataaatgatacatatttagtaactactttgacacttacggatccctcaacttctcgcaacggtcgcaacgatgccatgcacctcctatccacttcaaactttcgaaatttcgcaagcacatatctgattcaattgtaatcaatgtaactgttattaaaaatttctacaagtatatcataatgagaaatacgaaaataacatttacttaccccggatctaatgtgttgctaaaaacaaacttgtaaaacccatattggttacgggggatcgcttccttcgtcttgaaaggcccgacaacagttctgcccgactcaataaattgctcgtaggccttatcgttgaagtcatcctcaattaaaggcacattctccgactgtgtcttctttgatttgacgagggctttgcctttattccagaaagacgccacttcgactatatcaaagtcctcatcgtcgaaggtcttatgtgcagcaccttcatcttcaacagattttgtagcagatagtgaaggcgtacttacagattccaccacattttcctcggatagaccaacaacattagtcttcgaacggacaggggacttcaacggggactcctccacggcctggctgcactccgccttcttccccatttccgcagcagcatcctcctccaactctcggtcaataccacctacaccttctcctttgtccataaatttcaaagaaaatgatctcaactgagactttaactcattggagaagtactccttcaactcgttgatagagctgacaaagtggtcactgctctttcttccttccgagtcggagtagtagttgggcagtattacgggattcgaagtgagcgttatctgttaaacataacaaattaaacaaatttaatttttcaaacccaaaataattaatatcaactgaaatcacattaccacattataaccaaaattcgatgtaccttgtcgctgttgggacccccattgtctttcacaaatttgtaagcggacttacattgtttactaccccaaaaatcaacggggagcactgttcggtcgacatatccaaagttccactccacgtgagtcaagtacaccaactgtgacaaacaaacaatgtattagtaatacattcgactaataaa

SEQ ID NO: 340297 - DNA, 1349 bp, Cannabis indica
gagtcattatattctgttgcacccaatgaaaggtttcttaagctttatatgtgtttatttcattgtttttagaattcatattaagatgttaataaaacatacttggtagtaaatctagatcctggtaaaataattccaacatctggtcggcgaattacaggctcctaaatcataataatcacaacactgataagtgacaccctaaatcacttcccggggacttaaacttgaaactaaaagttttcctatcaataaataacatgacaataccctaaataacacaaaaatgggaaaaactagggttcccaaatttgcccccaaccggtagaccggttccccaaccgaaattcaagttctggaaaaaattcttggaagccaaccggtagaccggttcctacaggcctccctgaaccggaatttcggttcagtgcaggaatttttcaaaaattcataactcgaccaatccaatcccaaaccaaatcaaactttccagacatgctaattagaccccaaagatcaattctaaagcaataaaacaaccacccatacacagaaacacaattcaccattaaagctccaagctttgagttcaaaactcaaacttggttaaatccaactaacatgcatcaaaacctgctctaatccactcatttaaacatgaataagcctctgaaaacaacaacaaccaactacaacaagcacagcaagctaaacaacattttaccattaaaaccaaagtcttgagttcaaaactccatactagcttaaaatcaacaaacaaccacaaaaccctgcttgaatcatcatattaaaacataattaagctttagaaatcaacaataaacacaaacaataatcacagccaccaaatcctcaagcatgcaaaattttcttccttaaacttcaagaaactaaaagaaagagttgatggaagcttaccaacaacttgaaatcacaaaacttgctaaaaattacttgaatttgatgaagaaacaatgaaccctagctactctaagggggccgaaaaagagagagtgaatttgagagagaaagagtgatctttactttgctttgttttcttttgaaaatgatatagcactcctagtttaatcacatgaacttagcaaaataactcagccaatactcataaaaatcagcttcacttaacccacaaaagacaaaatacaacttgatacaaaagaccatgttgccctttaaaacactaaaaattactaaaagtcattatgggtacttttgggaaattataaattcccgaccaatcccgacattcccaatgtctaacaaaactcgcccactatactaaaatattagattgtgattctactgag

SEQ ID NO: 340298 - DNA, 571 bp, Cannabis indica
tcgggactcgggacacgaactcgaatcgagacacagacttggacctagacccgaacctaggacccagaccgggatgggagactcagacctgcacccaggacccaaacctagattggggacccaaactcaaaattagaaccagaatcaagactcaggactaggactgagaccaaagacccaaccccggtctcggtcccagacccggacacggacatagactgggacccaggatccgaatggaaatgagaccgggacccaagattgggatccgaatcttgacccacgacctggggcttggacccgacccgtagttggtgtctagatcttgcaattgtaccaagacccgaacctggaacaatttctagaccaggacccaaacccaaactcggaccccgagacccgaaataggaacaagaaccagaataaggaccctggaacaggaattggacctcgatccaaaaccggaccaagacacgaaaccgaacacagacccggacccagactaggatcaataccaggactcaggcccgaacgcggacccagactgcgccaggacctgggacctaggacc

SEQ ID NO: 340299 - DNA, 797 bp, Cannabis indica
acaataaaaacatccacccaaacacagaatcaaaatccaccattagagctccaagtttgagttcaaaactcaaacttgattaaacctagctaataatcaacaaaacctgcttgaatccactaaattaaacatatttaagcttctgaaaacaacaacaactaatcacagcaaccacagcagcaacaactcaattcatgcaaaaatatcatttttcttagaactcaagatacttaagaggatagtcatgagcttacctagagcttggatttccctcaaaatctgcttgaatcgctgaagaaacaaattgaattcccccacctagcttctagggttcatgaagagagacagagacttgctttgtttttttttttttttgtaaaatgatataacactcttattttaatcacataaacttaccaaaataactcagccaataatcataaaaattagcttaacttaacccacaaaagaccaaatacaacttgatacaaaagaccattttgcccttttaaacactaaaaattactaaaagtcactaagggtattttgggaaattctaaattcctgactaatctcaacattcccaatgattaaaaataccgccccgctatactaaaatactaagatgtgattctaccgagccatacaccgcgttgcatgttgccaggcactgcacatgcataaatatgaaatttctatatatgacatacaaaatgcattctgaattcaaatagatcatcataaataattatttaaatatcaataaataattttcgtaattaaaccctaattatctg

SEQ ID NO: 340300 - DNA, 634 bp, Cannabis indica
agagagagagagagtttcctttacttgctttgtttttgtgttttttttttttttttgaaaatgatataacacttattttaatcacataaacttacgaaaataactcagccaataagcataaaaatcaccttaacttaacccacaaaagacaaaatacaacttgatacaaaagaccattttgcccttttaaacactaaaaattactaaaagtcaataaagagtattttgggaaattctaaattcccgactaatctcaacattctcaacgattaaaaattccgccccgctatactaaaatactaagatgtgattctgccaagccatacaccgcgttccatgttgtcggacactgaacatgcaaaaatatgaaatttctatatatgacatacaaaatgcattctgaattcaaataaatcatcataaataattatttaaatatcaataaataattttcataattaaaccctaattatctgctaatttccaaatttaaattaaacggtctttacaactatccccccattaaaaggatttcgtccccgaaatctaacctgaataattttggatatttagctctcatatctgattcgagctcccaggtggcttcctccaccttgctgtttctccagagtac

SEQ ID NO: 340301 - DNA, 544 bp, Cannabis indica
atgaaaaacgaattttgaatcaaaagatatgaagaaaacaagtttgaggcacaggggtatgcagtgcatattgcatacccctacgcgcgcggaaggagttgtctggccgaggaacgaggacgcgtgcagcctctatggccgaaaaacataggcgggagaggggtaaacttcggacacgcctcttgtctgaagcgattttgtccgagcgagcctcacttgtccccattcgcgcgcgtgtgtgcattcaaaacctgatatttttgttcaaattcaaaaaatcataactagttcattaaaaattcaaattaggttctataaaagccaaaattcattaattttttgtctactttccagtaaaaataattccagatcgaaattaataatatttcattaacacacattgggatttctaaactattatcacataagcacataaaccacatgaaaccatccaaatcaacacaaatcatcgttttaattcatatttcatgaaagtaaatcattatcatggctctaaggccagttgttgaaatatgttttacca

SEQ ID NO: 340302 - DNA, 762 bp, Cannabis indica
acgtaccccctgttactcgtgttggtaatgctgtaactaccctaaaatcctacactgtaccaacacccttaaaatcacatttccattagtgttagtagtgtgaacatttaaatgaatagcctggagcgtacgatcctcgggacatcagggcttctattgtttagtcgttgggcgacaaatcttttgtaaatgaatagaaagcttttgtaattgtattttgtaaacgggatcccagaattttataagtataatatgttatgttttaattaaaaagcaagattttaattattcacgtttttccaataacctcattgattagcaacgagctgcacaatatgttaaaaatcacgttaacacgcctatgctagttagggtgttacaactagggttctaaaaaaggcccaaccaggagatcggttccaaactggaagactggttccaacagaacacatcaaatagctcagaaattaaaaacactattagagagccaacttaagctctctaacttcaagtttgagtaatccgtagcacaactagctatcttagcacaaaatcaactaaaataaaactatcttaaccccagaattcaaacctaaactagctgcacactacagaacctcaaatcactaaaatcatgcaattaacctatcttgagctaaagaaaaccataaagaagaaggctaagcattatactttgaattggacctcctatttctgattgaaaactctttaattgctgtaagggtagtttagtcatttacc

SEQ ID NO: 340303 - DNA, 665 bp, Cannabis indica
atccatatatcatgaatactccttttccccaaggatttaaaaaccctcacgtctcgtcgtatgataggagcactgatccagtctcgcatttgaataaatttaacactataatgcgagctagtaatgttacaaacaatttacgttgtattttgtttcccacctcactagttggagtagcaagcagctggtttaataaatttacttattattccattacttcttgggaatagctgtccaaggacttcaaaaagaagttctaggctgcaagggataggcgacccgaagcgtcctcactaaccaacataaagcaacagcctggcgagacgcttaaggcgtattaaagtcgtttagcacgactgctgcaatagtaagaaatttggatgatagtacacaacttactgccctttaggcggggatcactactaatctctccaccattgggggcgaattgtgggatgccttacagggtcgtctagtgagaacatcaccgagttcaacgagagggcttaggtatttgtttgaaaggaagaagctcgaaaagagatgaacttgttaaaaactggctcgggaggcaaacctagcactgtttcaacaagtacttgttgggttttatgccctaaataaaactctatttcaatgtaatccattttattcaacatcaataa

SEQ ID NO: 340304 - DNA, 578 bp, Cannabis indica
tgttcagttttgctgtagcagaattactttctgctgttgcaaatgcttacagtttttatattttcgtatatacaactgacatttgcaaaaacacggtgtttcaaaaatcaccggtatcggaaaagtcatcagtgccgcaaaagttgcatgaaaagttagtatcgtcggaaaagtcactgtccccgaaaaaagtcactagaaaagtcacaagaaatatatgtctcagatataaacaaaaatataaccaattctataagataatgaataaaaacaaatataacaaaataattcaaactagttataattgaaatataaccgattttgtaatataatgaataaaaataaataacacaaaataattcaaaccagttataattaaaatagaactggttctataacaatgttataatgaataaaaataaataacatgaaataactaaaacctgttataactaaaatagaaccgattatataacataatgaatgagtattttcgggatagatatggtatgagtgtaattatttggtgagttggagcatgttgaatgaatatttttgtttgagttattttattgtaa

SEQ ID NO: 340305 - DNA, 1036 bp, Cannabis indica
tatgcttctgactctttcctctaaccatgttctttttgttccatgcagacatgtctcagaagatgcttgatgctctcaagaagagagttggaggaagctcaagcgcatctcctctggccaagaaatccaggggcggtgaggcgaccccttcaaaggaaaaggcaccagctggagaggttattgacctttctgaggagctaactattgcgaacctctctactcaaaaaactattaagtccaaagattctcgaggacgaagttcagacaggcctaagcaatcaaaaggtggatctgagctggccaacagtggatccgagcagatgcgggctcctactccacctttgccagtgcttccaaaggccaagaaaggcaacaagatgctcgcccattacatgaattggttggttcctgaggttagtgagcaactgcctggtgctggcaacgactcttctttggagctgctgatgggaggagttttgaaggatgtcacaaagttaagtctttcttgaccgtttcctttaatcctctttacttggctcaaattgtaacgtttttcctttgtgcaggttggtctaaagttggcttaaacttactcccaagctaagtctgctgtttctcgaaacgcggctttatccaacaccatgcgggatgaggtggacctggccaagaaggatggcgatgatgccagggtggaacttggagctgtttggattgagctaggtgaagtcaacaagaagctttttaatgctcagaagaaaataacttagttgactaaggatctcgaggcttctgaccaacttgaagaggcttctgaccttatctgtagaagtgaatagccttcaagatgaaaggacgtcccttcgagctatcctctgttgactgaagaggagatgaagtctaaggaggaggagcttaaagctgaggtggcgtggctggaagaaaaagttcatgccttagagacacctggtctcgagctcttttatgacttttggaaggctaaccctcatgcaaactttgattacttgggtgaagccaa

SEQ ID NO: 340306 - DNA, 782 bp, Cannabis indica
ttttgtttgagaaaagtcgttagctgttctcgctattgaaaagtcaatttagaaccaatttttaaaacattactattatctatggggtctataggtacctcaatagtgtcttccacggcttgggccgctgcggcatgatcgaggattcttggatccagatctagtccatccgtatgcagcacctcttcgatcctaagaacctcctggcgaggaggtggtgcctccgatatatagatgacatttattgacttcttttctgcgagtttgactgctgcattatagcattctcgcgagtccgactagattcctcgcacagagcctactccagcgagagtagggaacttcatcgtgagatgatagattgatgttacaatcttcatctccttcaagattggtcgacattatatgccaaatactggtcaattatcgcgaagtcaaccattgacttgcctgttacaggggcagttcccaaagtaatcgggagtttaatcatctctttcagtgcaatgacgtcgccggtaaaaccgtatatactcgacgttacaggtcgcatatccttctcatgcaaccccatttgtttaaaggcttggaagttcaagagattcactgaacttccgttgtccacgagtatacggtggacattatctccgccaatattggcgacaataactagtgcgtcggaatgcgggtgatggacccatctcgcatcgctctccataaacgtgatgtcgtcgcattcccttttaaataatttctctggccgctcactgagattgtttaca

SEQ ID NO: 340307 - DNA, 577 bp, Cannabis indica
gagaaaattaaagaaaaagttgatacaaaaaaattataaattttatgggtttttatattttttgtatgaaaatgtgccttttttacaaaaagattattttataagaaaatttaaaaaaaaaataaataaaaatatgggaaaatcatataaaagtaaccaacaaggtataaccagaaggatataaggggggtaaataggtatcttatactatttctttcaatagttaacttttttttaaaaaaatttcctcaacaaaataattttgaaaaaaatcatatttatacaaacttatagtttaaaaaacataaaaatgaaaattgctcaaaataaaaaaaagggaaacttacaaaaatactgaaatttgagttaacttttataaaaatactgtcacacggaaatctttactaaaaaacactgtgtttaaaaaacactagtaaaacacaaagcaaaacagctcaaaacaacagtagaacaccaataaaacactagtagaacacaagtgaaaacttaacacagtatactgcagtatgaaacttataaaaaaacacagtaaaaaagtaaaaaaaaccgcctgaca

SEQ ID NO: 340308 - DNA, 742 bp, Cannabis indica
atatattatttgcataaaattgttcagtaaattaggagaatttcaagattaaacttttagggttgttgtgtttttaatgatgaaattatatttagattttttgattataattataattgattgaaattgattatgcataaatgacttctacattgttttctaatacggctacctatttccattaccgatttagtccaaaatcaataggtttaatgattttttttttggttttgaaatttgcggattaaattactagatctaccgttgttttggatgttttacgccgaattgaatccatagatagagtagaaattcaatcccgaataaaacccttccttttcccgaagttttcgttgcgtttttggctggaaaacagctccgacccacctgcgcacgaaccgagtcgcgtgactcgcatgaggaaccggctggaggaagaagaagaccctcctctgcgatgcccactctcggcagcagtgtgtgggggcgcgtgcagccacttccgatgtcgtttttcgacgtttctttttccagcgtgcttataattaaatttatgatttttctatgatttttaaataattttttgactccgtttaataataattattattttaatgataattatgtagttaaaaaattattaaaaataatttttgatgatttttcgaaatccgtaaatcattgatttttttttttttgtagtttcttctcgttctgtttgacgtagtcactctcttatttg

SEQ ID NO: 340309 - DNA, 584 bp, Cannabis indica
cgaattagctcttccattatttcattcattttttgcacttatcttatttgagagaagagagtttctttgttttgtgagagcctagttgttcatttaaatctcatggtgggctttgaccctccctcaacacccctaagttcacctatcattatatatataattatataaaacaaagcacaaataagttgatatgccatgataaaaacattttattctatgtttttttttttacattgtttaatttatttttcaaacattgctagaaaaatgatatttctctttggtttttaactcagtttatgtcatgacccgagtcctaagccgtggcaaatatgtaatatccacaacttaggtagtaaaatgtcacaatttgacccttttaggaagataacgcttataaatgatccttgaatttatatcacaaaatacttattgaaaaataatggaataactcctatatcgataagaaaatattagcaacaaaaccaggataacttattaatctaaaaaaaacaataatatcccaacaattatgtagtcactgaatagataaattaaataagtcaataaaataccaaaataat

SEQ ID NO: 340310 - DNA, 510 bp, Cannabis indica
gggggttatgcctgttctggattcaggagcccgaatgtgggactgagttacttttctttggaatcttaaatccagaagagttgatactgatgagttattcctatatgcctcgattatggtagatacgatttggagggcccgcaacgacaacgtacatagtaaatcaatgggtaacattaaacattatattgactctatttcttcttgttacaaagattatggatattgccttctttcccctccacagtctgttgggactcaggattggtctccgccgctggaagattaggttaaaatcaactgcgatgtcaaagtcggaggtgaaactatgtgtgttgtggcaattgcgagagaccataacgaattagtattgtgggtggcggttaaaaggctacacttctctgacccactcactagagaagctggaacctgtcttttagccatggagacggcggtgtcattgcatcatccttttgttttggtagagagtgattcagagattgttatcaa

SEQ ID NO: 340311 - DNA, 521 bp, Cannabis indica
ctcagttattgtagccttttggagctgtttatgcttgatttccttgtttcagtttatcagtgcattgtagttcaaattcagttaattggcgaaaagatgggacaatttggtgcaaaaatctgctgaagcttccaaagacaataagtagacgcgactatggaatggcctagtcgtgacccttatatctggtcacgactaggggaggttggaaaaagctcatttttccatctttgcctgtggtcacgaccagccattaagtgggtcgcgacctggtacgaaacatgggatttttgacctaatttcgatatatttccaattggaggcacaaccctaattcctatataagggactcgactcagattgccaaaatcatcaaaaatcggcgccgaaaagtgaatgaaggaggagaggaagctatcttgaagatccagagcgaaatcaccatctagtttctttcttccactctttattttctttatgtctatttttgtttcagatttaatcatggatgtttattttat

SEQ ID NO: 340312 - DNA, 888 bp, Cannabis indica
gtccatatgtctacagagccaaactcatgtatattcttggtagaaggctaaaagcttagaatgctctttaagggggaggtacctagtgttagctctccaccacccttggaaccttggggctaagtgagctactattggtcaatgggactagtaggccggtcatatgaggaccacgaggggactcatatgtctccatgagttggaatactcataaacactatcgggccgacctggtagtgagtctaagaatgctgccagaggttaacgggtatgtttccattggcttgccggtatgacacttgcacgggacgtcgcctaaacctccaagagatgttgtggtgtgccttgaccacgagtcttaacacgagatgccacgggtagtcatttgtgggctagtttgcatgcgcgcatgggatgtttgcaccatgctggaaagagatagaggtttgatgtatgcaaatagtttggtggcttgtctcgagggcctgccaacatgcgtggaggcatggtgcctttaggatcggtccatggacgtatgggaatcattggaaaatgagggagactgtttggacaatatcgaatggggcatgagaaatgtgtggcacgttggcttggtgttaacatcttgccacacttactacctttgtcacgagtgactaggtgagcgccggtgttaatgtttgccttatcatagtgggaacctatggacagtgtgagtatcttggctaaagagcctggatgcatggatgcactcatggatgcttgcaagcataactcgacgggagttattcgagagatggaagtgtgcacgaggcacatggtcgcgtgaaaaatgagcccattgttactcagatggatggaaggctgaccttggcttagagaagtcaa

SEQ ID NO: 340313 - DNA, 549 bp, Cannabis indica
agtctatatgtgcgatatgttacgtgatgtcggctgagaagtgtgcttggaaaggtgtttgtctatccgctccttttgcttttcagacggctccttgtacactggctctctttgaagggtcgtgttctctggaattagcttatgttcctgtaacttcaaggtcgtgcacagtaatctccagtcacgatcttgaatagggaggctttcgagaatttccgcggcttttctgcgagttgcgtctagcacaggtcgagccagtctatctgcgaaaaataaggaaaagcgggttagctcaaaatcacaaggtaacataaaaattaactaagtaaggaaatgtgcgacgtactaggtcgacgattaaaatcagtcctaatttctgggacttcaaacacgtaaaaccacttagatttccaatcctccatattggaaaccatgccttccaccccgttgatttcagaagtggcccacttgatgaaacaatagaagccgttgtggagacccacgttctttatgttggaattattttaccagaatcttagatctactcac

SEQ ID NO: 340314 - DNA, 1278 bp, Cannabis indica
tctaaacgcccccggagggtggacactccggccccgagccatgactccgggattccctccgaggcggaggaatacacagtgcctctcggcatagtgttgactttgattcctggagacaaggaaagacagaatcttcggatagccaagcacaactacgcccttggcgagtaaacccgagggcatgctgaagtgggtcttgagagaggagcagcaaaacgtcctcaacgtggaggacttccggaatccgtgggacctgaatatggatccactgacgcactggttcaaccacttcttggggcccaccttggctccttttgcctcggagatgaccagcgagtatgtctcccacctaactcaattctcgcccaaacggtacgctgcttgtgcatccttgaactccgtctaccaggttcaagacatcagcaacaccatggctgcggtaagtacttgtgattcatttctttcctcaatattttgtctaaggcatttgatctcactcttttctcctttttcagattactgcggagaccagccgcctctccaggaccatcgtgaatcatggcttcgtcatgtccgaatttggggccatagacgaggccatgaggatccttcgggacttgtctgctgagaggcgggagatctaggaggaagccgagcgaagggaggccctcgctatggcgaagctcgaggaggaggccaaacaaagggaagcccagacggaggcgaggctccgagaggaggtccagcagcgggaggccgagctggaggcgaggcatcgggaggcgctggaggcggaaggtgaggctgtcgccaaggccatgcgcaagcttcgggaagctaaggaggccatggacgaaatgtccgccaaggtgaggtccttagaggagttgcaccaggcggacttgtagtccaaggctaacttggccgtggagatgaaggagctaaaggacttcagagaccaggccttgaagaaggctaaaagagatgagctcatgtctcctttctcctgcaagcgtatcgacgacggcgtctacatggcctggtcgacaaatggccaaagtatcaagctcgacttctatctcaagcctgaggatgttattgctaaatttcgggagaggaagaagaaacttgaggccatgcttgaggcgcgtattggtcctcgccttcctcctcgcattgactaggccgattgagtccagcccactttaccaagctttttctcgctttctctcttttttttatttacagttatttttcttttattcaagacaatcttaa

SEQ ID NO: 340315 - DNA, 471 bp, Cannabis indica
aaaactaaaaattaaaatccaaattgttcttaaaataaaataattaattcgaaaataaagaagatttcgagtttcatcttcatcttggactatctccacccttctgtccaactatccgattcaactcgctaagatagcatccgagtttaagtagttgtggctgaaataagaagaaaaacaaataaacatggttagtaggtccataattaataatctaagtggattataattcactaaaacacatcagtttataggaaaagaaataccttgtttctttgctagaaatttagggcattggggtttccagtggcctttttcattgcaatagaagcattttccttttggtgcatcaccaagagtagcagcctttttctttttaactgttttcacagcttgaacaggctttttgctattcttccacttcttcttgttcttgggtttggaagtagaggcaaagtttgcctcagcttt

SEQ ID NO: 340316 - DNA, 516 bp, Cannabis indica
aaaaaaaatggaaacttcatctttgtaaataataataaattttattggaagagtcgccaaaaaagttagtgtcgttaggaaagttaccgaaaaagtcactgtcgccgagaaaaataactagaaaagtcacaagaagtaaattttttaaatataaacaaaaatagaactggttccataatataatgaatgcaaataaataatacaaaataactcaaaccggtcataattgaaatataatcgattctgtaaaataataaataaaataaaataactcaaactaattataattaaattaaaactggttctataacaatgttataatgaataaaaacaaataacacgaaataaatcaaaccggttataactaaaatagaatcggttatataacatactgaatgagtatttttgaagtagatttggtatgagtgtaattatttggtgggttggagcatgttgaatggatgtttttgtttgagctattttatttaaccggtttttgtgtgtgtttttatctta

SEQ ID NO: 340317 - DNA, 583 bp, Cannabis indica
gagagagagagagagttttgttgaactctctaaggttcgtgtgggattttgagctagggttagctcatttgtgcttggttttgttctatgcagaacgacaaatcgttttggttaaaccatctttcgtgtagggataaacgaccttggttcttggtcgttttgttaaagctgtgaattaacctttttgggacaattttgtccctgtcatttctgatcaattcttgagttggtgtaggggcattcttggaaagccaagaaaatcgtacagtggtatcagagctctggttcgagcatcattcaactcaaggaaggaatcaagaagattgaccaaggctggaagaagaagaagaatcacaacaagctgttgtggatagtggaaaagttgtggaaattccactgaatgatcctatttaggatactcaatcaatttctcaaaactcaactcagtttaatttcgattttattaaaatgagtaatatcaaagttgacattgatcgttttgatggatctggtgattacaggatttggaggagaaagataagatccctattggctcaacagaaactacttagggttcttgaag

SEQ ID NO: 340318 - DNA, 844 bp, Cannabis indica
agcaatgggagacaattcagcctttggacattagaatggtataagagttcttggatgtatttcaagtagagcttcttaaattatcatcacaacagagatagactttgttgatgttttggtagttagagcagaagtggttctgaggcaccatatataatggctccaacaaaactcaaagaaagtaaattggtgacctcaaaggatgatgaatttagggtttaaccaacctgttgtgtcattatgggtggcttattaagaaggaagatagatcatttcctatgaatattaactatcaaagtttatgtcaagtttttaatcaagaataaatattctcttatttagggtttagctcaaagtttaagcttttaaagctcaaagcttgagatttaatggtttggagctagtttggagggtttaaggttgaggaaaattgtgtttctggctgttcaaaactggaattctagatggtaccaaccggaattccagatggtactaactggaattccatttggtcagtttttgaaaaagtcaaattttgtattttggccataacttttcactcggggtgttcggtttagacgttctttatactgtttcgaagcttgtaacgagctctatcatatgatgtatgttttagagccaaaatataagttttattttagtgtatttatgatacgggattcggtaggaaaccctaggtcatcctttgcaactgttgagtagtgttttgggataaatgcttattggtttaccgttgatgtgacataggattgagatcaacgggaataattctccacttagattggccagcatgtatgaacctggattaaaggtaagaaaagta

SEQ ID NO: 340319 - DNA, 598 bp, Cannabis indica
tatcgtttgttgtatcgggcaacgatagtgacataagtagctcgtggttaacgagtggtaagggtactttataaagtaccagtattgtgtgattacgaagttgtgaaataacttaagcatgttattatgtgatgatttgtaactggatatagctttgttataatgtgaatgaatggatttttatattgcttaagaaattagtttcttttcttgcagaatcttagtgactcgcgaaatgtaagaattcgtgcttatagagatgtaagattggagtgctttatgaagcactgagattatggagttatgctaatgcgtgaatttagagtgctttatgaagcactaagattatgtagttatggtaaagtgcaaattagagtgttttatgaagcactaaaggtgagtatttatgatgataaatgttaaggaggttgtaagaaacatagagattgttgattataaataactatgaatatacttgattatgtaataagtgtgctctcataggcattaagttatttatacactttgaatatgtatgaccaattggtatatagattacattgtaatgaaatttgctggcactttctatgattttata

SEQ ID NO: 340320 - DNA, 1060 bp, Cannabis indica
atatatatcaaaacttatctttattttcccatatttttgtaaatagcccattgtgtaatggtaaaagtggtacaaactgagattattctgtctaagaaagattgactttaaaggtttgtggtagagtaccctctacactttctagcaaccccggggagttctagtaaagtgtgggacgaagcggtaccttggcaaccttcccaatcggcctgggaatatctcatgtatatacccttaaattattacatagttgaactttatactaattaaaaaaatatgaatgaagaagatcatcgccgatttgaatatttatatccattatatcttgcttcattaaatgaaaattctagtgctactgaaggtactagtaattttatcgaactagaatttagtgacggggaggaagctttccaatactattctttttataagagtgatagttccaaaaagtggaaggcttggtacgagtctcatcgaccacgtccttgtgaacatacgccatcttttgcacatctttatgatgatgtggaagaacaatcctacaactctctctataagaatagtcatgatgattatagttggaagcctgagtacgactataatccattatatgagtggaattgtgaaaaggaagattcttggtttcttataactctcagcatctatacaatagttccctcagtgacactattgttgagttacaagcatctatggcgataaattgcgagatgatgaaagacttacttgctgagttgaaacaaattaagcaagagttgagcaaattttctgatcacctggtaagttcacatgttaatggttttcctccacaaccgctgaatgaaaccacaattttgacgaggtaagggtcacctctacctctagtggtgaaaattttaaagaatccactctactgagtacatatgagggttaccatactgatgtggtacccacattattcgtaaaggaggatgatatcaccactatccgaaatgaagctctttctcattctaccattcttcccctaattctggatgaaagaaatgctatcatactgatgtga

SEQ ID NO: 340321 - DNA, 529 bp, Cannabis indica
acttctgaggaggacacgtgtcactttgagaatacaaatcaacaaatataatagtaattatattaagtgaaattaaaagggaataactcattaaatgtggagatgatagagtatatttacaacttgctgactgttaagtcttaagcgagataaggatatacaaactattgtctcacgcattgacgagaaaccatttaacgtgagaagtataaaacgaggcactaacctcactaagtatgaagagatgtaaataggacatgttaactgttacaacacttagcgtataacgtacattatacaaactaagcataacagttgaatgaacttggacaacggatagcgaagtatccatctcgctataagaacgcatactctcggtatcttcactaatcagcttcagacatctttcaataagattcactgctccgtcgagttagctctcttagatagaagctgacattcaaatgatgttaattgctaaagttcatcttgtcaccaagaactgagattgtcagatggagcattatgt

SEQ ID NO: 340322 - DNA, 1073 bp, Cannabis indica
tagtatgtaagactgtgaagaatccaatcaacaagaggaagaatcgggctcagattttggtgataccttgctacagaaaggatacaaagggttagagatctgagtgggaggagtaatttaattccgatgcaatgactgtaaggtttctcatgcattttatgtgtttattttcatcgttttagaaattcatattaggatgttaaaaacatacttgttactaaatctagatcctggtaaaatgtatttcaacaactggtatcaaagccatggtaattaatttactttcaagtaatatggatttaaaaccatgtatgtgtgatttggatgtgattcatcttgatctatgtgtttattggtgattgattgatgtttgcaaaatttttatgaaaaataattagattttcattctggaattatttttattagaaagtatggaaaaaattaagcaattctgtaatatcaagattaaaatagtatttaattttttggggggatattaatggtgcgaggataattatctcatttatttgtgttgttagtgagtagagactattgcttagagtagttgtaccaattttctaaagagagttaaagttgtattaactacgaaagtaaaatattatggtattttcataagtacgtaatcgtttaattaaagcccgatatgaaagtccatgaggttttctatataatatatgtatttgatttaaataattgtatgagtggtattaaataatattattatttaattattgtgttaaaattcgtaagtttagagaaattcgcaggtttaaaaactgttttactaaaacgaccatatctggagttttataactttgattgaggtgatactagtggcgttagaaagatcattcaaagatctataaattttgtagaaatagctatatcataattcgtaatttttctagctcaaaactaagctctaaagttacgagattgagagcttacaatttaaatttaaaagttagatatttgtttatttaataatttatcatattatgttaatattattattattcataaaactaaacctaataagagtcagatagtat

SEQ ID NO: 340323 - DNA, 579 bp, Cannabis indica
atgcaactcaatgcaaaagatgacaatctacttaagctaatattaagacttgtcatctcaaaggttgtacaaaaaggcaggtccccaaagacctagccagttgcgccttgacaaccaaggataaattggcacccactaagttcttcaaagaactaagcatgcttgtttcaaaaggaacaaacatgcttgacaaccaacatgaatacacttatagaaccatacctccaaaccaaaaccttgccagaaagtagggattaggggaatagctactgggtgtccaatcctagacagcataacacacagacgtggtatcccaatacaacctctaagaagtgttaccaagaacaatcatgttggcggacaaatccaaccaagtgtagatgggattaactacaacattgacttggcctccgaaaggctggctgaccatggcctttgcaggttggccggtgatggaatcaacaagctggccggtgaaggatgttggaaatattttaccaggatctagatttactaccaagtatgttttattaacatcctaatatgaattattaaacaatgaaataaacacataagagt

SEQ ID NO: 340324 - DNA, 553 bp, Cannabis indica
aagtgattcattcctagggatcaccccagaaaaaaaaaacactataaataccccacaaacatactaagaaaggggttgaggattctggattaaaaggaatcaaagagagaaaataggagagaaattcaccgagaacatgctcagtaataaatactctaattgataacaaagactcgtggattaagtctcgttaatgccccaaccacgtaaaaatcttatacattaaacttcctacaacttttcttatatattatttaattggttgctgaaaacttcggtcaacagtgagtgttgattatgttatagtggaatagacatatatttcgatataggacgagagtacctatatggtttatgtatcatttaggatttttatgcttaatgctcctatgtgtttaaatttacacaagcatagaaaatttgcatataggttgagatttatatgacctagcccgaatgtaagtttatttagtaaatttgctatcacatgaaaattaaaattgagaattaaattatgttaaaccataaaaagtagatgcaattgaaattaatc

SEQ ID NO: 340325 - DNA, 600 bp, Cannabis indica
acccagctaatcccaagaagcttctaacctcagtagctgattttggtgtcggccaatctcgaacaacttaaattttggatggatccaccatgatcccatctttatctactatgtcccccaataaggagacacgagataactagaattcacactttttgaatttagcatatagcttgtgatcctgtaaccgttgcaaaaccgctctaagatgcaactcatactcttcttttgattcagaatataccaagatgtcattgataaacacgatcacacatatatccaggtaatccttgaacactcgattcataagatccatgaatgccgccagggcattggtgagtccaaaaggcatcgcaaggaattcataatgtccataccgagtacggaacccagttcggcctgaaatacccggttgtgactataccgcgccaacctgtcaaaacacacctgaaaaagaaaacacaggcatactatataataatgtagtcccataagcacgtttataaattaatttcactgttttacccttctcgggtcaaaattctaaaatgcccctggctcaccaacggggtcttaacatatcataaatcatataaattc

SEQ ID NO: 340326 - DNA, 540 bp, Cannabis indica
gcgcgcacacgtgtgcatccaatttcagatattttcatacaaattcaaaaaatcataactaatttataaaaaatccaaattaggttttgtaaaagcctaaattcattaatttttcgtctactttccagtaaaaatacttccagaacgaaataaacaaatattgttacaacatattctgcaattttaaaacaatcatcatataagcacataaaccataatgaaaccatccaaatcaacacaaaacatcgttttaattcatatttcatgaaagtaaatcattaccacgactctaaggcacgttgttggaatatgttttaccaggatctagatttactaccatgtatgttatttaaaatcctaaatatgaatttctaaaacaatgtaaataaacacatataaagtttaagaaaccttatagtgggtacaacggaatattaatggctcattccactcagatctctaacccttgtatcttgtctgtagtagagtatcaccatgatctgagctcgaatgtccttctcttgattttggattcttcat

SEQ ID NO: 340327 - DNA, 637 bp, Cannabis indica
gtcttctctctttgagccagagggtaactctagttgagacagtacttgttgaaatattgctgggttggcctcctgagccagttttcaacaagttcatctcttttcgagcttcctctttttcggacgaacacttgagccctctcattgaactcagtgatgttcttcactggatgaccctgtaagtcgtcccacaattcgcccccagcagtggatagatcagtagtgatccccgcctgaagggcaataagttgtgttctatcatccagatttttaactcttgcagcagccgtgctaaaacgacttaaatatgcctttagtgttttgcctggctgttactttatattagttagcgaggacgccttagatcgcctatcccttgtggtctggaactattttttgaagtccttggatagctgttcctaggaagttatggaatgatgagtaaatttgttgaaccagctgcttgctgctccaactagcgaggtggaaaacaaaatacaacgtaaattgtttgtcacattactcgctcgcattattgtgttgaagttattcaaatgcgagaccagatcggtggtcccatcatacgatatgacgtgagggtttttaaattcctagggaaaaggagtactcatgatat

SEQ ID NO: 340328 - DNA, 589 bp, Cannabis indica
aaaaacattacaatggatatggcgaatctcgccgaatagcttgactcgcacaaaggggaacaacccctacccacatggcactagctttgttaatcaaagcatcattggctaaaacatgtgcaacttgatttgcttctctaaatacaaaagaaatccctgccactctttcattttgcagcagccatttaatctgcgcaatgaacccatcgacatctcgacatccttcctcctctttcatcactaagttaactgcttgaaggcaatcggattcaatagagaaggaggacaagttgcgctgtataccggcctgaagacccatcagaatcgcttgcaattcccccctgcaatggcgtgagtttcttctgcacaaaactattagcagccacaacaacccgaccttcatgatcccgaacgactgaactaagcccagctatcgccttccccaaccttcgacccctgcatccacattgaattttaaacgagcctcgcctaggtgacgtccatcttgcctcttctcgtcggctgtccagcttgattcgacacattctctctcaattcatgaaggaacttgttgcaccattctaatatt

SEQ ID NO: 340329 - DNA, 715 bp, Cannabis indica
aaataaataaagctgccaaaaaaatttaaaaacatgtcgacattatatcaacattatgtcgacattatcaaaagcaaacacaattcaattatgtcgacaaaatatcgacatcctgtcgacattcagtcgacaattttaatcgggcaacaatttcacagcatgtcgacaaaatatcaacatcttgtcgacattcagtcgacaatacaaacttaaattcaacatgttaatataatcgacaacatatcgacaacctgtcgatatgctgtcgacaaattcaatcagacaacaatttcacaacaagtcgacaacatatcgacatactgtcgatatccaatcgacaatacaacctaacaattaacacgttaatttaatcgacatactgtcgacaagtcgtcgacaatatagggcagaaaaacacttaaaccaccaatcgacatcctatcgacatacaaacgatatcctatcgacatacaaataacaacataaattaaacagacactcaatctatcgacatcctatcgatatcctatcgatatgtcatcgacaaccctgtaataaacacagataccattggaacactaacatctataacctaaagatcacaaaagctacaaaaaatccactaatctcaacaacattatatgattggcatcaaaatctatgaaaaatatattttttcaaaaaaaaatcttacctttgactgaatttggtggtg

SEQ ID NO: 340330 - DNA, 792 bp, Cannabis indica
tgcatgcttggtgattttgatgttgtggttgtgttttatgttttatgttgatttctaaagcttaattgtgtttagatatggagatttaagcaggttctagtggttgttggttggttttattcaagttggagtttaaactcaaactttggtttttattggtgaaatgttgttttgcttgttgttcttgctactgtgattagattgtgttttctgtagttatatgatggtattgtagagtggtttgagcaggttttgatagctaattagttggatgagcaagctttgagtttttgaactcaagcttgactcatcaatggtgaatttcgtttctgtgtttgggtgaatgtgttattgccttgaaaatgttctctagggtgtataaaagacgtctggaaagtttggattggattgggtttgttttggtcgagttatgaaattttgaatcattcttgaactaaaccgaaattccggttcagagaggcctgtaggaaccgaaattccggttggcttctaggaatttttccccagaaccagaattccggttggggaaccggtctacctgttggggcaattttgggaaccctagtttttcccatttttgtgttatttagggtatttccatgttattcttcgataggaaacttttagttttaagtttaagtccccgggaggtgatttagcgtgtcgcttatcagtgttgtgattcatgtgatttaggagcctgtcattcgccgagcagattgttccacttaggttgaccggcactcctgaattcagaatcaaggtaagatt

SEQ ID NO: 340331 - DNA, 588 bp, Cannabis indica
ctatccaatcaacccaagttttaataaaaccaataaaatttaatgtaagcccaaataaaaagtctaacaatatatgtatccatctataaatatattttttatatatgacattatagtactactatagcaccaccacccccttcttttcctaaaagcaaaacattattattgaactaaaaaaaatggataaactcgatcataaattatctccacacacatatatatatatttattcattaactatatatacaaggactagagcatcaagaagaagagagttgatcagtagttaataatatatatgtacgtcaaggactacgcaccacataatattaattggtttggttgtacttactagcttcttctacacattaattaaggtcacattaatgtgattatgatatgataaagtatttaactaaaataataagtctctcatgcatttatattggtcttgtattaatcataatattgttgttaagctgtttgcgattttcccattttgacctctaacagccaatttatagtttaatatataattaaattatacatttagggttcgtttggaacgtcgtattaggtcgtatt

SEQ ID NO: 340332 - DNA, 1064 bp, Cannabis indica
tgagtgcatgggaccgtaaggatcatttttgacgtaagaaaacgaagctttaacgtccaaaacgaaagaacacaattttgactccattgaagacggttaaccgccaacgaaggagacgactttgatctgccttcgtggatcttttttcttgggttgatcttgaccgttttgaggtcttgagcactgtggagagcttccccaatcgaaaggacgcttcaagagcaattggagacaaagttacactttatcggcggcaaaactgacgagaacgccgacaaccttgttctgatcatttctaaggtgtttttcttagatatttctgtagattttgattccttattttattctaaggtgcttaatgaagtttcataattttctgaatttatttggaattattgtgaattgagtagtttattttataaattaattatgaaaaatacttagggtgctcagaaaaatctagatttattttatatgatgagctatgacatataaactgttataaaattgatagattgaattttcaggcgattatgtatttttcaagaattattgatgttatatcttattttaactatgaaaaatacttaggttgctcaaaaaattcaaaaaaaattattagtgacttagtatagaatataaactgtgttagaatagttagattcgctttttaatcatttttggtatttttcatgaatttacttagttagtgcttaaattaattatgaaaaaaagttaagagttattaaaatagtaaaatatatttttgtaataccatttactgtctatgttgtaaaatggaataggttttataatttattagttgttgtaggtatttattataattatttatgattaattaactatttatttggattttaattagaataaatagtattttagtaaaattttacgtaaaaatgtgttgtaatcatgttttcgttaaaaatgtttatttgagtacagacaatatgtttttgtgaatcaaaataataaatgcttatgtatggtgtgtcatgcaagtgagattgacttatgtgtacgtatttttacgtaagtttctg

SEQ ID NO: 340333 - DNA, 825 bp, Cannabis indica
tgcacttgtctgtagaccgggagataaaacggctcagggcagcaacctttccggttaggctctgcacgtctttgtgcttcttggcggatggcatgctcaggagagcttgaattttctctgggtttgcctcaatccctctttggctgacgatgaagcctaggaactttcttgatttgaccccaaaggtgcatttctttgggttgagcttcattccgtatctccggactacctcagaacattcttctaagtcgtctgcatggctattgcactctttaaaacatgttatctacgtacacctccatgtttcgccccaggaggcctttgaacattcgtttgaccattctttgataggttgcaccagcgttctttaatccgaaaggcatgactagatagcagtatacccccttatcgaacctgaagctagtgcactcttgatctgccgcgtgcatctttatttggttgtaaccggtgtatgcgtccatgaaggacagtagcttaaatccagaagtggcgactaccatctgatcgatcttgggcaaagggaaacagtcctttggacaagccttgtttagatcagtgaagtctatacaaactcgccaggttccgttaggcttcggtaccaggaccggattggctagccattccgggtagtaaacgtcgcggatcatgctgtttgctaaaagcttatccacctctttttctaaggcctgggccttcactaaatcgaggggtcgtcgcttttgttggaccggcggcatgtccgggttgacgttgaggacgtgggtgatgacgtggggacttatgacagtcatgtcctcttggcac

SEQ ID NO: 340334 - DNA, 499 bp, Cannabis indica
ttgagagagaacaaaaatagaaagacaagagagagcggtgatcgtgggtgaatgggtagttgagaatatatacacatgattttacttacataaaatcagaaaaataactgaaaaggaaagtaacttccttacctttgaatcacgtgtggagagaaaagaggaaaccaaaaaggtttttcaaaaaatagtcaatgtttccttaaatggaaaaggaaaccaaatatccccacaagatctaagtattaaagaccccaccaaatccgaaattgccaccaaagaggaaaccaaaaataattaattatttaagaacaagtttcctaaaaaaccaaaataggaccaaatctccaaaattaaaggaaacacaatataaagaatacaattaaaccatgtttccacaaatgaaaaaatagaagaaaaaatatttacaaagaatcgaaaaatatgcccccctttttctttaattttttcaaaaaatgccccaagaaaaaaattgcaaata

SEQ ID NO: 340335 - DNA, 557 bp, Cannabis indica
tgaatataagaaaattggtggagactacatagtcaagataaattaaacaagagagtgactatgtcatatggaacgagaagaaacccaaaaaattttctatgattgacagatttcgaaaaatcatcaaaaaatatttttaataattttttaactacataattatcattaaaataataataattattaaacggagtcaaaaaattaattaaaaatcatagaaaaatcagaaattaaattttaaggacgctggaaaaaagaacgtcgaaaaacgacgtcgcacgaggcttcacgcgcccccacgcgccgcctgcgcgagtgggcgttgctggtggacggtcttcttcaacctccagcgggtcggatgcgggtcacgcgacccggttcggccccagtcgggtctgtcccgtttttcggccaaaaaatcgacgaaaacacgcgatttttgatgggttttgctcgggattgaatttctaattgatctacgctactaatttcgggtattaaagattaaatctctagatttcatggcaaaaccaatccgaaaattaagaacttaa

SEQ ID NO: 340336 - DNA, 990 bp, Cannabis indica
atcttttatctttttttttttcatcttttttcgttgatatttttctaatcttattctattttaaatttgcaaaaataaaagataacaagcgtaaaattgctccaaacatgagtaaaactaaattaaaaatatactaaaattaatactaaaaataacctaacaaatttccccaaactaagcatttactcgacctcgagtaaaacactaaaacgaaaaacaaaaattaaataagtcaatctccagaacatgagtaattttgaagtagactcaatctcatgattatgaaaaattttcacttatgcatacaatccagaatttcagttcaattacgcccttgacacactttaacttaatttcatccagctcatgaaaccatagaacgcaattaactaacaattgaaccactttatgcatgccaattacaatcatcaattcactaacccaaaattccatatgcttacaaatcttactattctccactaatataaattaatgtacaatcaagaatcagaaggtctttctcggcttgtaatgttagacttaggtaagggtagttgaaatggtcatttaggatttcctataccataagtttcttcaatcatgtcacccaaaatatttttcacacaatcccaatatcccttcttctaattacatgagagaatttttttcagaagattgcaacaactttatattgattttttttttctgaatttgacactggttgtcagatttttcctttttttttttcgcaagttgtttccaattaatatttttcatattctctcaattttcacacgtattcacacacaataaactttccgtctaaattcccccaaactaaagatccacttatggtatgcttagggttaaattttttgatatttaaggtttatcttttctaggctcaaaatgtgtagaaacaaagaacatgttaaggctcaaaaaaggtaactaggataaaattatagggatgacttgaaagacacaatc

SEQ ID NO: 340337 - DNA, 740 bp, Cannabis indica
aagagtgttatggggccttgtatttgccctagtgcagattgaaatttctgtagctcagtgtcatcatcgattggcctttaaaaatttgtagcagatgagactccagtaccgggggtagtttgctcagtccgagtactaatggttccagtttcttgcacgccctgagtgaacccaggcagtggggtagtcactccttgacctatagttggtgggcctattggtggttgaggattagtcagagcggtgtctatcttggttggatctcttgggtttgtaggcgtctgcaagttcggatccgtaaccattggatcaattacttcagtatgatttttcttcatgtttatacaaccattttgagtactcactattctaggtgagtactcgtataactgctagtgagtgttcttgttttacttgaatactcacattttcttggtgttgtctaaattcttccgacaacagatttaatgtaaaatagagaaagtaaaattttagtcatgtattttaaaaaatagagttgagaagttgttgagaaaaattgtatattaattagaataattagtatttttgcctcctgaactttcgacactacctgatcctgtcccctaaaatatacaacttgtcaaaaattccccctataatataaaggtaacataaccgcgctttgcgcggtttgttgaaagaaaatataatttaatttatagattttaaatattttgaacactttttttttctttttc

SEQ ID NO: 340338 - DNA, 797 bp, Cannabis indica
caggagcacccggggatttggaatctccacacttgcgggacatcaggtaagacagtagttagcacgtagagttatgcacggcggtgcttatattagaaatgatatatatgagtaattagaaactgggattagggttattaccctaatataagcggtttaatggcctagggttattaccgtaatgattgataatgtgtagatgccatgccatgttaattatatgtgtatattgaaatttagggttatgcgttcaaggcataatcaggttggactcggtgactagaaccaatatgaaccattctaaggccttattgtatatagacgcgtgagcgcaacacgtaagtctatgccacatagacataaataagcatgtgagcgtaacatgcatgtctgtgtcatacaagcaaatgtgaatggcattaatgtttatataatgtgataattatgattagcgatattttatagtgtcttgttgggcttggctcacgggtgctttactgtgaaggaaagggtaaatctgtctctgatcaactatgagtacaagagctggatgatgtatgtacatgttcgggccacactagaacaagcgggttggggtctaccagtgatgaatttttgtaactctgttttaccgcttaggtcgggtattgggaaaaagacttgttgtaacgccctaaataattaggcacgctacccaaaatgattatgaaatcctaatcccctaaccgggattactaattaaaaacagcgcagaatttaaacttttatattaaacagactgaaaataaacttgtaat

SEQ ID NO: 340339 - DNA, 632 bp, Cannabis indica
atatataaggttaattttcatttttattattttttttgtttaggggaaagtttatagaatttggcatttttttttagaaaaatatctatgaaaaaaatagttcgggtaaccagttaccgctttagggtaaccaggtactacgttttttattttgaatttttctcataaagtcacatattatcgctattgaaatgaggctcccaatctacgtggtggcgactgatcgctaagaggcctggtgaccaatctttaggcgtcacataagagtgtaaatgggtttggtggaatctaatccagctatgatctgacctgatccaaatcatgtaaggatttgtcccgtcctgccccgccccgctagatcagatactcaaatcggatcagatccgacctgactcttttttttaagaattttaatattaacttataattttatatccattttaattttgtatgagtattatttaatacaatactatgtttggtattgaaatgtactaatagattgtgtaaagataatatatttttaataaactctaccctaacaccaactacgggtcgggtctgggtccaagtttgggtctggatcctagtttgggttcgagtcagggtcttgggtccgggtccgggtctgg

SEQ ID NO: 340340 - DNA, 522 bp, Cannabis indica
gttttgacctgagccagcggttgcatcggattcttttcttttatgatccatggccaaaccactacctcccctgctaaaacctgatgcaggaggggtaggagccccaccaaccactagagtcccaacagactcggtcatgcatccaactgcgcactcagctcgcagtgccttatcaaccatttcagcataggtggttttgtcgtctgtagtaatcattagatcatgtctaatcttcgtatttaatccatccagatatttctcctttttactgaaatcggttgacacaattctcgaggccaacctcgctaagcgatcaaactgagtcgtatactctgtaacactcatgttttccttctaggtcaagtgagtgaactcttttctcttggcaattctgactgcctcattataatacttcgcattgaaaagttcctaaaacttctcccaggtcatggtagtaacgtcatgtatcatggcaccatgtcccaccgactaggcatctcttggaattgaaaagtggcacat

SEQ ID NO: 340341 - DNA, 770 bp, Cannabis indica
aatcagaaagagaaccaccattaggtacggcgacttcacctgagaggactcaatgaaaacaggggctgtttcaaattcataaaaaagtgtggaaaaactattacgaaactaaaattcaaccggaattccagtttaatttgcataaaactaatgtcttgacttcaatttttagatccatgaaaggcagatctcaaaaagtttaactggagttcccaacaatccaattcaagtataatccaaaaaaaattacatcgatactatagtaaaatgtttatccttgtgtatttttgttgttttccaatgatctaatggtgaatttgttcatattaaatcataaagagacatgtagatgaagttatgtaggtggaaacactgttctaatttttaatgtttcacaataattgcattacagttgcataaacattttgctaacagttatttcgtctacatgaaatcttcatctgatgtaaccttcggccaaccacccagcaaccacccaaaaactttcgtctgattgaaaccttcgtctgatgcaaccgttggccaactgtctagcaaccaccttgcagccatcgtctaattgaaacttttgtctgatgcaactaccacgtaacaacccagcaaccaccctgcaactattgtctgattgtgtaagtaatgatagtgtaagtggtattttggtaattaaaatcacataaaaggtataaatgttgtctttaccttatggagatatttttgtaaataaaatgttagtttatattttctatgta

SEQ ID NO: 340342 - DNA, 752 bp, Cannabis indica
tttttttttttttgtaatttcttagtctccatagtctaaaggcttgtttcccaaaacccgcacaagtatcaaaaatcatcaattttttttagttttcattggtgttcgtttggtttgttggttggaattgctgcttgattcctctcttgtactgtttgcttagtttttaaagaacttacagaagaatacaagtggaaaaaggcagaggtgtgagcttatttgaggataaaagccctcgaatttgagtgaaaacacaagtgaaattgagtgacaaattattttgagtgaaaaacttgagagagtgtgatgagatctttttttaagctgttctaacattatttttgcagaattcaatcatgttaaaagttccaaaagaatataccggtattaaaactacactatctacggttccaaatctacaacttcaagctttgatgggtgaaatgaggaggatgatgagagaggagtgtgaacaaatacatgcgaggttagatagggcagaagagggaacccaacagaggccctacaagaacagggttcaccaaagggatgataatgaagtagatggggaagggataatttctgatgaagagtttgatgggatgccagcgggtaaccataagaggtatggtcgggatagagaagctaggaaccaggtagataactatttgggaaatataaagatgaaaaatcatgcttttaaaggaaagagtgatcctgaagcatacatggagtgggagaagaagatagaa

SEQ ID NO: 340343 - DNA, 952 bp, Cannabis indica
aaaaacttcacacatatatatagttatgaatacatacatataaataattgaataattatttaatttaatattattatttagtttatatttattattatgtggtttttaaaaagtaattaatttaagatagataattttatagaaaatttattaaaataacaataaaatattaatttataaatttatactataataaaatattaaagaatagagagaattaaggagaaaaacgaaaaatagttttagagagagtttagaccgccacgtcaccgcctcatatttctcctttatataaatatatataaattagttaattgttagttgtcacattaatatagacattatataggtagaatgttaatacttaccgtcaatttcttattataatttattagtcaacctccgtactcgaaaatacatgacgaaatatttttaattttttttcatggtgatatttgttatgcttacaatatcatctctaaataaagttcgaataatttataatgttaaaataggtttaaattttttttaacacgcgtgataaactgacatatcgcgtactctctattttcagtaagctatatttggaatttttttaaaatttacaatcgtaatactgtaaccataaataattttactatgaaaaaaaaaattctaatatgtaatttcaaacatatagattgattaagaagttataatgagagattgtacttaacactcttctacattgtagtaatagtaatagataaataaatgaacattattatgaaataccagtatctcatattattgagttttatattaattattcaataaaatagacacctaaaaatttaaggggttttttcatttttacactttaaacacaattttttgtttttgcatttttacggaattaggcatagaaacccttattgcaactagcgctgcaaggtaaattgcaacaaaaaat

SEQ ID NO: 340344 - DNA, 635 bp, Cannabis indica
tgtttaaacaacatacttgtgagtagatctaagatcctggtaaataaatattccaacagcatattactctttacaaagaatgatcttgtcaaaactactatgaacaagatacaaatgccatagatttataaaatatgtggttgtggtctttcgatgacttaggtctagttacatgaaagagttcttagaatactccaagtggattctggtcacaagatactaaactcatattctatacattaacatacagtttgaaaccattgatagaaaaggatatcaataacttgtgaaggttgaactgtattgtattctggaaattgaaataaaaatttctatttggattctaaaatttaaagtcaaagagtttaatttataccaaatatttcttgagttgttattctctcttggaccaccactaattatctaactctaagtctaattttcctaaagtaaacatatacaagtaggagatttctaagatcgagaatttatatcattttaggagagaatgtcgggaatataatcatatgcgccattcaatttcttaaaagaaaacagaatgacatcataagcgagtgatttataaaccattcatccaatgatatattattaaagcaaattcgaaatgaataagc

SEQ ID NO: 340345 - DNA, 603 bp, Cannabis indica
cccaatatttaattacactaatattctttaataacgtactaattaattaagaaatgaggagtgttggggaaactctcttttgcactctcttttacactctctttctaattaagtgacatgtgtaattttctaaagtatgtttaaatatagttacaattatacactttttacttttcatttaataattaaattgtgttatcatttgcttgtttattttttttgaactatttttaataattttttcatattttttttaatattaaataatatgtactactatgcatctttcttttaatttcttttttataataaatatgtaatattttatattattaaaaaataaaaaacactagctctttttttttcaacaaattttacatcaatattttttttttcatattgtatcattctttaaattattttatttcatatttgttatatatattatgcctagtcgatagtatatgttaggtcgatttacttttgtttatttttttaagtaaaaaaaattcttttcatgaataggcaaaaaaaaaaactaaattgatttaacatatatatatatatatacatacatatttgattagagagaaatttgagaac

SEQ ID NO: 340346 - DNA, 820 bp, Cannabis indica
caaagcttgtgagtctactcttgctggaacctcatcgtttcatagtgatattggaataaagctgtcacattttataggttcatccgcaaattctcctccatcagactcaaaggcctagttgtcgaaaagatcgttcatctaaaagatagaagatcctttcaacgtgttgtgcatgtaatttaaggaggagtgtcctcacacggataataatcttaaatcgaaaaggatactaagaacattgcgagtattattcatgttctaagtaaagacctacatgcatgtgcaagcattcaatgtgatctagttgaaagatgcaaatattcgaggtttgtactgggagagatgcgagtattcagtccttaagtaaattttccaatttttttttaaattcgtactgggagagatgcaaatattaagtatttagtactcaatagtaggagtctggttaaattcgtacataagagtacattaaacctcttactattggttctcagggacatcttgttgttacatattgtcttagtctgaaacgaaaaagtttctactagactaggtcatcaacatagcattctagtattaacattaatgtaaaatacttgcttaagaataagtaatcattaaagataccataaaatatttcataaggactaggaaatttgcccaagtcattcgaatagactttgcaaaattctcctatcttatcctcataattctgataagttatttctatccatatgaatggttagatttactttctcaatttatttaaagtgcctatcatgatcataacatagtaatctatcactagtatcatccaaat

SEQ ID NO: 340347 - DNA, 527 bp, Cannabis indica
atcgttttagaagttcaatattaggttgttaaatcaacatacttgtgagtagatctaagatcctgggtaaatataattccaacagtatgctcaagagcattctgagaaggagaaggagcttattcaacttaagcgcgaggctaagttaaagggaggagccggggcctaacaacatgctcaagaatattctgagcaggaggatgaggctgaggaagagcaggaaagaccgctcaaaaggaagaagaaactttcggccgggcacaggcccatcgaacatacgattcagatcagtgagcccggtctacctgctcggccatcaacccttgtagaaggaaaggggaaagccgtcctggaggagcaagaagactcatcggatgacgatgccccatcagtacttgttcaggcagatgcccctgccaaagttcagggtactccatcttgtttttaaccttcttaattattatgccttcatatttctcatgcttttttctaactatgttactttcatttcatgcagacaagtctca

SEQ ID NO: 340348 - DNA, 857 bp, Cannabis indica
agggataggctggaggccaagcatcgagaggcattgagggcagagggcgaggctgttgccaaggccaggcgcgagctcggggaggctagggaggccttagatgaaatggctgccaaggtgaagtccttagaggaatgacaccaggcggacttggagtccagggcaaacttggtcggggatctaaaggagcttaaagactttaaagacgaagccttgaagaaggctaagaaagatgagctcctttctcccgtctcctgcagctggtgcattaagcgcttcgatgatggcgtttatatggcctggtcaacaaatggccagaataccaagctcgaattctactcgaaacccgcggagatgattgctaaattcggggagaagaagaacaagctcgacgccatgctggagccgcgcattggtcctcgccttcctcctcgaattgactaggccgttttgaatacaacccagatttttcttatctcttttttttattattatttacagccaattctcttttatttaagacaatctttatttacagctgttttattttctaaggggaaacaatggttaaggcctgtccccgggccctttgtatatatttatacttattttttgacctgcccttagggctaggatttttatatatataagatctttttttgatgcacatatctttcttttggacctgccctttgggtcaggatgtttatacatatgccttttttttttgcatactttttctttttggacctgccctttgggtcaggatatttacttttggcctggtttttgtctgtctatgtggtatgccctagtacccgcctgagtggcatagaaactttgtttttaaggaactc

SEQ ID NO: 340349 - DNA, 809 bp, Cannabis indica
caaaaataatatttaaacagttaaatacacacttattttttttttactatttataacaaaataattaaatcgttagtaacaatttcgcataaacttattttttgtagtaataaaaaattagaaaaatccaatatatttgatataattaattaattaaaaaataataactaaataaaactatcaaaaaaatagtattaatatcataaaagtaacttcatccaacttaaaaatacatttataataaaactgattgttaaaacaaaaggtaataaattttcaattatgattattttattttatttgttctttttatcaaatattttggtctaatctatttcatattttaataattaaaatatgggctaatgttttaattatatgttgacaataaacacaatatatatttttttaagtgaattttaattagtttcaattaagttataaatagaaaattattggcaaaagtagataaatatagtgcaattttgtgggagaaataagattttatccctctatactattacaattgtaaattttggatttctaaattgttgttctcttgcaaaaattgtagggttgttcatccgatctaatccgtacttttttagtcaaataacatttcatccgcactaagtgtggatttcatattttggatccaatccgatccgcatagccgtttaaatccaatccaatctaatccgcaatagtacaaattagatcggttatttttttaaatgaaaaattatttaatatttcatagaaaaaaaattaaaaaaagactattgtttcttatctccaataataatcta

SEQ ID NO: 340350 - DNA, 428 bp, Cannabis indica
taaaataatttccaacaaagtgcactcctcttgcatcttcctccataaaggtgattgagtcattttctcccttgaaactctttgaaggtctttcttctaagctccaaacttggggctcttgtcttgcctcatgggcatatttatttcctcccttgtgagtgttccatcctatgcaaggtccgcctatgatagttctgaagtctcttaacacttccggggcctcgccaggtacctctgattggtgcctttcatatgacctctgattttctcttcatactctcccagtccatggtgcgagagtctggggtcctttagtgttattggtggacagtgtcttacaggtgctggaacctgttgcctttgttgggttttatgccctaaataaaactctatttcaatgtaatctattttattcaacatcaacaaag

SEQ ID NO: 340351 - DNA, 2354 bp, Cannabis indica
aagaccattttgcccttgcttaaacaaaaagtaaccttgccacctaagggcattttggtcaaatctaaaaccacaaatattcccgacattctcaatgtctacctaaattgccccgctatttctaaagtactaaactataagaaaaagtgactctatcggccaaacattgcgttacactattactgggcataaaatatgaaaaacatgaaatttcacatataacataaataacacactaaaattcaaacatatctccataattacgtaaaacataattaagagtctaattctgaattaaaccctaattatctgctaattcttatattaaagttaagtgatcattacaattatcgccccgttaaaagtatttcgccctcgaaatctaacttgaataactctagatattgagccctcacgtcggactccaactctcaagtgccttcctccaccttattgtttcttcagagtgccttgagcaaagatatgaccttatttcgaaggactttatcttttctgtccaaaatttgtactggttgttcttcataagataaaatcggctggagttctagattttcataactcagcacatgagtgggatccgaaatgtatttccataacatagaaacatgaaatttggtatgggctgctgataatgctggaggcaaggctagatggtaagctccaatccaatgtttttgaggatctcaaaaggccctgtaaacctaggtcataacttgccctttttcccgaaacatttaatccccttcatcggagacactcatatgaatacatgatctcctacctagaattctacgtttctacattttggatttgcataactcttttgcctgctcttagaggcaattattctggccttgatctaatctatagccttgttgctccgttatactaattttggaccaaaatatttcctttctccagtttcattctagtgaattggacatctgcacttcctaccatacaacatctcataaggaggcatccttatggtattctaataactattgttgtatgaaaattctatcagtggtaagaacttgctccaagagccttcaaaattcattacacaggctcgcaacatatcctcaagtatttgaattgtcctctcggactgtccatcgtttgaggatggaaagttgtactaaacttcagcttggtacccatggatcactggagaatttgccaaaactttgaggtaaactttggatctctatctgatatgatggacttcggagccctatgtaacctcactatcatataagtttgcatattgatccactataattgttgtttttactggtagagaatgtgttgacttggtaaatcaatccacaacaacccaaatagaatcgaacatccttgtggttctaggtaatctaaccacgaaatccatggtgacatcctcctatttccactcaggaagagtcaaaggctgcaacaaccttgtaggtctctggtgttcagtcgtaatttgttgacaagtcaagcaccgagatacaattctaccacatccttcttcatctcgcactaccaatagaagggttttaaatcctggtacattttggtagttccaggatgcaatgaataaggagtggtgtgagctttctcaagaatttcattcttaagttccactctgttcagaacacaaactctggttttatacaacaacatcccattatctgatattgtgaagtctttagcttgaccagataaaaattcttctcgaatctttaccaatttgggattaactagctgggcagctctgattctatctaacaaatttgattgcaatgtcaaatttttaagtttacccacaacaaactcaatacctgatatgaccatgtcatctgctagctggggtgaaatcataatcatgttaaatacttgtccgagaccccttctgcttagggcatctgccactacattggccttcccaagatgataaagaatttcacaatcaaaatctttgaccagctccaaccatcaccgatatctgatattcaaatatttttgagtgaagaaatatttgaagctcttgtgattggtgtaaatctcacacctttccccataaagatagtgtcgctagatcttcaaagtgaaaaccactgtggtgagctctaagtcataagttgggtatcgctgttcatactcctttaagtaacgtgaggcataagcaattacccgatcagcttgcatcaatagacatcccagaacctattttgatgcatcatagtaaaccacaaaattttcttaatctagtggtagtgctaacaccggagctgtaatcaactgttatttcagctcttgaaagcttgcttcacacttgtctatcc

SEQ ID NO: 340352 - DNA, 158 bp, Cannabis indica
gaaacgacataacacctatccaaggtgtaagaatacctatcgctgaatttcatgccagtctaaagattatattccactgtgctgacaacactataatcattaacaaaaatatatgttctggacttaaatagaatttatacattatatatataatcatg

SEQ ID NO: 340353 - DNA, 2761 bp, Cannabis indica
atttttgcactctgacgtggcatcacacgatggtgacacgtggactcaactttgtgtatcttctcacaagagatatgccgaacagggcaccacatatattcgctcggacgaagccttcttagctgggtagtgagcagtcttaacagcacgccagcacttagtaatttcagcttttgcatcgtgagtcaccgaagaaatccctatgattttgggactagatcatagagatatggcaagctgtccaaatcccttgattagtgtattctgtatttaatatgcaatctctccacttatatcaattgtaatcagaaggggaattcttccctcccaagcttatagccctataaatagttattcttactcactgggcaaaagatcgaaaaacttatctaagaattcatattcagagatactattgtaagagctctaagaaaggggactattttccttattctcaagtgaatacaaaccaagaggattaggctattaccaaactgctcggggctaaacctctgtaaaattctcgtgtctttattcgatttattatgttacatacacctgatactacttgtcacttacaatttagactcactgtcgttggcaaaaagcaaggtcgacattttggtgctttcattgagagttgaactcaagatcattctcaaacctagtcataaacataatggtagtacagactcgtagaggcgtggttgatccaacaaatccacaggcggtggatcctacattgcagaacccagggaacacgagggttccaccaaccacaaatcccgaacaaccatcaactgcaggtcacggtgtaacgactcttgtgagtgaaatcgcgcctggtgtgcaagagactgggaataccagatcagcagccaatcaagacattcctaacactgtcgttccgcctgcaaccaatgtttgaaaaactattagagatgacaccaaaatctgaaacctctgtgctgctcttggagtcatgcaaggtcatacatacaccctgcatcacgatgagaaggaactccgtgctgtggtaaatcttgcatttgaagagcagaggtgcatgttcgctgaatgaagggacaaggagatggaaacattaagggctcggcaagaagccattgaggtccgaacttggcaggccaccgtgttgatacaaaaaccctatcaggctgccggacaacagcctgcaaccgtcatccccctgggtgagacagacaaagatccaccggtgaacacctctcagattataaatggtcagtcatccaatccccggtcacaggtcccacttgtaggccaagcggtaggcgggcataccttgtcaagtaattcattaggagaagttatacctaataattccaaccaagttaatggtgtcgtccaactgaatggccaaaccaaccagtcagtgagacagctgggtgtttctatatttgatggattggggacagttcatgatctcaaaaatgatctaaacaggaggagaggattggacgaccaacatgatgcaccagtcgttagcccaaaacccgtgctcaaaatcccgctcaaagagatgctgacgtgactcttgtcagccaagaggccgaacaagttagtccagctgtgcaggcatagttggatgaactaaaaaatatgttccaaggcctggtgggtcaggggaacaatgacctcgagttggaccaagcatgtggatcccctttctccccagagattaatgttttagaattgccccacaagttcaagatgccaacctggaagatgtacactaggaaggaagatcccttatcccacctcaagtatttcgaaatgcaaatggatctacatatgttgcagagtttttcctgccaccctctcagaggccgcccagcaatggtatttcaagttggcgcccaaaaagttcaacttatggaaggctttctcctcggagttccatgcacaattctcctcttctcgccaactttcgttgcacttaggagatctggtccaagtgaagcaaagactaggagaacctctctgagcctacatcaacagattcatgaccgaggcgactaaggttgcctgggtaacggaagacggaaagttgttcgcgatactagagggcattgaagttcttggaaaactttggaaggacataaggaagaacgggccagtagattcaatgagtgacttccttgactgcgcagaaggttttattaagcttgaagaagccattcagcaggcagaagttgagcaaaaacctagccagccaaatgctccctctgttgggacatccgttcagctcccctaatacccaagcaattcaagctcgggtggaaaatggtccaacaacaacaataataggcaaggaaacgggaaaaagggaaagttcactggtgaaaccgaacaagctcccaaggagaattctacaaagtaaaatgcattttatgtcttgacaaaagatatagaaagtgtgtacatgactagtcagttgttagccccgtacaagaagcccacacccatgaaaaaagatgtaagcaagagagacatggctaagttttgccatttttatggggattatggccatgacaccaatgaatgcaacaatgtgaagtgggaaattgaatttctgatcaagaaaaataatccgcacgtacagatttatgtcaaggccaatcaaaatcagaggggtgataacaactaagagttactaccaccaccagtagatggacatctgcaagttattattggaggtccgcacatagctggagattcaggc

SEQ ID NO: 340354 - DNA, 726 bp, Cannabis indica
atggtccttcccaatttggcccaagtacccccactccgagttcttgagtggctgggaagacccttcttaggaccaatggtgaattttctatctttgaccttggcgttgaagtatttagccacctttctttggtaagctgccattcgtacctgagactcatcccagagctcgtctatttgatccaccgcttcttgtaataaagctttgtttgttgccagatcatatgtcgcccttttgtgggatggaaacaaggtttccaccgagaacatagcttcacaccgagaacatagcttcacacccataatactcttggcaattctttaggccagttgttcttgcaggccagcaagttcttctttagggtgacttttagtattttattgatggcttttgcctgtccatttgtttgcggcctcgcaaccacagagaagcttttaacgattctgtgttggttgcagaagtttgtgaattcttcccagtcaaactactttccattatctaagactattttatgaggcaggccgtatcgacactcgatattttggataacaaagtctaatgctttcttagcagttatggtcttcataggctcgacctttgtccattttgtgaaaaagtccacgactactatggcatacttttgttgggttttgtgccctaaataaaacccatttcaatataatcatatttacttactaataaagatcagaaataacattttatgtt

SEQ ID NO: 340355 - DNA, 1221 bp, Cannabis indica
aaagctcccaggattgcaccattggaataaaaacaccaccacaacttgcttccttagagctgcctcttgctgcgccatcagtattaattttgatgatatttggtgggggaggcaaccaactcacttcttgaatttgaggtttcctctttatctatattataaaaaaaatttatatatattagtatataatatatttaattaaataaatttcatattgatttgcaggtatattattaattaattttatttatttgatgggaaaaaaattaattatataccttaggaggttttggtaaagaagctaattccataaatccattgatccccatgcatgtctatattgacattcatcgccttctgtgcactgtccaaccgtccaaaatttacaaataatatcgatcgaataattagcagaagaataacacattgccatttttgcaattttatggtatatatctgtgattagttctttgtatatattaggattgtaggatttcttgatgtgaaattccaagaatgccctacaccaactcaagcattcaatcaaaacgacagggacaaaaatgtcccagaataaacaatttaaagaaaatgttcaaacgacaaagaaccttgtcgtttctttcctgcacgacagatcgtttacacaaaacgatttgtcgttctttctcgaacaaaaccaagtgcaatcagagctaaccctagctcatttcactcattcgaaccttcgagagtttctcaaactctctctctttctctcctttctctctggttctcaaaccctagaaccagagatccttctcgatctacagatcgatctcacccagaaataatcccagaaacaccacaaaacacacacacacaaagatcaaaccaaaaacattagagttagaaagaatcaaaacaccaaaaattattaaggttcgccctagaaattaggggtacatcctctttcgagctcgccttgaagacgtttctcaggatctgcactatttggagaagaatattacaaacaggtgagaaatccaagtcacaatctcgactggtatttctgatattcactcaatctttcttttctgtgtttttcttttttggtttttcttcactatctcactaactctcttttctttttcttctttgcatgaacacttggatctacaactttgagagttaaactctcagatctggcttcttggcttctggtatctctcaactgagaga

SEQ ID NO: 340356 - DNA, 941 bp, Cannabis indica
taccacaagccataggtttagataaactcaaacctataatactaagaacaggaagctttgtttagttaattgaatagacttattttcaaaaatttcctttcttgtccttgtaatagaaaacttttgtttgttccatatgaatggttttaaccatagtagttctcttggctttgattcttagttccttattctgactatccattacttgtttaaactaacaatggattttcatcacaagtgtcgtctaagtcataacagggtgagttccttgaaaccctcctactacgacaaggtacagtgactttttgtcaaagaacattaaatggtattatcctcttcggttgtgtcaaaacaacagaggcagtgggaccatcttacatcgaataagatgatagaacacttttggaatcaagaaaaaaatatctcctctactttgctactttttcttttcagacttagtcattttcttagaaaagtggtatttcttgaaacaaaaactttcttatcttaatgactatgggacggtccacccctaatcactttagaatggctatcaaacatgcaaaccttggttaacaaatctaggtttcttaagttcacgatcaggacatccatgaatctagtaatagtttacactaagtacacaaccatttcatcattctgaaattttcctatcactagggtatatccctagaaggacttaggcaacaactagtacctaatcataaacctattactttcatcattgtgcaaatcaaatttctggggaggtaagtttgaatacaatttaaagttcaacttaatgatctttgaactgcatagccaccaaatatttctccacccctatcagttcgcaagatctttaaccacttaccttaatggttctccaccattgctggaaactgaaataaaaatttctatttggaatctaaaatttaaag

SEQ ID NO: 340357 - DNA, 760 bp, Cannabis indica
ttaaaatgttatatgataagtgtttatttaaatggaatgaatagttaagttagggtttaaaggcaataagtgcgtaagtgtggtattcgtgcctgactcgccaagggttgttgattactggcctgtttgtaaaatgtaccctccataatcatctagaccacagggcgagctagtagagcctgttgtagaccaaaccaatccaccggcaccgcttgtgcctccgctgaatgtgggggttggcaatgctaatctgcctgctgaatggcagcagatattttaagaaatgcgaagtgtcatacttcgtcaagaggaagagttgtgttaattgaggcaaccggcactggctgcccctgttgaacaagcgttaccaccagcacttatgccagtggtgggtaacccggggttcatgatgccacatcgagactccgtgtttgaacggtttgtgaagctgcaacctctaacttttctgggaggtactgacataatcaaagctgagcaatgcatgagtacaatcacccgcatccttgataatataggggtgacgggaacagagagagttaattgtgcagctttcatgttataagatcatgcccgcggttggtgggatattgtgggacagactcaagatgtcagtgtaatgacttgggatgagtttaagagtctgtttgaagaaaaattatataatattgcagtgaggacttcacatatggaagattttgtgaagctaactcaggggaaaatgtttgtggtcgaatacact

SEQ ID NO: 340358 - DNA, 792 bp, Cannabis indica
aaaaattagctttgactaattttttcaagctcaaggcactattttacaagagcttaagaaatttgggaacttggacctatatgagattaaatcaattggaggtgacattggggttcctactacctcggaggttaacgaacgaactactcctttcaaaaagagaaagtttgatgaggcctctgcatcactttgttcacgcccttggaagcttcttcatccacatccttgggctatccgtgatttcccttgggattcggagggtcgcgataataatactaaggagatagaagatgagccctcagaggaggtctccctttccaataacgatttcacttgcccggacgagtggaggactaaaggaaagaatgtgatctcatcaaggccaatggagggcacttttgtggttgaagaatctggttcttttgggtcggctcgttctcatacccttgtggaggagactactactcctccacaggagccatgagaggtatcgcttggaactgtagagggttagggcagacctctacagttcgtgagctgaagtccctgatttggtcgcgctcttcggatttcatctttctgaccgagctaaaagttgatgctacttctttggtacgtattcttaactccctccatttttattttcatattattgttccggctgtgggtactgcgggaggtattattttagcttggaaaattggttttgagtttgaatgtattgagtgctcccaaaatcacatctctggtttagtgttttcggacccccccctcgcaccttcggctcctgtc

SEQ ID NO: 340359 - DNA, 479 bp, Cannabis indica
tttcttctttttcctttttcctttccctttccctttcccttttacttttcctttccctttttcttgttctttcatgttttctttttcttttacatttggagcctccttcccgaattgatttaccaacttactaactttctcaaacacctccaaaccagtcatgggagcaggagcaattttgtcttctatgttgccatcaaattctttttttgtatcttcggaatggatgagactgatgtagaaagcgtctatggcccaagtatacaactttcctactgtgtgttaatctaatgccgtatgtattctctgaacaaataggacacactttatatcccttaacacaatggcccgacaagttaccgtaagctggaaaatcattgatcgtccatagtagaaccgctcgtaaagtgaaagtttcattttttcttgcatcataacattcgatcccatcccacaaagttttaaatcatccaccaata

SEQ ID NO: 340360 - DNA, 1553 bp, Cannabis indica
atagactaaaatatattatattttaattagaaaatcaataattagattatgaaatatctagatagttattttctaagtagactttttggtattttccagatctatatagaaaattaatatttaagttgatttatccaagacacttaaatattagatatttttcttaagagatttaattaaatagaaaaattatatttatgttaaaaattaattttagatcaacataaattagaaaaaaatttccaaatttattttattttgttttaatggaattcgaaaatgtactttcaatgtacatttagattttgaatttaatcagatatatatttattaaaaattagatttaagttaaaaattagttatttaattaattttggactaacttaaattaaataatttttataatatctattgaaaattaatattaaatatggaaataattttttttttcagatctatccaagtatgtatataattttataaatattaaattaaaatttacatttagagttatctaaattagtaattttaattaaataaatatatgaatattaaaataaatagattaaaataagtatcaaatgaaaatatatttcttttaaaataatgagctttagtttaaggatattcgatctctattattagttctgcatagttcttgttttaatgagattcattcctaatagatgttcattcattagcaatttaacgccatagaatctcgaaagataagtattattgtaagtcttttatctcaataatgactgctaagagtagggcttacaaagtatgaaacaatggtagaagctcatgaaatagaatgaccatgactcttgcctaaacgggacaacatcagatttttatttctatcgaataaaaagttgctaaaatagtatctattttagatgatctgacaactctattcagtgaatgatatctttgactctcgcctaaacgggacactatatcgatttgttggaaaccttaaaaattatttaagatatgattgtttatatttttacatgtttttattacttgctaaatacttgctaatttctgaattgtgtgaatttatattgaaccttcattgtgttttctgttattaattattgtagtaaaaattttgagtcttcattgttggtctaacttttggtttgttgtttttaacgagacatcctcaatagattgtcatttgttagacaacgtaatagtgttaaatctcgacagataagtatttatatatacaaaatctagttgactcatccctaaagatgacaactaaaactagtgtttacaatatgaaacaatgaagaagtttataaaataagaataactttgactctcgcctaaatgagacatcgttggattcttattttaatcgaaattatcctttattttttcctcttagctttttcattaagaaattgcttagatagtatatcattggataggagatttataagtcatttgcttatgatgtcactctattttttatatatatatatatatatatataaaaagtaagtggcacatatgactatattctaaatatt

SEQ ID NO: 340361 - DNA, 1988 bp, Cannabis indica
tgccccccaggcatgacaagggtgattcctgcactggacaactgatcggtagctaacccgtccacatgtagtttccaagtcggcttgtcttcactattgctcgggtgaggtacttgtattggctctgggttactttctgaagtgctctcttctttacacgcagattcaacgacaaaatctgttaaggcttgtcctttaatcgctttttagggctgaaagataattttgtactggcccaactccactgcccatttgagtaaccatccagaggcgtccagtttttgcaatacttggcgtaatggttggtcagtgtatacccgaacaggatgagccttaaagtaggggcttacctttctcattgctaggattaggcaataagtgagctttctatcaatgggtaccggccttcagcttcgatgagtcttttgctgatgtagtagatcaagtgttggatattgttctcttccttcatcagtacgacacttacagcatgttccgtgatagcttggtatattcctaactcttctccatcaagaggtttcgagagtacaggaggttttgtgagttgcatttttagctcttaaaaggcttttttgcattcctccatcgattcaaattgcttatttcctcgctggatgttaaagaatgggacacacttgtctgttgactttgaaacaaatctactaagtgcggcaattcgaccagtcaaactttgaacttcattggtttttgttggcgatttcatatctaagagggcttgaattttctttagaatggcttcaattcctcgagcattgacgataaagcccagaaacttatctgagctgactctgaaggagcactttaaggggttgagtttcatgttgtatttcatgaggactttgaaacattcgtccaggtcatctatatgcccccagccttcctggatttgacgagcatgtcatccacgtacacttccatatttcctcccatctgttctttgaacattttatttaccaatctttggtatgtagctctggcaatcttgacaccaaatggcatgaccttataataatacagacccatatcttttcggaaacttgtatgttcttggtttggtgggtgcatattgatttgattgtaccctaaataggcatccattaagcttagtatctcgtgtcctgctgttgcatccacatgttaatctattcttggaagtggaaagcagttctttgggcatgccttgttgaggtcggtgaattcaatacatactcaccactttctgttcagcttgggtactagtacgggattagtcacccaggctgggtagaaggcttcaattatgaaattgtttttgcgcagcttttcttcctcttcttttagtgttagggctcattccttgtccaacaatcttcttttttgttgaataggctggaaattaggatcaatattcaggatgtgtgagatcacagaaggataaatttcgaccatatcctcatgtgaccatgcaaaaatttcaaggtttgctatcaaaaattttatcaatgctgattttacttcaagcagcaaacatttcccaattttgagtttcctagtcggaaaatttgggtcgattccgatttcttctagttcttccacaggaccaacatttgtatttggtcccctaagtcggggatccacgtcttcatccccgtcttgggcgattccctatattgcaatgtcttttccctttcccaaactctaactagaggatacttcctgtttagccttactcagggcaaggttataacattcctgtgcaacttgttgatttcctctcaggcacccgaccccattcttcgttggaaacttaaggcacaaatgaaacatcgacgtaacaacctttaggtcatataaggccggtgaaaccatatacgggctaaagacaaggggttaaatctttgagttggagccccattttttcatattgtgtttttgttgagttttgtgccctaaataaaacccattac

SEQ ID NO: 340362 - DNA, 444 bp, Cannabis indica
caaggtatgaaaatatgaagagaataagaagaaaatatggttcggctatgctatagaaaaggaggctcaaaattttactgaaggtgattttttcatccactctaagtgtgagtcatcactatctatttataggcaaccacctaggtttaggttaggatttattaggcattaaaataatgaagaaattaaatggaaaatactttccctactggccgaccataggatgtagtgggccccacttggaattttctattttatcaaaatctttccttattttctcaaaatatcattttcccaattctaaccatttaaatgccaaaactaattatttaataattaaaacaactatcaaataaaatgtcattaatatatttattaattagacttatcaaagtctctaattaagacctaggatctcttttcttcacatttaagcccttgctt

SEQ ID NO: 340363 - DNA, 659 bp, Cannabis indica
ttattctagattcgttcagtacgctacactcctttctacgtgatggcatagtcctctttggactaatttgtataatagacttttctctaaagtcttcatatacaatattcatacttcttaccatctaacttaggggtgtgtatccatagaatatccatcaagatagtacttgctccttataggtctattctttcatctttcttaataagtgagtttcataaaataccctatctagtctagtatagcatccactatcttaaatcattccctatccctataggttgggcttcctttcataactaggtgtagagacttcatctttaaccatttgtagacaggtgcaattctatgcatcgatacttagttggctattggtacatttcattatgtgcttcaagttccactactagtgttggtgatctattgcgctgagcctgtgaaaactcttcaacaaatcgtcttagtcatgctcacattccttccaatgcctctattagatcgttagccttaactactattgggttctctggaacatcaaccatttgtgggtcagcggaacacacatccttagcccccactctactggtcgttcctttcacattgattctaactgatcttctagttgcatgtgtgagctcttacaagaaaggttgatttaa

SEQ ID NO: 340364 - DNA, 927 bp, Cannabis indica
cctacacagagaaaaaacattagagtctgagccaagtaaagaagaattaagggaaaatgtgaagaaagactcaccctggtaaattccctcaagactcctcccatcagcagctctagggacgattcgttgtcggcgccagccagttgctcactcacctcaggaaccaaccagtttatgtagtgagtaagcatctccttgcccctctttccatctggatgcactggcaaaggtggggtaggagcccacatatgctcagatccgctcttggctagctcggatccgcctttcgactgttcaggcctctccgagcttcctccctgagaatttttggacttagcattttttggggcagaagggtccatgacaattagctcctcagaaagatcaataacctcccccgccgatgcctttcccttggatggggttgcctctcaacccttagatttcttggccggaggagatgagcttgagcttcctccaactctcttcttcaaagcatcgagcatcttctgagacatgattgcacggaataaaagcaacatggttagaagaaaagtggcatcaaaagtataaaagcatgataatctagaagctttaaaaacaagacggagtatcctgtgcttcgtgagaagcatttgtccgagcaagattcgagagttcatcatcaccttacaagtctcttatctccgccatgacgctcttcccttttcctagtacgggaggaggtggccgagcaggtgaactgcgctccctaatttaaatggcatgttcaatgggcctgggatgggccagaagtttcttcttccttttgagcggagtcacctgctcctcctcagcctcatcttcaggattcaaaggctcatgagcatactgtttggcgcttgcacctcccttcaacttagcttcacgcttaagttggatgagttc

SEQ ID NO: 340365 - DNA, 696 bp, Cannabis indica
agagaagaggtatcagctggtcaagccagggatctttcagtgtcaaacaacgggatgctattgggtttgtgttccggatagtgtggaactcatgaatgaaatcttcgaagaggctcattctaccccttattccctgcatcccggcaccaccaagatgtaccaggatcttaaaccgtacttctggtggagcggtatgaagaagaatttggtagaattcgtatcgagatgcctaacctgtcagcagattaaggctgaacatcagagaccagcagggttgttacagcctttaaccctacctgaatggaagtgggaggatatcacgatggacttcgtggttgggttacctagaaccacaggtttgttcgattccatctgggttgtggtggatcgattcacgaagtctgctcactttctgcctgttagaacaacctattcagtggaccaattggcagaattgtacgttaaagagatagtaaggcttcacggggtaccgaagtctatagtttcggatagagatccgaagttcacctccaagttttggcagagtttgcaacgggcaatgggtacaaaactgaaattcagtacagcattccatcctcagacagatgggcagtccgaaaggacaattcagatattggaggacatgttacgagcctgtgttatggattttgaaggctcttggagtaaatatctacc

SEQ ID NO: 340366 - DNA, 837 bp, Cannabis indica
gcaaacacatagagaggaaatatcgaatcgattaaagaatatgtgggaagaggcgatgtactggtggagaaagtggatactgaagacaaatttgttgatccatttaccaaagttttgagtgcaactacatttgaaaagcacatactgaatttaagattaattgaaatgtacagattgttttatgatagtgcaagtgggagattattgggctttgtgccctaaataaaaatctatttcaatgtaatcttttctattaaattatcaataaagaaactgatttattttcattgtttatttagtgtgtaattttgttcatgcgatcatttatatgtttatttaatttatgtattcaaccaaatccttatctaattgatattcttgtttattgtgtcgtcagcatagtggaaagtaatcaagattgtgtgattaaatatatattcctaaatttatcagtatacagggtttaactaatatgataatctacaacatcgtttacttgcaccttggataagtgttatgtcctttctatggcattggttaaagtaacgcttgggttgaatgcatggagtatgcatcggaagggaccgatattgaactttgaatcagatatgttaaacttaccgtaatatctattcaatttaatatcacctagttgatcctagaacaaatgatcttaatcctgacacggttaggttcaatctcaagagtattatacatgttctttgatttgttaggtaagcctactttttggtcagggtgatacgtacattttggaaacatggtagtgcaattgagtgggagcgctaaacatagatatgtattcctatgatttatcag

SEQ ID NO: 340367 - DNA, 1636 bp, Cannabis indica
aaacttacctccccaaaaatttggactgcatattgatgaaagtataagttctatgattagtgactagtagctacctgagtccttctaggagaaaaccctaataattttatatttttattgaatttttaattatttattaagatatgagtttataaatataaataagtttgatttttttcttcataaaatcttagtttacttaaattatttattagattctctataattttgatttgattttttaagatacatgttgataagtaaaataaaattaaaaatatttttttatcaaatttcttaattaattttattatttttttgaattaatagaatattataattgctttagaaaaaatagaatattataatttttaattttttttaaataaaaggggaaaaattttgtattggtcaaagttcaggggtaaaagtactaatttttaatggtaaaagaaacaaaattaacagaatgggcgaaatcaggtagtgccgaaagttcaaggacaaaaatactaattatttaaaagattatgctatcatttaatttaaaatatatccaatattaaaatatctgatcttattattaaataatttataaatgtaatgaaatgaataaaattttaaaatctaaccataattcaaaatataaaattggtaatttttaagtttaaacttaaaatatcaataaattaataataatcaataaaaaaattattaatttaaaagtttgatatttaggtttaaatattgtaaattatattttatgtagatatttagtgatttgaaattgaaaaatctgaaattggcgaaaaaatcaccaaaatagggatctttgggtgaaaatcacgtagttgcccacgaagaggctactagcagggttaaacgcgcgcgcagggaaggatcagcaggttccttgaccaaggattctcagcgagtgtagggtcctgggcgtgcaaggtcgtgtctgaaggtggcgtgaccaaggaattcagacaaaaaaatgtttgaagcacgcgcatgagcctcgtcttgtccaagggtcctagtgtgatggtgcaccaccctcaacaccaaacacacccgaatttcaaacctcgatatctccttaaatttttattgaaactaagttccgtaaaaaccaatattgtttaatttttcaaaagtaatctaaataaattatttttagaacaaaaaataaaattattttaatggaaaaaattcgtaattcacatacatttatcaattcacatataaaccaacatgaacatatcaaaatcaacaaaatcatcattttaaatccatatttcatgaaaataaatcattaccatggctctgaggccagttgttagaacttatgttaccaagatgtagatttactaacatgtatgtttgattaacaccctaaatatgaattctctaaaacaataaaataaacacataagagtttagaaaaccttacattgatggcaacaaagtaatatgactccttccgctcagatctttaatccttgttcctttctattgcagagtaataactagatttacgcttggatctccttctctctttcggtttggttaaccatcgtcttccgcactatgattgagtacttgacttgctatgtgtgggcatgatact

SEQ ID NO: 340368 - DNA, 677 bp, Cannabis indica
ttgccaaaaaaagactttacactatatctcctaaaaggagaatagaaagacttatttttgatagaattcttgaccccttggtttaataaatcttagatttttttagaagggtaacaaacaaacataaagaaatcaagtgaccaaataaaatttcattgtctaagaatttatgctatattttggtgatctttctttttggtttcgtggaatgatcaattatagtatcttgtctttagactaatgaaacttattttgttcataaggcattaatctttaggcgttgtttcttttaaattttcaaaccatagctgacaaatcaactaggcaagaatataaaagtcgttgaaactaactatgggggttaacactaccatggaaggtatgacgaataacgtcttagattattttgcacaactactaaagaaatgtaattttgtcttccaatacaaaatgttaggcaaacctaacatgaagggtatttgagagatgtaattaacatttatctaaggacatggcaagaagtgtgattattcattcttcttcatgaaactcgttttgcggagaaatacttaagactgcaacataaatcccaaactttttatcaagtaaagtataagttaaaactctttataaactaaggttgtagttagactaatagtctaacatatagatatatt

SEQ ID NO: 340369 - DNA, 867 bp, Cannabis indica
gttccttctatagagatttcaccaccttcattgttatttctttgagcagcgaagccaatggaggacctcctggacatcctcgcccgtacctacagtcctgagtctagtctgctcgagtcacgcgacattgtggtgactcctgggagatcttctgtttgcgttctcgaggaccaagtcgtcctgattgacgaggaagagggggaaggtgagatcatcccgtggaccgcaagcgtaaaggcaaaattgtggagacagaggcttctaagaaaccgaggcgagcgggtactcctgctccaagtgctgactcagggattcattccgaagtggatgagtaccctgtgcctacgggcattatcttgactccccttcatccagatgaggaaagggctcaactccggattgccaagtacaactacgccttgggggattacaacaaggggaatgcgaaggtggaggctctgaagaaaatactaagggatgcccagggtggatctgtctaaagcgaatatgtcggaaacgtttaggatttgaatttggatcccttgaccgacttgtttaaacgctttctgggacctagcctggctccttttgcctcagagataatgagccacgttgctgccgacttgagccaactcccaatgaagaggtatgccgcctacgcttctactaaccccgtgtatcaaatccaggatatgagtgcggccctcactgcagtgagttcttatctttaagattcctcaagtctctcttttttttatacaaggttctaataacatgtattttctgttgactgccaaattacagcagaggccggtcatctcttaaagcgttaaattgtaaagaccgcttagtttaatttagaaatta

SEQ ID NO: 340370 - DNA, 553 bp, Cannabis indica
ttagggcaaaaaacccaacagaaatcaccaaccaaagctctgaaactaacacgaatcgacaacacaaatttttcggggaacccagcagcgaaatccgataaactcaaaaacccccaaaaattccaaaacctaattaaatcaattccaatccttaccaaacctttcagacctgcatattatacccgaatagacatattccaagcaataaaagaactacacaagctcagaaacaaaaatcaccattaaagagccaagcttgagttctaaaactcaaagcttgctcaaacctaataacatcccataaaactagcacaaatcaacatatttaaccataatctaacttcagaaacacaaatcatacaccaacaacaactacaatagcaaaattcacaaaacatgcataaatctattttcttaaagttcaagaaactaataaggatgaagccaagaacttacctagagcttaagatcacttaaaccttgctgtaagataccaaaattgatgaagaacatcaaaccctagctacctagggattgagagagagagagagag

SEQ ID NO: 340371 - DNA, 764 bp, Cannabis indica
tcgggcattgacaataaagcccagaaactttcccgagctgactccaaaggagaactttaagggatttagtttcatgttgtactttctgaggactttgaagcattcgtccaggtcatctatgtgccccccagccttcttggatctgacgagcatgtcctccacatatacttccatgtttcgtccaatctggtctttaaaaatcttgtttaccaatctttggtatgtggctccagcatttttaagaccaaatggcatgactttgtagcaatatagacccatatctgtttggaaacttgtatgttcttggtctggtggatgcattttgatttgattgtaccccgaataagcgtccatgaagcttaatatttcgtgcctagctgttgcgcgcacaagctgatcgaatcttggaaatagaaaacaatctttgagggatgccttgttgaggtctgtgaaatcaatacacactcgccatttcttgttcgccttgggtaccagtacgggattggcaacccaagacgggtagaaagcttcaattatgaagttgttgctgcgtagcttttctacctcttccttcagggctagtcctcgctctttgtccaatagccttcacttttgttgaactggtcggaagttgggatcaaaatttaggacgtgcgaaattacagaaggatcaagtccgaccatatcctcatgtgagcaggcaaaaacgtccaggtttgctctaagaaattttatcaactctgattttacttcgagcaacaaac

SEQ ID NO: 340372 - DNA, 516 bp, Cannabis indica
tttcaagattaaaggcacagctcgcaaaacctcgcgtcctttctaaacctcaggacgacaaggagctggggatataacctagcggttacggagcatgccgtgagcgctgtgctgatcagagacgagaacagcgtacaacacccagtctattacatcagtaaaagacttgtcaaggccaaaggccgatatccgtcgatagaaaagctcgcctactgccacattctagcaacaaggaagttgaggtattactttcaagctcaacctattcgggtgtctactgaccaaccactacgacaaatactgtaaaagccagatgcctctggacggttactcaagtgggcggtggaattgggtcagtatgaaatcaacttcctaccccgaaaagattttaagggccaagccttggtcgactttgtggtagaatgcacaggcaaaaaagaaagcataccagaaagtgatcccgagccaaaaccatagccaagtaatattaaagacaaacctgttgggttttatgcc

SEQ ID NO: 340373 - DNA, 610 bp, Cannabis indica
aaaaactagggttcccaaaactaccccaaccagtagaccggttcccaaccggaattccgcttctgaggggtttcctggggaccaaccggaattccggttcctacaggtccccctgaaccggaattccggtttagtgcaggaaacaccgaaaattccatatctcaaccaaaccattcccaattcacatgaaaccttccagacctgttctacacatcctaaagatcattttccaagcaacaaaatcagtacccaaactcaaaaacagtaaatgccattaaagctccaagtttgagttctaaaactcaaaacttggttaaactaactaacagccattaaaacctgcttgaatccacatatctaaacataagtaagtttctgaaaacaaaaccaaacactaacagcagctacaacaatacaaaacacaaagcatgcataaatccataacttaaaacccaagaaagctatgaaggagttactagaggcttacccaaagcttgaaaccaccaactccttgctgaactaagcttgaaatgaagaagaaattgacaaaccctagctgcctctaggtgaattcgagagacagagagagagagagttgagagaaaatgag

SEQ ID NO: 340374 - DNA, 557 bp, Cannabis indica
cattgaatagtcacccatataaaatatatatatatatatatgaattggatattcataagttaatacccacatacttatgaaaaaacccttgctaaacacaatttactaaagatattagactatttctaatggatggtgtatattttatgttaaatttggcccaaaacataacataaagttatatttggcccaatttttttatttgtgctccaatgcacaagatacaaattaattataaagtcgatattaccaataatactcattaaaaatatacaaaacaattaattatatttatattagtttaatatcttataatatacactacaaaaaataactacttttagtgacaattttttagtcacaacataaatttttgtgactaaataaggcatttatagataaaaataaaattatacctcatggtcattacaaaggatattgtcgggtataaagtatagttccaccatacctgttacattgtttacaaaagtccacttagggccagtttggcacagctgtgctgtggaaaaaaagcagttatagctgtgctgtgagaa

SEQ ID NO: 340375 - DNA, 699 bp, Cannabis indica
catggtgccctttaacatttctcagagcattgatattggataccattggtgttcaacaccttctagatgggcattaattctatcctacaattggttaacaatatttcttaaaagttattatattgaattatatgaacccaatacttaattgtaccaataacgatatgaaacttaggaaagtgttaggcaccagtagtgccttttaatattttttctattgggcaccagtgttgtatagcaccacttatgtgatgctttaaaattgtttagcaatatttttttaaaagttattatcttaagttatgtgagattcgatacttaattacactattattaatatgacattgaaaatgatgctagatatataagtatattttagcatttttcttttatataaattgagtaataatatgtataaacataaactaatcccccacaaatatcctatgggaggtcatattttttatagctaggagatgattgtttgaatttgtaaagtccttttttggcaagttagttgacaaaataatttttccatttatggtaagattggtgtgcattcatattcgatttcttaccttataaattcggattgtagttgcccttttccttgtttggaaagttgcactttcagctgaactttcctttgttgaaaacttctcaaaagagaaggaattctcttttggaaagttgtctttt

SEQ ID NO: 340376 - DNA, 534 bp, Cannabis indica
ttaggttgttaatccaacatacatgatagtaaatatatcctggtaaaataatttccaacagttggttccgaggaaagaaccaacgtcatagggtttacacaaacactcgtatgtcgtcttcttcttctgcacttcttcttcttcccacgataaccagcagccaccagacctcctgaaaacccacgaaaccctcgccaacaacaactaaaaaccccatatctccctcatttcttcaccatttcatcccattttgattttttctattttcaatatctcatcccatacacaaaaaagttgtgttttttcacccatttgcactgtacacgaacctattttaaaaaaaggtggtggtataactccggctactgattttagtagagaaaacgttgaatctcaacgtccattaaggtatagatatgctttctattctttttattaatgtacattggtattattttgtttttgtaaattttttggggattttttttattttattaatattatattgtgcgtgtgctataggtggctggattt

SEQ ID NO: 340377 - DNA, 674 bp, Cannabis indica
gttgaattaagcatgatttagtgactgttagtagagttaaacaagttttgatttataaaactcaaacttggagatttaatggtgattttagattctgagcttgggtaattattttgttgcttggaaaatgtttattgaggtacaatatgcaggtctcgaaagtttggtaaggtttgaagttgatttggttgagctttgaatttttttgggttttctagggaaaatcgggtaccggttaaccgatttttgcagctgggattctcgaaaaaatcaggttgtcgattcgtgctagttttaggtttctggttggttaattccctgctagtttagggtattgccatattaagatgcagtagatagggttttggttttaaacctaagtctcggttgtggtttagcgagccacttatccatgttgtaatcgatgtgatttaggagcctgtaatttgccgagcagttgttccactcaggttgaccggcacacctgaattcagaattgaggtaagattagtataatgtcatgtatatgttattacatgtttagcacacatgttgtttatgcctgttagattacattgacaacagtaatagtatacttatagttgtactggctaccgataaatgtatgttggctaaaatactaatctatgttgtcacatcaatatggctagagt

SEQ ID NO: 340378 - DNA, 656 bp, Cannabis indica
atgtgcttaccgaattttgggtataacaattgccccttaaaaagttctttttctttaaaaagatctttttaatgattacaaagggtatttacatcatgttcctcttttttgaaaagatgcattccctctgattttagcggttgtgcagttttgaggtacatcaaaattaaatgaccatctttcccacttctgcttcaattcatgcaaattccttttgaacgaagttaacttgcgatcggcgggccttctcgatggcaaagaatacacttgcgattacaaggttcccaagtattcttcttggcatcaaataattgttccaccccaagatcaggcttgggatcgcttggctcaagcacaataccttcaaagcagtgctcctcgagaatccggtgaaggagcatcccgaggtaatcaatgtggctggtcaccgactgtacttagggctaagcgtaatacaatagttaccttccaagactctcgtcttaatttttatacttggaattccattcttatggatcgcattgctcataattttgacagctggtatctagattccacgtccagattaactgtcacgagtcattttatggtatagccgagcaatacggcaatacagtactatagaagatagggcgggtcacatagatgcgagctgg

SEQ ID NO: 340379 - DNA, 725 bp, Cannabis indica
gattagcaacgagctgcacagtacgtttaaaaatcacgtaatacgcctatgctagttaggatgttacaagatcagtactttgcaattttttttctagtaaactcatccctatgatgactacatagaattaaatttataaatatgaaccaataatagaagctcattgttatcccattttttggcctcctaacgtggcatgcttacgaggacaaaattagcgccacatggtcgtacaactcatcaataagaacgccaaattagcacctaagcaaacagagacccggacactcaaacgggcatcaagtgacagaccagctccctcataggagctagccgaccctatggccaaccagccttggcactgcaccatggccggccagcctgccctccataggggcttgtccgaccaggaggtattctgtagggtttcctgtgtacttctatacgtggataacatcctatgggctgtgaatggggccctaaaagcccaacaaaatagctaaataatatcaacattcaatgagattttggtcttttgtaattaactaataaactatgcaaatctttagagttttaagttgtaatctagggtttaggcctcctatataaaggccttgactctaacctagaaacctaagtttagtctaagcctcaaacctgcctcaaagctctaagcctaagtctgacaacttgtctcttcttcacttcctctctcacgcgtccat

SEQ ID NO: 340380 - DNA, 558 bp, Cannabis indica
ttttagaagttcatatttagtgtgttaatcaacatacttgtgagtaaatctaagatcctggtaaaataatttccaacacttgcgactgtcactgctgctatattgcgtgagtttgtatacagttccatcatctgcaggttcgacataccttacaaattaatctctgacaatagaaacaatttgattgtaaggaaatgcaccacctatgcgatgagttgggtattaagaaagcattttcagcagtcgcatatccatagagcaatgttcagacagaggcaataaataagatcattaagcataccatcaagggtaagctcgaagaatgcaaatgtgtatggctagaagaacatccacaagttgtatggtcgtagaatacaactcctcgatccacgactggtgaaacccccttctcgatctcttatgggtgcaaagccatggtgccagtcaaggttggggcaagatctctacggagagatgtatttaaccttagtgaaaatacaaaaaatcaatttcttcaactcgatcttttagaagaaaagcgtgatcaggctcatttaa

SEQ ID NO: 340381 - DNA, 726 bp, Cannabis indica
gttatagaataggatactttagaaaaaattggtaaataaacttgtaaaatcatacaataatcgtacatcggtgtaaaacatacagaaagtcaaattcaatgccaaattacaatcaatcttaaagtgaaactataaaccaagcaaaagtagctactctagactcgcatctataaaatctgcttgaatgattgtaagagtccctacaaaaatattatagtgaaaataagagtccaacaaactaaaatatacactataaattaataagtaaaaattaattttataaagaggaatagaaaaacgtatctcatcaacaggatctctaaatcttcattagaatttttgggataagcaacaaatttttaacattatcacaacatcaaactttttttataactaacaaaatttaattttaacaaaacgcaaccgaagaataacaatatatataattacttttaatcatacaaatatataataatatatgaatgattatgatacatttaataaaaaatatatttatgtaaaaatatagaaaagttaccctatatattattttttagcttttttttttcaatttatggcttgaattcctccggtagtatttatgtgggttgttatacagattttggttgcgatttaggtttcttcgttagttgctatagagatttttatgtgaaattccgtaaaaatatatataaaaaaactgttttaaagtgtaaaaatcaaaaa

SEQ ID NO: 340382 - DNA, 845 bp, Cannabis indica
tgttggaatcgggcaggagtgaacatcacggctgctgctgctggttttgatttttctctctggtttgagagtcttttgcaccgtggacggtcaggcatggttgaggaaggattaatggtggcttggtctatatggaaagcaagaaacgagttgctatggaacaacaaaattcgaactgctgcggatgttgtcattggtgcacgttcaacccttgatcaatggagttacgctcaatctcatcgatttgatcccttgttggtacctgctgccacgaaacacaaggaagagcattggtttaaaccagaaattaataaaatcaaggtaaacgtggatggtgcaatttttcacagcaacggatttcatggtattggagcagtggctcgggatagtgatggacaattgattgaagctttcactactctgaaacgtggagttgttcaaccagccactgttgaagcttttggaattaaggaggctttgagttggatcaagtctaagggatggtctaatgttattgttgaaactgattcaattgtgtcagttcaagcactttctagttctcttgttatgccttcaatttttggtttgttaattttggattgtaaaagcttgttaaattgtttggttaatgtttgtgtgtcttttgttccgcgatctgctaacagaaccgcccattgtttggctcggggttcttgttattggtctgatcgcatcttcaatgtcagcaatgttcctaatgttgtacattctgctataatggccgatttggctattataagttaatgaagttccaccttctattcaaaaaaaaaaaaattataaatattaaattaaaatttataatt

SEQ ID NO: 340383 - DNA, 526 bp, Cannabis indica
tgtttcaaaatttgagactttttttttttatagtagcgtacattgtacttatttaagacatcctgtaaaattttaaaaaatttggataaatttaacacgccgaaaaataaagttcaaactgtctattatacgagtaactcttttattcaaagagtgtaatataaaagcacattttaatttgttgtgtgtaaatttaaatatgaatactataaattatttttatagtaataaaaataaattttcaatgcacatctttaaaagtggtatacttatatactcctacttgtttcgacaatcgagagacaaaaaaaatcaataatataaaagattattttctgatctaccgaaataatcataatatggattataattttgtgaggcattattgagttttaccgattttacaatattattatcttttaacaattgtagtgattttattaaattaagataataatatggaatatttttttagtgtaatttttggtgttatggttggaatagaaataatttttgacactaaatt

SEQ ID NO: 340384 - DNA, 660 bp, Cannabis indica
cttgaatgtatattggttgacatgaaccgactttttattttactggatgcagggctggtgctccacctgttcaaagaaggtttggaaatggaaggtttgcttctaaggtactcttttgtgctcagactattagtcttctataagctcctgcagattactgtttggcattcattttctttataattataggctcaccttctggtttatgtgatttgctgagggaaataattactattcttgccaccagtttcttgaataataattcttaattatataagtaatgataacatagggttggaagtaatgaaaacatgggaatgggaatgtgtgtgaattttctttttattgcccaatggactttaaacggtagactactctcaaccaaacatacacattaaacgggtgcatttcaattttggcaacgggtgttcaaggtaatactagagtatttcttttacatctttaaagttcctttctgattatgttgctttccagatgaagatgtattaagctcagtcaccagtttcggcccaattttttgggtatctccgaatgcttgccttgctattatgatcctaatgattttgaccatagctgccttctcatgagttgtcatccaaaggtagattcagatgcacttgaggtggatgatgagaactc

SEQ ID NO: 340385 - DNA, 592 bp, Cannabis indica
ctacatgacataaaaatgcatctctgaattcaataataacagtataaataaattatttaaatagctataagtaattttcataagtaatcatgattaactgctaatttccaaattaaactaagcggtctttacaccccctctctgtgggtcgtggtgcggtgcgaagagacgaccccttgttgggggctgtggtgtgacacgaagagaggccccctcattggcgtcgtggaatggcgtgaggggccctcgctggggtgaggagcctgagaatgagggagggccttgttggggctcgaggacccttcttcatctttaaaattctcgtttcttatagcccaagctttcgagcaagttttttcttcaatcgatcaacataagtaatttgggaatcttggtctcattaatgcgcctcattttttgataataagagcattaatttctcgtatcaactatgcattgaagcacaatagtaaaaagtgtattgaatatagcatttactaattttttgtgccaaatttagcatatatttttgttaggttttatgccctaaataaaactccatctcaatgtaatctattttattcaacatcaa

SEQ ID NO: 340386 - DNA, 797 bp, Cannabis indica
gttctctaaaatttcaatacccttaactgagctcactaaaaagaatcatcatttaatgtggacagacaagtgtgaggcaagcttccaggagctgaaatagagattaattataactccagtgttaaccttgccttctgataaggaaaaattcgtggtgtatcgtgatgcatccagacaaggtctggggtgtctattgatgcaggttgatcgagttattgtctatgcctctcgtcagttgaaagattatgagtagcggtacccaactcacgacctagaacttgcccacagtagtgtttgctttgaagatttggtagcattatctctacggagaaagatgtgaaatttatactgaccataaaagcctcaaatatttctttactcagaaggatttgaatatgagacaaaggcattggttagagttggttaaggattacgattgtgagatcctttaccatcctaggaaggccaatgtagtggtcgatgccctgagcaggaagggtcccgtacaactaactagtatggtttagatttcacctcagttagcagaagacatggtcaaattaagcatcgagtttgttgtaggcaaacttcataacttgacgctacaatctgatctattagaacgaattaaagttgttcagctaactgatccagagttagtgaagatcagggaaaaggtatcagctggtcaagctagagactttacagtgtcaaatagtgggatgctgttgttcaagaccaggatttgtgttccaaatagtgtggaacttagaaatgaaattcttgaagaggctcat

SEQ ID NO: 340387 - DNA, 964 bp, Cannabis indica
ggaaagttgcaaagtgaggcccgatttccttaaatggccgcccactatgcaaagccttttaccatttttattttttcattattttaatgccatacaattctaacctaaacctagagagcattctataaattgaaaatgttggcttcagggaactcatgactttgtcacattgtttcttttcagaaaaagcctagccgcccctctctctcttttcctctcttaaatttcaaaaatccttgagtttatatgtgtttatttcattgttgtagtaaatctagatcttggtaaaatatttccaacaactgatgccttaagcagaaaggggcagagtcagataaatactgtgaatcaaatctcccaactgctagaaaatgagatgactcgagctaagattgagttggttgtagggcaattagctaatattaccctgcaatctactcttttggagcgaatcaaagaagcacagttgcaagatccatagttagtgaaatccagagatagggtttcggctgggaaacctagtgactttacagtggatgaaatgggaatgttgcaattcgggaatcgtgtttgtgtgcctatggatgatggtatcaaaagggagactatggatgagtctcatacgactccttactcagttcatccagagtcaacaaagatgtatcaagacctgaaagccatgttctggtggccaggcatgaagaatgacatcgctgagtatgttgcaaagtgtcttacctgttagcaagttaaggttgaacaccagaggcctgtagggttgttgagccattgaacataccagagtggaaatgggaagatattgctatggacttcgtggtaggtttgcctagaaccatgggacagtttgactctgtgtgggtcatagtagataggtttacaaagtcagcacacttcttacctgttcgaacgaatttctccaatgatcagtatgctgagttatatg

SEQ ID NO: 340388 - DNA, 587 bp, Cannabis indica
tttttccttttaaaatgcaggaatggaacacagcatgtgtgtgatcaagtatgggagccaattggcagacaatataagttatgatgactacacaaggtttggaatactaattccaatcaattcttcactaaaaaacttggttgagctaataaaaactaagatataatgcaacaaaaataccatagacatatcctaccagatatcaccaggaacaacaccaatgaagctactaagtgataattccctcatgttctacattaagctcagaaagacatgggcaggagtaactgattctctactatgcatcacaactatagaagagacaactatacaaatagtagaaaatccttcttttgaacaaccaatgcaaatacaaaataagattgtggaagaactggttcaacaaatacacaacgaaccattcaaccaacaatctgagaatgaatgagaggattcaactgagtataactaggtagaaaactctccaaacatgtgttgggctttgtgccccaaataaaattctattttaatataatcttttctattcaattatcaataaaaaatagatttaatttcattacttgttt

SEQ ID NO: 340389 - DNA, 697 bp, Cannabis indica
tttatttttttaaaaacaaaaatacattctatacccattttgtgctctaattttaaaaacaaaaaataaaaatgtgttctgtaattttttttttttcatttttttgattttatttaagttggatctaggtcaggataagattcaggttcgggtcagaggtcgatttcaccactagggttgtgggaggggatttgggttcgggtctggtcggagtccaaaatattaattaagaaaaaaaactgtttaaaaaatattgaaagtgactttttctttgtttttaaaattttaattctcaattaaaaaattaaaaagtaaaaatagttttatagaacatgtttttgaaaaatcacttttccaattttaaaaacagaaaactgattaaaaaaaagtgttaccaaatgccactataaaatttgagtttgtaagtagcatgaattcgaattttttttttaaaaaaaatatgatccaatttattctacaaatacattattttatattttacaactacaaacatacaaattaattgttcaaaaactaattatcttattcttttaactaatattaataaagaaaataatatattatttttatatattattagtaactataatacatgaatttttttttaataaattaatatatatgtataacggtcggtttcgattttttcggtggatttattacccaaaaaaaaaat

SEQ ID NO: 340390 - DNA, 705 bp, Cannabis indica
aagacccaggacgcgaacccacaccaggagcctgatctggacggagactgaaatctggacccgaacccaaactcagacaattctctaactccgacccaaactcgaactcataattgcaaatggaactagaactgaactaggaccaggaccaggacataaacccaaagttgaacccagaacaaaaccaagacagagacctaatcccgtagggagactaggactcgaacccgaacaaggaccgggacccaaatccacacaataactgggacctggacccaaaataaggatagggaactgggaaaccaaactaggatcgtgacctagtacctgacccagacctgaacttgaacctagaaactagctcgtgacgcggcaccagaaatggaacaagactaggacacgagatggggttccagatctggacctagggcttggacaaaacccatagtcggtgtctagatttgggactaacccctggagacgaacactgacgaggacccgaacccacacccggatcggaacccagtcccaaacccaaaattggaaccgaacccataccgtgtgacccaaaattggaaccaaaactcgaagtcgacctggactggagctaggacttggacttggaatcataactgaaattggacctagatccaaaaccgtaaccggaccaggacccagactccaaatgagacctagacccgaatt

SEQ ID NO: 340391 - DNA, 850 bp, Cannabis indica
ttattaataaagagtagtcattaattattcttagtcactcaagctcctataaatacaacgaaattaaataccaaccttaccttttttatatttctatctaaaattttcaaaaaatatataaagaaatttttttgctctctttattagtctctcttccttttttaaccaatctttctcaattctgaatataagattcacttctttaaatattttcaacataacgtctacttttcaaagtgatcaaaatgtttaatattttcaacattgttgttgtttcttgatgaggttataactttaatccaatgcttaaatgtggaagagaatcgtaacaagtcttttgcaatagatggttctgatactttattgcgatttttaaaaaagtaatggagttggttggaccattttggtaaacgagacgaataagaaggaaaggaagaagacaatatcttatttgaatgatgaaatcgaagacgaattagttcaccatatcatcaatgaagttcttcgttttgaggtaagcttttttagtcctgaattcatccctatagagatcaaaaacttcattaaagtgtttcattcaaaggtagaggatcttgaaagtaaggtttccaaagacaaattgaaaagaatccataataagataaatgagcattggagtaattgtattgaacaatatttggaccaagaaagtaatgatggtgatagctctgattatgtttttgttcagtggattttcttttctcaagtgttgagtgatgggattcaagaaatatggagtgaacatgatccagaattatagtaactttgttcttctttagttaattaataaatttctttatcattgtaatgt

SEQ ID NO: 340392 - DNA, 1176 bp, Cannabis indica
gtttagaacgggaagtacttctaacatttctagagaaagctactgctgcggaattatcacaatacaatttcagcagcctcgagatagagtccataacacccaatgctgaaatgaattccgcagccatattgcctgacaagtagcctcataacacgccatatactctgcctccattgttgaggatgttgtgagtgtctgtttgacacttttccacgaaacagctcctccagccatcatgaaaatgtagcctgatgtggatttcttatcatccacgcatcctgcataatcggcgtcactaaacccaactatatcaagagtgtcagctcgccgataagtcaacatatgatccttggtaccctgaagataccgcatgaccttcttagccgctttccaatggctaagtccaggatcactcaagtatctacccaacacgccaacaacaaaagcaatatcagggcgtgtgcatacttgagcgtacatcaggctacccacaactgacgcataaggaaccactttcatttcatctctctctttatcattttgtggacattggccctttgagaatttatcacctttcactattggtgcctttccaggtgaacaagtatgcatattgaatcttttcaaaatccgatcaatgtaagttctctgagacaaccgaagaatacctttagatctatcccgaaggatctgtatcccaagtacatatgaagcctcaccaaggtctttcatatcaaaatggtcagataacaattgctttgtctcagacaacagatttttatcattagaagcaagcaaaatatcatcaacatacagtaccaggaagatgaagctgctcccactgaccttcatatatatacattgatcaactttgttttccatgaaaccatttgcagtgacaactgcatcaaacttgagataccactgtcttgatgcttgtttaagtccataaatagacttattgagcttgcaaaccatatgctccttgccaggctcctcaaaaccaacaggttgagtcatgtagatatcttcatacaaatctccatttagaaaggcagttttcacatccatttgttcaagttccaaatcaaaatgagcaaccatagccatgataattcgcaaagaatctttgttagagacaggtgagaatttttctttgaaatcaataccttctct

SEQ ID NO: 340393 - DNA, 743 bp, Cannabis indica
cttaaaacgatttgtttgtgatttcgatggtattatcatgttattttgtgtgttgtattgatgattgattgatgtttgtgaaattctgggaaaaataagcaattttcttttttacagaactctatttcgattttatttgaattagttatgaatttttgaaaatcggaaaaaatcaaggtggtgattgttaggctatttttagcatacgttttgggtcactttttatagtttttttccttctttattattatatttggaatagaattacgcttgttttctttggtttcaggtttcacacttggaatgtataaattgatcaaatttcggaaaacaacaatctataaaatagagaaaattctgcaagaaaataaagctgaaacttcaagcttaaatttgactatgttctaatcagattttggaaaaagtcaaaacataaaagttttagatttctttttcttctttccaacgcatcttgaatcaactcatttggagtttgtatgtgaaagttatgcacattttactgaaagatgctgaagctgtcaaattttgctccagtagtcgcgaccaccactttccatggtcgcgactaggagccaaacagcaagttttttttcgtattttgcctatggtcgcgactaggctttatatggtcgcgaccagggacgaaatacgagatttttggccagttttttactttttaaaggtagcaaccctaatttctatttaaggggctcgtgttttag

SEQ ID NO: 340394 - DNA, 805 bp, Cannabis indica
ataagtcgataacctaagacatgagagtcttgatcaggttatcgaggttgttgggtcattcgaactagctccctgagtatagaatcgatctctactacttgataactttatggtatagagttattttttatgccttaaatctaaaaatattgtgaggaaagtagtgaaaatgtgtttgattgcttaattttaagtagttttggtttaatttctaattagtaagctaacttttgagtctgtaaaaattattgtgttaattgtcttttttttattaaatgttgcttgtttgttgtgggaaagaagaattaacttgataggaaaagggagtgaagcaaaggaaaagtttgaacaaaagctcaaaactgggcagaaatgctgaagcaatgttatagcattttaggcaggttgagaaaaaacgtgaaaaaaagtctaaaaaacaactttcacttatccacatcagcaaattcgtcccagtcactcaaaatgcaccagctggctactgtggaaagaaaaagacaaaatgtagtgggccaaagtggaaaaagattgggcttctatttttagggtatcattttgtaccctaaagacccaacaactaatagaggagaaaagcaagtacaccatcatcatctttacaataacgtgcagctgccattttgaaattccatattttaatattcccagtttaattatttaattaagtgattaattaaatgcggaataatgaaactggtactgaaatcagtttttccgtagataaagaataaaactttgtaactccagagaaacccagaaaaacaaacag

SEQ ID NO: 340395 - DNA, 1083 bp, Cannabis indica
caccccagctagtgaaccactgagaacgatcctctacagccgtcgcaatccgaagaagatctggccgttaatcacgctctgatcgaacagtcatgattcatccaccaggtttggtttcctgtctccttagaactcaaggaaacagaggttcgagcctatagaacagatcctgttcaagtaaggtcgtgcactgaagattagaatttggactataaatacaatagatctttgtttcagatagtcgatgtgggactctacttctctcttaacaactaagcaactacaggtgtcgttataatttagtttttgtattaaaaatatataacatgtgaaagtaaccaaggattagatccttctctttcggttgttgtgaaaaatattcaaattagaaaactaaatgcaattaagtaaaagaacaaattataactcagttcagcactctcaacagctgacatgatttatattttttagcaagtatcaataaaaaagcctatctactagttgactagtagtccatttggagccttaggtgaacttcaaaatactaacaataaaaacaaacaaacacaaaatactaacaataaatagagggaaaatcaaaacaaaacaaaccataaaaacactatacaaagaattgaggaaatgatacattgtccaatgtccattagttgcatgtgacattttggacaatattaattttcaagatcattgtcacacaggggacataatgcattaatgcttacagaatgaacataaaatttacaagcagatttagcagagaatcccccattagagttttgataatagtactattacaaactttgttgttgcattgtaagccctttgattcacatattttaagtaataggtagaatgagttcaaccttgtggctcgtacatgagtacaagtttcaattaaacaaacatttatactttctactactgatattgaaacgctgcaagcttctcaatcgtaatagtccttaatgactcggagatcatggaagcttgactccttgtcgataattcttgtgccacaaaatgcatagtgggtcgtgaatctggtctacttctagtacatga

SEQ ID NO: 340396 - DNA, 973 bp, Cannabis indica
tattaatgccttgatttttttttcaagatttgcttccatacccctcgtgttaattatgaatcccaaaaattttcctcaggattttccaaaggaactttttttcggtttagcttaatgttatacttctttaatatctcgaagcattccgcgaggtctgtggtatgacacctactttttatttattttaccaacatatcatcgacgtaatctccatgttccacccgatctggtttgtgaacattttgtttaccaatagctgatatgttgccccagcaatcttcagtccaaacgacatgactttataacagtagagtcccctgttggttacgaagcttgtatgttcttgattagggacatacaattttatctggttatatcaagaatatgcatccataaatgacataagcttgtgcccagcagttgcatccactaactagtcgatcctcagtagtggaaaacaatattttgggcacgctttattcagatcggagaaatcaatacaagttctccaagttccgttaggcttcgagacgagaacaagattaactatccacgatggataaaacacctcgcgtatgaagtcgttaaccaacaacttatccacttcttgttttagtgaccctttcctttcgaatccagaggtctccttttttgcctcttcgatgggtagcttggatcaacatttaaatgatggaaaataatattagggttgatccctatcatatctccatggctctaggcgaattgatcctggttcaccttcaaaaaacttattagctgctatttgagctgttcgtctaggttcttccctatgtatacaaactttgtgggatttcctgggtcgagaataacctcttccaattcctcgattggtttcagtaggtttctctcatcttggactcgggggtcaaaatctttgtctttcttttcagtttcttctgccaagatcgccatccactgatgaccagctttt

SEQ ID NO: 340397 - DNA, 606 bp, Cannabis indica
gactaaaagtttcctcatagtccacgccttctctttgggtgtaacccttggcgaccagtcttgctttaaaagttttgacttcgcctccagtgcctcttttcttcttttagacccactcacatccaattggacgttagttataaggtgcatctacatattcccaaactttgttctttttcatggaatccatttctgaatcaatgccgactgaccattgtttttgtttgggacttgccattgcctgtttgtaggttaatgggtcatcatcaataccatcaccaatgaccttattgatttcaccatccaagccataatgagatggtttagtagaaaccctcccactacgacgaggagcggtgaccttctgaacaggaacttttgtggtagttctctcagctgtaacatcttgtgttgtttcaactgagggagtgggattatcctctactcgagtagaagaggatggaacattacaaggtgttatacctgaaaccatttcttctaacgcaactttacttttcggcttgaagtctttaatatagtcatcttcaaggatggtagcatttgtagagacaaacactttgttatccttgtgactataaaatagtc

SEQ ID NO: 340398 - DNA, 615 bp, Cannabis indica
cttttggatttcttttgagttgattgcagcctttacttctgacataaaaatacccagaaaaatacaacaccgcaagcaattatttgaaatgcagaaaagaaaataaaggaaagagtgcaccgatttttatagaggttccccaaaaattattgctaggtacatcctcttcgatctcccctcagattgctcgtttccattatagaccttcaaagataaaaagattacaccaaatcaaaggtacgattggtaatctataattatttatagtgtttgaaaactctctctttctctctatttattactaaatcaaaacagactttttctcctctcttttccatgaacaatcaccatccgagtttattttcactaagataagattgagtaaccaccatgctagtttaattttttatgctgtgctcaaaaaagattcatactccaaattatttttttttccttatccacttaaattttatttttataatttaaaaatacacttaacatttgagggttagtttggtacgcaggattagactggactggacaagattagatgaaattatttaccccaccctgccagatgggataaataatcccagacatattagattagctgta

SEQ ID NO: 340399 - DNA, 300 bp, Cannabis indica
aaaataatttccaacaatagatcactataggttggatctgatatagcatttttaaggatacaaagtagaaatcgaggttggaaaatcttaagtgttgagaatgttatgggcctgtgagagagagtggggaagagagttatcaaacttaggcttagaacatggaggcttagagactttgttatggcttagttctcacttagggtttttaggttagagttaaggcctttgtataggaaagcctaaaccctagtttacagctaaaacctaggatatttgtatatttaattaattaattataaa

SEQ ID NO: 340400 - DNA, 955 bp, Cannabis indica
tttaactaaaagcggaagcaaaactgaattactttaaaagtaggaatcaagaaagtactgttcaaaacaatctgaacactaaactgtaattcaagaattaatgtgccaacatatataacatcaactccaacataagtgccactttaagctttgactccctctcacttatcttctgagatcccttagcccctggttgtggttgcttcttttcatattttctttatcctttgttgggcttgagttgagaaacaaagtgagaagactcattcttctcattttgttagcttgcttgttggaacaacacactgagaaattaggtcactaaaactccatgctttattataagtgtttaggttgtcttgataaagctaaaagagacaggaagtgcatgaagagcacgatgaataatgtaagagttaggaagaggaatattatgatcttgcaactcggattgaacattaataaaacctcgcactcctttgatttatcatactgaatggttgtcattgcatccataagatgtccaactgcagcgatttcaccagtgtcaaatagttttttctactgctttgaaatattcattagcatttgtggtgtttggcaaaccaccaaaagacgttcaggaattgaacgtttcatagcaatgagactaagatgatttgaatttttcccttgtacatgaagaattttctaagcaacaatactgatattagttagatcagcatatttttcttctcccaggcataagtccaaatctattatgcctaaagtaattttcacatctcgtttccatgtcttaaagttggaagcattcagaattcagatagaaactttattgttgttctcataaaggagaccaaaaaatccaaaaaattaaaacttgatcaagctatatgagccaagcaattagaaaatattgtagaattaactggtcattataaactcccctttgggg

SEQ ID NO: 340401 - DNA, 1897 bp, Cannabis indica
cattgtaacgagaggggaaagacttcgtctccaagttcacagccctataaatagtgatgcatgttcactgggcaaagggtcgcaaacagtttagtcgagactttaccctagagatattatctaagaattcatattcagagatactgttataagagctataagaaaaggaacctttctccttgttcttgaatcaatacaaataacgaggattaggctattaccgagcttcttggggctgaacctctataaaatccttctgtctttacatcgctttattatatatcgattgctataaatcacttatcgcttactaaataagactcattgtcgttggctaaaagtgaggtcaacattttggtgctttcattgagagcagaatcaagaatcgctctccattcaaaatctaaccacaaatacgatggtggtgcagactcgtaggggtcaggttgatccagcaaattcacagacggtggattctgcattgcagaacccaggaaacacaagggttccgcaagctgttaatcttgaagagccgacaaacgtgggtcacggtgtaacgactgctatagatgaaatcgcgcgtggtgtgcaagagactaggaataacagttccgcacccaaccagggcattcataacatagtcgttccgcccagtaccaacactcaaacaaccattggagattctactgagttacaaaatctccgtgacgttcttggactcatgcagggtcataacaataccctacatcataatcaagaagatctccgcgatgcggtaaatctcgcgttcgaagaacaaaggcacatgtttattgagtggagagacagagagatggaagcgctaagggctcatcatagagagattgaaaatcgtagtcggcaagctaccgtgctgatacgaaaggcctaccaaactttaggtcagcaacctccgaatgtcatccccctgggtgagacggacgaagatccagcgatgaatacttcccagactgcaaattgtcagctgcccaatccccgctcacgagttccacttgtgggccaagcggtaggcgggcagaccttgtctagtaattcatcgggagagatcatacctgatggttccaaccagattaacggtgccattccacctgtcgaccaagcaaatcaaacgctaaggcagccaggcacttctgtattcgaaaggttggggacaactcatgacctaaggaatgatctgaatagaaggacatgagtagacgatcagaatgtcacgacgatcgtgcagccttgagcgtgctcaaattcttgctcagaaagatgcagacgtgattcaaacagactagaatgccgagcaggttagcccagccgtacaggcataactagacgaactgaaaaatatgttctaaggcatgcctggacaaagaaacaatgatctcgagctggaccgagcacgcggaactcctttttctcccgagatcaatcttttggcattgcctcacaagtttaaaatgcctacacggaaaatgtacacaggaagagaagatcctctttcccacctcaagtatttcgaaatgcaaatggatttacaagtggtacgaggggatgtgtgctgtagaatctttcctgctaccctgttagaggccgcccaacaatgatatttcaagttggcccctggaaagttcagttcatggaaagccttctcttcaaaattccatgcacagttctcctcctctcaccaacttccattgcgcttgggagacctggttgaagtcaagcaaagaccaggtgaacctctccgcgcatacatcagcagattcatgatggaggcgaccaaagtttcacgggtaactgaagatggaaagttatctgcgatactagggggcattgaagtccttgacgaactttggaaggatataag

SEQ ID NO: 340402 - DNA, 699 bp, Cannabis indica
ttgtacactaatcataggaattaatagtgtattaatcttaaatatatcgaatcaggatacactaaacaaatcttatcatctgtggtggaccatataataagtctccacctaccactttagactccatctatatctacaaacaaaccactataaggcaatcacaattaataatacttctgaaaaattagtactaatagtgtaatagtcttacgtttttttttgattaattatgattttcgtcttttgaatttttacatatattaaattatgtcttaaattttttagattattaaaatttttcctaaattattaaaattactgttgaattcaatgagttttttttttttttttcaattttactaatagaattagtttgacgtcaataaaagtttaagaaatacgatttggtacatgtgaaaatttagagataaaatttgataaatatcaaaattcaatgggcacaatttagtacataaagaatcttcgtgttagtgaaattggatagaatagagcaaaaatctttaaatccaacaatgacaataattcaagaaaaaaatttgacaccctaaaaaatttagaaatttttacatgaaaaatccattttgcacaatttattacctaaatacctctacacgcctatgtctacatttttacttacaaagttggttttattacacaaataccacttagtcatcattc

SEQ ID NO: 340403 - DNA, 566 bp, Cannabis indica
tttttaatttttttttctagtgtaactctatttagttataacctctcaattagaatataatttatttggtcccaagtgtattcttggatagaggttctactgtataactgtgatttttggtttggtgttgttatgtttttttcagtctcgctaactctggcgacaactattaataaaaggaaggtgtttttcaaggtgatgaggtattgttcaaatacgttacagctttattgtctatatttccagagatagttttgtcctatgtggcttgcgttttgttttccgcagctcatggtttggcaaaacatgtcctttgattagacaatgagctatcttggttcgagagactccaccgccgattgtggtgtgctgcattgataatcatgtgtgactttgttaaaaaaaaaaattcagggtacaaagaccaagttgaaaatgacgagtgctacaaattgaatattttaagaattataattattactcaaacaaaattagtagcaaccaaattttaacccatgattgaattttggtaaatactatatttggtgtgattttattaaaaaata

SEQ ID NO: 340404 - DNA, 651 bp, Cannabis indica
taaaaaagataaaataaatggctaaaatccacttcagtggtcggccacacatgtgaacctcactagttacaattttaccactttatttcatgatttatcttttctttcaataatgctatatttttcaatttcaaccatataaatatcaaaactatttatttattaattataattaattatcaaataaaattgacataaacttatttattaattagaccttacaaagtctcttaattaacaaataaaccttaaaacctcttattttaacaattaagcctttgcttagtgtaaattcataaataagatatagtctaattttagaattataattgattaattaaaaccaattagctgaatctacaagcagtattatctcaactagtgtggagaccatggacttatgtaatcaagcttacaataagtagattcgaaatttaccaagtaaatttcttaacttattattttatccctacgacactatatatatatttagaattgaactcttaattacatagaacacactattttcaaaaatagatgctatttgaattacctattgtttcaatccaaatagtaaaagatcatctattaatgatctatatcgagtagagacaaatttgttgggttttgtgcccaaaataaaactcattt

SEQ ID NO: 340405 - DNA, 1651 bp, Cannabis indica
tactctagccatattgatgtgacagcatcgattagtattttagccaacatacatttatcagtaattaatacaactctatgtatgttattactgctatcaatgtactttaacaagcataaacaacatgtatgctaaacatgtaataacatatgcattacattatactaatcatacattgtttccgaattcaggtgtaccgcccaacctgagtggaacaactggtcggcaaattataggctcctaaatcacatcattcataacatggataagtgacacgctaaatcacaatcggggacttaggttttgaaccaaaaatctaactactaaaagttaacatggcaataccctaaactaacaaggaattaaccaaccaaagctctgaaactaacatgaatcgaaaacacaaaaagtgtacgaaaccgatttctaatccagttaaccggttttacacaaggtaacctaaaaatttcgaaaacctaacaaatttgactccagaccttgcgaaaccttccaggcctgaatattataccccagtagacatattccaaacaacaaaacaaataactaagctcagaatcaaaaatcaccattaaagagtcaagcttgagttctaaaactcaaagcttgctcaaccaacaaaatagccctcaaaataagcttaattcaacatatctaaacataattctatctcagaaaacaataataaacaataacaacaaccacagtaccttaaaattcaaatcacgcaaaaactcataacttaaaacttaagaaactaagaaggaagttactagaggctttaccttgacttggatttacttagagctgctggaaatcacaggaatttgatgaacaaaaatagaaccctagaacccttgctagttctagggatttcgagagagagagtttcttactttttcaatttttgtattttttttttttttttgcaaattcaaataaaattagataggttttaattaattaatttatcatcttaaaacataaataaaaatcagattatttaagttaattaaccttcactaaaagagaaaacacataaaagcaaaatgaccattttgcccttcccacactaaaagtcataaaaggtcacttaggggtattgtattcaattctaaaatctcaactattcccgacatttccaatgtctaaccatattgccccgctatactaaaaaaaatactaggatgtgattctaatagccaaacactgcgttccaatgttgtcgggcacaaaacatgcaaaattatgaaattccatatatgacatataaaatacactctgaattcaaataaatgttcgtaaattaataactcataactaatatgcaagtttaataattaaaccctaattatctgctaattttcaaattaaaattaagcgatctttacaattatccccctccttaaaaggatttcatccccgaaatctaacctgaacaactctggatattgagccttcatatgtcagaatctaactcccaggtggctttctccaccttgctatttctccagagtactttgaccaaagctatggtcttgttccgaaggaccttatcctttctgtctaggtatgataagtctagttgcagctcaagattttcataactcaatacatgagcagggtctgaaac

SEQ ID NO: 340406 - DNA, 575 bp, Cannabis indica
ttctgctggagccattctgtagggagccttagaaaccggctctgctgcaggtgccagtcaattacaaaatcaatttttagctgaggtggtaaacgtggaagttcaactggaaagacatctagaaattgtcaaaccactttaatgtcttctggccgaactgagtcaggctgagtggtatctaataccacgaccataaaccctagacatccctctcataacaattccctagctgttaaaactgaaattactaggatccgagatccctgaaccaaaacgacgaagacaaacggttcttcgccttctggttggaagattaccatcttcctcttacaatcaatacaggctgagtacttggacaagaaatccattcccagtataatatcagaatccactaaattcatctctatcaaatcagcactcaactctctatcctctattttgattggcatagacctaatctaccttttggaggaactaactctccgctaggcagtagggttccaaaccctgtttcatagctatcatgtggtctatccaatttactaaaaattctggacgccacataggaaggaatg

SEQ ID NO: 340407 - DNA, 1788 bp, Cannabis indica
agcataataaaatattgtttccgattattttttattttaaactcattcatttctctcattgattattctgattccatttaaaatttagtaaatgcgccattaaagtattggaataagattttagaattattacatgaaaaacacaaattcacactttatttataaaaatacttgtataaggtgtagacaatatttatacattttatgtgcttttaattactaaaatacctattacactatcacttacacaatcagacaaaggttgatgggtgttcgacagaaggttgcatcagacaaaggtttcaattccaggaagcatggatcgtgggttgctgttgaaactgtaatgccatagttatatctgttgcaagccaactaacgtgcaacttaattgcaactaaaaatgtaaaatgtgaatgtgtatatgtaagaaactatttgacagtatttttttgtcactaatcaataattacttgtaccttaatagtaatatgtagagaaataactattagcaaaatatttatgcaatggtaatgcaactgttatgaaacattaaaaatcagaatagtgtttccacgtatgtaactttatctacggttgggttttgtgcccttaataaatctcatttcaatataatcagatttactaattagtaaaagatcataaatcatttatattgcatggttcacatgatttattttatgattatatgtttaatgtataaattctattaaatacagaacatatagttattcataattacagtattgtcaaaacagtggaatacaatcatgattatgtttcaaagtttaagtcccatgatttgtcagtatactggatttagactgacatgataatcaacgataaagtatacttacaccttggataagtgatgtcttttccaggacattggcaaagtatgctagtatcggatgtatggagtatacatcgaattggaccgatattaaacttggataagatatcataaactaactgttatatctttctaagtcaatatcactggttgatcttagctcgatagatcttaatcctgatatggttaggttcgatcgcaattgtattatttatgttcttagaggtgttcgtgaaagttaactaattaatggttcgggtagatacttacatcttaggaacatgataatataattgagtgagagcggtaatcatagatttagattctatagcttatgtaagtgtttagaagtgaaacaataattttcttcaagcttcgcttaatagagataaataattgagatcttatttcaataattatattagtttactgaaatatcatttataggtaactaagtgttttaaggataaaatacattgaagagtagtaatggtaaatatgttcctattcagtgtagatcatctatagaggatctttgactatttggattagaacgatgaataattcttagcgtatctatatcttggtacatatagagcgttctgtataattaatagtgcaattctaaatctatagtagtgcaaggaggaattaataagttagagaatttacttggtaaattctagttctacttaaaagaggtttgtgggtagatatattaattaagagactttgtatggtctaattaataaataagataaatggtaattttatttgataattaattataattattaaataaataatgttaacatttataggattgaaataaaaaaatatggcattattaaaagaaagataaattgttgaaataaagtcgcaaaattgtaactagtgaggcccacattaagtgg

SEQ ID NO: 340408 - DNA, 525 bp, Cannabis indica
tgaaaaaagaagaatccagcagttagcccccaaaccaaaccctaatgattaaaagagggaatgggggtcccctaatcgctggaaagagggcccctccaaatgtttgccaaaatgcgaacccaaaggattttccttagcaaacatcgggtgcaaaaatctcaaaggcagcgaaagcagaagaaaagtcaaaaacgcagaatgtgggacaaaaatcgccccataccctaaataatctttccacagaggggtcgattgcaaggaagaatgggggaaaataacgaaacacaaataaaagagatcctacacatcacataacagacttagccaaagctatttcccagaaatccaacactcaaccaaaaagttctgccctaacatgcaaataaacagtaaagacatagagtactgtccaagaaacttaaatgaaatttgagacctaggggttagtgttgatagacggtaaaaagcggattggcagcgacagaggaatagcaacaagaaatctatggtttctgaaattttttc

SEQ ID NO: 340409 - DNA, 1342 bp, Cannabis indica
aaaaaaattcattaaataaaaacagtgtttttttttcccaccttttttccctttcttcacgcactctctctctctctctcactctcctatctttctctctgtttctttcttcaaaccatcaccaccacgaactcgcaactttagtaggataattttattgtttaggcagttgtaatacactaatatcaaaagataacatttgttactaatttatagagtgagtgtcaaagagaatctcctaaacactcttcgtgtatatagtatgtaatcttttattgttagatcaatctttaacaatggtaacattttgatctacatttattattaatttggtgtaggatttactacttttaatgtaataacttcaatcattcaacaataaatatcacaccaaatatgacactaaggtcttcaccaatgaagcaccatctatagttgcttggataagtctacttaaacaaatctagatttttaaagaaaaaaaaagactcaaacgggttcctataaaatttagtttttacaaaaattaaaattttaatatatttttttatatctaaataattttttaaataataagtaaataagttttaaaattttatttttttaaattttcttaatcattcaaaattattttttttacgatctaaattaattttttaagtttactagaaagaaatattgaatctttctcatttttattttgagatggtacgatttgatagttgtcaaaatttagagggcaaaattactaatttacaaatacacgtcaagcaagaaatggagaattggtgcggtaccgggaagaagatggacttctctatgccaagggtggcagattatttgtaccaaacagaggcactttaagaagggaattgcttaaagaaacccacaatcctaagtgggttggtcacccgggtgtggctaggatgctagctttactgtcgaagtcttactattggccgaaaatggagcaagacatagaggtgtatgtgaagacatgtcttgtatgtcaacaagataagacagaaagaaggcaagaagcatggttgcttcaacctcttccaatccctgagaaaccatggcagtgaataagcatggatttcaatgtgggatttctagaagtaaaggggtttcggtctatcttggtggtggtggatcgattctcgaaatacgacatattcatttatgcgcataatgagatgaaatctaataaaatgaccaatttttttgcaaatgtaaaagttcaggagacaaaattactaattattcttaataaaatagtcatgtcttattcttttttttttagaaatggggttatgtctgttaggtccttttttggcaa

SEQ ID NO: 340410 - DNA, 673 bp, Cannabis indica
cctatcctgattctgggtccaggtcctgattattgtgtgcgtttgggtcccagtctaggatcgggttcgagttctagtctcggttcgggtttaggtatctatttgggttttgatctggcttcgggttttggtttaggtcctggtcctggtcctagtcttagttcggttgtagttccatttgcgattctgagttcgagtttgggtttgagttcgtgtcagagttcgagtccttgtctgggcttgggttcgagtcccgatggcactctaggtcaatatcagcctccgggtgtgggttcgcgtcctggatcttggtctaagttcggtccgagtccgaagttccaatcccgatcttagtctggcttcagatctgggtctaagtcccttgttctaatcctggtctgggttcaaatttgggtccgagtccgggtctagctttgggtctgattctatgtgtggttttgtctttgggtcagattctgtgtctgggtttgtgtccacgtctaaaccccgatctgggtctaggttcaggtctaggtccatgttggggacccgagtgcgagtccaagtttgggtctgggtcaggatctcagtccagatctaggtccagcattttggtcccaattctggtcatggtccgagtccagcttcgtatctgaatccctatctagatcca

SEQ ID NO: 340411 - DNA, 622 bp, Cannabis indica
gacctcacttgcgtgagatactacttgattgcgtacacttgtgtaataaacataaaattcgtaacagtgccgtagttgggtgtttccatatttcctgagttagtgcaatccctagaggatataacagaacctagagttgtaggtttgggtttcccgggatgagggtttcgatcatgtgatttacccagtttcattatgtgattagggcatccatctagcacgagacttttcgttcaggtcggccagcacacttgaatttagaaagaaggtaagaactgtgtataatgtgtaatataaatatttgagtgtatatatatgttagtgtatatgtattcttatgtgttagttgcactaccaacacgtgtacagttatggtacagagtgcactggtatagcgaatattgtttaagagtacattacaatgataccagcacaagtacggaagggtacagggtgtttgtggtatatcactcagtggtactcagggtacaaaacaaaccctaccaacactcgtacagcaaggtacgtagtgtatgtggtatagtggttgtaccctagtatggaacgttcttactcatatgttaagccttgtaaatagatgtatgggcgcctagatacaagt

SEQ ID NO: 340412 - DNA, 778 bp, Cannabis indica
actcataaaaaattaaaaaattaacataactttaaaataaaaaagattttaacaaaactaatatagatataccataatgtttaaataatttgcttctaattctaaaaaaaataaaaaataaaaattaatgattttgaaataaggacatttactaacataatcttatgatttagggtcatttgctatatttttttgaaatgaggacataaactaacatagtcctatgatttggggccatttactataatttcccttagttttgttaatcatgttttcctttcttttgttcgatttgttttagtgttgttttacagttattttgctatgattagttatttgatatcgattttattttttttcttaatctcaccggaattaatagttattttctaattgttttggtgttcctgtggtggttttgtccgtggatgtggaagatggaggcctcatttttttttttggtgtttacagtataaaaggaaaaaaaaaatggccaagacttaataaaaataatttctgtcatgtagcagtatttttgtaaagattggaccaagaatcagtatttttgtaaatttcctttaatatattgttttaaacctaccactaatactattaatgcatataagacttcaatataaatgtaatttaatataataaaattgaattcataaaagataaaaatatatagaaactagttaacaaagccgcacttcgtgcggcatgtataataattttaaaaattttattcacataaggcatcagtttttgtaaaatattt

SEQ ID NO: 340413 - DNA, 505 bp, Cannabis indica
ttttttgtttgttttttatttttttttatttttttgggctaatcttataggccaatgtagccacaacctctctaaaaataaagatttcatttaaaactctactaaaaaaaaggggaagagtgataaaagtgaagggtgataaattaagaaagtgatcacatgacatcattcaccttatttgattattttacttatttatttattttatgttttttttttaaaaaaatataaacatatatgacttaatttttattatcaaaccatttcactgacacatattctttagcttgacgacgatagtgtggtactacaacattattagtacaatcaagttttatatgttataaatcttaatttaagaatactaccgatatgaaaatcataataaatatttagagttatagaaaatatacaattacgttaaaacatacatataaatatttctttgttgtgtttatcttttttttaagttaatttgaagtacttaaaacaaaagcttaataaa

SEQ ID NO: 340414 - DNA, 497 bp, Cannabis indica
cactttctgtcctgttaccgtttatgtcccaccacttgcacctaaaaataataacactacaatccttcaagtaagtgaactcgtacacttgtttgagtacgccataaaaattgttaccatcatctccaggcaccaaaataccactattttgggtcttacaattttcataccgatcctcgactaagaatttaacaccattaacaatacatccaggataacaataacatgttgggttagagggatttgcgatggcgtacaactcatctgatacttctgcaggatcatctgctcggagttgattgatctatcattaagaaaaataatttaatcattgatgctagattaatacacagtattttaataacaaaataagtagaaagcaatacttactcgagacttgaaccaactaggaaactcattctcttgaattgtgtcaagattttgatgacccctaagttgtagctcgttcctatgctcactacatgaaaaatggggaa

SEQ ID NO: 340415 - DNA, 325 bp, Cannabis indica
ttgtgcatatatcaaatatatatattaaaccataaacatgtaacatacatgtagtcataaatcacttcaatattctaaattgataactaattagattgtaatgggttttatttaggcaacaaaacccaagagtttcattatagaaaattatttattgatatttaaataattatttaagctgttatttttgcattcagaatgcatttttatgtcatatagtgaaatttcataattttgcattttcggtgtccaacaacatggaactcggtttatggctcagtagaatcacaaattagtatttcagtatagtgggacggtttattta

SEQ ID NO: 340416 - DNA, 581 bp, Cannabis indica
ccaacaaccatattgatttcactctccaagccataatggtctggttttgtggaaaccctcccactacaacgacaagttgtgaccttctgaacaggaacattagttgtagatttcttggttgtatcaacttacattggttcagccgagggagtgggattatcctctacttgtgtagaagaggatggaacattagttggagttatttttgaaatcattccctctaacactactttactttgcagcttgaagttcttaatatagtcttcttcaaggaatgtggcatttgtataagcaaacactttattatccttgtgactataaaatagtccacgcctagtctccttagactttctgacaaacatgcaactttcagttcacacttcaagttttccttctttctttcttaagacatgagcaaggcacccctagattctataatagtataaactaggtatacgaccattgcatagttctactggtgtcttaggaactgctttagaggtaacaacatttaaaatgtcattagccttttgaataacatatccctagaaggacgttgttaaatagcttagcatagacct

SEQ ID NO: 340417 - DNA, 719 bp, Cannabis indica
tgatctccggtgggccccatatcggtagaaccaccagacacgagctaaagtgttatgctggggccataaaacacgacgaagtgtgggaagtcactcaactcccaacacaaaggccccgactcatggaccagcccattgcctttacagaagacgacgtgaaactggtgcgtttccctaaccatgatcctctggtcatagagactcctatcgccaataaaatcgtggcaagaatattagtagataatgggagctacatgaacttattgttcaaagaagccttcacgaccataggccttgttgtgaaaattatatatgcaagtatacgcagtcacacaagtaataaagtgataagtaagatcgtctccacagggattgcaaacaaagtttgatgtaaaaccaactaattacaacttaaagtaagaggaattaacatgcaaatggttgagtaacgattcaaaattaaaaatgacatgaattaaacttgctagaattaaaactactgctgctagaaaaattggttgcaagataaaaattgtaatatggtaaaaatggcttgaatagctaattccttctagtcaggtttttcccaggtgttacagcatcagttcagcattactctagcattctgcacagagataacaaaaaattcctctaggcttgtgagaattttccaacactcacaaatttaattctaccatttagctcaatatattcctata

SEQ ID NO: 340418 - DNA, 1130 bp, Cannabis indica
tcatctgagtcgtaatcaggcagcttcccatcttgatatttcttgagttttttttccaactcactgattcgcaattggattagatcatcttgcttttggttggaattgagctgtttgcgtaaattgggcttcctccgattcaattgctcacgaaaatctggtcatcttcgatcatagttgcttgttgaccttgtgcctgagtaaccctcagattggctactccttgtatgactcatactttctcaataattattgcgatgaaacctatcccctcctcgcatagatcgactgtgatctcgagatcttgtacgtcccgagctagaacttgcctcatcacataatggctttctcctctgagaaaggtttgatacatggcccctgcttgggtgtgtatactcctcctccctatcacagcgagaaggatgttgacggtgtcttagtggtaatccacctgtcttaggttcagtcctaagatttctttcgttagcacaagggatctcttggcccctagttttgggctgccttctgttctcgtttttgggagaagactctagtaagtcattattttcattcccctgggttgtgaatccccgaggtctctaaggcacttcttgacgaggtgcctgattatttggttgttgattttctgaaacatccttagtttccccaggtcgctcctcctgagtgttctgggggttttcctgagccatctcctgcctcctggttcttgaccttcgaggcctacctcgcgacctcctcactccaggatcaggttaattttgtgtgttgttttcttgggtcaccctggctgcggctgcctctctctcaaacttagcgtttcgttggttagcctcggttagtcattgttagagttggtaattttccaattcaaccaatggcacgtacgtagtgggatcataggcatcctcactcctaggtacataatcaccagcttcagtattggtttcctcgttcctagtttctgggttttgatcatcatcatgttggcttcttcttgaacgtgttgtccgtaaattgggtggcctccgtgagcccattgactcttttctagaacggtgattagtctcttcaggactactgttgttgttttccccattattatccatgga

SEQ ID NO: 340419 - DNA, 538 bp, Cannabis indica
catcttccttctttgatgaatcgacattggagggcaaagaatgctcaacagacagatcattcccttgtttctatagcatcttatatcgtaaggaagttcgatcaccatagggcttctgaagctgtagggtttgattgatagtagcaatgcctgggcgaatgaactgtaaagcttgcttggttcgaattagatcagctgtgagtttataaatctcattctccttttcatcaagaagtctgttgagattttagacagtgtcttctaactttcctttttcagtctccacttgctctagagagttctttagagcacggatatgtttagtcatgtactcccattgtgcaaacatttcttcataagcatgttgacgacctgtgctatctgcttctaatgaggtggagactgcatcatcttcagactcaactggattacagctttgggccatgaatgccattacctgctttatctcatctgatccttcactggctatggagttcttttcctcatcactatcactccaggttgctgcaagggcctt

SEQ ID NO: 340420 - DNA, 520 bp, Cannabis indica
gattgaagagctgatctcaggagggggaagttcagcaaacataaaaggaacgaggaaagtcatccgcgggcggatgacaaggaggaaaatcaaaacgcgagcggctcgagaacgcctcgcaatatattgaccatcatatgcgggcctcatatcataggtgactccagaaagtcgcaggagcgatatgcaaaggaagccaaggagaagcctctcaccaacgtgaacaatctcagtgagcgaccagcgaagttgttcaaaagagaatgcgatgacataacgttcatggaaagtgatgtgagatgggtccatcacccgcattctgacgcattggtcattgtcgccaatattggcagagataacgtccactgtatactcgtgtataacggaagttcagtgaatcacttgaacttccaaccctttaaacaaatggggttggatgagaaggatctgcgacctgttacgtttattatatacagttttaccagcgacgtcattgttggaatttattttaccaggatct

SEQ ID NO: 340421 - DNA, 975 bp, Cannabis indica
aaatattttctattaaattaaatatttattcatagaattgaattgatatgtcaaatttggaatattggaaacctttgagtagattagatctactggagctaaggttacctcatttattatatggttttaaagtgaaagtagcttcgaaaaaattgtttaaaatatatacttttcaaggctcaaatcatattcaacattataaaaaggtacattgtaataacaaaaataaaaaatcttaagttttaactgataaaattgttttcaaatttataccaatcaggctaagagtaacatgcttttttctcacttatgtcatatttttcagttttaatcttataaatgtcaaaattatttatttataattataattaattatcaaattaaattatcatttaacttatttattaattagaccttacaaaatctctcaattaacaaataaactctaaaacctcttttcttcacaattaagcctcttgcttagtaaaaattcataaataagacatagtctaattttagaattataattgattaattaaaactaattaactaagtctacaagcagtattatcttagctagtatagggaccatgggcctatataatcaagcttctaataagcaattttagaatttaccaagtaaattctctaacttattaattcctctttgctccactatagattcagaattgcactcttaattatatagaacactctatatgttccaagatataaataaattataaattatccatttttataatccaaataatcaatgatcctctatagataatctacatcaagtagggacaaaattacttctacccttcaatgtattttatccttaaaatagttagctaacctataaattatatttcagtaaactaatataattaatgaaatgagtactccaccatttatctttattaagccaagctcgaaagaaattattatttcacttttatgcatttataa

SEQ ID NO: 340422 - DNA, 786 bp, Cannabis indica
cacaaaaacacaacactaggcctcttttgaaccacaagttctttcaggaactgaacattccgtggcggcccaagcccacggtagttccaagacagtattttcataatgattggcgagccccattgccaaggcccgccaaagatgaattttttgaactattatgctgtaccacctcagcactgtctctactaccctcacttactttcctttttttgttatcagtaacaaccaggctattctctaagctatgcagaacatccttccccctattctgagaaacttctccttgattgacacgtgggccatgagaaaatgaggaagccataaccacacctccaccattaacatgaattggtattgggttaacgcctacattcacagcatccccaccaaccgaaggccctcccccattgacggtcggcgattccatcccctcacgtccgacaccaccaacttctgtcggggggctccaccccctggttctaagccatcgagacccaatattcttgtgagatcgttgaggcaaggccctcatgaactcaccatatggcttcactatttgctctatgggctgatgaaacaacttatgacagaacctttccgagtgcccaattataccacaaatgaaacagaaagtcgaggccctttcgtacttaaaattaatccaaaaaccagctcccatcatccttagtgagcttcattcgccggtgtaatggtttatcaatattcaaagtaactctgatgcgaagaaaatatctccatactcctataaaatttttcggatca

SEQ ID NO: 340423 - DNA, 1230 bp, Cannabis indica
tccagatcattctgcgaggccagttttgctaaggcatcaacgttggagttttgttctctcagaatttgtttgattttaaagtaatcgaatctttccaagttcttccaaactttctctaaatacttcgccattttcaagcctttggcctgattccctgaggacctagtttacgatcagctgcgaatcactatgacagatgagatttttgactttcaaggcctctgcaatctttaagccggcgatcgaggcttcatattcagccttgttatttgatgcgtcaaattggaatctcagagcatagtgaaacttaaagccttccggggacaataatatcaccccttctcctgaaccttgttcgttggatgcgccatccacatctaacttccaggtttccacatctcgctgatcaggtgggatttcttctagagttatgccttctatcaggaagtcagctaaagcttgacccttgatggatgttcgaggattttatgttatgtcgaactaccccagtcaatcgaccattttattaatcttccagaaccatctggttttgataaaacttgtctcaagggctgatcggttaacacttttatggggtgagcctgaaagtatagtcgtagtttgcgagacgcatggactaggcataacgcgagtttttctagagggggatacctggattctacccctagtaaccttttacttacgtagtaaataggttgctggtgcttgtccacttctcgcactatagctacaataatcgcatcttccgagagggctaaataaagaaatagcctctctccagttattggtttcgccaaaactggaggcgttgcaagatacctttttatgctctgaaaggcctcttcgcattcttttgtccactcaaagttttgttgccttgcaatatattgaagaacggtacacacttatcagttgacttcaaaatgaattgttaagtgctgtcattcttcctgtcagggcctgtacttccttaggctttgtcggggatggcatgtctattaatgtcttgattttttcaggatttgcctcaatacccctcgcgttaactatgaatcccaaaaaatttcccgaggagactccaaaggaatatttttttgggtttagcttcatgttatacttttttaatattttaaaagcattctacgaggtctgaggtatgatccttactctttatcgatttcaccaacatatcatcgacgtaaacctcca

SEQ ID NO: 340424 - DNA, 801 bp, Cannabis indica
agttttcaggagttaaaataacgattgataacagcagcagtgctagttttgctatcagatcgggaaaagttttttgtttactgtgatgcatccagacagggtctgggatgtgttttgatgcaagctgacaaagttatagcctatgcctcatgtcaattgaaggattatgagcagcactatcaaacacatgatttggagcttgctgatgtagtattaactctaaaaatatggcgacattacctttatggtgaaaaatatgagatttacacagatcataagagtctcaagtaatttttcacccaaaaagatttaaatatgaggcagagacggtggatagaattggtcaaagattgcaactgctagattttatatcacctcgggaaaaaccaatgttgtggcagatgcattaagtagaagaggtcccgggcaggttttaccactatgattatagctccttaactggccccaaaaatggttaatgctgaaattgagtttgtagctggaaagttacacaatctgacacttcaatcagatttgttagaaagaatcaaaagggggcagttggaagatcctgagctagtcaaattcgagatgaggtatcgctcggtcggcctaaggactttttaatctcgaataacgaaatgttacgatataaagctcgagtttgtggtcctataaatgatgagcttaagaaggatatcgttgatgaagcccacactacaccttattcattgcatctgggaaccaccaaaatgtatcaagatttgaaaccttattttggtggtatgggatgaaaagaga

SEQ ID NO: 340425 - DNA, 1402 bp, Cannabis indica
ttcatcaaaaaatcttccacaagtttcctgcacgttttagtctatgtcgatgacatagtaattgcaagcaccaatgcttctgaagctaacttcctttaaggcattcttaaattcaaaatttaaactcaaagacctcgaccacttaagattcttccttggccttgaaattgtaagatccaaaagaggcatttctgtttctcaaagaaatttcactctgcaacttttaaatgaaaccgctctcctcggctctaaggttgtttctactctcatggatgccaacctttccttaagcaaagatattggacttcctgtcaatgatcctacctcttaccgaagtctaattggtaaactcttatcgaattgcttatgccgtgaatagactcagccaatacaatagtgatcctcgacaaccacatctcaaagctgcttatcgaattgtacaatatctcaaaggcacttctggccaaggactcatgtttcactccaactatgcctcacagcttcctgcacaacgacttctccaaattcaagccttttctgatgcagattggggcacctgccctaatacacgacgttctataactggtttctgcatattcatcggccaatctctcatctcttggaagtccaagaagcaatctacagtgtccaaatcatctgccgaagctgagtacaggtcccttgccaatacaacttgtgagatcatgtggcttcacaacattcttactgatttcagcatctacacatctcaaccgacaaccattcattgtgacaatcaagctgccatccatatttctgagaatgcagtcttccacgagcgcaccaagcatgttgacatagactgccatatagttcgagaacaggtcaacaaaaattgcatcaagctctcctatgttccttctcgacacaacattgctgacataatgacaaaagctcttttccctactcaattccaaacattgttgtccaagatgagtgtctccaacatttacactccatcttgagggggagtcttaaacaatattagttatgttagttataattagattgttaagtaggttgttagagttagttaattgtttaactaactggttgttagtttgttgctgattttctttagcttttgctgtataaatactttcattattcattaataaaacataatgcttttttactctcaataataccttaagtgttcataagcagggggtttattatgtaacaattgataaggtgttaaattttgtaataaggtggtgggtgttcgattgattaagtatacagcaatttggacaagatatggccaataggtcaaggctatagaagattgaaaagccaaggcacgagccacatttaatatgtgttgatgttttcgttcaacaaccgaattttgttgaggtct

SEQ ID NO: 340426 - DNA, 839 bp, Cannabis indica
ccacccatcggaccacccatcggactaccatcggaccaaatctgctaccaattttttttttatgtttttgtacatacaaaagtagcatcaggtgaccatcggaccaccatcggactaccatcggaccccatcggactacctaatttttttttttttttatgtttttgcactaaaaaaagtatggaaaatttgagaggggtatttttgggttttagataaagtggtcatatattttcaatgatgatatgtattagtttagaaataaaatattaggtatatgtaagtatagaaaatcaaatttcccaattaatattaatgtaaaattttaaaatatggtgatgatatagcatgcatgctggtatgaaagtgtctatatcattaatctttctacaaatccattaattgtgttaatggacaataatccttatctttaatattattgtgtcaaagttttcttttattattttaaactataatgatgagtgatattttatcattgagtaatttacgcataaatattttaactttcagttacacataaatatttaagtttaatttttagtagtaataatacttaagttatcatttaaataattttttttttaaaaaaataaaatttaaatgaattggaccaatcaataattatttttaaaatttatggcatgtttacttaaagggaatgagaatgaatggtaaggtattaattctcatataattgtttactaaattttggaagggaaatttgaattattatgcatgttttaatataaaattggtttggagaacacttagtgtaggtaattttaaaaataggaccaattttcaaaaactcccaaaat

SEQ ID NO: 340427 - DNA, 1178 bp, Cannabis indica
tgagtctaaatcttgcttgtaggaaggcttgtaaagcatgtagaatgtctatgttggggctggctatgataatatcgtctacatagacgagaagagcaataaaggtattatgagatccctttgtgaagagtgtgtagtcagcttgggattgagtaaaaccttcttgcaagagagcattagtgagcttcttataccattgccgtgaggattggcgaaggccataaatcgatttgtgtagcttgcatacaaggtttttccctgtgactgaggatgaaagtttgaggcctggtgggatttgcatataaacttcttccaaatctccattgagaaaggcgttgatgtcgagtaatgtgtgccattgtttgatggtgacaatggccaagagaagcttgaaggtaaccattttggcgacaggagagaatgtgtcgaagaagtccaatccttcttgttgtgtgtagccttgagcaagtaatcgagctttgagacgttctacactaccatcactgttgtactttattttatagacccatcggcatccgatagcacgtttgtcaggaggaagtagtactacagtccaagtattgttggtaataagcgccaagagttcatcatccatagcttgtaaccaccgtttgaattgaattgcttgcttgtaactttgaggttcaaattcagctgtaactgcaagaatgaatgccttgtaagtttttgaaagtttagaatatgaaataaatttggaaataggatacgcagtgttagatttatcatgtagtaaattatagcattcaaaatcttgtaaatagctaggtggtttggaaattcttgtagatcttcttggtaaaactgtaggttgagatggtgaattcggctgttgctggattggggaagaatctgcaacaaattcctgttggtttggagttgcagatggtactgtagtagatgtttcttgagtagaatcaagtgtatcctgcaaagaggggttaggagagataatactagtgtctggtgtgatataatctgtgatatgtgtgtgtcagtaacatgtgtagtgggaagaataagtggagtgaaaggatcaatgatatgaggattagtattaagcttatgaaatgggtacacattttcgtgaaaaaccacattccttgaaacaaatatttgttgagtgtttaagtcataca

SEQ ID NO: 340428 - DNA, 1463 bp, Cannabis indica
gccccaacattcttcaaaccaaaaggcatgactttataacaataaagtcacatcttggttacgaaacttgtatgctcttgatcagggacatgcatcttaatttggttgtatccagaatatgcgtccatgaatgtcattagctcgtgtccagcagttgcatccaccaactggtcgatccatggtagtcgaaagcaatccattggacatgctttgtttaaatctgaaaagtcaatacaagttctccaagtaccatttggctttgggacaagaacagaattcgatatccacgaggggtagaacgcctcgcgtataaaatcgtttgttaataacttgtccacctcttctttaagttcccctgcctttcaaaatccaagggtcgtcttttttgtcttttagttgggtaattagggtcgatattcaaatggtggcaaatcactttagggtcaatcgctatcatgtctgaatggctcaggcaaattgatcctggtttgccttcagaaaatttattagttgctattttagtttttcatctagattttccccaataaacacacatttagtgggattttctggatctaaaacaacttcatctagttcctcaattggttcctttcgtcttgaatttgaggatctagatcctcttcttgcttctcgccttcctccgttatgaccaccattgactgatggttggccctattctacaattctacacgatagcattcgcgagcaatagttggtcacctagcactacacctacacctgccggtgtttgaaactttaaagataggtgtttgattgaactaactgcccctagtccaatcagtgcaggacgacctatcagtatgttataaactgatggtaggtcaacaactagaaaatcttgcatcaatgttgtggataatggtggctcgcctacggtcaatgggagttcaataatgccttaagtggcgacactatctccagtaaatctgcacaacttcaccatacaaggttttaattttgtattttgcaatccaattttccttagtgtatccttgtaaagaatatttactgagctttcgttatccaccaacaccctttttactcctttgttggtgagctgaatagcaatcacgagaggatcaacgtgcggatacctcacttgctttgtgtctttctccgaaaatacaattggaggttcttcagtcttgaatttcgtagatgatttcggagcaaaaactgattgctcattttgatttctttaacatatctcttctgggcattactgctttctccagcgagatgtggccctcccgagattaccaatatgtcctctccttctacaagaggagattgtaatctttggttgctcaggttattaggcagatttggctagttttgtccataaccttgtcgtcttacatactattgaaaataaccacgcgagataaggctctctatctcaactttcaactaacgacatt

SEQ ID NO: 340429 - DNA, 587 bp, Cannabis indica
tttattaaattgcacacacgtggcgtccttgttggacagggcgttacaagttagccattgattaagttaagttctagctgataacactatactttccacacttgacactttgttgttccaaaccttgtcattccttgcattccatattgaccaacaaagagcaaccaatagctttttctgatttgcatctaacaccagaaaattcgaaacacactagtcagaaaacctctcttgatgtggtagcattgtaccgataccaactctgttccagcagagttctgcagctggacagaccacgagagcatggtatatcatctcctcctggctgttacaaatggggcaagacaaagacacatccacacgctttgttcttaattgactcatggttggaagacagccttgagaagccctccacactatgtttttcattttcggaggtagcctcaaagcccaaaacttcttccaaaaattatcaacagtagcagagccttgatcattttccccattaatttcttgaacaagtctatatgcacttttaactgtatacaacccagaattctcaccattccatgtaatgttatctcgac

SEQ ID NO: 340430 - DNA, 717 bp, Cannabis indica
gagttagggggccattagtagtgggtacgatatactggacccagccctccatcacatgaacaaccccaattgtgaagacccatttgccttatttaaataaatgtattaagctaatttaattagaaaatatgtttaagttgaaaattaatttatttaattttagatcaacttaaattagaatattttcttagatattaaattggagagctgaacatcttgtaacctgcctctatccattcgagctggtattggaagaggcttgtagctctgaaaaaccagatatcatccttgaatgttgttgctgatttttgcagggagaaatatgctatcaaggcaggttacaagatgttcagctctccaatcccgaaattacattggtgcaaagaagtctggtcaaggttgaatacacccaaacattctttgatactttggcttgtgatgctggataagctgaaaaccaaagaccgactactgaaaatgggtatcaagcttcaagagacttgcaatctgtgtactgaatgcaatgaaactatacagcatctgttttttgaatgcaggatcaccaatcaatgcttgattgagatcaagtcttggctgaaatggaatgttgccactttcaacattcggcaattagttaaatggattggtagggcaaaagtttcaaaatttaaaaaagactgtctatagtgctgcaattgcagcaatggtgtataatgc

SEQ ID NO: 340431 - DNA, 810 bp, Cannabis indica
ggggatatgtaatatctcgaaaaatatattgatattttaattagacatattttattaaatatgtgattaagtgggtattagagtaggattataatcctacttaaactaagtaatagttgattaaggagataagaataaataaagcgtaatttactaattacgaaggttatattagaatatgtgggtatcgtagatactataatttgaataaaatattttcgggcctggtaaccgtgggaacttgacggagtggtcaaggatgtcacgacgatatagagtgaattaattggatcgggacttataccggattagtttaaaattttaagttaccggtgctaggttgaggattaggaaagattgagtttaggaattcaattctttgctctttaatggtgaattgtataatttgatgagatattgtgaattgatgttttggatatgttattttggtggatttatactgctttggaacttctaggttgttttggtgatgcttgggtcgatttttggaggagggaaacttttggttgctaccctgccagaactggtcgaccggttgcctacaggggagagttttcagttttcctccaggttggttttagggctcggggtggttttcaatgtttagtgtggaatgtttagaagttgtaaaacctaacctagaactattggaatataaggattgtccggttttaggaattaggattatttcggagattttaattgaagtatttattgagtattgttgtcgtgacataggacccgggatcgtcaagctttgattccatttagacgggatgcacgctaaac

SEQ ID NO: 340432 - DNA, 576 bp, Cannabis indica
aaaccgtacacagtcccattctatcactgacgcttgtacctacacctgatacatcgccaggaagaaaccctacaatagtttcattctgtcactgacgctcgtacctacgcccaatatgtcgcccggaatatcgcatcacctaatcaggtgagcctatacattatgtccataatatcatcacattatcattgtctaatcagacaatcaataattttaggacctggcaaacagcggtttcgattcatagtcataactttataacggtttcccaacaggtacaacctgaatgtcaatatccatacatcacattacctactcaagcaagattatgccatggcctggcattcatcgtagatatatgtatattgcattgcctaataaggcaagctcatgtcataatctaacattcatataccgcattgccttaacaggctagctaagcctatgccataacttggcaccatatcccctaatcaagggtacttatatatcatattgactaatcaagcaaatctatttcacaatctaaatttcatatatcatatcacctaatcaagtgaagtcatatgtcacatt

SEQ ID NO: 340433 - DNA, 1719 bp, Cannabis indica
agatttcggggaaatccttttaagggggagatagttgtaaagaccgcttagtttaaatttggaagcagataattagggttttattatgaaaattatttattaatactaaattaattatttatgatgatttatttgaattcagaatgtattttatatgtcatatatagaaatttaatatttttgcatgttcagtgcccggcaacattggaacgcggtgtatggctcagtagaatcatatcttggtattttagtgtagcacggcggtattgttagacattgaaaatgtctggattagtcgagattttagaattttccaaaaatacccttaagtgccttttaatcctttcagtgtggaaggggcaaaaaggtcattttgccccataagcttttgtcctttagtggacttagtgttatgtgattatttgatttattttaatttatgttagctgaaataagttaataatatgttattttgctcatttgttcaaaatgttaaacttagaaaattcaagagaattgtattttctctctcttttgaccacccttagaatagctagcatttgggggttttgtctgcatttcaagcaagattcatcaaggagttggagtgcttaagttttatgtaagtttttgaccatgttttcttgagttacttgaattgtaagtaagtgaaaattgcatgttttgaggatttgcttgttgtagttattgttaatgtttagtaatgttatcttaggcttaaatatgtttagttttgtggattcaagcaggttttactgtttgttagttagatttaaccaagtttgagttttgagctcaaaacttggagctttaatggtagatttggattctgtacttgggttgttgttttattgctttaaaaatgttcattggggtctatttagcaggtctggaaggtttgatatggtttggggttgatttagtgaagttatgaaatttttagtgattcctacactgaaccggaattttggttcagagaggtctgtaggaaccggaattccggttggcttctaggcatttttcccagaacaagaattccggttgaggaactggtctaccggttggggcaaatttgggaaccctaatttttcccatttttgtgttatttagggtattgccatgttatttatcgatggggaaacttttagtttcaagtttatgtccgtgggaagtgatttagcgtgtcgcttatcagtgttgtgattgatgtgatttaggagccagtaatttgccgagcagattgttccactcaggttgaccagcacacctgaattcagaatcgaggtaagataagtataacagtatgcatatgtatttacatgtttagcgtgcatgttagtaagcctgttagattacattagatatgtatgttggcttttgtgctatttgacagtatcacatcggtacggctagagtatgactagcgtactgagtatagggtgatacagtatcacatcggtatcggtagaccatgagtagcgtaccgagtataggctgttactatgttaaaagtaccatcgtacgaacgttcgagacttagtaccgtgtcggacacggggattagggttatggtcagggtatgggcgtctgatcataatccgggatatatgtatgttacatgacttatgcttttcttactgggtctatcgactcacagtgctatatttgttgggttttatgccctaaataaaacttatt

SEQ ID NO: 340434 - DNA, 1248 bp, Cannabis indica
tattttctttgataggctttgcctggctgcgtgattgccacaaaatccatcgtgtacctctgacaagagtcgtgcagcttcttcttgtgtaacacatctaagtagtggcatggagaatccccttctatacataactccttctacgatgatataccgtgcaacctttctcctcattttccgagcttcatttctgttatctgaaagttctccagtatcgaggtaggctgctattggtgttatccagttcagagatgcgtcaatcatttcaatttcttccgcacaggtgatactgggttcttcaagaaattgaattgggattagattagccttattagctatgttgctgcttacaagacgggccaaggcatcaacgattgtattttcttctcttgggatttgcttgagaacgtagctcttgaattgtgcaagcagatcatatattttgcttaaatatgctatcattttcccccgggcctcgtactctctaaacacatgatttactaccaattatgagtcactgcagatctcgatgtgttcagcatatagctcccgtgcaagttttagaccgacaatgagggcttcgtactctacttcattgttggaggctctgaacccaaatttgattgcctcgtgcaggtgttgcccccccaggtgtgacaagggcaatccctgcaccagatagttgatctgtaaccgacccatccacgtgtaatttccaggtaggtttatcttcattgttgcttgactgaagttcttgtactggctcagggttgccttttgaaaaatgctttcttctttgccggtacacttaactgcaaagtccgctaaagcctgtcctttgattgttgttcagggttgaaatattatctcgtattgacccaattccactgcccatttgagtaaccgtccagaagcatcaggtttttgtattatttggcgtaatggttggtcagtgtatactcaaacacgatgagcttgaaagtaaggccttaactttcttgttgctaagattaggtagtaagttagcttttctatcagcagatatcgtccttcagcttcaaccagtctttggctgatgtaatagaccggatgttggacattattttcttccctaatcaacacgacactcacaacatgttttataacagctaggtatattcctagttcttctccgtccagaggttttgagagtacaggaggttttgcaagttgtctttttagttcttgaaaggccttctcacattcctc

SEQ ID NO: 340435 - DNA, 836 bp, Cannabis indica
ctaattaccccactaaacattttcaaagcatcaaaaccaagcttcaagcaaaaatacacaattcaccatgtgagctccaagctttgagttcaaaactcaagcttggctaaaactcacccacaagcatcaaaacttgatttaatctacttaaacaagtataaaataactgcaaaaaccaaacccatgcacaaacaatctctacagcaaccaattcctcaattttccataaaaatcataattttgagctaaaattccaaacttgcttagaatccactaatcatgcattacaacctgctcaattcaccatgtttcatcataatgaaaccccagaaaacaaccttaaacaataacaacaactacaacaacgaaaatcaccatttcactttaaaaatcatagttttgagtaaaaattttcaagcttgaatcaaagcaactaacatgcatcataaccagctctaatctactcaaattaacatgattaaacttttgcaattaacacacaaacacagcagcaaccacacttcaaaactatacatgcaactatcatcttttcttaattttcaagaaatttaaagagagaaagagcaagagctaacctagcttggattgaacacaaacaaatcttgaatccacaaagaaaaagtgacaatccttgctgctcaaggaggccgaaagagggagagagagtttgagagaaaaatgatttttcttaatctttgattttcctcaactttttctaacttttaacaaatgataaaaatacataaaattaatctttacttcagccaacaaataacaaatacaatattaaactcatttactaagtccactaaagg

SEQ ID NO: 340436 - DNA, 574 bp, Cannabis indica
gtggcgagagcttccatcttcttctgacagtgctctaaaaaaaggagagcattgccatcttcatgtggcagtggtcgcataggccatattgcgtgaaattcttgtgcaattttgacttcatgttcaagtctaagcatttttatgccttaatgagtaaagtccttgttggtctccttgtcagattgaggtatatagggtgaaaacgctcatgcgggcccataaatgttagtttaggcacacttgggtgtgtgagtctcggcaccaaatagttggtcaatgtttttgagttcctagaggtgccatggaaccttcaagtaggatgtcttaacttatttttcatttataagtcttggtcaaagtcacagggttgagttgagtgtcttcaaggtactcttggcaagtgggcccttgtgcaagagtagccattttatttttttataaaattttgatatgacattttctcccaaaattttttgcttgtaagccttcatgtattgctttttgcactttttcctaaggtctttcacggaaagctacttctttgtgagtgtatgaatgttacttctcttctaga

SEQ ID NO: 340437 - DNA, 942 bp, Cannabis indica
agtgagcggtttcctttttgttcatgggctggcggtttccttttaaaatttcaaaattggtttccttttcttttcttgcttcaacatctatttaatccaatctttgtcatttaactcaccatctacccgaacctagtttcttgtttcttttgttgttactgttcatcttccccttcagatcgaaaatggtgagaaccaagaacctagggcttaccaaaaagttggtggaaaccgatgcaaccccgtccaatgcacctcctgctgcttcatccatgcctcctgctgctgcaaaaccaggagattcatcgcttcctcagcgtgaatctcagccacagaagccaaaacgacctccaaaataagtggctcgaaaatcggttcgccctgtttggacctcttcttcgtctgaatcttcgaaggcatctcctccgcctttagcagtccttcctcctgctacatcagttcctgctactactccaacaggtccttctactcgaacccgagctcagaaagcatctgtcgagaaagaactccttgcatctctaagtcgtgaaaaggttgggactccagccaagaagaagcttaaggtaaatcctccttcggtttcttcttcttcagaagaagaagaaccaacgaaagtctcctctgacaaatccgcgtctctgcattccgagaaggaaattccagaggacatgggagtttcctcagacagtgaggacactgaactcgagccagagcctcatttgacaaaatctgctcctgctcgttctgcttcagcagcaaaggcttctactgctgccaaaggcaagcagccaatgaaagagccttctcctggtaatgttccttcaactctttctcactgccctcgattttattatcgtgataatgagcgtgattggaatttgtatgcaacccgtaagtttgaaagtgagaggaattatgatt

SEQ ID NO: 340438 - DNA, 781 bp, Cannabis indica
gaaaaaaagctttcaagagctaaaggcacaacttgctaaacctcccatactttcaaaacctctggacggtgaggaactgggaatatatttagttgtcacgaaacatggcgtgagtgccgtgctgatcagagaagagaacaacgtacaacacccagtctattacatcagtaaaagactcattgaggccgagggccgatatccgttgatagaaaaactcgcctgctgcctcattctagcaacaaggaagttggccttatttccatgctcatcctgttcgggtatataccgaccagccactacaacaaatactgcaaaagccagatgcttctggacggttacttaagggggcagtagagttgggtcagtacgaaatcactttctaatcccgaacaacaatcaaaggccaagccttggcagactttgtggtagaatgcacaggcaaaaaagaaagcatttcagaaagcaacctcgagccgacactaatacctcaaccaagtcacaatggggacaaaccgacctggaaactacatgtggatgggtcggctacagatcaactatctggtgcagggattgccctcgtcacgcctagggggcaacacctacacgctgcagtcaagttcggattcaaggcatctaacaacgaggccgagtacgaagctttaatcgctagactaagactagcacgagagatgaaggtcgaacacattaaaatctgcagtgattcacagctggtggtaaatcatgtatcaggaaaatacaaggctcggggagaaaagatgat

SEQ ID NO: 340439 - DNA, 589 bp, Cannabis indica
taattaaattaatctcaacaatttacccttctcgggtcataattaccaaaatgcccctggctcaccaacggggtctttaacatgttaaatttcatataatttcacatatattgaactatataataatataattcctcaattaactcataattatctaattagggttttgccaatccttttcttaattttgggtattacactaagtgtactatttattttagtgtgaaatttacaatttttatgatttttgctcggtgacggtggaaaaagcgacagatggtcggtagagtcacatgggtgagtttagaaatttttatttagtggggtatttatatattaatatttggagtatcaaggttaggcggggttatagttttggaccactttacccatagacctataagttgcttaagtatgaagtaaggggcaaaattagaatttgccattttattgagattttatcttgtagtggagttagtagaaacttccaaattttgttttatgttgttggtatgatctagtttattaagaaaatagaattatggaaattaagagaaaaaccaaagttatctcattctctctctctctc

SEQ ID NO: 340440 - DNA, 658 bp, Cannabis indica
aagcttggacacaacccgtagtcggtgtctcgatcttttaatcgtaccaagacccgaacatggaaccatttctagacgtggacacaaacccatactcaaattcaggaccttaaaacaggaattggacctggacacataacgagatctagacaccgaaccaaacacgaacgtggacccagattgggatcgatacccggaccaagacccaaacctgaacctagaattgcaccaggacctgcgacccagaacatggagcctaggacccgggacccgggacatagactagaacctagacccgtaccaaaacctagacccagacccagacccagaccaagaccaagacctagtcccagacccaaaccgaaacccagacccaaacccaaacccagactcatactagaattcgaactcgaacctaggactcagactcaaacccgagactcagacccggatcgagatcaggactgggacacagacctagactaggaccgagccctaaacctagaccgagactagaacttggattgggatcaggacctggaaccctatatcgggaccgagacccaagacccaagattcagacttgagacgtgggaaccgaactctatgacctagatggggggacctaggccctaaacctgaacctggacccagactt

SEQ ID NO: 340441 - DNA, 509 bp, Cannabis indica
accttcgaaaattcaaacctccatagctcgtgccattggagctctgcaactttcgaacctgcaaaaacaaaacaccattaaagcttgacaaaagcttcgatcaacaaaaatcaaaacaaaactgtacagttgctaatcgaaggtgccgagataactcatcattgaagctactcgaagctttcgtcatcaaaattcagtcatcattgaaccttcgatcaaacagttcgactatgagatccaaaaactactccaagctactcgaagctactcgcaaatgtcagattcagtcaatgctactcgaagctactaagacaacacttcacaagaacagaacttttggaaaataaaaaaactatgcttcctttgatcatttcaagaatcatcattaaacaaaggagatatcacgttcaacctctgtacacttgaagagaaaaaagcaacaagatcatagctcctagaatctgatttacacaaaaaaagtttcaaaaaccagtaagtttttcatattt

SEQ ID NO: 340442 - DNA, 679 bp, Cannabis indica
ttcagtgatgaagatgctgtcaagattagtttcccgcacaatgacccattggtcgtcgaagtccagatagcacacaagatggtggcccgaaccatgatagacaatggagcctctgcaaacatcttattcaagacaccatatgaaaagatggggctccaactcaaatacttaaccccctgtctcccgctcgtgtatggtttctccgaccaaagcgttgtacttctagggaaaattcgcctacccctcaccgttgggcaggctccgaagagcataactataatggcacaatttttagaattggacgttccatcaacatttaatgtcatgttaggccgaccagatttatatgacttaaaggctgttacgtcgatatttcattcatgccttacgtttccaacaaagaatggggtggggttactgagaggaaaccagcaagttgctcgagaatgttacaaccttgccctaaccaaggttaaaaatgaggtatcctctagccagagtacggacaaggggaaaagcattgcaaaatagggaaccgcccaaggcggggatgaagatgtggatcttcgacatggggacccaaacagcattattggactagtagaagaactagaagagattaaaatcaatccaattattccgaccacaatgcttaaacctgactggaactttagctgag

SEQ ID NO: 340443 - DNA, 648 bp, Cannabis indica
actgtgtttcttaatgtcaattcaatttatgggactgaaattttcttttattatgttaatgcattaaagtggcgtttggtttaatgtaagggaaatgataatgataatgaattgtaatagaaacagtaacaggaatgatatggtgtttggtttatttttggtatggtattggaaatgagtggtgtattgacaaaattattctttaaatccttggaaggtaagggtataaatgtaattttaattttatataaattgtgtagttgtgattaagtaggtatagagttgtaatccgatatatcataatgccaaatcaaacatgacctgaaaagagtgtttaaagttctggccaagattatcataaatgcttttgtattaatcttaaatgcttcttaattttgattagtatattttcatgatttctatgatattataggcaaagaaaagaagtgtttaaagtgactataaacgattataaacgcttaaataaaaaaaaaaaaaagactataaacgattataaatttacacttcacaaccatcataattgcatatactataaacaaatagttacaattttctagttataacataaattttttgtgactaatgtgatttttagtcacaacagaaaattacttgtgactaaaacat

SEQ ID NO: 340444 - DNA, 478 bp, Cannabis indica
cctgcatttgtctgattcgtgtatgacattgttatagtgaggtatgatacagcgatgttactgttgaatgtagagatacctttctctatagcaatggtacggctaagtgtgcccaggttatcgtagggccaagttaggcccaggttatgtatgtaatggctatgatatgccaacgttatggtaatgacatgttttatagtattgatatgattgtgtgctatgagtatgatattggagttatgagctcaatttatgtatgttatgaatagttagcatggacatatatattaaaggtctccatgtgtgcaattacttagtaatggttaaagctaaggtatatgatattgttaaaacttaattagtatattaatgaaatatgttattgtgtggtattgtatggtattgcatgataagcatttccttactgggcttttagctcacccccttacttcccctacaggcaatagacagggaacat

SEQ ID NO: 340445 - DNA, 502 bp, Cannabis indica
aacattaaatgttatttctgatctatattaataagtaaatctgattataatgaaatgagttttatttagggcataaaacctaacataaggggggtactaagacataccacaccgacagacataaagcaggctaaaagtaaaagcaaagtaaaaaagaatatctatcaaagtgatcatatatatatatttaaaatatcttgacccagagggcaggtctaaaaagaataaaaaatataaagggcctggggacgggccgtaataactgtgtcccattagaaaaaaaaacaagctaaattaaaattgtcttaaaggaaagaaaaatggctgtaaataaaaaaaaaaagagatatgattataatgctgaaaatgggatggactccgcggcctagtcgatgtgaggaggaagacgagggccccgacgcgcttcaagtaaagcatcaagccttttcttcttctcttagaatttagcaagagcctctttaggcttgggatagaagtcaag

SEQ ID NO: 340446 - DNA, 554 bp, Cannabis indica
gtaaaattcatgcaaacataaatcacttcaaatttcttatattgataactaatcagattgtaaagggttttatttagggcacaaaacccaacattctatccctcgtagatttctaatccagtccttgttttaaaaccaaatggaaaattgaaaacttgcatagatttctcagatttgaacaaggcatgtcccaaagattgtttcccactaccaaggatagaccaattggtagatgaaatggaagggaatgaattgatgactttcatggatgcatattctggataaaaccagattaaaaggcatctcccaaatcaggaatatacaagcttcgtaataaatatggggctttactattataaagccatgccatttgggttgaaaaatgttggagaaatataccaacgtctcgtaaatggtatgtttgaaaactagattacacaaaacatggaggtctacgtcgacgacatattagtaaagttagtgaaaagcgaagatcacacaatggacctcgcagaatgttttgctatactcaggaagtatgacatgaagcttaa

SEQ ID NO: 340447 - DNA, 975 bp, Cannabis indica
cgggtcgccacaagccgctcttctagcctccttctttgtttctagggctccaattctgaatgaaccctaattctcacgaactccctctatttaaaccaattttcatctttaaaattcgtgaaattacgaaactgcccaaaaatcctgtcactgggtccccgtcgcgactggcaaagcccccgtcgcgacggggttaaacaactttgtcttgaaattctctctgccagttcccgtcgcgactggcatgttccccgtcgcgactggaacaggcagcgacaccaatcttggattttcttctcgattctttcaccatttttcctcaattcttgtacatactttctttaaatgcccgaggacctgaaaccaaagaatcaagcgtaatatagccctaaaactagaaacaaagggtgaaaactaaccaaaaatatgacccgaaacttagactaattttagcctaacagataccctctgtgtttcgcaacttcatacgcctcttaagtggcctcgtaacattgatggtagcacgaacacgtaaataatctctccataaccccaagaagttcttctcatctgatccaaaaaacttaccaatgtaatttgcaatatctgtgactatcgttgccgttttaaatctcgatcgaagatcatgtaattgtacccacatatcgacctcattcagctctaacattctcgggtcttcccccctcctcagccttttgaaaatcaacaagaacttgttgaacgtccacgggctacgatcaatcatgctttggatatctaactcatggtagaatttaaacaagtatcgattagtatccaattctttaacgaacatttcacccggttgccaaagagatgccatcaaatgttgcataacatcaaaatcaatggatctttctttcaaaaaccttccaacaatgcaccgccagtcatcataatcattccccgtagtattactagcatcataggacaata

SEQ ID NO: 340448 - DNA, 1209 bp, Cannabis indica
ttaattcctttttttttttaacattattagtttaggaaatatttagagtaaatactattttagattttgttttgcaaaagttactaattaaaccctctgttttgttaaatgacaaaatagacattgtactttctaaaatggtacaaataggaccctgaagtgattttttgtcaaaataaaatttaataataatccgatctaaaggtgttatgacaaaactatttatattttctgtatctgttcgtgttaggaatggtcttcaagttggttatattaaaaaaaaagttgtcaaaaattaagcttagggtcctatttttactattttaaaaaatacagggtctattttgtcatttaacaaaacaaaaagtccaatcgataacttttgcaaaacatcgggtctaaaatggcatttactcaaatttctatagtagactcttatttgtttcaacatttagaagaaaaaaaatagtctaatttgcatgatcgcatacgttgcatttaggatcacttgtaaatttttcaaaaaattctgaatagtttacaatgctgaaaataaaatttaaattgttacttactatttatcgagattttcaaaaattaataaaatataataaaggtaaagaaatatatcataaacaaataatgaaacaagaatttttgcgtagttcaagaattaacgaccactagtccatgagtcaatattattatgataaggttggaaaaacctttttgatttacataagtgttttgtcaagtatttgaaccttagaatttgtctaagcactcaaagaatgagatttttaccctttgcatgaatgtattttcttatatttatagagttagggttctcatacataaaccttgtccactactgtggtaaatacacataatacataaacccatcttaaccatgacctccttaatgaagcgccattcaactcggtcaaaagctttactcatgtcaagtttcaaagtggcaataccagcccgaccccctgttttatttttgatggcatgaacaagttcgaaggcaacgagaatgttatccgtaatcaaccgattgggcaaaaaagcactctgcgtttctgatatgacattaggaaggacattcttgaagcgaccaacaagaacttttgtgactagcttggagacaacattgcagagacttattggtcggtaatcttgaaccctttgaggatttttaatttt

SEQ ID NO: 340449 - DNA, 765 bp, Cannabis indica
gtagcgtgccttagcattagggcgttacattcacaataatttacacgtacatgtaccaaaatattattaaaaaacaaaaattactaataatctaatacaccctaaagatttactattgatataaactcattcatttatcacctttagattttaaatatatggctataaaaacatgcctaccacatagagacaaaacccatgtacctattatagatatgtcctaagaagatataggaaaatttacatggtatactaacttttgttatttttttacaaaaatactgctaggcggtattttttacttttttactgtatttttttataagtttcatactgcagtatactgtgttaagttttcactggtgttctactggtgttttttagttgttctactgttgttttgttgttttgagttgttttattttgtattttactggtgtttcacagtatttttgaaaacttttccatgtgacagtatttttgtaatttttccttaattttattatataaatcaataaaaattaaatgtaaaagaattacaatttaatgtaataactaaataacataaaagtaaatataaaagaagtatatttattgtgatgcaatatatcatattgtagtacaaattccataaccttttgttatgtgataaatttgaattaacttttgatacactgcataaagcgaacattttacaagataagctatattttaataatgagaattgctaaaaggtattatcggtgtctagcactctcttcggtg

SEQ ID NO: 340450 - DNA, 550 bp, Cannabis indica
ttttcacgcccgaaatcatatgttagaatatttttttaaaactttttcgtagcaatattccattatagttatagtatcatttatgtaaatttttgaaaaattctgatagtttaaaaacagattcttgatatttcagtctaccacgtgtatttaaaaaatttcgaacttatttttaacattttaaattattcaaaattttctaaaaatttacaagaatgatgttgtaactaaaacaaacaccactatgaataaaaataaaatattattttccaacatatatttttgggtatgaaaattgactaacagattgaagataccacttttaaaattacttgtcttgtaattatgtgtcaagtttgtggggtaatatacttatattatttatatttaaatacatattgaatttattttattttctttttcatttttttgaaaaatgattcatatgatttgatgagtactataggtattcggtagattatataaataatagggaaacttacaaaaatattgaaatttgagttaacttttacataaatactgtcacacg

SEQ ID NO: 340451 - DNA, 512 bp, Cannabis indica
taaataaaatctatgtctagaagtcgaaaagattttatagatttagccatttagaaaaatgctccagaaacttactaaagtaagttgctagcactagagtaagtaaactaccagatataccacaagccacaggtttagataaactcatacctataatactaggatcaggaagttttgttaagtccattgaatagacttatttttcaaaatttcctttcttgtccttgtagtagaaaacttttagttactccatatgaatagttttaaccacagttctcttgactttgctttttagatccttattctgactatccattacttgtttaaactaacaatagattttttaatcacaagtgtcttccaagtcataatagagtgggttccttaaaatcctcccactacgacaaggtaccgtgactttctatctatgaatattaatggcatttacctcatcgtttatgtcaagacaacagaagcagtgggaccattttatatagaataagataatagaa

SEQ ID NO: 340452 - DNA, 695 bp, Cannabis indica
ttcatcgcttccccagcgtgaatctcaaaccgagaagccaaaacgtcctcccaagcaagtggctcgcaaatcggtaagacctcttcgaacctggacttcttcgtctgaatcttcgaaggaatcccctccaccgttggcagttcctcctcctactgcatcagtccctgcctccactccaacaggcccttctactcgaactcgagcccagcaagcctctgctgagaaggaacttcgagcttctcaaagtcgtgataaggcagtccctccagccaagaagaaactcaagaccaatcctccctcggtttcttcaagttcaagttcagaagaagaagatccaatggaagtctcctcagacaaatcatttctcttcattcagagaaagacagtgaggacacagaactcgagccagagcctcctctgtcaaaatctgcttctgcagcaaaggcttctgctgctgccaaaggcaagcagcctatggaagagccttcttctggtaatgttccttcaactctttctcactgccctcgattttattatcgtgataatgaacgtgactggaatttatatgcaacccgtaagtttgaaagtgagaggaactatgatttgcatgctcatcgggtttatgggattgtaaagtttattcaatttcatcaatgggaaaacactcccactggtttcaatgggttcattgcaaa

SEQ ID NO: 340453 - DNA, 527 bp, Cannabis indica
ataataagtataattttagtgtcttattagagtaaatatatgtgaaactacacttatatttaatgttttgaaatatgtccttagatagaaaaatattaatacaaaactctatggtgattgtttgctattggataccaaagtggctcccaaatgctttcatgatacggaggttgatcttaaatagttatctcttttattgtgggcccattggacatgtggctacctctcgaatggccacatattttggtaaaaattatggacaatatttactctctaaattccaaattgtaatattgtaagttgggatttgttattggatgacctctcaattctctcctggaggggttatgtgagaccctaacttgggttcactcggcggaccttaacatcactcgatgcttagcttgtgggataacggcatatgagtgaagtgcacctaccatggggcagcaggcagcagctgcataggcgttcagcacattgggagatgttagctgagcttggctacgtgatgggcttagatggac

SEQ ID NO: 340454 - DNA, 925 bp, Cannabis indica
ttattgaatatgtgtttatatatatatatatattgtgtaaattgtgtaattgtattgtatatatttgttgtgaatgagaatgatgtagtagggatttaattagtttagaaataaagtttttaaaattatgttagtgtgatatataattgattatatatgtatatgtatatgttattttttcaaaaattaatttatagaatttagtaactagtaacttattacatttttttaataactagtaagtaattaaataattaaaattctaatttcgttgcattgcattatatagtaggttgtgagctaattttgagattcgacatatttcagtattgatcggattttaacttgctataggtatatacattcactaactttttgttattataattaattatcaatgcatgcttagtggagtttgaatattttaaatattcatccgtagtgatgtaagttctgcgaatacatgtactgcggccggataggtggataaattttgtattgttaatgttattttgttttttctgtattgttatatttgttttgtttgttactttaggcattttttaaatttttgaaaacgtccaattacagtcgttatgctgctgaaattttgatagaattagaataaattttaccaaaaaaatataaatattgaaggaaaagtacataacacaaataactagttaattactcgcaagttgtaaaaaattaggtgacataacacatttatacaaacttctcaattataaatgacaaaccaaacaaatgaatggattcactttaggaaaagtcattccaattctacctacattccaatcaactaaacactatcctagttagttaattacaacttatacaacttaataatatgaaccaaactaaaacaagaattttagtaatatgtaaattaatatgaattaattgt

SEQ ID NO: 340455 - DNA, 775 bp, Cannabis indica
attccaaatcatagtggtgcaaggaggaattaataagttaggaaatttaccatctgcttattggaagctcggttatataggcccatggtccccatactagttgagacaatactgcttgtacgactcagttaattgattataattaatcaattataattctaaaattagacaatgtcttatttttgaattttcactaagctagggcttaattgtgaagaaaagacgttttagggtttacttgttaattaagagactttatcaagtctaattaataaaataaattaaatggaaattttatttgataattaattttaattataaaataattaattttgacatttaactggttgaattaaaaaaatatggcatttgtgaaagaataggataaataattgagtacaattgtaaaattgtaattggtgggcccacatcctaatggtcggtcacttaatctcaatttagccatttatttatcaatttttagtgccaaatatttcaaacctaaacctagaaggattcctataaatagatagtgatagacccaaaactgacagcttagaatcattagcctttaagtcaaaattgagtcttttctttttctctctaattttcaaatcattccccctattttcttcttcaattttcacccctcttagtgattgagtacatgctcgcacatagcaagtaagtactcaattatagtgtgtaagactatgaagaatccaacacctgaagcagaatcgggctcagatcttgataatactctgcgatagaa

SEQ ID NO: 340456 - DNA, 677 bp, Cannabis indica
ttctttacaaaaaaaatatatataatggtaaaaaataatgctaattaaatttaatataagctatagtaaaattatgttaaatttaacacaaaatataatttaacattcttgatgtactcaatattttgtttgagagactatattttagagataaatattaaaagaatatataatttgataaaatatccctattaataatgtgtttatatatttaagtaactagtctaataataaggttccattatagcatccaaaatggagtaaattaacattatttattcagttgcttaaataggcattcttcttaagaagagaacaaaaaatcaaactctttttgattgtaaatataggtagcattgttcatttgggtcaagtaattagaaaattgatgtacaccttacacatacacaattaatatatatccttaagggaaattcttctaacctttacttgtaattccaattctagcatttgaagacttattagttgcaacatctagctagtaaccgaatttgctataattttatggactatttttaaaaatatgggaaaaattattaaggttatgataaatattgcataaaaagtaaatgtcattaaatatgacattatctaaccaatcaaactaaaaatattagaaaaaaaccatataaaacattaaaaagaaatctgaattt

SEQ ID NO: 340457 - DNA, 762 bp, Cannabis indica
ctttgagaggatgaagcagaagaaactcgcaggaaaaaggtcaaggacaaggatgtcatgcaagtcttcggacgaatttaatggtgatccttgacgaagaagtttaagggtttttctcaaactttttgaaatggagaaaatgatgcaaaggtcaaggtggttccgttttttttacgttatactcatgatagttgcttcgttagatcagagaaagatttgatcctatggacatgattcaaagttgaagtgaaaaagatggacattaattttgatgtacctcaaaaccgcacaaccgcataataagaggatatgtgtcttttcaaaaaagtggaacatgacgtaaataccctttgtaatcattaaaaagctgtttttaattaaaaaagaactgtttaaggggcaattgttatacccgaaatttggtaagcacatcatcatcttggcccaataaaaatgggatactcacagctgtgcaaattataaaagcctcatttacttagcttgatttgtaatcaaatcccataaattactgcctactatgtaattatacatagtggcaggcaagatcaagagaggggacgaaaaatcttatacaagagaggtcctaagaaaaaaaaaacacaattagaaatctgaatatgattgactcgtgaactatgcagaattttaactgcaaaaccacgtaaaaaaaccctgtgttcatatattatttttctatagcttttatttttttttgttggaattattaccgtgaggctcaaa

SEQ ID NO: 340458 - DNA, 707 bp, Cannabis indica
aatagagttcctaaatctaagagtaaaatttcatcttatgagatcttgaaaaaataggcaatcaaatgtgtcttattttagaacctggggatgtttagcttattttaggattcctgatcctaagagaataaaactagctagtagagcctatgaatgtgtatttattggatatgcggtgaatagcaaagcatatagattctatgatctgaatgcacatgttatagtggaatctaatgatgctgatttttatgaacatagatttccctttaaattaagaaatagtaggggtacatctactagaaatgttcctactattagggataatgagcacactgaaagtagtgaaatacaacctagaagaagcaagagagctagagtagaaaaaaaacttggttcagatttttgtgctcacaccttaaaggaggatcttgccaacctcctatgagccttgtcttccatagatgctgacctgtggaaagaggccgttgatgatgaaatgagactcacttattaagaacaaaacctggcattatacaaacttaccacccgggtgcaaaactataggttgtaagtggattttgaaaaagaaattgaaacctgatggaactgttgacaaatacaaagctcgtttagtagcaaatggttttagacaaagagagaatgtagatttctttgacactttttcacctgtcactagaataacatcc

SEQ ID NO: 340459 - DNA, 822 bp, Cannabis indica
aagcatgtcttccggttacactctcccagatgatgtttcttgcaccgaggacactcagggtaagagtaaccctggcgtcaacctttgccttggttcccgcggaaccgcttgctttgccctgaaccaccagatgttggggtgactttccttttatgctcagtggtggagtcaccaccatccctaccatatacaggagtaggaaaagtggggcttccaccaacactcggagtcactcggggctcctgaagaaatttcaccacaccctcggctctcaaagccttcttgaccatttcaccatatgtagttgcctcggtagtagtaatcaccatatcatgcctaatcttcgcactcaaactagccaaatatttctctttcttactaaagccagttggcacgattcccacagcaagcttggccagacggtcaaactttgtagtatactcagtaaccgacattccctcagtttcaaccaattcggtgaaccatttcctctttgcactgcggacggcctcattgtaatatttggagttcaacaactccttaaactcttcccaagtcataactgtgacgtcccgagtgagggttatcaactcccaccacacgagagcgtcctcctgaaactggaatgtggcgcaggtcacccgatcattaccaaccactcccatgaagttaaggatacgttcaatcactgtgagccactgctcagccttcattacatcgggacctcctacaaacactggaggtgcctgcttccggaacctttcgtacaacggttccatacggttgcctatcgggttttgtgccctaaataaaacccattac

SEQ ID NO: 340460 - DNA, 542 bp, Cannabis indica
tcaaacaccatagatttcttgctcttattccttcgccgttgtcagtctacattttaccggcgatcaacaccaacacccagtctccacacttcatgtaagttcttcatgactagtactctttcttactatttgtttatatagcacactttatgatttctgggttggatgtctgaacttctgggaatatttttgtttgagtttatgtatgatgtgttagattcctcctcttttgcatttagattacttcttttaactatgtttttgtcgagaaaccatcttcatcccacgtaatgacactttagggtttagagcagacctcgttttttcggttttacccttttttccctttctctctttacttttttgcaatgtcactatctgtgggattcttgcacccgactcttgtcaaggaaaaccttttgaggctttctcttttggcaagtgtctggagggggcctctttctagcggttaggggacccccgttcccttcttgaagtagggtttggtttggggcccaactgctggattttttcaatctttt

SEQ ID NO: 340461 - DNA, 508 bp, Cannabis indica
tttgtactttagtgaatattcagtactgatattttcccagtatattggagaaaaggattgccaaatcatcagtctaacacagcagccatgtcacctttatttcttcacaccacccctcaaacgaaagggggattctttcacttgaagtttgtcgatcaaaaacttgaatctggaaggtgacagtcccttggttagacagtctgcaatttggtcatgagagggtatgtatcgaatctccagccttttgttcattactttatctctgataaaatggacatctaactctatgtgcttggttctagcatggtatacagggttagaagcaagtgcacttgcgttcaagttgtcacaccagatcactggttgagcagtgagaaagattttcatttctttgagtaactcctgtaaccaagacagttcagaggccaactgagcaagtgctctatactctgactcagtgcttgatcgtgccaccacatgttgtttcttagaggaccaagatatcaag

SEQ ID NO: 340462 - DNA, 647 bp, Cannabis indica
taaacttgtttaagtcaattgtctttgtaattgttgataatttattaattgatttctttctttgggcatggcctcatggactaggagtgttcgaaagaacactgataccacatacaaatctcttgtgtcaagtgatttaattttctgcaattatttttatattctgccagttctgatttgtgtctgcaaaactgttttctacagtaacagaattatattctcctgctggagacgtttacaattttatatttctgtaatatttattgatatttgcaaagactcggtttttcattatattccaatgtgttgacgatactataatcatgaaaaaatatatatatttatatatgctctggacttaatagaatttatatattaaacataatcatgaaataaatcatgtgaaccatgcaacataaacgatttctgatattttattaattagtaaatttgattatattgaaatgagttttatttagggcacaaaactcaataccttaaacactagatgcaatagaaactaaatttacaagtccaatcttgaaaaatcagaattaaaaaatcacactcttatcttctctttacatcatatccttcgtcgaagtgggttttcaaaacctccctatgatcttctctctctctctctt

SEQ ID NO: 340463 - DNA, 538 bp, Cannabis indica
cgaggtatgatttagtataatgtcatgcatatgcctatacatgtttagcgtacatgttagatgctgtcagaataacatattagatatatgttaggcaaattttatatagccatccgattagcatatcaaggcaacagtgaggtgtacatagagttgcaccgagatgccatcagatatatgctagcctatcagatagtatggattaactgctaccacatcagtgcgattagagtacagagtataggcctgattcacggttaatcatactttgttaagaacgttcctgattaagttagggtactggttaggtgtatgggcgcctgattataacccgagatttagtatgtttattatgttatgcttttcttacagagtctgtagactcacagtgctattgctatgtgtaggtaagagcaaggctaaagctatggagccatgagagtgagtaggtgaagattgtacatgtcaaggcggttaggcctggagcatacgctcctggggacatcagggcttccgttgtttagtcactgggcgacaa

SEQ ID NO: 340464 - DNA, 987 bp, Cannabis indica
tgatatagaagttggggacaaaggaggagtggatacttctcccaaaaacagtaaatgatgcactgtgttagtgtccaagttatgttattttatattttgaagctataatgtactatgagtatttgttatgaaatctgtactttggtttattttggagtattaatgtcactttcctcattaattaattgtggaattaaaagtgaagtgaatcattgtgaaatcacaactgcaaacagaaagaaaatagacttaaaataatatagtagagttacatacaactatatatataatggaggtaagtgcttcaatctcattaaatggcctaacaaaaagttgattcaacggccatatgagatgagttgtaacaaaagtacactatatatatataaaataccacgattgaaactgaacggatgttcaatcaagttctataacttgagggaacttccgttgagacggagggctattgtctctgaacggggactttggtcgtgaaggactttctcttggagtagtgtttggtgattcttgttttacatgaagtgggtagtggggtatggacacctcggtgtagtcgagaatgtcatccatgataccctctaatttttctcttgaagtgttggcttcttgcatggcatgggctgaatggtagaggtgttccgccagtttgtatgactcctgcttggcctccgtggctcttaaatgtgccttccttataagtttttcgtgttcgtggagaacagtctcgagccttgcacagttaggacatcctgaaatggaggctgaacggagtcttggactccgtgacggtgtacctacgggtcttgtggaagaaaaaggatgcggtggggatttttgaggacttgtttcaaaagggttgaagttttggtaagggtccatttgatttaggtaatagtaaaacggggtttgaaaaaaatgctttgtttggataacctaacctttacttatatagtggtttggtgggtt

SEQ ID NO: 340465 - DNA, 886 bp, Cannabis indica
gccatcaaacataaatttgatattgggatcctatatagatacatatagtttttactttaataaggagttttttttttctacatattaaagtagtttcttttttgtatttttacagaaattcacataataacacacatagcaacttaaatcacaactcaaactcatataataacccactacaaaaaaaaggccacctttagtggtaaccttttgtcacaaaataatttttttgtgactaaatgtgatttttagtcacaacaaaatattatttatgattaaaacataatgtttagatacaacttgtcactaatttaaatttttagtcacaacaagtgttgcgatcaaaaatacatttggtcgcaacagttagagatttttgtaactaatactttttagccacagaccttttagccacaacgtaaaaatgataatttataattagtcacaacttttttttatttttattcacaaattttattgtgactaaaagtaagattttttatagtgacccacatagcaattatcgaaataattactgaagcaactcaaattaaaaaataaaaaataaaaaaaaaaaatcatataggatgattcccctttcaataatattatgaaaaattgaacattacaaaatgaattggtcaattatatcttactacttttattgtgtttgaaaatttatgtggaggaaattgtaagtcaatttctacatgcttagttgtactgtactatataatacatagactatacatttaaatgcatgcatattgttgtatgtataccctactatatataatcactgaaacattaaatagaaaagttatatcatagacacatcacttttatctctattggtggaaatatctttatttttagcacttatatt

SEQ ID NO: 340466 - DNA, 506 bp, Cannabis indica
aatacccattaaaagcatacccatagatacatataggttcatatcagattgtttgcctcttcagttttgtacatataatatagaaggcatagtattatttgccttttactataatatgtatatattgttattattatatattagagttcaaataatttaattaattttggtgttagtttatgtctaatattttaagtaaattaattgaaaaaatatgttgctaaagtgacatcttttgtgtagattaatatatttaaatattaggatggttgtgtgtttgtaattgatgcatatattgactgacttaaaggtaagtaaatatttcgctaaatttcaaacatatcagtggcaataaatgtgtgacaattataaggtattttgtgtcagaagtacgttagtccaaagattgacttattgtttggcacaattttattgtcattatttaattactacaccatgagtaccgcttgcagttaatattactgtccaaagacttgatattaatg

SEQ ID NO: 340467 - DNA, 569 bp, Cannabis indica
cgaacacatgacatgagagatgaacatggagtgatggaagcgttgttcagggagtttttttcctttactttttttaattgttatttatattaatttattttcctaattaagttccattgggacaatgtcatgttagtgtgtgttgggggggggggtgtacctcgcggtttactttatgtcattttgcttttttatgtcgaatttattttgatgtcttttcttattgtttttatgtttcgttttttaggttttatgtagtagttattttttattatgactatttatgtgatgaatttgagcaatggatttaattggcagtaatgataactgatgagacttttaattgatctaaaaataatgctaggaagatgataaatttctaatgaattgtgtgcttaactgtggttaatgattgctcaagcttagttttttagggcttttttaagttttaacaaaaaaggtaacaatattacaaaaatactaccagttggccaaataaacaaatatacaacccaaataaaaaaaattacacaaataccacttacacacaccttcaatccaggatccat

SEQ ID NO: 340468 - DNA, 590 bp, Cannabis indica
gcttaacaaaagacaaattaacataagataactcagagagaagatgttgacagtcatggaccaacatcccgaatgtagagggaagaaacatgttattgttgatagcttggactgccattagacaatcagtttcaacctcgacagagttccagctcttagtttttatccaactaagggcctccttaattccaattagctcaacaatttcaggggcaacactaccagatttgcttaaagcagcagctccaagaacaactccaaatttgttttagtttcatgtttattaagttttacaattacgttattttttagttgttatattgttgtttttatgttgttcaatacatgatatacttacagttttgtttaactattaatcgtattttaacggttcattgttttattaattttgtcatcttaatattttttaggtgcgtgataagatctctgatggtgtttacaagttgaaccttctaaagaaaaatattacaaggcttataacttatttttttatttgtcttgtttgaaacgttctctgcttgtagttcattcatttgaagaaaaaaatcatagtagaaagttgttttata

SEQ ID NO: 340469 - DNA, 558 bp, Cannabis indica
attaataaaatactgatatttatataatatgtaattatactaaaaagtgtgggtaattaaattttgataattaaaattcaacttttaaactgtttaacaaaagataagtaatatggactacggggtccccctgttttcaaaatattcacaaactggtttcaaagtattttacaacataaactttatatttccaaaatacaatcaaaatagagcatcctgtttactgggccgtgccactgcggctggtatgtacattgctgctgcgaccacaaactcatggttgctcaactttagccttccctttacctgcaccataaagcacccgtgagtcacagagactcagcaagaaagtgatcaaaacaataactgaaagaaaatgattatcaacttaatctcatgccatcatgtttactcactatacaatataataagcattcctttaaacattacacagtcctggtacttaataaagtacccctttttaccactcgtcacttacgagctgaatatgtcactatcgttgcccgataaagcaaacgataagtaagaaacctaacc

SEQ ID NO: 340470 - DNA, 1016 bp, Cannabis indica
aaactctccaatttcagcaagaattccttccctttgctggttataggcagcacgaaagagagagagagagagacttctaaatttcactacttccctttttcctttctaagtttctttcaaattctatcttgttctttttaaaataatggattaatattaatattaatcctataaagatgcagccattcatttctcactaaaaaccaaaagtcaacaaaatgacttatttgccctttaactcaagctaaagattacacaataccaagggcattctagacattaccaatcccgtccaatttacaacacctctaatacctaacaataataccccgataatattctaaattatataaaattcgactctctataggcccaacgtcgctttccacagcttccgaacacaatcacagaaattaagaaattacataaataacataataaatatatatgaactcaaataaattcccataatcgtattatttattaataataataaaatctcatacataaaccctaattatttaataatttaaggtattaatcatatgcggtctttacaactagagtactgagtataggctagattcgtagttagttatacttttttgagaacgttcctaactcggttagggttatggttgggtttatgggtgcctgattataattcggattattgctatgatattatttatgcttttcttactgagtatgttgactcacaattgctatttccatgtgtaggtaagggcaaggctaaagctgagtagccgtgagagcgagcagatgaagattgtacatgtcgggacagttaggcctggagcgtactatctttgggacatcaagtcttattttatataggcgctaggcgacaaacttttgtatatgcacagttaaacttttgtaaacgggatcccagatttttatatgtatgatattttatgttttaattaaataagcaaaatttaattaatcacgattttcaataaacttgtggattagcaacgagctgtgcagtt

SEQ ID NO: 340471 - DNA, 947 bp, Cannabis indica
caagtggagaactatccccgataatctcggccctatgtcacaacaacggtaaaccaataagtgtttatcccaataaaacactgcttaatattcacataagacaatctaggattttctaccaagccctgcggtataaatatattaaactaaaacttatattttggttctaaattatacacaatattgtagagctcgttgcaagcttcgaaacggtatataaaatttccgaaacggacacccgagtcataacttatgataaaaatacgatttttgatctcttaggaatttctaaaaactatgaaatacgaaaatctcaatttttgcactcaccgaaacactaccaaaacttatccaaatcactccaaactttcacagtgtgcatatatgccataaatattaccattcttacgtaacagaaattaaaatcgagcccttaaatgaaaaacgccattaatgttcggactaatctttaaaaagttcaaaactcgatttctaactcaaaattatctcaattcaacaagtaaacataagaactagtcccatgactacccgagaataatcgtataaggtcagaaccttcataactattctaattcacaaaaccctatacgaaaccaattgtttttaaaattaaaacgaaattaaaccataccttaagctttcccttttcaaagatttgctatcctgctactaccagagcttagatcactaggtttcaggttgaaaatcgaagaaaatagatataggaggagaaggttttatcgaaaggagagaactagggtttcgtttgttcgttcgttctgtttcactgataacttaatatatatataaataatattataacaatatattaataataataatattaataaaaactttattattaatacttatcttattatttcttagccactaagaaatctctatttctaaggtatttggccaac

SEQ ID NO: 340472 - DNA, 692 bp, Cannabis indica
tatttcaatctctcttttttttgattcagattgcccccagcaatatacactttgatttgttctttttctaccctaaagaattataagtcatattgaccttattgatatcatcatgactacctaaagaaaaaaactctcaaaaaccttggctcgtagcttctgtccgctggccggtagaattaaccacaaacaaccattgagagcacagacaaaagcgttctgttttttgaagctaaattcaaagactccctctcaacttttcttgaccagaaatcacacaataatgcggttagtatggtatttattgatcaggcagcaagtacttcatctctcagtggtctgaagaggcaggagaattagttagaaaagatatgccaatattttaatgaggaaattaaacaaaaaaaaaagagaaaattaaggagagattaaaaagaagtattgaaagtgatttgagagtgtcatatcaccgcctcatatatctcttttatatctattatattttatatgaaatatggctatataacagaatttttggtttatgagaaattattagtgactttttttaaataaaaaaaaaaacaaattattaaatgttgtcacgtaaagggtcagcatccgttaaacctaaatataattaatccattacaattaataataaatttgtttataaaaaattatttttaaatttt

SEQ ID NO: 340473 - DNA, 646 bp, Cannabis indica
ttttttttcttataattgattttcaaaattcctaaagactaatcaaaagtgttcaaagtcctaattcatttgggaatgcttgaagaacatatacaagtgcctaagaatgccaaagttgatgtccatttggtagtttcgagcaaaacggacttggttcacgtcattaagtcaactccacagaagtgtaaaattaattggggaaaatgttaacccataaacttttcttggtgacatagccataaatttttgacatgtggcatgaaggatgatgtgaaagagttgagcaaacccgagtcagagcagtcaacctgggagagacctagccctgcgcccaggttgactcaaggatctctgggatggaagtttagacttcaataacttgaatccaactcactatcttttagtattctataccataaagacatggacaaactaatacaaggtctgggagctaaaattacatgaacttgcaacccaaaagccaacctggcacatagggtttccacccagcgcccaagttaatatcatcaactagggttttagtttttgggaccgtcttagtgcaaagtggccaaaacttgcattgagaaattgacttgacataacatgtatgtatttgaggtatggttgtaaagaccgcttagtt

SEQ ID NO: 340474 - DNA, 586 bp, Cannabis indica
aactgtcatatctctttaaatactcatccgattctcgcaatcctagttcctatataaagctaattgaatttcccataattcttatgaagaaaggttttactgaatcaaaatttatctatatcaaaaattagtatttctatgttgtttgttgtaaatcattttttcatattttctatataagttgtctcagtaaaatctgaatatccctctgaatgatgatccgattctagtgatctatgtgccgttaaaagattcgattttctaatgttttatgaaggaactattcaccaattattgattattctaagtcaaaattattgttttaatgttatagtttgaaatccatttgtgttgggatttctaaaaaactgtttcggtaaaatatctatatctcttacgttataactctgattttaaagattttagtgtcattaaaaaggtaaattttattttctaaaacttttatgaagagaatattctctgatttagaatattttagtatcaaaactttgtatttctgatgtcttctgtgatttgttactccatattctttctcagaaatagtttcagtaaaactatcataact

SEQ ID NO: 340475 - DNA, 553 bp, Cannabis indica
ccgcccaatttccatctctactcaccaccacacttatatagcacattttgagtggtcaacggtttgttatattatttattaaattaaaatgtatgagacttgatatttatttgcacaaataacaatatactaggatatttgtaattaaatattcagttcaatttaatttattaattagggtaaattgcggcataaatacttaatgttttagattttatacacttaaatactttatctttacttttggaggcaaaaataccaatgttataattctcttacacctattacactactacttctattaactaataataaatatggacacatagaggaccagatgcattgcatttatttattttattttaaaatttaatattcttaaaattaaatgctacttattttaaaaaaataaataaaagagatgcaataccaaattaccataactgagtgaactactgcactatatgtaaaaattattataagaattgtttttttaaaacaagtagcatttagtttctgatattaagaattttaaattttaaaataaaaaaaa

SEQ ID NO: 340476 - DNA, 579 bp, Cannabis indica
gaagcacccgtcagtcacaatgactcagcaagaaaagctactaattagacattatggaaagtgcaagcagatttcataataatattatatacatactggtaggtcttacatatgtcaatctacatatacagaaataacataacgtttatgtaagcacacttaatacataatgaagaatatttatagctattcataatcaaccatcttagcggttcataaagtaccctaatcaaacatcattataaacactcactttcagtacttcataaatcactctaattcatataatctcagtacttcataaagcactcaacacataatcttagtgcttcgtaaagcactcaacacataatcttagtgcttcataaagcactcaattcttatatcccctacaacatgtttttttgtacccccgttagttacagagactaatttcataaataatataacgttcattcaatcataccataacacaatatatttagttacaactcatcacataataacacgcttgatcgttccacaacttcataaccacataatttaggtacttcataaagtacccctaccactcgttaa

SEQ ID NO: 340477 - DNA, 1329 bp, Cannabis indica
ctgagtagccatgtaaatagtctctaaatcttctgccaggacagagaaagtagtaaacttggcaggattttccctaggggcctgttcggttttgctagcgaactttccctttttcccattgccttatctattattgttgttagaccgtttaccgcccaagcttgaattgcttgggtactgagggagctggacggatgttccagcaaagggagcttttagctggccaggtttaagcttggcctcttcaagcttgatgaagccatttgtacgatcaaggaagtcactcatagaatctactggtccgtctcttttgatatccttccaaagctctccgagagctttgatgccccctagtattgcggttaattttccttcttcggttaaccgtgcaaccttcgttgcctccatcatgaatttattgatgtaagctcggagaggttctcttggcctttgcttcactttgaccaggtcttctaaatgcaacgggaattggcgggaagaagagaattgtgcatggaattccaaggagaaagccttccaagagttgaaccttctaggtgtcaacttgaaatattattgttgggcgacttctgagagcgtggcaggaaaaactctacagcatacatctcctcgtactccttgtaggtccatttgcatttcaaaatacttaagatgtgataagggatcttccttcccagtatacatcttccaagtcggcatcttgaacttgtgaggcaactctaggacattgatctctggggagaaaggggatccacgtgctcggtccaacttgaggtcattattcttttgacaggatagtccttggaacatattttttagttcatccaattgtgcctgcacggatggattaacttgttcagtctcttggctgaccaaaatcacgtcaggatctctttgagcaggattttgaacacgggcccagggttgaatggctggtgcgacatactgcttgtctagccctctccttctgttcagatcatccctgagatcatgagctattcccaatctattaaatatagatacaccaggttgtctcagtgactggttggtttgaccgatcacttggctagaaccattaacctgggcggagttattaggtatgacctctcttaaagaattactagataaggtctatccgcctaccgcttggcccataggcgaaacctgtgatcggggattgggcgactgaccgttcaggatttgagaagcgttcacagttggatcttcgtctgactcgcccaacgggatgatggttgtaggttgctgattagtagcctggtaggctctttgtatcagcatggtggcctg

SEQ ID NO: 340478 - DNA, 637 bp, Cannabis indica
gatcttcgtctgactcgcccaacgggatgatggttgtaggttgctgattagtagcctggtaggctctttgtatcagcatggtggcctgtcttttttggtcgtcaatggccgcttgctgagccgtcaacatttccacctctttatctctccatttagcaaacagacgcctttgctcttcaaatgcaaggttcactgcagcacggagctcctcctggtcatgatgcaaggtattagtatgaccttgcatgagtccaagagcagcatggaggttctggatctcggtgtcatctccaacagttgttcaaacatttgttgctagcggaacactagtactgggaataccctgattggttgctgaactagtatttccagtctcttgcacaccaggcacgattccactcaaaggagtcgtcacaccctaacctacggttggcagttgttcaggatttgtggctggtggaacccctgcatttcttggatttcgcagtgcgggatccactgccgctagatttgttggatcgaccacgcctctacgaatctgtaccaccatcgtgtttatgattaaatttgaagtaaagagcgattttgtgattctggctctcaatgaaagtaccaaaatattgaccttgcttttagc

SEQ ID NO: 340479 - DNA, 606 bp, Cannabis indica
tgtatttcattattattattattcattgcaaaaagattactgattatcgtgtgaatgggagaagaagtagtggatggattggacgaagtttcactagaagtggtttcattggaagaagagttactcatccactcttgtttgacttttttttttcaattttttttttttataatattattattattttttttttgttcaacttgttcccaggttactttggaggtttttagaatggtccttcacaacttactagaactccccggggttaccaggtaagtgtgaagggttcactaaccttttcgaccaaagacctttctaagcaaaaatgagttgcttatttttgataaaacaaggttgtttttgttatagtaaatagcacaaaaatgtaatattacaatgattaacacaaaaatgttcccaggccaattggaaaggttgccaaggtaccgcttcgtcccaaccttgcctagacagaaccgaggttcccaggtaaggtggagggtacactaacacaaaccttatttaaaaaccaatctttctagacagaacaatcttggtttgtgtcatatacaatattacaccgttgtaccaaatactaagcgtttt

SEQ ID NO: 340480 - DNA, 1200 bp, Cannabis indica
gagcctgctaacataaaagtaatggatgacgctgaagaaaataatcctcatgaaggaacaagtcatcgtcctggaaaagagccattgagtcctcaaggatctattgagtcatcacatgaacatactgcaagcccaacgaaaacccagtattggggtccctggcttgacggaccttgattaaacaacgatcggtcaattcccaaccaggttgacgaagatggtgccacgacccaaccaggacataccaatcgtggagttagaaaattgccatcttaggcatcaattggaggaagcaaaccggcgtaatgccaaattagagcgtgaaatagctgcagtaagggcagcgcatgagaatagttaccgaaatcaacttgaccttggaagaagagtttcacgaggcaaacctcgcaactctcaaaccaagggcaagagataacctagagatacactcagaactctcaagagatgcaacttgaggaaattgaggaaaatctagagacgcagcctgggatatgcggaacatcggacagaaatcaccaaccctctcttcaagttcataagaaaagaactcacacaagccctataggggaacaaggtgaatcagaccttaaaaggaagagcagaaagaagaggcgaggggtaccacgaggcacacagtatctcataatcgacccgtgcgaggagaagagaacactcattataggaataatcaaaaaggcataatacaacatgtaggacgagcaaggtccgacaacattcatgacttgtgtgacctacgagaacatttgaacttgagaaaacctaatcttcgtcaacaactttatccaaaacaaagggttttactccatttgcaaatggaaaagttggagaataagttcagaagaaatcaagttaaggaacctgggaggaaatcaggatatgattccgttgaagacttcgagtcaaaagcctcaggatcaagaagaaaagacaattccaaaaggttgtccaaggataagaaacagaagaaatgcaacaaatatacccccctttatgctacatataccgagctcaatgaatctcgggaaaatatctacctctcacatgtacaagaaatcgtttttagcgagccaaagcctatgaaacatgtgaggcgtaaaagggacccaactaaacggtgtgaatatcatggggatattggtcataccacagaagagtgtc

SEQ ID NO: 340481 - DNA, 798 bp, Cannabis indica
gggacccttcctgctcagggcatcggccactacattggccttcccggggtgataaagaatctcacaatcgtaatcctttactaactccaaccaacgcctctgtctcatattcaaatctttctgaatgaagaaatatttgagacttttgtggtcggtataaatttcacacctgtctcatgtgtcgggtatcgctgttcataatccttccactgacgggaggcataagcgataacccagtcggcttgcatcagtacacaccctagaccctgtctggatgcatcacaatacaccacgaacttttccttgtcagaaggcaaagctagcactggagctgtaatcaatctctgtttcagctcttgaaaactagcttcgcatttgtctgaccatataaaccgctgattctttttggtgagctcggataagggtgttgagattttagaaaacccttctacaaaccgacaataataaccggctagaccaaagaagtttctgacttttgtcactgttttcggtctagggcaatccgtgacggattctatctttcctagatccaccttgataccatccttgctaacatatagtttatgaaattgcactatatgacataaaaatgcatttttaattcaaataaatgaacataaataattatttaaatatcaataaataatttccataattaaacactaattatctgctaatttccaaatttaaactaagcggtctttatattaattttattaaattataagatttgaaagtgatattgaagattttttttgaaatcattgatcttatttg

SEQ ID NO: 340482 - DNA, 532 bp, Cannabis indica
tttgtcaactttagtataattttaggttaatctcattgagaaactttaaaataatgggtaaaataattacattatttggtaaagggtgatgtgagtttgatattttagtttttttgagaagactaagaatgtcaaatgacataattctaataatgatctctaagaggtattttagaaaaataaattaagttgtttaaataatgtaaagattatttagataactaaactggtgaaaagtgattcttataaaaatttcacttgatactagaaatgtgggggtgcgccacaaatttaatcaaaatttgatgagacattgttgattaattaacttgattttgaattgaaattctaaatcaattttggctatgtgcatatgtgaaattttgacatatatttggtgtcaaattttggtgaaagtaatttcatgaaggaaattaaatttaagagaaattatagaaacaatatgatattctatattttaaaatcaagatatgatcttgatagtgaagtgtgaaagtgtggggtgatactc

SEQ ID NO: 340483 - DNA, 661 bp, Cannabis indica
tcatctctgtcttcacaggaaaagacacagattttgagagcgatcttaaaggtcctcctcaagtgggcaaggaatccaagaagaaggtggtcttggttggcgtggttttggattctactaaagaacccaaccagcctaagacccaagcttccacaagaagacctttgtgccaacctctctctggtattgagaaatttcctgaggctagaaatgaggtctcggctgcaggaaatgggatcctctgatgtggagaatgaggtttattcagaggttgagaccttctacgtgttgacggtctttcgcatgctatatgtagacgatctttcttcgagctatatgtagacgatctttctcgagtttatcaacccctcccctcgtattctttttaggaagatgacttaatggtttgcccctagtggcattgttggaaagacaggtttgtaaaccaacttgggttttctcttatcttaaatgccttgtactttttcgttcaaacttaatataattgtgcctgcttgcattttttattcacaatgtaaacaactatattttgatcaaatgtaaagtacttttgggtttttccattgctcgtaatctccttgtttaagtagttagttgtctaccaaacttttgatttttgagcagttgtcaattcagcctc

SEQ ID NO: 340484 - DNA, 998 bp, Cannabis indica
gtaggattagctttatcgctttgctgttgggcgcatgccttcttatagctattctaacacttcgtttatttctttgttgtagcagccaagccaatggaagatctcctggtgactttcgccgaggcctacagcccagactcatctctacctctggctctatcccaactggtgacccccgggaggtcgtcttctagtgcccccttaggcacaatcatcttgatagacgaggaaggggaagtcgaggaggaggagtgcaagattgcgacttcccttgaccgtaagcggaaggggaagatggtcgaggccgagtcttccaagaggtccaggaggagggacactccggctgttagcaccaactcagggattccttcggaagcggaggagtacaccatgccggatggcattgttctcaccccggttcccgcagacgaggagaggcaactactgtgaattgccaaacacaactacgccctggacgagttcagtcggggacatactgaggtggaagccctaaagaagatcttgcgggatgagcaacagaacaccttgcgcgaggatgccttcagaaatccctgggacctgaacatggatcccttgacagattggttcaaccgcttcatcggtcctactctcgccccctttgcctctgagatgaccagccagtttgtctcccatctgactcaattcccgaccaagagatacgcagcatatgcctcagtgaactctgtttaccaggttcaggatatcagcgctgccctggctgcggtaagttctttcgatccattcctctctttttgcttatattttatcttaaggcacttggtctcattctttctctttttttagatcactgcagagaccggtcgcctctcaaagaccctgattgatcatgggtacgtcatgtccgaatttggtggcatggacgaggccttgaagagtctgttggaatattttaccaggatctagatttactaccaagtatgttttattaacatcct

SEQ ID NO: 340485 - DNA, 578 bp, Cannabis indica
aaacaaagcagcaagttacaaggaaggtagagaaccattccaaactaactcattatctaatccaagacctagcttagctactttatgagcaatcacattgtattctctatgaacatgacaaatagctagccttggactgaaggataacaagttcttaatgttacttaatatatcatccaaaatactattattccaattacaagaactaagtttatcaacaatcgatttgcaatcagccataagcacatccacaggtagtttaatcagttgagcccactggatggcctgatatatggccttggcttcagcaatagcaggagaaacaagcccagtaaaaggagtagaaaaacctgctttaacccgattacaagcatccaaaactactactccaacactatattttctgcacttaggatcaatggctgcatcagtgaaaattctgaagttgcccaattcaattggttgtgctggtgcactgagagttgtagagttgtgacttgttgaatgaacctgctgcacatctaaatacttgaaaaaaaaaaaggttaagactccaatcatacacttcctttggagga

SEQ ID NO: 340486 - DNA, 629 bp, Cannabis indica
atcaccaaaagaattatggatcatatgtgcatgagggggaaacatattcatattgtactcttttcttcttagctcaggttttgttccactggattttcctgacaaggtttttaacgaggaaacttacaaataattatgaatatgaaatatatattgcacactttttttcttagctcgaattttgtcccactgagttttcctaacaaggtttttaacgaggtaactttaaatcatgttaacatagttgcactttatgaagcaagtataaaatgtgtgggagtgagatcattaacataatatattcgggaaacataaggattacactcaatagagaagtatcaacacatgcagttctctatgaagataatatatttgtatcgctcaactaaaatgagggtacattgaaggagatagaattaaaacacatttcaccaaatttttctttatacatttcaaaagaatgtatattggtgtccaacatattcaatcaagtgttaatcttgtaggcttattcaaaaagttattaccagcatcaatttttgagaagacagcatacaagattggaattaatcgattagaagatctccacgaatgcctaaatgaggaggagttaattcatactgcactct

SEQ ID NO: 340487 - DNA, 543 bp, Cannabis indica
tctcatatggtatcagaagaaaacgcctccatggccagaccatccacaagatctcaagatggtgttccaccatcaacaaacaactctaatcttcctccggatgttacctcagctcctcttgccgaaccagtaaccaccaatcgtcgaccagctactgctcgatccagatctcagctttaagatgaaatcgaaactcaatcaccaagaatcgacacccagcttcctgctcaagaacggataaccagtaataaacacatcaccaatgatgtctccagccccttcttcctcagctccggtgaccatctcggtcttgttctcgtgtccactgtccttaatggcagcaactaccagtcgtggaaacgtggaattacgatggccttagctgcgaagaacaagcttccattcatcgacgactctcttcctcggcctgaacctagtaacaatctcctaaactcttggcttcgctgtaacaatattgtaacgccctgactctcaaggacgccacgtgtgtgcttttataaacttattattattaccaatcta

SEQ ID NO: 340488 - DNA, 929 bp, Cannabis indica
cccaggtctgggttctcatcccactcctcgtctgattccaattccgagtctaagatcgggtccggatcctagttcgggttcgggtccgagtcttggtacagatctgggttcgggtcctaaattcaaatactgactatgggtctggacaaagccttaggtctagattcatatctcggtcttggtttgggtttgtgttaagagttgtgtcccggtagtcagttcctaggtttcgggtccaaggttgagtcctgtgtctcgagtttggggtgaagttttgggtctcggtctcggtccggcccagttttgggtccaagtcccccatctaggtccggatccttcgtctagatcttggtccaggttcgggtttggggccaaagtcccccatctaggtcacgatgtggttctcaggtccaaggtctgagtctcgggtcccggtcccatttcgggttctagtcccagtacatgttcaaagctccatccaggtccgagtcccgggttcgagtttgagtctcgggttcgtgtctgagttttggtacgagtctggatctgggtctgggtcttggtctgggtttgggttttggtctgggtatgggtgcgggtcttggtctgggtcttggtctgggtccaagttttggtacgcctctgagatctggtccaggtctcgggtcacgggtgcttggttccaggttctgggtcacaagtcctggcgcaagtctggggccgggtttgggtctgggttcgggtatcgatcccaatctaggtccgtgttcgattccgcatcaagatccagttctgggtccaggtcgaattcctggtccaaggtcataattccagttcttgttccgatttcaggtccttagtccaagtatgggttttgggtcctagttttgaaatggttccaagtttgggtcttggtaagattccaagat

SEQ ID NO: 340489 - DNA, 740 bp, Cannabis indica
ggactcgaactaagactcagaccctgacaccaacttggacacagacctggacgcggaacaaaactcggacccagaataaaagctggaaaatatgactaggacccagacctaagacgataaccaaacccaaagcataagtcaaactcagaccaaaacctggaccgagaccttgactaggacttggacctaagacctaagactttaacctggactaggaccgggaccgggacctagacctgacctggtcctaagccctcaccagatcctgacactcgcaacccagacaaggatctagacccttaaaaggacccgaacctaaacccagacaaagatagggatcgagatctagacctgaacacggaccgcgaccacgactaaaaccaagactcaggacctgaacctgaaattggaaccagactaggacctaggaaccggacttcgatggggcacctagaccagggacctaggccccggaacccagaccatgatgtaaattctagacttgaacctgaatcaggacctgacctggacccgggaatctgaagtcagacccagacccagacatgaaacctgccccggacctcaactaggagaggaacctggacacgaacacataccaggataaaacccaaacccggaccaaaactcagacacagacccagaatcagacccaaacatagacctgaaccaggacccaaactcgaacccacaccaggatcagaaccaaggacttagaccca

SEQ ID NO: 340490 - DNA, 639 bp, Cannabis indica
tattattacgtatataaataataataaaaattataattattcataataatttattaatataacactatgttatctcaatttttgccaatctgacgtggcatacttacatggataaaatcaatgccacgtggcagttaggtcaccaataggaaggccaaatcagcacccgaacaaatatagaccccggtactcaaacaggcatcaagcgacagattagctccctctcaagagttggttagccagccttgggactacaccatggctgactagcctggcctccacaggggcctagccagccaagaggtgctctgcagggttccctgtgcacttctacacatggacaacaactcatgggctacgaattgggccctaaaagcccaataaaatgactgaataagatctagattcaaaggtattttagtcttttgtaattatctaacaaacaatgcaaatatctaggaatttaaactataatctagggttttaggcatcttatataaaggccttaactttagcctagaaacctaagttgaatgtaagcctaaagtctaagtctgacaaattctatcatcctcacttcctctctcacacgcctacactagtgtaacaccctaactaacataggcgtattacgtgatt

SEQ ID NO: 340491 - DNA, 624 bp, Cannabis indica
aagttagctcatattcaagttaaaaaataaaatccaaagtaagaaatattcatccatggctgctgcccgttttttacagttcaacaagtttgagatatctaaagacaagaaataacaaagtaaaagaggaaagaaaaagagaaagagaaggtaaaagaaattcaaacataagaacttgtgtccttctcccttgcactttggtccccctttttcttcttcctcctctgtacttttgcaattaaattctctcgaaaatggcagctcacgtaatggaggaatgatgatggtgtacttctctttttctcttcttttaggtgttgggtttttagggtacatacttcataccccaaaatagaagcccaatcttttccactttggcccactaggtttagtccctttccttccacaacagccaactggtgtattttgagtgactgggccgaatttgctgaggtggataagtgaaactcgtgtttccacgtcactgccagaatgctgaatttgcttcagcattgctttagcaatctacctcaattttagcttatgttccacttcttccttgcttcctttcaacaacaacaagcacaattaattggaaaatcacacctaacaatatcaatattt

SEQ ID NO: 340492 - DNA, 514 bp, Cannabis indica
tttttttgctaattttgaaaaataccatttttttttctaaataagggtccaaaatataatttttactctatagcccactacatttcagggccggccctactggttagactaaattgggctcattcatgtgggattctctagaagcggttaaatctaactctctcttagtagtattggctatcaataagaagaaggtgtttttaaatgagatgggcacactattttaggatgtcataactttattcactacaagaaatgtcacttgtgctggcaaaagttggtattgcgcgggtaaaatagaatttacctatgatgtgttggcaaaagggggctagcaaatcaatattggtattagaacttttaccagcataaaatgaaaagcattggcaaaaaagacttttcccaacgcgtaaatgtgctggtaaaagttagattttagccactgcaaatgtatgctggtaaaactttgatctctttgccagcgcagttagcgaaatgcgctggtaaaagttac

SEQ ID NO: 340493 - DNA, 848 bp, Cannabis indica
taaggatttttatcactttgtatttttttaatttgctcgcatgaatagttatattatctattcgttttctaggtttatgtactttatcaaggcgtcgtgatgccttgtttagtactttcctagctcgcgagaacctttagtattcagttttgtacacgagatataacttttaattttccactctcgtcagataggttataaattagaaattatagttgtttgatcccttcttcgtcaaaattgtttgattaaggtgttataacgatttgacccctttctcgtcaaaaagatttcgtcaggttgttataacggttcgactccactttcgttaaagaggtttagtcaagaacctttgaattttaaaaaaaaattgaaatggcgggtttgcattatacaatgtatttccacatgaattccgattagtcatacataaatgccccttaagtaattttaaagaatgagactttgcaattactaaatataaatgattctctttattcataactaaagtttaaggcttacatcagtaatgtgagttacatcatttatttattaatagtagggtcgcaaatgttctacgttccagtagttttttattagcaggctgtcaggccaagccaatttatagactctgactccaactacttcttcgataacatatggaccctcccagtttgggttgaacactcctgctgatgcatctctcgtatttgcgaagactcgtcttaacaccaagtctccaaaactgaacagtcttttcttgactcttttgttgaagtatcttgtgactcggtgttggtatgcagcgttggtgatttgcgactcagttcgtttttcctcaagtagat

SEQ ID NO: 340494 - DNA, 624 bp, Cannabis indica
tttcataggtattttgggtggcgtacctaattatttagggcattataatttatttaattaaattatatataatattttcattccaaccttcaaaaatcaaaatacataacctaaaaaaagaacttaaacatataattaagtatatgtgtctttcacttaacttgttttagtatgattgttgaaatactcttttcgtcattaagaactatgattgtcaaaatgaagtattatgccttcaagcaaaaaaaaaaaaaaaaacacaacgaggcgtacatcatcaacctcagaaagataggagaaaaactccagctcgctatcaaggtcattgatattgagttcctaccaagacatcccagaatgctatgatttaagacgtgtttaaatacacgatcattttgacccagtaaaaacgggtaaatcacagttgtgtgatattcaaaataataactgtatttatactacgtgatatgtaatcaaacctcacgatttcaggggataaatgttgtaaagattacagtcaaccctgtaattaactgcttactatgtgattataaatagagtcaagtgagactgaaaaagggacgaaaaaacgataagaaaaaaagaaaggccctgaaaaaccat

SEQ ID NO: 340495 - DNA, 625 bp, Cannabis indica
catcacacgtcccatccagttatttaaaaaaaaaaattgaattaaattgataacggtataaaaaacggtacattttgatatataaatgacagcaccatatttttgtaaaaagaatgcaattaaagtactggaatgtaaattttcctatttattttatggtaggatatagaacaagttgggtaattatccatgtctacatattccttactatataaaatgcaatctttcagacatgcatggatcttttgatactttagccctaagaattaggcacgcaacgacaactgatatagaaaccctaattctactaatccgggattactagaatgataagcgcaggtaaatttaaattttaataacaacggaatgaaaatataacttgtaatgattttttttaactttacaataaacccaaaagatacaagttttgcgatcccataaacattttcacaaaatattacatgtttacttcatgtgccgacctaagtggaaaaaccagaggttacaaaacacaatcactggtagaccccaactcgcttggtctagtgtggcccgaacatatacaagctctcgcactcatggctgaacacagattgatttaccctttcctgcacagtagagcacc

SEQ ID NO: 340496 - DNA, 551 bp, Cannabis indica
tggtctaagtatatttgaagctagacttatttttgtattattttttcttaagttttatttatgtctccatcctgaacttttctgttcgtacgtgtatttttttttatcatgttcatgcatagtttttaattattcaggctcttggtatgtctttggccgcaaccattcttgtgtctgtctaagcagcttcaaccttgtgtggtggtctctaatcttatattttcttgtcatagctttttctagatttgtttgattgtgtcatatctttgttacatattggtttttatgcattggtcttccaaggtatagtttttttgtatctatttgttatgcatcatggagattcatatttgttctactgacctatttcgttgtgtcaaatttttgtctgttttgcctggtcttttcatcttgcttaatttgcgactcatttttctgattactttcataatgttgatatacattagtttcaggttatggtcataggacctttttaactggatatggattggcactctttacttctactgtgcctttctatgaatgtcttc

SEQ ID NO: 340497 - DNA, 505 bp, Cannabis indica
gctcggagcccgtgctcaaattcctgcttagaaagatactgatgtgattcaaatcgactagaatgctgagcaggttagcccagccgtacaggcactactagacgaactgaaaaatatgtttcaaggcatggctggacaaagaaatattgatctcgagctggaccgagcacgcaagaactccttaatctcccgagatcaatcttctggcattgccccacaagtttaaaatgccaacatggaaaatgtacacaggaagagaagatcctctttctcacatcaagtatttcaaaatgcaaatggatttgcaaggggtacgaggggacatgtgttgcagaatctttcctgctaccttgtcggaagccgcccaacaattgtatttcaagttggcccctagaaagttcagttcatggaaagccttctcttcggaattccatgcacagttctcctcctctctccaacttccgttgcatctaggagacctggttgaagtcaagcaaagaccagg

SEQ ID NO: 340498 - DNA, 940 bp, Cannabis indica
aatcacgtaatacgcctatgttagttagggtgttacaaaaagttaattttattctgattataagatttttaattgaaaattcagattctacacaaattctaccaaaatttgaattttgtttcaatgaaaaatgatttttgaatcaaaagatatgacaaaataaaatgcatacccctgcgtgcccagatgaaggggaatgggcgagggaaagggctgcgtgcagcctctgttggccaagggagctcgtcgtgagcagcccttcagacagggccttgtccgagtatcctcggttatgtacttgtctgaagacgcgtgctgtccgagcgtacactcatccccccgcacgcacatgtggttcccaaaatgagatattttcatccaaattcaaaaaaaaatcataacgaattcataaaaaatccaaattagattatgtaaaagcctaaattaattaattttttgtctactttcgagtaaaaatattttcaaaaaaatatatatttatcaacttaaattgcgatttccatacaatcaccaaacatgcacataaaccaacataaaaccatccaaatcaacacaaacatcgttttaaatccatatttcatgaaagtaaatcattaccatggctctgaggccagtttttggagattattttaccaggatctagatttactaccatgtatgttattaaacatcctaaatataaatttctaaaagaatgtaatttaaatacatataaagtttaagaaaccttacattggttgcagcggaattaaatgactccttccgctcagatctctaacccttgtatcatttctgtagcagagtatcaccaagatctgagcccgattatccttcagttgatttggattcttcacagtcttacacactataattgagtaccaacttgctatgtgagggcacgtactctatcactataggg

SEQ ID NO: 340499 - DNA, 707 bp, Cannabis indica
tcttggacttcaacgtccctagctgtgtcttcctcttcagtggcaggtcgggcctgttcaacatttggcaaagttgtgagacgggcgatgggttagacaatgaagactttcgcatagtttacttggtttgcgccatcattctatacttggacagaattttatttgtgtgcctagcaatagtcacatcaaaggtggcaataggtttacttgcaactgcagggcttggacagccttcgggcaaagtatcagaaatttttggagggactatgtacgtctagttagaaggaagataatgtctccagccctttttgagtttccaaatgaaccgtctgtaaccttgaccttggatctgaccgggataaaaattgtgctgcaactcgagttctagggaaggtgtgtgttcactacttacttcccagtcttcaaaactagaattggaaagattatcactagacgaggacagactggcacagaggcgaggatgatcctcgtacaatattgaagcagattgtggtagatatggtgttcgcctccccaaaactcaccaagattcatctacaaaaggtaggagacaagatgagaattaagtcagggcaacgaatgaaaataggcttgttatgttgggttttgtgccctaaataaaacctatttcaatataatcagatttactaattaaaaaagaatcagaaattacattttatgttgca

SEQ ID NO: 340500 - DNA, 567 bp, Cannabis indica
gacacgtgtactcaatttccctataaggaaagctgaaatgtcaatgagagactcctcgagtttaaacctcgcctaaactagactcagcgagatgatgcagatatgaccgagtctagccgcatttgtacgactcgcattatgcaggaccaaggaacgaatttaacccgcatataccgatatatatatatatatatatgcgagtatccccccgatcctcctgcgataacatagagattgattctctttgatgcgagctagtcccgatgacccaacagcctcgataaaccaatatagactcgcatgtcttagttctatcagctcgttatacgatgtccgtgaatgcgaggttacaagaacgcagacatcttagtctcaactaagtgttgagtgtattctaagtccacgagcttacgcaagaatatgaacagccaaagcgcacattagaagtcgcatacgttgttgtatttagtgaatagaaattgttcttcatttattaatgtttacgttttttagcttaattactgtaaatcaatgtacaaacggattgacaatgaatgcaatccttgt

SEQ ID NO: 340501 - DNA, 1562 bp, Cannabis indica
gttctagtgatctcaatagcgagctggggcaatttttccttctgaggtcgacgatgcatgtctgatgtcgatcgcggtttttatgtacagtgaattcttcaaaactcatttgaatgttagcttctgacttgccagggttatgagcctcgctgacgctaatgggatgaagttatatgaggtcttcccataacgagatggacacctcgctttacttattcttgagccgatctatctataacacttagtttgtactctaaggacttttgcaattgatatatgtcgctttcgtcttccaatgtgtattgtccttgatgccttgcaattcgcattcagcgacatatggttttttgctaatatgctaagtaccagtttgtgtattagttcctcgcccaagaccttacagtctacatgttacaaatatactctgatactcacgtaattaatgagttattccatgtaaggcgattgcatcgatccatattccccttagcgtgacgcgtgtccttcactgaaatggtagccgaattatgggtataacaattgccccataaaaagttctattttagtaaaaagagatttttaatattacagagggcattttcatcaagatcccctcttggaaaaaatgcatcctgtgattctggcggttgtacaatttcgagggtcattatgaatcatctcttcatattttgcccgactcccaactgttggatttcccaatctttagctttcttgtcacttgactttgtgtataaaagggcggctcaagcttgtcatttttcacaaacctctggctttttagtgagatccatttttagaatggatcatttctttcctgctagaatgtccctttagagttcagaagttcaccctcccaaactcataagaccaggatgcaccaaccattttccatttgttcccaaggacttcaagcctcaattggagccagaaatgatggattacaaggttgaggagcttccgaccaatccaaactagcggaagcccgtagcccaccatgggcgatcctcacaagtgatccttgagggcatagatcttgtgagcgatcttaaaggtcctccttaggctgataaagaattccagaggacagttggcatagtttcaaatgaatccaggaaggaagttggcatggtttctatcagagaatccagccaacccaagaccaaaacctgcgccagaagacctttgcgccaacctttttctggtagcgaggaatgtcctgaggttgggaaagagatctcgacttcaggaaatgggatcttctgatgatgaggagaatgaggtctgtgcagagattaaggatttctacatgtagccggtctttctcaagctagtgtagtcggtctttctccgagctacgtgcagacggtctttctcaggctatatgaagatagtctttttcgagtttattgatttcccctctcatcctctgttaaggaagatgacttaatcgtttgcccctagtggcatttttgtaaagacaagtttgtaacccgatttagattttttcttatcttaaatgccttgtactattttcattcgaa

SEQ ID NO: 340502 - DNA, 512 bp, Cannabis indica
agcacatcagaggatgctacgtaattagctaaagaagaacccacggtcttgataaggcacgccttgcccgcataggagagaagttttgatttccacccttgcaccctagtcaacactctatccacaaggaattttgtgtcctcggtgcgcttgagggacctgaacaggggtatacccaagtactttgccttcttggccattcttttcattcccagcagttgagaaattgcttgggctgtgcgtggtgggaccattttggaaaagaacaccgaggatttctcaacattgacactttgccccgagtacctacagtattcctgcaaactatccatgaaatggcttgcttcacggagtgaggcttgcccgaacagtatggtatcatcagcaaagagaagatgacttatggtcggaccgtccctcctcattttgaatcctttgattaggcccctctcaaccttttcattgatcatgttcgataacacatcagctccgagtatgaacaaagccgggga

SEQ ID NO: 340503 - DNA, 1062 bp, Cannabis indica
tttttagttgagtgcacaggcaaagaagaaagaaacataaaggacatcccagagccaatacaagagtccctgccagaaaataacgaaggctgacctacctggaaattgcacgtggccggatcgactacagaccatatttctggtgcaagaatttcccttatcacacataggggcaacacttgcacagagtaatcaaatttgggttcaaggcctccaataacgaactaaaacttgctcgggaagtgcatgccgagtacattgagatatgtagtgatttgtagttagtagtgaatcatgtttcaagagagtacgatgcccgaagagagaaaatgatggcatatctaagcaagatacaagacctgcttgcacaattaaagagttacacactcaagtagattccaatagaagaaaatacaaatgctgatgccttaccccaacttgcgagcatcacagtaacagataaggccaacctagtccccatccaattcttagaagaacctagtatcaattgttcaaaagcattggagatgatagacacaacaccaaactagatgacacccatagcagcctacctcaacactagagaacttccaaatgagaggaagaaagctaggaagatgatgaggaaagctgcatggtacatcatagtagaaggcgcgatgtattgaagagggttctctatgccattacttagatgtgtaacaaaaaagaagctgcacgaatcctgtccaaggcacatgatagattttgtggcaaccacgcagtaggacaaagcctatcaaagaaaatactaaggcaaggatatttctggccgacaatgatggaagattcaaaggcctaagtaaagaaatgtgacaaatgctagagatttttgaagatcccccgtgcatcacccaacgagctgatgcagatgcaaagtccttggccttttgccatttggggaatagatctaatcggacaattgtctaagggcaagggcagagtacagtatgcagtggtcttagtggattattttacaaagtggacggaggccgaggctttagcaatgatcacatttaaaaa

SEQ ID NO: 340504 - DNA, 518 bp, Cannabis indica
tatgttctggacctaatagaatttatatacatgaaataaatcatgtgaaccatgcaacataaaaggatttctgatctttattaattagtaaatctgattatattgaaatggattttatttagggcacaaaatccaacaaactcccacttgcactaatataaaacaaaaggtgcatttcaaataatatcaacatctggatatccaaatcaagtgtagtttgtagtatagttttcgtaataggatctaacaaattgtattcaattcaaccttccctccaccattacatttccttaatcataaaatacttgatattgtaaaattcctctatatatgtctactcccttagggaaactggattctttacttttggcaactacttttgcgttaattaggaagtaacacttgtagttaataaatgttggaacaatgccaaaaatgtatagaactttccttagcctgaataagtatctttcctgcaactttaacattcagtccctctggtagacttagagacttca

SEQ ID NO: 340505 - DNA, 537 bp, Cannabis indica
attatttttgattttacgtgattatttattgttcatatatctagaatcctatttgattaaagttaagattataagattaattaatttgtgatttcttcctatacacataataataataatctcaccgaataactaataacattttttctttaatttttaattgtataactttcaaataacatagaaaaaaattagtataaaatttagttacgtgcctcgcacgtaactttttgctagtaaagtaaaaatacacttatgagaattgattggttccaaataccgctaatactttgattatcccagattcagaccaattaaattaatttaacaactactttaaccatcaactttgtagcccaaaatttggtaataggaatcctttacaattcaatgtaaaaaattaaaaaactaattaaactttacacatgatttataatattgttaaaaaaatctcaatagaatattatgttttaggattgatccttctctaattttcttacagctctctaatcttataatattttattggttgccgaa

SEQ ID NO: 340506 - DNA, 831 bp, Cannabis indica
tccagcggaactcaaggagctaaaaatacaacttcaggggatgcttgacttagggtttatccgaccctgtgtatcgcccaggggagctccggttctatttgtgaaaaagaaggatggtttcctcagaatgtgtattgattatcgggaattaaacaagctgacgatcaagaacaagtatcagttttccataattgattattttttaatgagctttagggaaagactgtgtttggaaagattaacttatgatcgggtaatcatcagctcagaattcgggacgaggatataccaaagactatattttgaactagatagggcactatgagttcttattaatgtcattcgaattgacaaatgctccagcaacctttatggatttcatgaacagagtattcaaggatttcctcgatataactgtgttatagtgtttatcgatgacatccttgtgtactcttagacaaaagaggagcatgagcaacatctccaaatggtattacaacaactcagggattataagttgtatgaaaaattcaaaaaatgtgagttttggttgttagaggtttcttttctagggcacattctcagaaaagacagaatcatggttgatccgcgcaagattgaatcagtgaaaaattttgcgaggccaaaatctgtgatggaagtgcgaaattttcttggtttagtagggtattattgacatttttcaatggttcatatggtcagacaagtgtgatgcaagttttcaggagttgaaacaacgattgataacagcaccagtgctagctttgccatcagaccgggaaaagttcgttgtttattgtgatgcatcca

SEQ ID NO: 340507 - DNA, 529 bp, Cannabis indica
tacaaaccgtaaagttcaggtggtttagccgctaatattcctattcaaaaataccattaccaaataaagatattgacatgcatgccatcactaatccttgtgagtttcgaataattgctccaattctaattgtatcacttttatcatccaaggatgcatccacattcaatttaaaggtccccaatggtggagtaatccactttgacgttgatgtacaaatagtcttctcttttaaactggtagtatgttggatactgttaaattcatcataaagggattgaatacataaaactataacttcaggagaactaatttggtgtccatgaactacttggtttcgctctccccaaatataccaatctgcctaaggaatacttcaaattttgtctgtgataacacttctgatgctttaatgattatttgttgaaaagaaacttcgatagagagactatttaagagtttgaactttaataatttctacaccttcttaaacatactacacaaaaaaatagcatggctatttgtatcc

SEQ ID NO: 340508 - DNA, 846 bp, Cannabis indica
taagtttaactattggttgtaaataaatacttaagtttaatttttgacagtaataatactaagttatatttatggaatttctgtaggtacctaagtgtggttattatttacacgttattttttttattatatttaaattaatttttaaataacaaataaaatttaatgactttgatcaattaaaaatgtcgtgtgtgtggctattaacttaacacttaatgactatttacagaagtcttaaaaatatagtttaaatttatactacaggttactctttcaatatgtactaatgaaaatgtcattcttagattcgacttaaataaaatcaaaaaataaaaataaactttacagaatacacttttgttttttgtttttaaaattaaaaaataaaagtagttacagaacgcatttttgtttttcaaaaacaaaaattttactttcattttgtgattaaaaaattacaaaacaaaagtgttaccaaacggtaccaaaactaatatggaaaaagaaattagatgccaaatgttttatttgaaatttttttaatcatttttcttttctgtttgttgtttttcttaaaaaaaaaatactaaagtaaattcaatcttgaatacggtttgttagaattgtaaaataacttgagcttccatcttaaaattaattacaataagaggtgtaggccatttatcttatatatgatattttattaaggtttttattagcacatattaaaattttcaactttttttatttttttactgtgggatgaatttttttttcaaaaatattgtgtaagttttatgatgtgtatttactgttgttccacggttgttttttagttcttcc

SEQ ID NO: 340509 - DNA, 707 bp, Cannabis indica
aaggatgtggtctccgatagtgcgtatttttcctagtagcaaagtacacacgttcttaggagtccgttaactccgtgtactgggtatattgacgagtatacccccttttctgtcatttttcctccgcccgagtgctgcctttggaggacctcttactcctcgagccttgggaagaaccggctaggctggctgtcggagcggagtgcgagggggttgtccatttatccctaagggatttccaaaatgggacgatgcaggggccatggcctggccttggctatatccgggagtggtagagaactgtatgccgctcatcggtggagcttctgctggcacagtgcccgagggctgggctccgagcatatatcccgctatcccggtgggataataccctccataggccactatttgggcctcttcgaggttaatgtatttttggactgtcttctggaagtcttgaaggttttcagctcctttttgttgtagtttgttccagaatggagtccctgtacggatgcctgcttggacgagggcaagctgttgtccgtcatctactttcttggtttttgaggcttcttcacagaacctctttatgtaattctttagtgtctctgtaggcagctgcttgatgttagtcaaggcgctgacctgcagattgacttttcttgtggcgcaaactgtctccggaagttggtctgtaacttatt

SEQ ID NO: 340510 - DNA, 808 bp, Cannabis indica
agtatgcctgtgttgtcttttcaggtgtgttttgacaggttggcacggtatagtcacaaccgggtatttcgggccgaaccgggttcaggtccgaaatgcaatttgaattgaattaattggcattttatttggaaatatatgagcatgaaatgactaaattgcccatgtgagtgtatatgcatgctttatagccctaggggcaaaatggtattttgaccttttatgtttcatttaataaaagcagttattttggaaaatgaaatagaaattctggtttgcttcccctctcacccgacccctctctcttcctctaaaccctcttcttctcaattttgatttttggagaaaattggtgtgattttgcttggcttggagcttgatacttggagattgtttgagtttagccttgaattgagatttaaggtaactttctttggtttaatctttgtttattaactgaatttaattataagaagagaatgaaaagggtgtggtgtttttgattatgcatgttgttgagtttgatgtttgatcttggtaaattgggtgtgaataacatgaatttgttgtaggttttaattgttgagtagtggctgagattttagggtattttctaggtttattttcatgtcttgaattcagcttttggttgagtttgttgctagaaaatacttgggtttgttggaatttaagctaaagttcaagagcttggattttatgagctaaagcatcattttgcgttgaattgtgggatttatttttggtaagtttagaggtgtttttagggtttcattgagtttgaaatctg

SEQ ID NO: 340511 - DNA, 573 bp, Cannabis indica
cataatttttctttttattttaactttttttttaaccaaaaaattaacctttattaaatcaaatcagctaccaagatagcttccaaaccagcagggacaacacccccgcaggaaacacaaccaggaataaaaccagtagaacgagctaaaaagttaactgcctggttcccagaccgcttaacaaatctaattgaaatggaaaacaaaagagaggattgcataagagctacacaatccgaaattaaaagccccaccggagacaacaaacgcttcttctattgcacggctcgcaccagcagcagcgagtccacctccataaccacaccagcaggcacacccccctcaacccaccttccattcacccaactgagcgcctccttctacgccatagctttagctaaaaacgggtcgggctgaccataagttttaactgccagtgcatcaatgaatgaaccattatgatcccgagcaatccaccccaaaccgagactattgtcatcctcaaagaaagcagcatcacaattaaccttaatctcaccacaacaaggtttagcccattgctcacacccggaa

SEQ ID NO: 340512 - DNA, 1202 bp, Cannabis indica
aaaccaggatcccgttttacaaaatatttacaactatttcaaagtgcaagtcacaaaagtttgtcgcctagcgactacacacaataagccatgttgtcccaaagattgtatgctccaggccaaactgccccgacatgtacaatcttcatctgctcgctctcacggctactcaaccttatccttgcccttacctacgcatgcaaacaatatctatgagtcgacagactcaataagaaaagcataaataataacataacattaacctggatcataattaagcgcccatacacccaaccataaccctaactaagtcaggaacgttctcgacaaggtatgactaactgcgaatccaccctatactcagtactatcgtggtactgatgtggtaacagctagttcatactatctgatagcctagcatatatctattggcatctcggtgaaactctatgtacacctcactgatgccctaatatgttaatctaatcgctatagatttgcctattctgacggaaactaacatgtacgctaaacatgtatacatatatgcaaccattatactaatcttacctcgtttcagaattcaagtgtgtcggccaacctgagtggaacagctgctcgacgaattacaggcccctaaatcacattatttgtacaactggtgagtgacacactaaattactttccgaggacttaaacttgaaactaaaagtttccctatcgataaataacatggaaataccctaaaatcaaggaatccaccaactaaggctctaaaacacacacgaatcgacaacaagaaaaactcaggaaaccagtttaagatctggttaaccgattttacagggcctgtgaaaccggttaaccggtttgcaccaggtaacccaaattaattcgaaaccttgtccaattcgtatccaaaccataccaaacctgcttaatataccccaaagaaaaaatttcaagcaacaaaacaacctaacaagctcatatctaaaattgccattaaagaccaaagttagagttctaaaactcaaactttgtctaaccaccacaacaagccctaaaattgttgggttttgtgccctaaataaaatccatttcaatataatcagatttactaattaatacagatcagaaattacttttaagttacatggttcacatgatttatttcatgattatgtttaatgtataaattc

SEQ ID NO: 340513 - DNA, 935 bp, Cannabis indica
gcgctttggtgaggagagatgagagaattcagaacaagtttcaacctgttagctaaggtcttggagatgatcttataaatgatattacaaaggctaatgggtcgaaactctgagatgcacttaggttggtggactttgggaataagcgtaatgagggtgttattcagaggggccacactcgcatttccattgagaaagctggaggccgcttcaagcacatcgttcctgacaacatgccaattggctttgtagaaatgagaattgaaaccatctgggccaggggctttgtcaaggggaagttggaagaaagctttctctatttcatccagggaaaagtcctcgctcaagagggacttgtcagaatcagaaagagagcgactaattccttccaaagcggagttcatatcagaaaccgtggggttggaggaggtgaacagctggtcaaaatgagactcaatttcacgaatgattccatcctcgtcggagaccataccaccatttgccgtatgaagttggtgaattttattcgtttttttcctctgagaggcaaatcgatggaagaactttgtgttcttgtctccctgagccagccattgagttcgggaacgctgtttccagtaagcttcctctttgtagagtaacgcatcaagccgggattggagatcttttatggtctcgatagtgcggttgtcccagttagaattggatcgggctcgttcaagctctttttcaagcttactgatttgatttttgaagttgaaatttttcttatggttccaagaattgagcttttgagcacacagagattgggtggcaataagattgggtatagcatcctctgcggacgaggaggaagtccaggactgatccaaaattctatcccagttggggtcctggagccacacgttctcgaagagaaatcttttgctatggga

SEQ ID NO: 340514 - DNA, 1571 bp, Cannabis indica
tagtaattttttttactaaaattagacaaaagtccttaaatctaacattctcaatagttcagggggcatttttaacgaccttaaaagttcatgggacatgatttggtccatgtcaaagtttgaaggacaaaaatcctaattagccatttattaattacttgattcatattttctaaaatattgtataaaatatttataaaaagtaggaaacttatcatatatactattttttttgtcaaatttatagtttgggttgctttgatggttttcatatgggttgctatgtgaattttggttacgatttaagttgctccgttggttgtgttgagaaaaactataaacttcaagcgtagcgaaataacaaaaaaataaaacaaaggaatttactcagtttggtaaaactaccaaactcacaaagagagatatatttcacttaccacttcaaaattacatatactttctatctcaatctctccacccaaattctaatacaccaattgcttcttcctcactctcgccacataacgaaactcacacacttctcttttcacaagtcactatctttttcacactcacacctcacacacaaaacacatatttataaagttacaaaacttggacatcaagacaacttggggaccaagaaattccaaagcttccttaagaagaattttcaaaacttggccaccaagactttccttttcccataatgaataattacctaaaaaaaaaaagataactttacaaatatagataaataaataatttgagtcaaactccaacaatttccaccttgactcaaattctctaaactcacaactcaaaccattaataagagtatatatgaaacgaattcatactctcattgaacttcacttgagcatttgtcttcacattattcaatctttcattgatgtcccctttcttcaaacaactttgaactgaaattggagtcttctctacattgcattccttcgcactaactaaatgccttaaatgacttgacttcaccttcacaactccacctaaaatagtcttcccgactaatttatacaaatttcactctttcttacccttcacaactaccaagccacctttcttgatagttatttcaccatcttttaaataatagacacaacctcgagtatctaaagctcccaaagagattaagctcctccttaatgttggaacatatctcacatcagttagtgtcctcacaacaccatcaaacattgtcaccttaacagctctattcaaacaactttagagctagaattattgctcataaaaacaatgcagccatcatatgccttataagtgtcaaagcactccttatacgggcacatgtggaacgaacaactagaatccaaaatccaagagtgagaaaagtttttatcagctatgacagaaagaacatcagagacactttcaaagccttcaccagcaacatttatggaatctgatgtgtctttgcattcttgattcctcattgcttcaagatgcttggtcaactcttcacaagtccgcctaacatgcccctttttgtgacaatagtagcactccacttccct

SEQ ID NO: 340515 - DNA, 550 bp, Cannabis indica
aataacacaaaataactcaaaacggttataattaaaatataactggttctgcaatataatgaataagaataaataacacaaaataactcaaactaattataattaaaatagaattgatataatagtattataataaataaaaacaaataacacgaaataactcaaaccatttataattaaaatagaacctattatataacataatgaatgagtatttttagggtagatgtggtatgggtattatttggtgggttggagcatgttgaatgaatgtttttatttaagtaattttatttaactatttttgtgtgtgagtttttatcttagttgctttatgcaaccaatttttttgttgtctcaaatttttaactagttcatagatataatcagtttctttaaattatatttgagttattgtgtgttattatttgtgttttttatattgttatggaaccagttcttttcatatttatgcctcaatattttttagaattgatccccactttttttttaaaaaaaaaagattataaccggttttatgaagtattat

SEQ ID NO: 340516 - DNA, 993 bp, Cannabis indica
atatcacatattatatacagttcttaccttattttcgaattcaagtgtgctggctgacctgaatggaaatgctcgtgctagatggatgccctaatcacattaattgtaacagcgatgagtgactcgctaaatcactttccggggacttaaacttgaaactaaaagttcccctatcgataaaaaacatggcaatactctaaatatctcaaaattgggaaaaagtagggtcccaaaaattcccccaaacggcagaccggtcccaaccggaagtccatttttggaacaccaaccggtcgaccggttctgtgctgggaacccaaaaaccaacccccttaactcaattcaatcccaaaccttcctaaaacttccagggtacctatacaatgcataaacaacaattcccaaccagaatttcatagaacaaaccatcaacactcaagttgccattaaagctcaaagcattgaactcaaagcacaaacttgcacaaaactcacaatcaatctcaaaaccagctgctatgaactaaaatcaatccatacaagccctagaattcgaactatgcaagcatcaaaccctaacagcccctaaaacccaaaatcacctcttgaaactaaaatataacttcaagaacttaaaagggaaaggagctagggtttaccttgattattcttccttgaatccttggctgaaaacacagaaaattaaagagtcggctgggttttccttctggtttgagagggccgaacaccaagagagaggggagagaaatgatattttctctaatttaatttcttttcctaattttgcttttcttcaaagtaatacctatcttttccattcaactaagctaaaataaactaggtgtcataacccatggctgccacctaaccctcattaaccattttactaaatgactataatgccctttaaactaatactaaggtttttctaaagctaggggtaaaatggtcaaaatccataaccacgctcaa

SEQ ID NO: 340517 - DNA, 695 bp, Cannabis indica
tgtaatatgtaaaatgaatttttaaataataatattggtttttattaaattattaatttatatttatataattttaaaaagtttagtattttttttagtttttgaatagattaataaagaatttaaatattaaaaattaaaaagattaattagaagaatttaattttttttaatttaaataaaaattgcaattaaatgaataaaactttgattaaaatttttaaaaaataattgttattgtatttttaaggtggtataaaaaattaaaaataatgaataaataagaaaatggtaacttttaatgaatttgttttataaagataaatttagaaatttaggaattaagtatataattagttaaaattttaataactaatataaattttttaaataataataattcatttaaaaaataattattttatattaatttatttaaatttagaaaataaatttatttttatatacataataaataattaaaaaattaaaaaattaaaaaataaaaagttagtaatttaatgaataaaatttttatttaaatatgttttaattcataaaatattcataaaattttataataataataattaataataaatggttgaaaagaatatatcaatgctttggtatacttataaatatataccatagctttgttatatttaaaaatatatcatagcttttgtatagtt

SEQ ID NO: 340518 - DNA, 830 bp, Cannabis indica
acaaaaccagttatatttcaattttcacatgttttagtttatttatttttatttcattatgttataaaatacgttcttttttattttttatatgagacatctacttctgatgactttttttgggaacggtgactttttcggtaatttttccgtcagtaataactttttcagccacttgttcaataccagggacttttccgacgtcagtgactatttcaacgaaacataatattgtttaacaaatatagaattttaactttttttttacgaaaatatggcataaagcccatataaatgtaaaaaagaattaagaaaaaactcataatctcatggtattatttatttatggcataaaaaagtaaactcttataattttttttcatatattgtgtaatttctactaattttatattgtgtcacagatttatttttaaaatggatttttataaaaatatttaatgggcaaaagtttacaattttactgtcacacgaaacttttacaaaaagactatcttttttataaaatacacgtaaataataaaatagaaaaattaaaacaatagtggaacaattaaaaaacaatagtgaaacaattgtgaaaatttaacacaatacacagtataaaactgatactgtatttttgaaaaaaaaaccacaatattttttttaaaaaaaaattctgccctgtaataaaaagtaaaaacattgaaaattttaatatatatatatatgtatagtgtaaaaactctattttaatatatatgtagcttatttttttatttttttttctttctttttaaaattattaattcaatctaattaaaatatat

SEQ ID NO: 340519 - DNA, 552 bp, Cannabis indica
cccaaccggtagatcggttcccctacgtggggtttttaaggggatcaaccggtcgaccggttcctataggtccccctgaactagtcgaccagtacagcaagaaaaacttcaaaatttcactactctattaaatcaaccccaaactcaaccaaaccttccagaccttttcaatataccccaaagaacaaaaacaaggcaataaaacaacctaacatgctcagaattacaaaacaccattagagagccaagcttgagttcttaaactcaaagcttgctcaaacaacacaacaaccatcaaatccacttcaattcaacataataaaccttaatttaatttcagaaaacaaaaataaataacactaaaagctacaacaccaaaactcacaaaaatgaagcataaccttaacttaaagcttaagaaatctaaagaaaaaagtgctagagaggttaccttgggttagaacactaaaagcctgctagaaattccttgaattaagaagaaaaagctcaaaccctagctggttttccaaggagcgagagagagagagagag

SEQ ID NO: 340520 - DNA, 858 bp, Cannabis indica
agttgagcaagtcttttgctagtgaaagacttaggataggtgaaacagatacttggaatgaggatttcccgtgacaggaagaatgggaaattatttcccgtgacaggaagaatgggaaattttggttatctcaagaagcttatgttgaaaaagttcttgaaagatttaacatgagcaaagctaaagcagttagttccccacttgtaggccatttcaagctaagctccaaacaatgtcctacaagtgagaaggataaacaagaaatggcttcaataccttactcatctgcagttggcagtttgatgtatgctatggtttgtacgaggccagatattgctcatgcagttagagttgttagtcgattcctttccaatcctggtaaggatcattgggaagcagtgaaatggatattgagatatctacgaggtacttccaggttgtgcttatgctttggtagtggtgaacctatgcttgatgggtacacagatgcagacatggctggtgattgtgattctaagaaatccatttcaggattcttgatgacatttgcaaggggagctatttcatggcaattgaggttacataagtgtgttgctttatctactacagaagctgaatacatagctgtaactgaagctcgtaaagaagctttatggatgaaaaagttcctacaagagttgggcttgcaacaagaaagatacattgtctattgtgacagtcagagtgccattcacctatccaagaattcaacattccattcaagatccaagcatattgatgttagatatcattggattcgtgatgtacttgagatgaaagaattgaacttgaaaaaggtgcataccagtgagaatggtt

SEQ ID NO: 340521 - DNA, 389 bp, Cannabis indica
ttaccaggatctagatttacaaacaagtatgttgactaacatcctaagtatgaatatctctaaaacaataaaataaacacataagagtttagaaaaccttacattggttgcagcggaatataatgactcattttgcttaagatctctagcccttgaatcttttctatcgcagagcattatcaacatctgagcctgaatctttccctcattcgggttttgttaccaccgtcttacttgttggaatatattttgccaggatctagatttactaacaagtatgtttttaacatcctaaacatgaacttataaaacgatataaaataaacacataaaaggtatgagaaaccttacattagttgcagcggaattaaatgactccttccgtgaag

SEQ ID NO: 340522 - DNA, 763 bp, Cannabis indica
gaagtgtcatacttcgtcaagaacaagagttgcgacgattaaggtaaccggctgcccctgttgatcaagtgttaccaccagcacctgtgccagtggtgggtaaccaggggtttgttatgccgcaatgagactcggtgtttgagcggttcgtgaagctgcaacctctgacttttctaggaggtattgacataattaaggccaagcagtggatgaagagaggactgaatgccacaatcagtcgggacttgaaggttaccacttcatatgacactttgtacaagaaagtgatagagctagccttaattgctgaggaggctgagcaatatgtagtaaaagagaagaccgcaaaggatgccgtcacagcatcgaatccgcctgctagtggtaacgtcagtaaggggaccgacagtggcaaccctgatcacaaacggaaggctaaggctttcggagtatcaggggtaataaatagaaagcatcggggaaattgaggtggccgtcaaggtcacggatcctctttcaagtcatatcttgaatgtccgaaatgcaagaatcactatcagggtgaatgatgggccaaggatacgtagtatatttgatatggattatatgaatcagacgttccaagattacctgattagatgtgtgatcgtgtttatcgatgacatcttggagtaatctgaaatagataaagaacatgagttgcatctcagatcagttttacaatgattacgggacaataagctgtatgctaaattcaagaagt

SEQ ID NO: 340523 - DNA, 454 bp, Cannabis indica
ggccagaagtaaccttgccttataattttcttagataagctttgcccggcggcatgatttccacaaaatccgtcatgcacttcagataggagtcgtgcagcttcttcttgagtaacacatctgagcaatggcattgacaatcctctcatgtacataattccctctactatgatataccgtgcaacttttcttctcattttttgagcttcactccgattatcttggactttccaagagtcgaggtaggctgctattggtgtcatcaaatttggaaaagtatcaatcatttctatttctcccgtgccagtgatgctaggctcttgaggaactgaataggaccaagttcgccttgtcacttaacattgctgctttagtcaattgagctaacgcgtctgtagttgtgttttcttcccttagaatttgtgtgaggtcgtagcttttaaattgtgcaagc

SEQ ID NO: 340524 - DNA, 884 bp, Cannabis indica
tctaaccatactaatgtgatagcatcgatcagtatttgagccaaacatacatctatcagtatcccgtataactctacgtatattaatactactgtcaatgtactctaacaggcataattaacatgtacgttaaacatgtaaacacatatgcataacattatactattcttacctcgtttccaaatttaggtttgccggccaactagattggaacaactgctcgacaaattataggcccctaaatcacatctttctaacacaggtgagtgacacgctaaatcacatccgaggacttaggttttaaaccaaaagttttcctactaaaagttaacatggaaacaccctaaactatcaaggaattaaccaaccaaagctctgaaactaacacaaatcgacaacacgaaaagtttgggaacccagctgctgatctgattaacctagtttatagggcctgtaaaaccgaataattttacaccaggtaacccaaaaaaatttgaaacttgacaaattcgaatccaaaccttccaggaaataaaacaaataagcaagctcggaatcaagattcaccattaaagagccaagcttgagttcttaaactcaaagcttgctcaaaccttacaacagccaccaaaactagctcaattcaacataaataaccataatttaactttagaaaacaataacaaacaccaacagcaaatgcagaaccctaacacataattcatgcaaaaatcttttactgaaagttcaagaaatcaaaagcaggagtgttaggaactttaccttggattatattattaaacaacctgttgaaattactagaatttgtgaagaaaaaaaaatccaaaccctagctgttctagggaacgagagagagagagaga

SEQ ID NO: 340525 - DNA, 511 bp, Cannabis indica
attaataaaacaaacacataagggattatctgaagatattaatgaggaggcttgttttttggttcttgacacgaaaaggagaagaacggccttggaagatactgatggggtccatgtgaggaatgatgtggtaacgggcgaagtagtaaatggttcaaatgagttgagtttggtgggtactggtgtccaagcccaccaatcattatgaatctaatttattctgtcgttaaagaggaaattacacttactataagattttaaaagtttttatgataaatatgacatatttaaatttgaccaagtggtatggtatttttttgtttttaggtctttttagggtatttgatatgccatatatatgtaattaggttttcaaatcccatatttaatgttttcatttgtttaggaagttttctttgttattgatgacagaaaagtcaccggagtttactgccggtgcccgaaaatggttggtgccggaaaagtcaccggagttgctgccagcaccaga

SEQ ID NO: 340526 - DNA, 683 bp, Cannabis indica
ttgaagtccacccccaaacaagacaggtcggggtacttctatttctctaagccaggcttcaagtgattgatcagcacagatgacaaggccatcagcaaaatagggcgttttgttgatgagtacttcatggtgaaggatgcgagcattacccagattcggtttcagcaaattccgacatatcaccgtcctcccctcactcttgctcttagggatagagctcaaaagcttgctcggttgccgtaggaagaccggaatattatctagttgacctctgatgagagtcttgtgaggtatgggctttatcccgaggactttactcctaactccgtggcggggaagaagaggaaatctgatgctggccaggccgaacgagctcattcggagaatgagttgattcaaataaagtgtgaagctaagttgaagggtggtgccagggcaatgcaatatgctcaggagcctttgaatcctgaagatgaagctgaggaagagcaggtgactccactgaagaggaagaagaaactcccggcctcgccgatgcctgttgaacatacaattcgtataagggagcccatttcccctgctcgaccatctcctcccgtgttcggaaaaggaaaagtcatcatgtctaagataagatcgatgtcaggtgatgatggacttctgagtcttgtgcgggcggtcac

SEQ ID NO: 340527 - DNA, 655 bp, Cannabis indica
taggtcaattccccagatgcaaagggccacggaatttgcatttgtgtcagctcgtatggccgagctcttggtatctttgaaaatctatggcatttgtcgcacttcttgacataagctttcgaatcttcaatcatcgtcggccagaagtagccttgccttagaattttctttgataagctctgtccggctgcatgatttccacagaatccgtcgtgaacttcatatagaagccgtgcagtttcattttgcgtgacgcatctgagtaatggcattgagaatccgcttctgtacatgatcctgtctacgatgatgtaccgagctgcctttcttctcattttccatgcttcatttcggttatctaggagtttcgcagagtttagataggctactattggcatcatccagttcggggatgtgttgatcattttgatttcttccgtgccagtgatgttaggcttttcaaggaactggatcgggaccaggtttgccttgtcacttatattgctgctcgccaaccgggctaacgcatccgctgttgtattttcttctcttggaatttgcctgaggctgtagcccttgcattgtgcgagaagatcatgtattttgctcagatatgctatcactttttctccccgagcctcgtatttgccagata

SEQ ID NO: 340528 - DNA, 720 bp, Cannabis indica
aatttggccctaaaagcccaatagaatggctcgataatatctagaatcaaggacagtttggtcttttgtaaatatctaacagactatgcaagtattaagggatttgaatgtcgggaattttttactaggatctagatttactaacaagtatgttgaataacatcctaaatatgaattctctaaaacaatgaaactagacacatatgagtttaaaaaatcttaaattagttgcagcagaatataatgactccttcctctcagatctctaacccttgttcctttctgtcgcattgtattatcaagatctgagtctggatcactttctcttattcgggtttggttgccaccgtcttactcacaatgattgagtacttgacttgcaatgtgtgggcatgtcactctatcactaagggttcgaatatgaagaacaatgaggaggcttgaaaatcactatagaaggtgtctctcatctacaagttgtctgacagataaaactaggtttgatttggttgaaggcatcaagtggatgagtgagagcatcatgttccttttatagtgtttcaactagcgcttagggctgaattatatggattaaaatagaataaaatattgtgcaaaaattcaatctaagggccggccataaaggaccaatcactagtaacaattttgccatttttttcaaccacttattcttctttcaataaaactatattttccaat

SEQ ID NO: 340529 - DNA, 667 bp, Cannabis indica
aaaattataactaattaaacaattatcattaattacacaaaaaaaattatgtaatattaattttgcacaaactaaagtaaaagaaataataatcagtaaatagtctctaagtgctatcatcctcctatatttcatcctttatataggtatataaatatagattattaaaattaataccatttgattttgttaataatttttttattagttatatattttgtaattttttaattttatataaactgttaagttttagcataaaaatttaattaaataataaaaattgagcaaaatgattatgataaaagtgtacacatgtattgacctcgcttttagccaacgacaatgagtcaaataataagcgataagaaatataatcaaagtgaagtatgaatgaataaataataaagaacacaaagttttaaagaggttcggtcccgttcagttcggtaatagcctactctccttgatttgtattaactcaagaacaaagaatacagtttctcctctcttgaagctctcacaatgaaatttctgagtatgctctcttagatttctctcaagtaattctttcgacccccataccagagagaattgatcactatttatagggctaaatgtttgagggtaagtttctcttttgcttacaatgtttataattggtaag

SEQ ID NO: 340530 - DNA, 1680 bp, Cannabis indica
tcaattctgcctcgctataacagatataatctcccttaagaaaacttaaatatactttactgattttgtcactttataatttttaatttgctcgtttgaatagttagattatctatccattttctaggttcaaatacttttttcaaggtgttgtgatgcctcgttttgctctttcctagctcgcaaaaactgttagaattaagttttatacgcgagttataacttttaattttcctttcccgtcagataggtttttaatcaaaaattatagttgtttgatcctttcttcgtcaaaaaggtttgatcaaaatgttataacaattcgactcctctctcgtcaaagaggtttggtcagggagttataacagttcgactcctctttcatcaaagaggtttagttgaaaacctttaaatttcaaaaaaaaaattgaaatggcgggtttgcattatactatgtatttccagataaattccggttaatcatacataaatgccccttaagtaatttttaaagaataaaactttgtaattacttaacataaagtattctctttattcataactgaagtttaaattttacatcagtaatgcgagttacatcatttatttatttgtagtagggtcacaaatgtttcacgttccagtagttctttattagcgagccgttgagtcgagcaattctataaactccaactcctactactgcttcgatggcatatggagcctcgcaattcgggttgaacactcttgcagatgcatctctcgtatttgcaaatactcgtcttagcaccaagtctccaacattgaatagtcttttcttgacttttttgttgaagtatcttgtaacttggtgttggtatgctgcgttggtgatttgcgactcagctcgtttttcctcaagtagatccaagtataattttaaaacttcttggttttcttcttgattataaaactctcttctgtgagtcgatatgtgcacttcaacaagcagtattactttcgagccaaatgctagcgagaaaggagtgtgtcccatcgctgtcttctcgaaagttctgtgggctcagagtacctaaggtagctcgtcaacccatctgcctttggtggcatccagcttcttcttgatagtatcattctaggttttattaacagcttccacttgtccatttgcctgaggcctggatattgatgagaagcttttgataattttgttcctctctcaaaattcagtgaacaagtcgccatcaaattgggttccattataggatactatcttcatgggtattccaaacctacagataatgttattgacagcaaagtcaaggactttcttgcaggttacggaaataagggggctcggcctccgtccatttagtgaagaagtcgactgctactatcccatacttagctcctcctcgcctagtgggtaatgccccaattaagtcaattcgccatatagcaaatggtagggcgaggttatcattcttagttctgttggcggcacgcgaggtatatgtgaaaacctttgacacttatcacatttcttgacaaactcgtgggtgtccttattgatctttggccaataatatccttgaataatgatcattttagacagactttgccgacccgcatgatccccataaaagccttcatgaatctctctgatgatttcattcgctt

SEQ ID NO: 340531 - DNA, 944 bp, Cannabis indica
agtgtgttccattcttgaacatcttccgaggaaataagcaattcgagtggacagaggaatgtgaaaaagctttttaggagctaaaaatgcaactcccaaagcctcccatactctcaaaacctctagacggagaagaactcaggatatacttggctttcacggaacatgctgtgagtgccgtgctgatcagagaagaaaacaacatacaacacccagtctattacatcagtaagagactcattgaggcctaaggcctgtatccgttgataaagaaactcgcttactacctgattctagcaacaagaaagataaggccctattttcaagctcatcctgttctggtgtacactgaacaaccattacgccaaatatagaaaaagctggacgcatctggacggttactcaagtgggcagtggagctggatcagtacgaaattaccttccaaccctgaacaacaatcaaaagccaggctctagcagactttgtggtagaatacacatgcaaagaagaaagcctatcagaaggcaaccccaagccggtacatacacctcagaaaagtaatagtgaaaacaagctgacttggaaactacatgtggacgggtcggctacagatcaactatctggttcaggaatcacccttgtcacacctggggggcaacacttacatgctgcagtcaagttggattcaaggcatctaataacgaagccaaatatgaagcttggatcgctggccaaaaactagcccgagagatgaaagttgaacacatcgaaatctgcagtgattcacagctggtggtaaatcacatatctggagaatacaaggctcggggagaaaagatgatagcatatctgagcaaaatacatgacctgctcgtacaattcaaaagctacggtcttagaaaaattccaagggaaggaaacacaactgcagacacgttagctc

SEQ ID NO: 340532 - DNA, 659 bp, Cannabis indica
ttagtttattaaataataataattgtgtaatattttaaatttatttagtttagaataattaaaatttttacccctgaactttcgacactacctgattttgctccttaaaatatacggcttgttaaaatttctccctaaagtattacaattatataattatgccttttctgttagatttcgtttcttttaccgttaaaaatttgtatttttaccccttgaactttgaccaatacaaaattttgcaccattttattaaaaaaattaattttaaaaattataatattctatcttttttaaagcaattataatattctattaattcaaaaaaagaataataaatattattaaaaaattagataaaaatattaaattaattaaaaaatatattaattttacttaaaaaatattttcagattttattttattcataaacaggtatcttaaaaatcaaacaaaaattgttgagaatataataaataatttaaatgaactaagattatttgaaaaaaaaaaatcaaacttatttatatttataaacacataccttaacaaataaaaaaaataattaaaaattcaataaaaatattaaattattttgaaaaaaaagttataaattaaactaataaaatgttatgtttacttaaacaaatctatatttt

SEQ ID NO: 340533 - DNA, 733 bp, Cannabis indica
aggttttgatgcaaaagctcataagtttcttgaagatgattttgtttgctgaaataatttcgtactttactattatatttcatcagtcaactattacaacggctattataactaatttttgttaaaacttataaatgtcactgtcctcatttgtggtgtcactttccaatgttacctgagataaaaaagaaaaggtatatgggcatcagccttgaaatattctcaatatcatagacaaaaatgagattttggactatatttaagcaagtaaacacacttgaaaccagagaaaatcctaatgatcactaatcatggaagttcctaattttttattgggttctattatttcttctactatactaatcaatagtgaatacatatttttttcagaacaaagcttcaattaattgtctttattattatttgttaatttaataattcatgatagttatagcttcttacaaacactatgggtgaccctgaatttgtgtaaaacagctataacaaatcatgatcacttgaagactcttccctattttatggtggtgactcttgtttaggggtggcaaaacgggttttgacacggcacatgaacacgacacgaattttatggattacagtcgggaaaattagatgcgggtcgaaaatgggtcgacacgacttgacacgaaataaaaacgggtcaaacacgacacgacccgcttaacacgaatgtgacacgtttgacacgatt

SEQ ID NO: 340534 - DNA, 594 bp, Cannabis indica
ctaaggttggttattctcatcaattgggggcctggggccataactttctgaaggcccatagtcaatccagacacactattgaccaaaaccccttgccgcccatgaagagaagagaagataaaaatagggaaatttacaaaaatactgaaatttgggttaacttttacaaaaatactgtcacaaggaaattttttcaaaaatactgtatttttataaaacaccagtaaaacacaaagcagtataactcaaaacaacagtagaaaacaccagtagaacaccagtgaaaatttaacactatatactgcagtatgaaacttataaaaaaatacagtaaaaaagtaaaaaataccgcctggcagtatttttgtaaaaatatggcaaaagttagtataccatgtaaatttccctaaaaatattaggggttttttcatttttaaacttcaaaactagttttttttttttttttttacattttctacatagaaatttctattacaactagcgctgcaacctaaattgcaataaaaatcgtatagaaacctctattgtaactagcactgtaaccattttagaaaggaataattacataagaca

SEQ ID NO: 340535 - DNA, 845 bp, Cannabis indica
ttcttcatcagttgtgggagactatctttggtcagtttgaaatgtggggctagtggtgtctgcacaggtttagaatcactcattccatacttctcaatcaccttttctaggtattctttctgagatagagtgatagtatttggtctttgtctttgtatgtcaatgcctagtatcttcttagcttcccccagatctttcatgtcaaactcatcattgagttttgctttcaaattgtcaatttctgttctgtcttgacccacaatgagtatgtcatcaacatacagtagcagataaaggtgtccatttgtgtagacacagtagtcatagctgctccttgtatatcccagtttctccattgtttcattgaatctcaagttccattgccttggagcttgtttcaatccatacaaggatttctgcaacaagcatacctcatcaggatcattgctttcaaagccctcaggaatagtcatgtaaatgtcttcatctaggctgccatggagaaatgcagttttaacatccatttggtccacctcaagatcaaattttgcagctttggccattatgattctaatggatgcttgctttaccacaggtgagaatatgtcagtgtagtcaattccctctttttgagtgaatcccttagctactaatctggccttgaacctaacctgttcaaatccagggatgccatctttgaccctaaagatccatttgcatctgattagcctatgtccaggtggtcttctaactactctccatgtcttgttcttgaccagtgattgtttttcctcatcaatagcctgcaaccacttcttgccgtctttgccattcactgcttcttg

SEQ ID NO: 340536 - DNA, 860 bp, Cannabis indica
caaactttatacatttaatatttctcaatatacaaaagtgttatcccaatttttgcactctgacatggcatcacacgatggtgacacgtggaatcgactccgggtatctcctcgcaaggtacaggccgaataggatacctcatatgcatgctcaagacgaaacaatcagaaacccgcacagaacgataaacacttagcgaattcagctttcgcatcgtgagtcatcaaggaaatccctataacttgggatcaaattacagagatatggcaagctgtccaaatcccacgatcagtgtattatgtatttactgtgcaatctttctgcttatatcaattgtaacgagaagggaaatacatcctctccaagctcatagccatataaatagtgatgcatattcactgggtaaagggttggaaacatttttgttgagagattttatctaagaattcatattcagagatactgttgtaagagctataagaaaaggaatctttctcctcgctcttaagtcaatataaataacgaggactaggctattactgaattgatcggggctgaacctctgtaaaattcttgtgtctttatattgctttattatattttaatcattacaaactacatgtcgcttacaaaaatagactcactgtcgttggctaaaagcaaggtcaacattttggtactttcattgagagcagaatcaaggatcactcttcattctaaatttaatcacaagtatgattgtagtacaaactcgtaagggcgtggttgattcggcaaatccacagacggtggaccctgcactgcagaacccagggaacgcaagggttctgctagccgttaatgttgggttttatgccct

SEQ ID NO: 340537 - DNA, 510 bp, Cannabis indica
cataatatccttatcagtcctcaatttcactgataccgtgatgcttaaataagccagtgaaattaaacatacaccacttaaaataagtaagtgtcactaaacttgcttaaagaattaagccaacaacatatcattgtcaataagcaaataaagacaatgatcacaacaatatgaaccacatgctttcaattcaatcattctcgagaatataacaaaacataattgaaaacatatccattcaataataaaatattgaaacataaaatgtagttcataactttattcagaaaattataaataataatttctaaaaacaaacagaaaacaaaactcccactaaccaaaagatcaaaagattctaaaatgcccatattaacaacatgtttattaaacagcacggcacttaaccctttggttagaggatcagctaacatcgactcggtcttgcaattttcaatgacaatgtctcctttcttgaccaagtctctgacagtgagatactttatttcc

SEQ ID NO: 340538 - DNA, 772 bp, Cannabis indica
atatattcttttgatatagtataataaaaattaattttaatatatttttttaattaaatagttaaattaaacatagaaattcaaaattctcttttattattcataattagatcaaaattaatatttttaaaatttgttagtaaccatcaatgaataatacccattataaaatattctatatatatatttctcaattagtattatatattaatagttactaaacaaatttaactataaatattaattttaaaattattaaactattagattttgatccaacgaataataaagagaaattttaatttctatacttaatttaacgacttaaataaaaaaaaaatatatcaaaaatatcattttttacactatatcaaaaaatatatttatatacaaaatatttaaattaaattaaattttttttatcttttttattttgtaggaaattattttttaattcttttcagtcgatagaataattttaattagtatattttgtaaaaataatagatttttttaattaaataaaaaattaaacataaaaatttaaagtttttttcacactacgtagtacatattaagagtgtttattgtgtggtgaacaaccgacttatatgcaccatactttcttcttgatttggataattaatttcaacaaatcctcttccacgtattcatctttaattatttagaattagaatttttctattggaaattaaaagggatgtccattatgttctatatatactttaattattatccacatgttgaacag

SEQ ID NO: 340539 - DNA, 1030 bp, Cannabis indica
ggacaacctaggacaaaccagccccagccttcatcctatggtttcacatcccaattgggccagtagtctcagtatcaacatcagtttaggccacaaggttcagggttcaacatggggtactcacaaggtttccaaactcctgctcctagtgggagtcaaagagggtacaatcatggtggagggtctggtgcaagtacaagctatcctagtcagggaaagggaaaggcaaaagcaaagtcatccgctcaagcctacgctcttggagttgatgatgtacagggcagtgctggccagggagttgttgatggtatggttcttatctcacactcttgggctcatgtgtaattatttgatactggtgcatcgcattcctttatatctttgatgtttgctagtatgttgggtttgagttgggaaacttttagtcctgcattgcatttgagtgtacctatgggggaactcggtgaggtatccaccatatgtaggtcagtttgtattgtgttcgagggacacaagttatctggaaacttattagtgttgcctatggggcgatttgatgtatttcttggtatggattggttgtctaaataccaagctattgtggattgttcacgtaagagagtgagtcttttaacccctagtggtgatttcattgtttatcgagctaacatgagtgcagtgagacaaaatcctaacttaagggcatgcttaggtggaaagagaaacttagagtgttatggaaatctgtttgcggtcgatgacgagtctaggaatttagatcagttcccttggatatcagtggttagtggctttccggatgtgttttcagaggatttaccagggttaccacctgatagggagatcgagttttgcattgatttgattctcagagctcaaccagtttctattgcgccttatcgcatggcacctgcagagttggctaaattgaaaaaccaattaggggagttaatggataagggttacatcagacatagtacttctccatggggagctccagtcttgtttgcca

SEQ ID NO: 340540 - DNA, 827 bp, Cannabis indica
aaatagatagtgaaggcttcaggaaaattacactttcttctgacacttctgattcagaaaaacctgagccttctctctccctatctggccgaccactccctctctctttcttctggtaaaataatttcctacagtatgcaagattctgttgttaattcatggatatttcctttagaggtgttttcgatgtgttatttgaaatgtggctttgagtttaaatctaaattttggttgtggttattgctttgtgctagctgaaagtatggttgttctgaccaagcttgagttcatggaactctagcttggagctttaatggcactttgtgatttttaatttggttttggtttttgataattgagttgtgttctattgatgatattaaacctatttgagctgttgttagtgtttaattgtgtggttgagcaagtttgagttcaagaactaaaagcttgctcaataatggcacttttgaattcttggtgtaattattgtgtttgagctgtgaagtatgtctaatatgttatatgatgatgttctagaaagtttggtggtgattgggggagatttgagtaggttatggaggcttaaaaattgaagtttttcgtgtttttctgcgtatacaaccggaattccggttggttcagggctgttctaaccgaaattccggttggactgtgtcggggaaggctaaattttgttttggccataacttttgactcaggattccgttttggacgttctttatattgttggaaagcttgttttgagctctatatgttaatttgtaaatgtaattctaattatgtgattattgaaagtgaatttt

SEQ ID NO: 340541 - DNA, 749 bp, Cannabis indica
gattcccgtcttcttcatcttgaacttcatgtccacctgaactggttccacctgatttggtgcttcttgaggttccatttgaattggttccacctgatctggattcggttccacttcagttgggccggtttgagagactccaatagatgtacctgcagggttagtttttgtggaacctgcatcaagctcattagtatttttacaaggaaaatcattttcttgaaaaatcacatctcttctaatgagagtttcgaaacctcctttcccttttaccgacaatctatagccctttacatcctcggggtaacccagaaacacacattttagagcccttggctctaacttgccaacactttgatgtgcataagctgcacatccaaaaactgtcaaattagacaagtcaggtcgtttaccagtccacctttcttcacgagttttaccttcaatttcactagagggacttctattgattaggtatgtagcagtgacaactgcttctccccgaaatccatttgcgagcccggcattgaaaagcatgcaccttgctttgttcaatatggttctattcatcctttcagcaacaccattttgttgagcagttttcctcacggtcctatgcctttggattccattgtcttgacagtaacctgtaaactcatcattacaaaattctaggccattatctgttcttagggttttcaatttccggttagttaggttttcaacaagtaatttccaatgtacaaatt

SEQ ID NO: 340542 - DNA, 1083 bp, Cannabis indica
aaaaacataaaaaaatagatacacatttattaaatcaaataaaaataaaaataatagaaaaaaatacacattaataaaacacatacatttcacaaaagaaattttgtgtccaccttcttgaagctgctaaagatctttttattgaatttgaaaaaataaccaaaaaaaaaatacttttaattgtagaaataaatttaaaaataaaaaaaaacatataacaaaatatatataaataaactgtataaaatatatttatttagaatataaatacacataaataaaaaatatatatatatatattttatatatacatttcaattatctatatatataatgcataaaaaatatattacacttccaaaatatatatacaaatataatatgtatatatacacagaacagagcatctcatcaaccaaaaaaaatccaaaaattaagaacccaaaccagaagaaatgttaaaaactatggagattggatatgacttacagtgagttgtttgggatttcgggaccgtttattttgaaattttacacgaaattagtcctcctccacctcttgccggtgctaggttcgaaaataaagaaaatacaaaaatatcaattgaagcaacaaagagaaaaacgaaaacccatttcaaaaacacatcaatcttaaacaaaaatcacaaaaatcaaataaaacaagaagaagaatgggcggaccccgccgctaataccgcagcgctaataatatttgaactgaatgggcaggatcacgcccatttattagcggcggaccccaccgctaatactattagcggcaggcaatagcggcaaactgcccgccgctaatagtattttataaaaataaaaataaaaccaaccaattagcgatggatattgggttccgccgctaataccactattgataacgtaatcaatcatattctaaaacttaaactcaaaactgggcaattctctattgataaatagcatggcaatatcctaaatatcgataaaatacaagaacctatgttatacccaaaattcgggtggaggacacgtgtcaaggtaaagggaatgtgaatcggtgccatatctt

SEQ ID NO: 340543 - DNA, 757 bp, Cannabis indica
aaggttgctagaatggtttccattttaaatgagttgactactctattcaatgaataatatctttgactcttaacgaagcactgtatcagtttgctggaaaccttggaaaataatttaatatgttttattttggtatttttgcaaacatgtttacttgttatattctgaatttgtgtatgaatataatttaaccaaatgatttattctgtttattgatatttgtagagtcaaaatgaacaactcacactccaatcctcatcttttacatgcctttgcaaataaactctatagtgtgaagatgtctcctggtaagagcatcaattcacacttacttataatgaacctaaagttccagaagcaagtttgctgggaattgatttatcaaaagagctatgggttcaatttgttctcaacagccttccacctgagtataatggatttgttgtatcatacatgatcaaaaattttaacccatccgacgttgacaagctagacgcagaattgcgtgcttatgaaatgactttgctgcctgcaaggaggcttccctccaattttgcagacaagggcaaaaagaaagctgaagaaattgaggaagatgactctgacaatgttgttttgagtttaattttgagagatagaatcgaaattgaatcgacaattgaaacaattagagaacaaatgagcagacgtcttcttctatgttcacactgtggagagaagggacattcaaaagatagatgtcccagacttttgaacc

SEQ ID NO: 340544 - DNA, 632 bp, Cannabis indica
tcatcatggctatggttgctcattttgatttggaacttgaacaaatggatgtgaaaactgcctttctaaatggagatttgtatgaagatatctacatgactcaacctgttggttttgaggagcctggcaaggagcatatggtttgcaagctcaataagtctatttatggacttaaacaagcatcaagacagtggtatctcaaatttgatgcagttgtcactgcaaatggtttcatggagaataaagttgatcaatgtatatatatgaaggtcagtgggagcagcttcatcttcctggtactgtatgttgatgatatcttacttgcttccaatgataaaaatctgttgtctgagacaaagaaattgttatctgaccattttgatatgaaagaccttggtgaggcttcatatgtacttaggatacagatcctccgggataaaactaaaggtattcttcggttgtctcagagaacttacattgatcggattttgaaaagattcaatatgcatacttgttcacctggaaaggcaccaatagtgaaaggtgataaattctcaaagggccaatgtccacaaaatgacaaagagagagatgaaatgaaagtggttccttatgcgtcagttgtgggtagc

SEQ ID NO: 340545 - DNA, 840 bp, Cannabis indica
aagagctaattttcattgttagaccatcatcaacagtcaaaaacatctactttgtattttcctcctatttttgtgggtctccttcacctataaaaggagagctcccataactcatttttcactttaacgaaactacctacaaagtcagagcttctctctctagaaattagagcttctgatacttagtattcttctacaattaccatctcgtgagaaataaaaactcaaagaaaatatagctccattattgttgcgatacaagaagtaaactactataaattttttgtgtctctcttataattacttaactacattttcattctcaccaatctagcgaacaagtgtggcttagaagtttagtctatgtttctgagtcaagacatggtataatcaacatgcaactactttaatagtactcttagtatattgaaaatcaatattaagtaataattgctctaaacgtttattacatatttatgaagaaaaaaaatgtatacgtttttgttattacatattaaatttatgatatgtttatttttttaggttaggtaacctaatacatgtgttggatatttgcatcatgtataaaattgatggtatctcactgtatgatttttatgagcaacgacgaacattcacaatggttttttctcttactctccatgttatttggtaagatattgagacattgtagtcgtttgccatatcatcaacaatttcagttggtgtgtaatgtctttttgggtttacgaatttattttacattacattgccaactaggtttcttgtagcttgtggatggtctacagaagtaatgtctaatgaatatgtatgtgtata

SEQ ID NO: 340546 - DNA, 605 bp, Cannabis indica
agaagtacttgagacttttgtggccagtgtaaatttcacattgttcaccatataagtagtgtcgtcaaatcttcaaggcaaacacaactgttgcaagttttaagtcatgggtcgggtagcgctgtttgtaatcttttaaatgtcgtgaggcataagctataactttgtctgcttgcatcaatacacatcccaaaccctgtctgggtgcatcacaatacactacaaaattttctcgatcagttggcaaggctaagactagggctataattaatcgctatttcaactctagccatttctgttagagtacaattctttctttcaaccactccattttgttcaggagttttaggagcagaaaattcatgagatataccattagatttacaaaactcatcatatatagtattttcaaattcttttccatgatcactcctaatcagaacaattttaccaatgttacaatctttttcaactcttaatttcaaacacaaggattgaaaagcttccaaggcatcagatttttctctcaaaaaattcacccatgaaaatcgagaaaaatcatcaacacacacaaaaatatacatcttaccattcaagctttcaac

SEQ ID NO: 340547 - DNA, 961 bp, Cannabis indica
agatcctggtaaaataaattccaacatgttcctttttctcatttttatactcttgggttaacttccgttagatcaaggagacaattgatccaacaggtagaatttgaaaaagaagtggaaaagatggtcattaaatgctgatatacctcaaaacaacaaaattgcaaaaataagaggacatgcattttttcaaaaggaattatgactaatataccctctctaatcatttaaaaagtatattttagtaaaaagaactttttaaagggctattgttatacccgaaatttagctggcacttaagagaaggacacgtgtcaaactgggaaaataagaatcaacaaatataatgataattatattagaagatattaaaatgtaataactcattgaatgcagagatgatagagtatatttacaacttgctgactgtaaagtcttaagtgagataaggatatacaaactattgtctcgctcgttgacaagaaactattctacgttagaagtacaaagtgaggcatcaacctcattacgtatgaagagatgtagacgagacatgttgactgttaaaagagttatcgtatacaaactaagcataatagttgaatgaacctcaacagcgaatagcgaggcatccatctcgctataggaaggcatactcatggtagtttcactaatcagctccaaaaatctttcaatgatacccactgctccgtcgagttacctctctcagaaagaagctaacattcaaatgatgttgactgctgaagttcaccttgtcaccaagaactgcgattgtcagatggaatgttatgttcccagcgagatgttccagcacaatacactttacagcgtacttaatccacgtacgcattgacctggtaaaagcgaataaatcatatctctgtgattttcaaataataattgcatttatttacgtggacgtaatcaaatcccataattt

SEQ ID NO: 340548 - DNA, 615 bp, Cannabis indica
atttatctaagaaaaagtttcaaatattcaagaaaagataaaggccaaggaaataattccttaggatcaacagtgagaggtcttagatatgttttgctatgcattagaccacacacctgctgttgagtgggagtaaatgagcaggtatcagattaaatccaagaaatgaacatttgaagataatcaagttaatcgtaagctctagaagatgaactatatgttagtcaataagggtgatattttatactcttagactgcaccaaatcaagtttctagacttgcattagtgctagaaagtcgactgatgagatggtgattactctaggggtggagcagtgattttggagaattgtaaaaactgacctggagtctctaactctaccactgagattgaatgttaaagttacaggaaggatacttattcagtctatggaaagttttatacagtttttgggattgtacagtaatgaattaactactagtgttacttcctgactaatacaaaagtagttgccaaaaagtaaagaatccagtatccctagaggagtagacatatagagaggaatttcataatatcaatgattttgtgattaaggatatgcaatggtggagaaa

SEQ ID NO: 340549 - DNA, 1183 bp, Cannabis indica
aagagcgagcactagccctaaaaagaagaagtagaaaagctatgcaacaacaatttcataatggaagctttctacccagcttgggtcgcaaatcccatattggtgcccaaaccgaacaagaaatggcgagtgtgtattgatttcacagacctaaacaaagcatgccccaaagactgttttccacttccaagaatcgatcagctcgtggattcaacagcagggcatgaaatattaagcttcatgattgcttattcagggtacaatcagatcaaaatgcatccaccagaccaagaacgtaaaagtttttgaacagatttgggtctatattgctacaaagtaatgtcgtttggtataaaagatgctggagcaacataccaaagattggtaaacaaaatatttaaagaccaagtcgagcaaaataatgaagtgtatgtggatgacatgctcatcgaatccaggaaggttgggggcacatagatgacctggacgaatgcttcaaagtcctcaaaaagtacaacatgaaactaaatcccttaaagtgctcctttggagtcagctcgggaaagtttctaggcttcattgtcaatgcctgaggaattgaagccaatccagagaagattcaagccctcctcgatatgaagtcgccaactaaaaccaaagaattgcaaagtttgactagtcgaattaccgcactcagtagatttgtttcaaaatcaacagacaagtgtgtcccattcttcaatatcctgcgaggaaacaagcaattcgagtcaacgaggaatgtgaaaagctttccaagagctaaaagcataactcgcaaaacccccgtactctcaaaacctctggacatagaagaacttagaatatacttggctgtcacggagcatgtcgtgagtgccgtgctaatcagagaagagaacaacatacaacacccagtctattatatcagtaaaagactcattgaggccaaaggtcgatacccattgatagaaaaactcccttactgccttattctagcaacaagaaagttaaggccttattttcaagctcaccctgttcgggtgtacactgaccaaccactacgccaaatattgcaaaagccagacgcctctggacggctactcaagttggcggtggagttgggccaatacaaaattattttccaaccccaaacaacaatcaa

SEQ ID NO: 340550 - DNA, 1082 bp, Cannabis indica
gtgacgaacaatttatactgtattttgttccccacctcgcttgttagagcagcgagtagctgatttaacaagtttactcatcattcaataacctcctgggagcagctgtctagggatttcaagaaatagatctaggctgctagggatagacgacccaaagcggcctcgctaaccaatataaagcagccgcccagtgagacacttaagtcgttttagcacggttgcagctatggttaggcatttggatgacatcacacaacttacaaccctttaggcggggatctctctacttatccattgatcggggcgagttgtgggatgacttacaaggtcgtctagtaagaagcatcattgagttcaatgaatgtgctcaggtattcgttcagaaggaagaagccggaaaagaaatgaatttgttaaaaacaagcacgggaagcaaacccagcaatgtttcaacaagtattgtttccatgagaatggataactcgggggcttttggttcgaagacaaatgacggtaccaaggaaccgtcgaaggataaaaagaaacagaagaagcatgataagtacgtgccagtgtatactatttattccaagcttaatgaaactcgggagaatatttacctcgtacatgagtagaaggttgccatcggtaagcccgagcccatgaggaattcgaggaacaaaagagatcttaacaagtattgtaaattccataaggatattgggcacacgatcgacaaatgttgccaattgaaagatgagatagaaagtctcatcgctcgaggccattttaaacagtacgtgaaaagatagggtcagggatataaccagcccagtctgcccaataacccaaacaaccaggggttacaacctcttcatgttgaaggagaaaacatcttggttctttcaggagggccgcatattgcaggggaaagcaataatgcccagaaaagatatgtgaaagagataaagaacgagtagtcggcattttcccaagaacctttcaagaaggtgaaaactgaagaacctaccattttattcacagaggaaaaatgagaaatacgtgaggtatcctcacgt

SEQ ID NO: 340551 - DNA, 1245 bp, Cannabis indica
gttagcgtgatttttaacgtactatgcagctcgttgctaatcaacgagattattggaaaacgtgaataattaaaattttgcttatttaattaaaacataacatatgacttttataaactttcgggatcccatttacaaaatacagttacaaagtttactacacatttataaaatacttgtcgcctagcgacaaaacaacaaaagccctgatgtctcgaggatcgtactctccaggcctaacggccctgatgtacaatcttcatctgcccgctctcacggctcctcaactttatctttgcccttacctactcatagcaacagcactgtgagtcgacagactcagtaagaaaagcataacataataaacatactaatatcacgggttataatcaggcgcccatacacctaaccataaccctaactgaatcaggatcgatcttgacaaagtatgcctaaccgcgaacccagcctatactcagtactctaatcgtactgatatggtagcaattaattcatactatctgatagcctagcatatttctgctgacatctcggtgcatctctatgtacacctcaccgatgccctgatatgctaatcttagggctatagatttgtctatactgacggaaactaacatgcacgctaaacatgtataaacatatgcaaaatattatactaatcttaccttgatttcgaattcaggtgtgtcggccaacctgagtggaacaattgcgcggcgaattacaggctcctaaatcacatcaatcagaacactgataagtgacacgctaaatcactttccggggacttaaacttgaaactaaaagtttccctatcgataaataacatggcaataccctaaatatctcaaaaatggggaaaactagggttcccaaaactgccccaatcggtagaccggttccccaaccggaattccagttctgtagggtttcctggggaccaaccggaattccggttcctacaggcccctctgaacttgaattctggttcagtgcaggaatgactaaaaatatcatatttcaaccaaatcaacccaaacaccacaataacttccagacctgctatatagaccacaaagaacatatcccaagcaacaaaactaactaatatgctcataaacacaatccaccattaaagatccaagtttgagttcaaaactcaaagcttggttaaactaatcaacaaccactaaaaccagctcaaaccaagataaccaaacataa

SEQ ID NO: 340552 - DNA, 658 bp, Cannabis indica
ggagtttagacaaggtttgagttagaactcaaactttggtctctaatggtgaaatttgattttaacgttctgtagttgttttattacatgggatatgttctttatggtctaaataacaggtctggaaaatttggtagagtttgggtttgaattggtgaagtcgtggaatttttggtgattcctacattgaaccggaattccggttcagagggacctgtaggaaccggaatttcggttggtccccaggaaaccccacagacccggaatttctgttggggaaccggtctacaagttggggcagtttcgggaaccctagtttttcccatatttgagatgttagggtattgccatgttattcatcgatagggaaacttttattttcaagtttaagtccccgaaaagtgatttagtgtgtcacttacctatgttgtgattgatgtgatttaggagcctggaattcaccgagcagttgttccactcaggttggccggcacacctgaattcgaaatcaaggtaagattagtataatagtatgcatatgtatttacatatttagcgtgcatgttagtaagcctgttagattacattagatatgtatgttggcttttgtactatctgacagtatcacatcgatgcgattagagtatgactagcgtac

SEQ ID NO: 340553 - DNA, 1045 bp, Cannabis indica
tggtcgggtgaaccctagatccaacattccctgaagttatatcttcagttcttttaattctgcaggtgccattcggtaaggtgcttttgaaacaggttctgcccccaggtattaggtcaataataaaatctatctcccgctaaggtggtaatcctggtaattccttaggaaacacgttcaggaattccttaaccactttaacctcttcaggtccaagtatcataggtttactagaatcaattacaaccgctaagaatcctatacaccctctgcgtagtaaatccctagctttcaatgctgagattcttgggacacgagaaccttgaactgaaccaacaaaaacaaatggttcctcgttctccggctgaaaggttaccattttccgtttgcaatcaatactagcagagtatttggacaaaaagtccattcctagtataatatcaaacccggctaatggtaactccacaagatcagcgctcagttctctaccttcaactctaattaacactgatctaacccactttcttgaaataatccattccccattaggtaatagggttccaaatcccatctcaaaaacatcactaggcctaccaagttgattaagagctctcaatgatacatatgattgtgtagcacccgaatcaaataaaacagtaaagacaaaaccattaataaatagctgacctgtgaccactgaagggctggcggtacatcagcctaagtgatagcaaatacacgtgctggagcatgcttaacttttggcttaggttcctctttcttcaactggtagcaatctttcttgaggtgccccattgacccacactaaaaacaagctctctggttacaagttctgagatgatgtttcttgcagcacgggcactcaggattagagtaagtctgacgtccccctttaccctgattttttcggaaccttttactttggcctgaactccacgaagatggaaaagttctcttcttttgctcaaaagtggaatcaccactctcttttccaggaccaaaaatagggagagtagtggcccca

SEQ ID NO: 340554 - DNA, 573 bp, Cannabis indica
acggacaatgtatagcgagacatatacctcgctacatataaggaaatattgacgagacgaatcagctgttgaaacacttagcatatattctacattataataactaagtgtagcaacttggaaatatgtaggacgtgattgtccagtttgcgaggtcttatggtcaaagagaagttcttaagtttgctcagtacactggagctcatgccattactagaagacatataattgaactaaattattatttgtcatctatatgcaaagcgagatgcctcaacccacgtcagtattagccaccttgaagataggaatgataagtggttgtacggttatcaattgttatctacacgtgtttaaatgaaacatgatcaaagctcacgtttcatgaaacgattatgtaattagaatttaaatgtaaataaccgccaacctataatcttataaatagggatagattctactgaaaaagggacgaaaaatctttgagagaaaagagttactaataatgtattaaatatccagaaatatcttgaataagatagactcgtggagtatgcaaatttaactgcaaaa

SEQ ID NO: 340555 - DNA, 724 bp, Cannabis indica
tcagagagagttgcaaggagcgagagagagagaaaatcgaagtttttgttatcaatcaacattgacaccatgggattgttcatagtcatgttggatacttcaattaacataaatagaaatcaagtaggtttaacacaaaatctattcaaaattattagcacttagcaagtaggaatgacaagtgaaaatactaaaacatacaatcctaaataatttctaaggttttcaagaaactgatatcactgtcccgtttaggcgagagtcaaagatatcatccattgaatagagttgtcacctcatctaaaatggaaaacattctagcaaccttttattcgatcaagatgataatcgagcgttgtcccatctaggcgagagtcaaggccattctatcttatgagcttctaccattgtttcatacttctgtaagtcttactcttagcagccaccattagggtgatcagtactaggaataaaacacttacaaataatacttatctttcaagattctacggtgttaaattgctaatgaacgttcatccattagggatgattactcactaaaacaagaactatatagaaccaacaatggagatcgaatatccttataataaagctcattatttaaagtgtattttcttgtaatatttattttaatctatttattttaaaatatagatttaatttaataaaaattttccaatttagaaaaaaaaattctaaatat

SEQ ID NO: 340556 - DNA, 915 bp, Cannabis indica
tttgcttcatctaatgcgaactggagagaagttacaagtagtgtgcaagctcgtgttacagcagagcagaatatggagttgcttcagccggtctccgatgatgaagtccgaaaagcattgttccaaatgcatcccgacaaggctccggggcctgacggaatgacaccagtgtttttccaaaaatgctggccggtggttaatcgagatgtcatacaactggtacgtaatttttttagctctggaaatcttcctgtgggtttaaacaatactaatctggttttaatacccaagaagaaacaacctatggatatgggtgacttaagacctattgcgctttgtaatgttctttataagattgtttcaaaagtcattgctaataggcttaaagtggttatgccttctattatatcggatactcaaagtgcgtttcttcaaggtcgtctaatatccgataatattatgatctcctatgagataatgcatcatttgaaaaggaaaagaaggggttatgatggtattatggcgctcaagctagacataagtaaggcttacgaccgtcttgaatggggatatcttcgggccatgctcgagaggatgggctttgatggaagatggatcaatttagttatgtcttgtgtgggtactgtttcttacatgatttcccatgggggtaaggagttaggtcctattactgcacaaagaggccttcgtcagggtgatcctctatcaccgtatctatttatcctctgtgatgagggattctcaagtctgttgcgtagctatgaacaaagtggtttaataacgggctgcaaaattgctagaggagcaccagttatttcacacatgctttttgaagatgatagttacatctactgtaaagctacagaggaagaagcacataatgtgaaagaatta

SEQ ID NO: 340557 - DNA, 778 bp, Cannabis indica
atttttaacaaaagtatacgtctttttttttaaatgataactttaatgacaagtatcacataattataactaaagagcattgttattggacaccagtggtgcccaacacctttcacaggtggcaccttacgattggttagcgatattccctaaatcttattttttcaagttatataagacttgctacttaattacaacaatagtggtatgatactaaggagagttgccttttagtattctcataactaaaatattacatttcttttttcttttttcttacttaagatatttaaaaaaaataacaatcacttttttaaaacatattaattaataataacagaacaaactaatacaatagcgacgactacaagtgaactacgataatgacaagggatgagatacagcgatgacatcaggtgagatatacggtagtgatgaaaataagtgagatacaaaacaagtgagatacaatataataacaatagttttaaatgatcgagatatgaaaataatgcattatggggaacactgtaaattttttctacaccatactatttatttattttcataaaaataatttcgtttaacaaagcaattcgaaatactacatataataaattttaaacttcttaataaataattttaaataataataataaaattatgcattttatttttaataaataaaattaataatatgaaataagataatatatttataattttactatatattataattatatttttaaataattatttattataatactaaaaa

SEQ ID NO: 340558 - DNA, 1072 bp, Cannabis indica
ttacctaataatacttaaagggtaccttatattatgaaaattagttcaaaaatcggtactttttgtttcaatttgatcaaaaaaaaaatatatttttatgaccatattactttttttatgaattgattttttattatttataatgatttttttaagaataaattaacaaattaaatatattaaaaatagttattctttcgattttatgatacctttgttctgaaaatattcttctctttttaccatgtgggtgatattagcattggtgaaaatggtcactattttccatgttgtaaattcgatggtaggctaattatctcattatttcttccatgctctctctctctctctctactaaactctcatctgttcaatgtcatctggtttatgattgtttttggtattttattaatgaagtattatacaaaaacaacatcttgatatagaaacttgatttgcagcaataagaaatcaacaagacaatgagaaattcatataggcaatattattgctctccatataggaaaaaagattgtgatgattttcttggtagaagaaacaagttttgggacgagagtaatgatgaaagaaatattagaatatttctaattaaggaaataaaataatattattgattctgataaatgaatattttatattcattgaatctggacagaatcaattacgtaatattctatatatggtcagatttctatattcattacctgatttgatttcctgaattaattgtcaaaatattctgacaattaatgtggcacagatactgatggagtatctcacctataaatatagggtctcggtccccgagctcctcactcattctgttcataacagcaaattccatctaaagagagttgagagagcgaggaagcccgattacccatggtagtcaatttcctttgcagatcaaagcttatgtgggtttgaagctcaagaatcaatggctggaggtatttcgatccttaagttatatagtgtatatatttgtttaattccgcattttatatacacatacatatatttcagtttatacatataaatgtctaacagt

SEQ ID NO: 340559 - DNA, 900 bp, Cannabis indica
tggtgctgatccactcaaggcaatgcattagatgagtatgataacatccatttttgattttatgcggatcgaagataatgaccgggtcaggtgtgctatcattatgctgcgagatgatgcccgtattttgtgggagattgtgtctcagggtcatgacctgaataacatgacctaggatgccttccggaccttgttttatgagaagtactataatgagtctattcgggcagcaaaggcagaagagtttatacgattgactcagggcagcatgacagtgacagagtatgccactaagttcgatcgactggcaaaatttgatttagatgaggtggctactaaagctgttagaaaagcaaagtttatccgagggttggatgaacatattgcgcgggatgtgattgttgcttccaaacaactaggggttgctcgaacttatgcccaaatagttgaactggccctagtttctgagggtgcagaagatcagatacgaaagaaaaatattgccagaagagattcgtggaagcaaacatcaggtgttggttctagtaggggtactgatctcggtgaccgcaagaaaaggcctagtgaatcattagctgcaggcccaaacaaaaggttccagggtaaccaaggcttccgtcatggtgggaacgaaaattggcagagtttccctcaatgcccgagatgtaaaaggcgccatcatggcgagtgtcaggccagggcctatttccactgtgggatagtgggtcacatgaagaggaattgcccacagctactacgactatagtgtttaccctaactcagactgaggctgatgctagtccttccattgtgataggccttggtataattatatagtatctaaataagaattttacaaaagcacacacgtggcgtccc

SEQ ID NO: 340560 - DNA, 607 bp, Cannabis indica
tgcccccagccccctcggttttgttgatgcagagaagccaacttatgtctgcaagcttcataaagcactatatggactaaagcaacaacacgtgcctggaacgatacactgaaaaaaccttattccaaaggtttttctgcttctcgatctgactcgtccctgtttatccgaggctctggaagtgatttagttgtgcttctggtgtatgttgatgatataatcatcacagggccaaacaccatagttatcaacaatcttataaaggaattgaatcaagtgttttccatcaataatcttaggccattacactattttttgggggttgaaattgctcgaaataccactggcatgtacctatcccagacaaaatatatctctgctttgctggtgaaacttcacatggctggtgctaagccttctccaaatccaacaagctctggacacaagctttcactaaccgagggagaaccatttatggaccgaacactctacggaagcacattaggggccttacaatatctgaatttaactaggctggacgttgtaatacccggtaaaaatatacatatattttaaattttatttgttatacaatttgtgtgagaat

SEQ ID NO: 340561 - DNA, 641 bp, Cannabis indica
aaaatatacaaagtgataaaaattaaagtatatttaagtttgcttaaggcagattataattgctatagcgaggaagagatgacaactactcgaaaataaaaaaagttcggtagataaccaactacttaaacaggaagattgcgaacaatagataaacccaaaagtacttaacatttgatcaaaatatagttgtttacattgtgaataaaaatgcaagcaaacacaattgtattaagttcgaatgaaaatagtagaaggcatttaagataagcaaaaacccaagttaggatacgaacttgtctttacaaaaatgccactaggggcaaaccattaagtcgtcttccaaaacaaagaatgtgatgggcgggtcagtaaactcgagaaagaccgtctacacatagcttggagaaagatcagctacacgtagctcaagaaagaccgtctacatgtagaaggtctcaacctttggataaacctcattctcctcatcagaagatcccatttcctacagccgagacctttttcccagcctcaggaaattcctcaataccagagagagggttggcgcaaaggtcttctggtgcaggtttgggtcttgagttggttggattctctaatagaaacctcacaaactttccccc

SEQ ID NO: 340562 - DNA, 632 bp, Cannabis indica
cccccagattcatccaaaaccacgccaaatttcctttgggattccttgtcaacctgaggaggacctctaagattgttcacaagatctatgtctaattctgaggagacaaagaaaaaaaaaaagggggtcaatggagcaacaaaaagtaataatgatctgactcaaaccaccacccccaagggacaatgtaacgccctaaaataattaggcacgctacccaaaattatgaaaccctagtcccctaatcaggattactaaccaaaatagcgcagaatttaaacttttatattaaatagaatgcaaataaacttgtaatatatttaaactttcaaaatagttgggatcccaaaaatatttacaaacttattacaagtcttttctttctagccgacctaagcggcaaaatagaattcaaaatacatcactggtagaccccaacccgcttggtctagaatggctcggacatgtacattcttcgtccagctcctgcactcatggctgattaacaacagtcttaccctttcctgcacagtagaacacccgtgagccaagactagcaagacaatataaatcataacacataatatgcttatcatataatataaacagtaattccattcatatatgtctgt

SEQ ID NO: 340563 - DNA, 717 bp, Cannabis indica
ttatttgtggagaaacttatgatttattatatttaactatttttttttttgtggtaaaatttttttatgtttactttattttgtaaattttataaagtaactgatattatatattttaataatttaaaatgaaaaatttgattatatatgcatactaatagaggaaattattttcctaaatttatgcatttcaaaattaaaaaaatatgaccactttacattaaactcaaaaatacccctctcatttttcaaacctcaactctctctctctcttcctctatctctctcgttgttctctcatcatctcacccttaccagcaccaaatcaccaccaccaagcaccaaatcaccgcctaccagaccaccgaccactgtgagacgcgactccaaccctctaccaccgagctttgaatggaaatgtcgaaggcaagccttcggatctttttttttttattattagtttttttttatttttgtcggatgttatttggaaattttttggatttggggtctgatttcgtcgggcccgatgcagcctgatgcaggcccgacaccggttcaatggattcgcaggaaaaatgaggatgacaaaggcccgatggggcccgattcctgtgtaaaaaaagaagaatttgatatggcccgatagtgggcccgatggtgggcccgatgcctgtgtaaaaaaaaaaatagaatttgatatggcccgatggggcc

SEQ ID NO: 340564 - DNA, 707 bp, Cannabis indica
cctatttcactactaattaatacctaaaaaaaaaggtaaaatcatgcatcaattagaggggttcaactaagtcttacttttccaagtaagatctagcttgctaaatgttaaagctggccaaaaattaacattcaatcaacatttcatcacaactaattgaacaaagacatgattactcaatcattgcaaaattcaaccactagtccatacaagggttcataaccgcccaaatctcaaatattctagttcatagctgaaattaaaaactcaaaaccagaaaataacatgttcatggagtttaagagaggattagagagtagaaaatgatacaaaatggaagaggagagcaagagaaatgagttggaatctcaaatcttctctttgtaggttgccttcttctccttcttcttagtcttcttcttctcttctttctcttttttctgcacttagattttttttcttctgtaatttcgtactagcctcctcttcaaagtgcagccacctttttctatttatcctccttctcttttgctccccaattagggtactaaagtttaccctaattggaaatccaattcatggtccacttgcccttcattttccacctattagttgagtcattggccacattttcgccacctcagctccttttttttcttcattaatgccagctggactttctgccaaaataaacttactgggctgac

SEQ ID NO: 340565 - DNA, 568 bp, Cannabis indica
tctctgaatctgcttctctctctgcttctctctctgtaaaatgaatcaagatcttctgttaaaattatagtgcattttgccaactaaataggctctttttcaatgaaaatttcatatttcccttattaccctcgagacactaaaaataatttttaaaagaatatctatttttattatcttcttcctccaaccaaaactattttgctcaccaccaccaccaaaactattttgctcaccaccaccaccccaaattcaaaaatatcttattcaaagtaaattaatatagatctttattgtaaatgaatttttatgtatttttttttaaaaaaaatttaaaatctataattactattttagtgtattataatatttatttgttgagttttgaggaccttaaaactcgaaaatctgaagagaaaaaaaggtagattttattttatatttaatatttaatctaattaataaaaataatttaaagtaacaaatgtcatcaaaaaatattatcatgaagaaaaaaatgaagactcttggaaataaatttcaaatggctcacgatcaagatcaataa

SEQ ID NO: 340566 - DNA, 636 bp, Cannabis indica
aaatcaaacgaaaacttccaaagtacctaaaaagtccataacaaacctaatccaagtaataaaaacaagtaatagaccctaaaactgaaaacaccattgaagagcaaagtttgagcgctaaagctcaaactttgttcaaccataacaaaaggcaacaaatcaaacttgaataaacttaaactataaatcaacctctgcaaacataatgaatacaaaattaaacctacagaaccctaaccataaaaatcatgcatcgagactaaacttttccaccataagctcaaagaagaagagagaagagccttacctcaccaccaacttgagctactgcacctcaaatcttcaaaaaatgatcaactaagaggagaaataagctgggtctctatggttcacttgtgaccgaccaagagagagagaaaagaatttgaattttttcttaattttcttctaattcctttttccttcaaattcaatcaacactaagattatttcctaaaacttatccactaatgaaaaattggccagctgccacaaggagaataagcgacccaaccaaaagtcaaaaagaccaaaatgccctcactaaggttttaaatggctaatggcataggggtaaaatggtccgaaatctcaacc

SEQ ID NO: 340567 - DNA, 607 bp, Cannabis indica
tttaggtctctgtatgggttttgatcttggttcggaattgggtttaggtccttgtactggtcctagtcctagtttggttctagttccctttgcgattctgagttcgagtttgggtttgagttcaggtcagtgttggagtcttggtctgagtttgggtacgagtttggatttcagtcaaggtccagatcaagcttcgggtgtgggttcgcgtcctgcgtcttggtctaggttgggtacaagtcccaagttcaaatctcgatctgagtcttgattctgttcttggtctaagtccttggttatgatcttggtctgggttcgagtttgggtccaggtccgagtctagctttgggtctgattctaggtgtgggtgtttgagttcgggtctgagtctgtgttggattttgtgtccagggctggaccccgatttgggtcttggttcgggtccaggtccaagttcaggttccgtgtgcgtgtccaagtttgagtgtgggtcaggatcacggtccagatctaggtttagcatttcgatcacagtctgggtctttgtctgagtccatgttcgtattcggatccctatctaggtccaagtctgtgtttgggatcgggt

SEQ ID NO: 340568 - DNA, 643 bp, Cannabis indica
tccactccaaaaacaccccgaatcagatcggacttgaggagaaaaacccaaaatccctctttccttggaaaaacggcctgcctttttttcctggcagccatggtgatttctgttttttcaccccaaaaaccaatcaaacctccaccaaacctaaccgaactttccagaacagtatattatggcaattataacataaccaaacaactatttcaatgcaatatatcaatttgctcaaaatcacacttcaaagtgaagaaaaactcaattttctctcaacaaccatatccaatttcaaccagtcattaaaaccacttaattcaaacttcaacacactgcaaaacaaacctaaaagcaccatctcaaaccaaactaaacctacagccacgaaatctcaataccctcacccaaaaccaacctaaaaccaattaaattcttaagacaaagcatagaacttaccttgattgcttctaggttgggcctaggttctacaagctggttcaattcaagattaaagggtgaaattttgatcccttgctggctggttttggttcacacgaaggggagaagaagaagaagtttacttgccttgtaagctttctccttaaatagggtttttcatctcatttcatttcatttctttctt

SEQ ID NO: 340569 - DNA, 797 bp, Cannabis indica
aagtttttcctttgtgcaggccggtctgaagttggcctacacttactccaaggctaagtctgccgcttctaggaaaacggctctgtccgacaccatgagggcagaggcgaacttagctaggaaggatgatgaagacgccagggcggaactcggagctgttcggttggagttgggtgaagccaacaagaagctgtttgtcgccctgaagaagataactaagctgactaaggatcttgaggttttttaccgtcttgaggacaccatcgagaccttatttgttgaagtgaacagtcttcaggatgagaggacttctcttcgagcagttcttcatcgggtgaaggaggagaaggaagctaaggaggaggagctttcggacaaggtggcgaggttgaaagagaaggttaatgctctagagacagccggtcttgagcttttctttgacttttggaagtctaaccctcaggccaactttggctacttgggtgatgctaaggacatgtaccttgagttatgtgcgtcccaagtggcctatggcaaaactaaggcggctgcttcaacctccggtcaggcttctgatgtacctcctgttcaaacaactgatcctccaacccgattgccccagaagaaccgaaccatgagcctgagactccagttgtttcaacacgtctccttttatctctttatttttatatatcttattcggcctcagggccttttctaagacatcatgaccggccaattggtctttaaacttggaattatttttaatttttcggacaacaggctgaccgggcagc

SEQ ID NO: 340570 - DNA, 1081 bp, Cannabis indica
ttagttaatgataattgtctattccttttatcttgtttgtgaaattatccatatttgtgtgtattttcatgtttaagattgatcaccttctacatgttctatgatcttaattcaaaatctgaaaagtgagaattgagaatgctaaaattggataatctaggttttatgtgaaacaaaagtatttgcgtaacctgtgtgatatttagattattgcttaaacctgatcacatgttaatctaattcagagattgattagataacgggtgatttagggcctaaaagatctaaaaagagttaggttaatttatttaatctatcgttcgcatcaagaaaaaggatagtaattagcattaacaattgggtaataaatcaacaggattctcttctctattttatcatcttgattaaatcttttgccgtcaattttagtttcttgatactttttgttttgtgtttcaatcataaaaattattggtttgccaaatagaatcataaatttaatctagtggtattcagttcaattccctgtggttcaacctcgcctgtgtgagtttactacttgattacgtgcacttgcgtaatgtttatatttttcataacaaatttttggcgccgttaccgggaaattatttaaaaattgatattgcataagattagattaaattctactttggttaattgttcttgctgattgctaacctgtttctttcaacattgtcttaatctatttcaggaattgaaggtgtatgcgacactacgggcagagtgttatactgccagttgatcttaaaattgagacgacctgtaaaagaaacagaagaaacaaaaggcaagaaagagtttcagcaactgctgaaacagaagaaatcatggctgataatgctaatggcggtaataatggcggcaacaacggtaataacggaggtgccgttgaagaccaggcaaacggtcgaagtctgagagactacattctcccaacattaacaagggttcagtcttgtataagaccacctgtcgtagatgccaacaactttgagataaagccagccatactccaaatggtgcaatcctcagttcagtt

SEQ ID NO: 340571 - DNA, 522 bp, Cannabis indica
atacaaattttattattttcctattactattaaaaatagagctatacaataatatttagaaaaaatgtgataaagaaatgaaagaaataacattaagataataacaaaataaacgagtaatagaaaaggataagttagagaaagaaggcggatttagaagtacggtagagatggatccaacgctttgagaccaaagagactaaagaacatgaacttagtgggagtttctgaaagattctacaagaagctcatcagagagcaagttctccatctctctcacacacaaccacacttattttttccaaatcttcttcttcttcttcttcttctcctccttcacatactctttatttttggttacttactacaaaaggagagggttagcttttatttaggtaatgttgtagacttaagaaaaaatagaagaagaagatgaaatgggtgttagaattattataatggactaatacaatcataggtttaatttcataatacacaatcattaactatgtgcctaatgtt

SEQ ID NO: 340572 - DNA, 679 bp, Cannabis indica
ggtgctctactgtgcaggaaagggtaaggcactagctgatcagccatgagttcaagagttgggcgaagaatgtacatgtccgggccaaatcagaccaagcgggttaagggtctaccagtgttgaatttttaaaactctattttgccgcttaggccggctaactgaaagagacttgtaataaagtttgaaaatattttaggatcccaactgttgtaaaggttatattattacaagttttaatttcattccgtttattgcaaaagtttaatttctgcgctattttgattagtaatcctgtttaggggattagggtttcgtaaataacttgggtagcgtacctaattatttagggcattacagatacgctataaacatttaattaaccatcgttctagtctcaataatcaaagatcctctatagatgatttacaccgagtagggataaatttaccgtttcactcctcaatgtattttatccttaaaacaacttagcttcctataaatgatatttcagtgaactaatatataatcaatgaaaacaagagctcttccatttatctctataagccaagctcgaaggaaatcatcgcttcacttctatgtcttgatagaagctatagattcattgaacctaagcatgttaggattaagatcttttgatctaagaccaactagtgat

SEQ ID NO: 340573 - DNA, 816 bp, Cannabis indica
tacatcagtagttacggaagcgaccaaagtttcacgagtaaccgaggatggaaagttatccgcgatactgggggccattgaagtcctcggtgaactttggaaagatataaggaagaacgggccggtatactcaatgagtgatttccttgaccgaaccgaaggcttcatcaagctcgaagaagccattcaacgagcagaaggtgaacaaaagccggacaaaacgaaggctccttccattgggacatccgcccaacttcccaactattccactaattcaagctcaaaaggcaagcgttcaagcaaggaaacgggaagaaaggaaagttcactgataaattcaaacaaactcccgaagagaatcataccaaatacactgcattcactattctgactgaagatatagaaagtgtatatttggcaaatcagtcgttaatcccgtacaagaagtcggggcccatgaagaaagataccaagaaaagggacatgactaagttttttcggttccacgaagactacggccacgacacgaacgaatgttacaatctaaagggggaaattgaatttctaataaagaaaaacaatccgcacatgcagaagtatgtcaagaccaaccaaggtctgaaaaaccaagatttgctacctccactagtagatggacatttacaagtcattattggaggtctgcacattgctggagattcgggcaaagctcggtagaggtatgcccaaacagcacaacacgagcaagacgaactcatcctggccgtggaagaaaggaagcccaaaattccataagcaggagagccaaccataact

SEQ ID NO: 340574 - DNA, 879 bp, Cannabis indica
gttcggggctgatacatgatttcatattggcccaactccaccacccatttgagtaaccatccagaggcatcaggtttttgtaatacttggcgtaatagttagtcagtgtacacacccgaacaggatgggcctaaaagtaaggttttagctttcttgttgttaagattaggtaataagtgagcttttctatcaacgggtaatggccttcagcttcaatgagtcttttgctaatgtaatagaccagatgttggatattgttcccttctctgatcagtacaacacttacagcatgttccgtgacagccagatatatccctaattcttctccgtccagaggttttgagagtacaggaggtttagcgagttgcgtttttagctcttgaaaggaattttcatattcctccatccattcaaattttttgtttcctccaaggatgttgaagaatggaacgcacttgtgggtagacttcaaaactaatctactgagtgcggtaatctgaccagttaaactttggacttccttggtgtttttaggcgatttcatatacaggagggcttgaattttctctagattggcttcaatacctcaggctttaacaataaagcccaaaaacttacctgagctgactccaaaggcgcactttaggagattaagtttcatgttgtatttcttgaggacgttgaagcattcgtccaggtcatctgtatgccccaaaccttcctggatttgacgagcatgtcatccacatatacttccatccgatctagtctttgaacattttatttacaaatctttggtatgtagttccgagattcttgagaccaaatggcatggccttataacagtatagacccgtatttgtttggaaacttgtatgt

SEQ ID NO: 340575 - DNA, 623 bp, Cannabis indica
tttttatcttggttgttttacagtaccagattctttttctcaaatttttaactagttaatataatcaattttttttatcttatattttgtgttatcgtgtgttattattttttttttacttattttgttatggaatcgattcagtttagattcatgccttggtatttttggaattaactcccacattttttttttaattataaccaatttattatgtgttattcatttttactcaatttgttgtggaacgagttttatttttaacttatgtttcagtgttttatgaactgatgttctctttgtttttttttaattataaccagtttgagttattttgtgttatttgtttttattcattattttatagaaccggttctattttaatttatatttaagacatctacttctggtgacttttccagagacaacgacttttttagcgatttttccagtgactttttcgataacttttccagtacttgtgattttccagcaactttttcggtgtgggtaatttttctggcgaaacttattattacaaattttatcaaatttatttattatcttttttttttcttttttatattttaaactttgattctgttttaattgtatattttttt

SEQ ID NO: 340576 - DNA, 591 bp, Cannabis indica
attaaaatcaaattccacatattttgatttaaaatagaatgtatgtatgaattacaccaagtgaccatcatactattattatagaatagaatgccctttagcattattaataaccatctctagataaaggaagttagttagaattgtcaataaatttttcccaagtaggtaggatttgaaaagataactaataatagctatggtagtactagtaatatggaaagagagagaaggttgatgtgagttaaattagtgagtaagccttaaccttatatgtggtggtagagtactcaaggttgatgagctttaataattgataaagcaatttatatatatatttatatatatggaacacttcttaatgggtattacatgtgaatggttattaaaatttaactataaatattaattttaaaaatacgaaactattgaatttaatctaataacgaataattaaatcacaaatttgaattcttatacttaattactacttaattaaaaaaaaatatatcaaaaaatatctctttttacactatatcaaaaatatgttcatacaaatatatttaactaaaactcaactttttctttttt

SEQ ID NO: 340577 - DNA, 2092 bp, Cannabis indica
ttataggattgaaattaaaaaatatggtattattgaaagaagaataagtgattgaaataaagtggcaaaattgtaactagtgaggcccattagtgcccgaccacttagagtgaattttacctattattttattcttttttaatcaatataatcaaatgataaaccctagttgaaatactataaaaggaacatgatgctctcattctcatccaagtctttcaacctaccaaacctagtttcattctctgacaactagtagatgagagactctttctatagtgattttgaaccctcattcattgttcgtcaccaattcgagccatagtgatagagtaccatacccacacatagcaagtcaagtaactcaatcatagtgtggaagacggtggtaaccaactcaaaggagagtaggagatccaggctcagatcttgttattactctgcgacagaaaggaacaagggttagagatctgagcggaaggagtcattattattccgctgcatcaatgtaaggttttctaaattcttatgtgtttatttcatcatattagaaaattcatatttagggtgttaatgaaacatacatgttagtaaatctagatcctgataaaataaataccaacaagatcttcctcttgctaagtacacttcttctttcttggattccttctctaatagtagttcaaaatctttcgacttaagtgcgacaagaacatcttctaatgcaattacatctctgtcatacttgatggttttcttgacttgatatgcaattggaagcgatctcaacaagatgatggtctggctttcttcatcaaccttgtgatttatgttagccaaacctacgataatctcattaaatctatcaatattatcatctaaagaaagagaagaaatcattctaaaaccgtataacctttccagcaaattaatcttgctaacaattgatggtttaaagtatagttcttcaaacttgtcccaaactcctttcgtcgtcttctctgtgatgagttttctttgaacactgtttgatagatacatgataatcatgtagtatgccctcccctccatttttgctttttcctctagtttcttttctgccaataacttcttatctccaagaaccttggagactttctagtgcacaaggattcctttcagattttctctccatagcgcaaagttcccaattccatcaaatttctccaatttgaatctcaccattgatcacattcaaagttccttcaagaattgcagcgaaaagaatcttgattatgcgtttttgatcgattgccaagctctaatttatgggaaaattacaactaacagtgcagaagcaaatcagctaaactttaaacaatcaaacaattaacgatgacaagatttaagaaattaaaaacaacaaacggagaaaaatagggatgaacagagtaaggaaaaccagaaagtaattaaggcataaataaaaaagtcaacaccaagatgtatactggttttagtctgatacatcgatgtgatcaatgactctacttcagttctagaaaaccaccaaatcctctttattgattgagcttgaacaagtacaatacagtcaagaaagattctctgttgagtactcacaaagtgtttcaactctcacactcttacaaaagattcttcttacaaaatccaaacacaatctctctcttttctctatacctctctctacctctcaatcttttctctctctaactatcaatctcaatctgaaccctcatctgaaaagacaagtcaatgtggttattataggcttaggatcaagatctttaggtcagtggctacaaaaaacgaagctcttaacttagttaggaaataactaacttaaccaactctcctttgaccaatatttccacatctgaaaaacgttttattacttattacttatcactcatctatagtttagagttaggggtgttcataaaatagtcgatccaatccaatccgcacgatccaatccaatccaatccgcaaagtgcggatatccgcacttgtgcagattggattggatgggaaaattcaaaatctgcacttgtgcggattggatgttgattga

SEQ ID NO: 340578 - DNA, 1178 bp, Cannabis indica
cattaattctgctgcatcaatgtaaggttttcttaactttatatgtgtttaatttctcgttttagaaagttcatatttagggtattaaacaacatacttgtgagtagatctaagatcctggtaaaataatttccaatacttagcatacccttcactccaaatctcattacgccacgcatagaagtaactttcaagaagacataatcaccaacatcaaactcaacttcccgtcgatggagatcggcatagcttttctgacgactctgaacaaccttaagtctttcttggattcccttaatcttttcagtggtactagtgataatctggggtccaatagtgacatgctcatctggttctgcccaacacaatggcgatctgcatggtctcccatataaggcctcataaggagccatgcctatactggcttggtagctattgttgtatgtgaattccactagtgacaaatgttctccccaactacctccaaaatccaaaacacaagagcgaagcatgtcttccaaagtctgtatggtcctctcagactgtccatctgtctgtggatgatgggcagtactcaagtgaagttcagtccctaaggcttgttgcaaggccttccaaaaccttgatgtaaatcgaggatctctatcagaaacaatgcttgaaggcactccatgtagtcgaactatattgtctacataaagtcgagctagcttggtaagcttgtaatccttcctgattggaataaaatgagcagacttagtcaaacgatcaacaatcacccaaacagcgtcatgcttcaaaggtgtcaatggcaacccagtaacaaagtccattgtaatcttgtcccacttccattctggtataggcaaaggttgaagtaaacctgagggtctctgatgctcagcctttacttgctgacatactatacacttagctacaaagctggccacatctcttttcataccttcccaccaatattgtctctttaaatcttggtacatctttgtacttccaggatgtacaaaaaatttggatctatgggcctcaatcaaaatggtctccctaagatcagggatatctgtaacaactagtcttcccatatggcataggtacccttcaccattaactgtccacccgtctagttgctcaccatcgtagattcggttccaaataagtct

SEQ ID NO: 340579 - DNA, 600 bp, Cannabis indica
gatgaaggaggagaagaaagccaaagaggaggagctttcggccgaggtggcaaggttgaaagagaaggtcaatgccttggagacagctggtcttgagctcttctttgacttttggaaggctaatcctcaggccaactttgactacttgggtcatgctaaggacatgtacctttagttctgcgcgtctagagtggcctatggcgaaattgaggcggctgcttcaacatccggtcaggctgctgatgtaggtttattcaaacaacagatcctccagcttcagttggcccagatcaaccgaaccaagagcctaggactcctgctgtttaaacacttctccttttatcactttatttttatatatcttattcggcctcagggccttttctaagacgtcatgaccggccaagcggtctttaaacttggaattatttttcatttttcggacaacaggcggaccgggcagcttttaatcccggtattacaagcttttgttatccttaatgaatttcattctctgtttataattgtcgtgcaattgtgattgttttatttttaccaagtgctttgtacaggtataggtgccccccaagtgaccgagca

SEQ ID NO: 340580 - DNA, 512 bp, Cannabis indica
aaagtcaaaatctttcgaaatgttcttgagaaacagttaggaagagtcatcaaagttgttctttcagatcgtggaggagaatattaaggtaatcgttattcagaatatggactacacatgaggccttttgctgaatattttctagaaaatggtgtagtttctcaatacactatgtcaggttcacctgagcaacatggcgttgctgaacggagaaatcgcactctcatcgttatattaaaaacatgatgagtagattaaattttctagagcttttatggggtgaagcacttaagactgtaacttatattttaaattgtgttccaagtcaatctgttcccaaaacccttttgagttgtggattgggagaaagcctagtctgaatcatcttcgtgtatggggttgtccagctaaaacaaggatttatgatcctaatttgaaaaagttagattcgagatcaaatcgttgttatttcattggttatccaatgcgctcaaaaggctatcacatttact

SEQ ID NO: 340581 - DNA, 508 bp, Cannabis indica
ggctgaattagagagtcaaggtatgactagcttgcttgctttcttaagtgtttactgctttcacagatgttctaacacttactcttttctctcgttgcagcaactaatcccatggaggcaattttggccacccttgccggagctcacacccctgatgctacccttcctccaacttcttcccagacggttacccctgcgaaggcttcttccagtgcccctccagacactattgacttagtggatgaggaggaggtacttcctgaggaagctaaagaaggtcaagaagagcaatgagctcttcctgaggaagttgaagaaggtgaagaagagcaagaggttgctctggttcgcaaacgcaaaggcaaaatggtagctgaggagacctctaagcggccacggagagcggacactccggccccgagccatgattccgggatccctcccgaggcgaaggaatttactgtgcctcccaacatagtgctgactccggttcccggagatgaggcga

SEQ ID NO: 340582 - DNA, 684 bp, Cannabis indica
caggcttcaagtggttgaccggctcgaactacaaggccttcagcaagatagggcattttgctgatgagtacttcatggtgaaggacgcgagcattacccagactcggttccaacagattttgacatatcaccatcctcccctcactcttgctcttagggatagagctcaaaaacttgcccggctgccgggggaagaccggaatattatccagttgacctccaaggataactttgtgaggtacgggctctatcttgaggactttactcctaagtccgtggcggggaagaagaggaaatctggtgctggccggactgaacgagctcatctggagaatgagctgattcaactgaagcgcgaagctaagttgaagggaggtgcaagggctgagcagtatgctcaggagcccttgaatcctaaagatgaagctgaggaagaacaggtgactccactgaagaggaagaaggaactcccagccttgcccaagcctgttgaacatgcgattcgcataagggagcccatttcacctgttcggacatcccctcccgtgttcggaaaagggaaagctgttatgtctgaaataagatcgatgtcaggtgacgatggatttctgagtcttgttcggacggtcaccttgaattttactttatcttgttttttgagcttcttgattttcatgccttgtg

SEQ ID NO: 340583 - DNA, 513 bp, Cannabis indica
actataaaaaaataattaaaaaatatataaaaaataaaaattttatatgacatattttttaatatatatatatttgtgattttaatgaaatagattaaaatattattattattattattattattattattattattattattattattataatagaatcttaacaactcacaacacttcaaaatttataccaaacacacagttcagcttttttctacattttttctacagttgttttaccctacagcacaattacaactactttttcctacatcacagttgtgccaaactggcccaaaatcatcggacccatattgggctaccatccctgtctaggtaccaaagaaaatattggactaccatcgagccctatcggaccagaaaaaaaaattacagatcctagaaaaaaaacaatattcacagacagcaaacacacacacaaaatactaaaataacagcaacaattcacatatcaagcatcaaaacaacattctaaactaaatataacaacca

SEQ ID NO: 340584 - DNA, 769 bp, Cannabis indica
aaaaaaataaaagaaagatacgtagcagtacatatatttagtaaaaaaattgaagaaattaataaaataaataaaaaaataaacaagtaaattagataacacattttaattattaacaaaaaaaaaaaaaagatatgattgtaactatatttaaacatactttagaaagttacagatgtcactcaattaggaagagaatgtaaaagagagtgcaaaaaagagtttccctagcactcttctattatttcatatatatcttaagttttaactacaataactttttagcttcaattttttattaaaaaaataatgaatagcattgatgcttcaacatagcatccatacaaatttctagaatggcatcatcttttctccaatggtatagcatctcaatattttgccacataatatgtccacctcaccgagcatcctctaaaattttactattggagatgctcttacttaacatattttagtgaatggtaataagaaatgagttggaattagaatgaaatacataagtccctaaccaatttgtctggtagaagtgttcataaaatagccgatccaattcaatctacacaattcaatccgcaaagtacgaatatccgcacttgtgcggattgaatttgattggaaaattcaacttccgcacttgtgcggattgaatgttgattgatatgtaaaagtaaccgaaccaatccaatccacacatctttataaaaaaaataaaaattatatatacaaataatattttaatgtaaagaaa

SEQ ID NO: 340585 - DNA, 1166 bp, Cannabis indica
gttgattatgcaatctgaattttggggtttaatattgaaatatgatgcatgaattatgtgtttaaaactctctattggtttctagtaatctaaccttgtgaattgagagtttgtttatgcttttgggttgatttggaagtgtttggcaactgaaattcgtgaaaatgcatgctggtttctgggtttggaacccaagtgccgcggcatggtctgagcatgcccagcgcccttgaatttgtgggcagtttgagtgcaaactttgaaaatccataacttttgattccgaactccgatttggaagttctttatatcattagaaagctccttccgagctctatgtgattatctgaattttaaatgccatgaatatattttataagtatggaaccaggagttaaccttatttgtgaaaattcgagattgtgtgactaggattatcgacacctggtcaggagcacccagggatttggaatctctactaaaactggaaaacatgtaagagaaaggtttacatgtagagtatgcgcggtggcgcttatgttgaatatgatatatgtgactaattgtaaccaggattagggaactaccctaatatgagcggttaatagcctagggttattaccctagtgatataagttgagtaaatgctatgccatgctaagtgtatgattatattgagatttaagggttatgcattcaaggcataatccgattggactcggtaaccataaccgagatgaaccattctaaggcctcattgtatttagacgtgtgagagcaacacgtaggtctacgcctggtagatataaatagacgtgtgagagaaacacctaggtctacgccacgtagacataaagagccatgtgagcacaacatgcaggtctgtgtcacacaggcagatttgaattgaattgttgtttatattatatgatgtgcatattgttgatatgttttatactgtcttgttgggcttggctcacgagtgctctactgtgcaggaaagggtaagactattgctgctcagccacgagtgcaggagttggatgaagaatgtacatgttcgggccatactagaccaagcgggttggggtctaccagtgatgtgtttttgagactttattttaccgcttaggtcggctgaaagaaaaagacttgtaataatattt

SEQ ID NO: 340586 - DNA, 1305 bp, Cannabis indica
atattcttatttttaaaaaaaaacaaacagctgtaattaataactcttttttgaaaaagctgtaatttatattttttagtttgaaagagctgtaattacgttttcaaaaaaaaaaagagttttatttaataaataaataaaaagaaacaaaaaaaaaagtataatatattaagcgtacatgaaccttatcatatgtgcttatacacattacaatgtcgttctccccttcttcttctccttcgtgcgcagctgctaaaaaaaccctcctttggcgaaggacgggcaagatgctccacatatttgcgttccccatcacctgaaaccccaatcgtcgactatatatctctcctcctcggtggctgtctctccgccttcctcgttgacgatcgaagatcccacgaaagtctaaggttagatcgtcgatcctcgatgtttcatcatctctactttatttttcttttatctgtttctctctctctctctctctctctatgcaggatcttgatgtcgacaacctttgaagctcgtctccagtcgacaatgtttgaagttcgtcgtttggttccggttttggttattggtcgatcgcgattgaagctcgtccctggtttgtggtgtttgaagagtctgtgtttccagtcggtggtcgcgattgaacctcaatgaggggtttttcatagttctaattgcagcaagagtctattattttccatgttagaatgaacaaatcaaatttggttgatttggttgttatgtatacagtactgtttgggttaaattttttatggatcatatttgtgcaatatgtagttgtttgggactatttatatgtgcatcttatctgcatatgataaaaacgtatattctgtccattgtacaagttttcctgaaatttgaagaatgctcattttgcagcagttatgctgttgaattttaaattttgtgttaaattaagtcgtatagaattaactatattaatttcttttttgtatattattttttttagaaagtttattattttaattttagtgtattgtatttattaaaaaaaataaaattaaaaaaaactgatattctttttaattttggtattttttttaaaaaatattgttaatatagtggctctttttgcgtgtcactatatctttaaaaatattaataaaatatataaaaagaaaaaaaggaatatagtgacactttatctttgttgctgttacttttgcagtctgacaaaacctgactttatagggctatagtgacgcgcagaaagttaatgtaaaagggttcagtgacatgtgtggagtg

SEQ ID NO: 340587 - DNA, 978 bp, Cannabis indica
aactatttgtttttcccttttgggcaaaggaaaataaacaggaggcaaatataatcgtgtacttttctttttcaggtgccagagacagtcggatactcatttaaatgagatctaaataattatttaaaccatccttagttttgccgggaatatcaagtaaggtacccataatactcttacacatatttttttcgatatgcatgacatccaaacaatgttgaacaagtaaacttttcaaatatggaagacgaaaaaggattgactttttttgaaaacaaccatttgttttcggatttttttttgcgtctttccatacttaaaatctactagttctacttcttagagaatttgttcccctgacaatggctaaggagtcatatctccctcttcagtaccattgaatactttcttcttccatctatcaggatgatttgtaggcaagtattgtctatgacccatataacacatcttgtatctattttccaagcgacgagcccatgtgttagtgcaacaaattgaacaacctttgtaacattttgtgcttaagcctgacaaattaaaaatcattaaaagtgcacaataacactgcttttagattgaagaattatttttcaaaatcatcataggcctgaatgtcattctcatataattctattaaatcgtcaatcaaatggttccaaatatacatcaatattatgtccgagttgttgcgggccttatatcattaaagaaagcatattaaattcctttccatcactaactagggaggaagattgtacataacaaggaagacaggtcatgaactatgacaactacttggagatatatgtggatttactgcatccgtggacacaccgagacgaatatgtcttggttcagatttgaactcaagatttatgtagtttacttttttccaagcttgggaatctacaggatgtttgagtttgccatctttcactctcttggtctcatgccaaa

SEQ ID NO: 340588 - DNA, 691 bp, Cannabis indica
tactttgggtgccaggtgggtgagccctccgtccatggctaccgaggcatgcttgtgggatcttgaccaggatggctacctgggcgaattagactgttacattcccgcccacaataaccgagccacaaaccctgagagggaaatgtgtgcctggtcagttctcatgcccagcaaggggcattgttgcctttgcacccatactttaggaatgtggcagacttcttctgcctttgtccgaccttatttactcccaaaggcattaaatatctttctaccctcttcgttctctatgcctcccagaagtgggatatgccttctccccacgaccttagctggttttttgatttgaagtccacccctaagcaaggcaggtcggggtacttctatttctctcaaccagacttcaagtggttgacgggcaccgaggataaggccattagaaaaattgggtgttttgttgatgagtatttcatggtggatggcatgggcaccacccatactcggttccagcagatcccaacatatcaccgccctcccttcactcttgctcttagagatagagctcaaaggcttgctcaactgcggagggatgaccgaaatatcatccagttgacctccgaggaaaagtttgtgaagtacgggctctatccgaaggatttcatttctaagccagtgaaggggaggaagagga

SEQ ID NO: 340589 - DNA, 457 bp, Cannabis indica
agtgacagtgtggaggtactaaaaattgtctttccagtcaccttcattagtgacacgcgttgaactgtcactaaacagatttagagtcactcattgtgtgtcactaaaaccgatttttctagtagtgtgacgacacaataaacaagaatatcaatgtgataaggatttccatgaatttataaatcaaataaacatataaatgatcacatgaaccaaatgacatattaaataagtaatgaaaataaatctgtttctttattgatgattgaatagaaaagattacattgaaataaagttttatttagggcacaaagcccaacagactctcatttgtactaacataaaacaatcagtacatttcaattaatcctaaattcagtctgtgcttttcaaatgtagttgcagtcaaaactttggtgaatggatcagctaaattgtcttcagtgtccactttctc

SEQ ID NO: 340590 - DNA, 680 bp, Cannabis indica
atatggttgttggtgaattgagcaggttttagtgcttgtaagtgagttttagccaagcttgagttttgaactcaaagcttggagctcacatggtgaattgtgtatttttgtttgaagcttggtttggatgctttaaaaatgtttagtggggtatgtagagcaggtctggaagttttgaaagagtttgggtttgttttgagcaagttatgaaattttgagtgtttcctgctcagaaccgaaattccggtacagcaacccgaattccgaatggtgttccaagattcccagaaccgaaattccgattgtagaaccgatttgccggttgggggatttttgggaaccctagtttttccccatttttatgttgtttagggtattgccatgctttttatcgatagggaacttctagtctctagtttaagtccccgggaagtgatttagcatatcacttatcagtgttgtggttgttatggtttaggagcctgtaaatcgctgtgcagttcgttccactcaggtttaccggcacacctgaattcggaaatgaggtaagattagtataacagtatgcatatgtattacatgtttagcgtgcatgttagtaagcctgttagattacataagatatgtatgttggcttcgtaccatccgactgtgtcacatcggtaaggctagagtatgac

SEQ ID NO: 340591 - DNA, 554 bp, Cannabis indica
aattcctatattttaaacatacagacacttattcatctcaaaaaaaaaaaaaaagaactcttcttggcgcagcccatacaaatgtttggcccagcttctttttgaccttacatttattcagcccaattcatttaaactaaccaatcaacctctactacaattttctgatatacacacataacaaacaaattctgaaagacaaaataagcaattgacctgcttaataaagtatcagtatgtttattaaactctaattatagtattagtgtagtttaaatttgttacatgttaaatattgtgtcaaatttagcataaaatatagcatgaattaaattttatactagagtaaatattactttttttatttactcttttgtcatccattaatacaattaatggttttttaaatttttatttatatatttaatataattttgaaatttttacatcaaaaatctaatttacacaatttattataaaaaaaacctctacacgcttacatcatcatttttacctttcctctttcttttattacaattataccacttacacat

SEQ ID NO: 340592 - DNA, 604 bp, Cannabis indica
atgatcgcaggactggtaaaagaaaggtgcgctctctgagtaggtttaggtcgcaaagaagcaagtcgcagaaggttcagcctcgtgaaagtggtaagatctgatttggtgaccctcgagaccaagtcctcgcatgaaaagggctcgttcaactgagtattgtccaccgaatcggtcccacttccttccgcatcttcttcttcctcgcctgactctcgagctggggccgcccaatcatcgtccatctcctcaacctcgacgtcaggggcatgtcttgaatggacgagataatcacgcgctgacaccgtagattcgctgtctcggatttcaatagttcctggttcagcaagctcctgcaccatcctctcaatgtctgcagaggacatcgggcctgattccgcatctccggcagttgcgatctcctcttctgagatcgaagtcgggataaaactgtcctcccgttggtcctcatctccatcaaacgcattgcctcctgagccaagcgtctggctatctggcaggtcagtcatctgaaagatagaagatcttttcagcgtggtgaatgtgcgaaaaaaaacaagtaagtgacctcactcgcatataa

SEQ ID NO: 340593 - DNA, 936 bp, Cannabis indica
aaaaaatggttaaggctgagattgaatttttgatacaaatgttacacaatctgacacttcaatcagattttttaaaagaataaaaaagacacaattggaagatcctgagctagtccaaattcgggatgaggtattggctggttggcctaaagacttttcaatcttgaataaaggaatgttactttacaaagctaaggtttgtgtgtctagtaatggggagcttaaaaaggaaatccttgatgaagctcacactacaccttatttgttgcacctaggaaccaccaagatgtatcaggatttgaaactctattattggttgtgtgggatgaaggaagatgtagtggattacatgactaaatgtttaacatgtcaataaatcaaagcttaacaccagaggccggtagggtttccgcaaccattagcacttcttgagtggaagtgggaggatattgcaatggacttcgtggttggtttgcctagaaccacatgaatgtatgactcagtatgagtcataatggaccgtttcacgaagttagcacattttctaccggtaaaaacaaccaatacagtggatcagtatgcagagctgtatgtgaaggagatagtaagtctccatggagctcctaaattcattatttcagacagggatccaaagtttatatcgaaattatgggtaagtttttagagagctacgggtacgaagctgaagttcagtacggatttttttacccccaaactgataggtaatccgagagaacaattcagattctagaaggcttattacgagcatgtgtcatggactgttcatggagtaaatacttgcctttgacagttcctacaacaataactatcaaagtacagtagggatgactccctatgaaatgttgtatggtaggaagtgtcgttctccaattcattaagacaaaactgaagaaa

SEQ ID NO: 340594 - DNA, 627 bp, Cannabis indica
tttaattattaaaatgttctttattaattaataactactttacattaatatattaatttttttaatacatactgtcctcttatttatttctttaaataattaaataaataaagtgtgatggagttgtttttaggtaattgaaatttgatagaaacgagtgtaatgatgggttttgcatttgggggagggtggattggatttgtggtgatctgatgagatgtgtgttcaaaaaagccttttccctttttatgtgtggaacacattaattgaacctttctctttgccaatctagtttcttaatagaccatcctcactaacattatcacaacatgaagttttacaaatgaatattgttactaagcatcttaatgtacctaagtattgatgtgacatattatgtatttagagatttttaatattttttaaattaaaatttacgacttaatgggatgtcatattttgtggtacttaacactttaacatttttatttagaaatagttacttttttataataattaggaaaaatttatggtgcatgagtgcactcatgcatttttgatttgtttcggtatttaagaaaaaaaaattaatttattttttatatataattatatacattgtagtta

SEQ ID NO: 340595 - DNA, 968 bp, Cannabis indica
ttttttagttttttaaaactcagcttttaaaaaactgtttttaaaattttttgccaaacgactctattagtttttaaaaaccgttttttgttttttaaaactgaaaacagtttttaagttgtaaagccaaacgatccctttaccttttttttttttttttgtttcaagggtgtggtttttttaagtaatataaatgataacatagcttaacttttacaacgggagatgaccttataaattataatgaagcttaatttgagacaataaatatctcaaacaccactacttaataactccacttaaaatatattctcaaagagtgctcaaatgcttattttggaatgtgatcatgcacaaatcattattgctcattgaacacaaatcaaaaataaactttaccaaattgtttaaaaaataaggttaaatagtatcttaatattattaagatatatttttagtaactatttagtttattgtataaacattacgaaattttctttcatgcacaatatagttcaatgattttgattaaaaaaaaactaattaatattaggaaatgttttaataatataattaaaatataaactatttacaaaaataccttaataaatctcaactataataataccttgtcatatcattaaaaaataccttaattctaaaataatatgcttagaaaaaaaattaatcacaaattcttttttttattagtttcttggatttttaaaagtaacttttttgttacttatgatgttgataagatactaattagttacttttacataaaaaatatttatttttaaattacatgatttgagatacaatttggttacctctaaaaccttatttgtagacatcttaataatcaattagttattttaagttatattgtgctatcttattatttagggtaaatactattttggaccctgtgttttgcaaaagttactgattggaccctgtatttt

SEQ ID NO: 340596 - DNA, 652 bp, Cannabis indica
ggatgtggtctccggtagtgtgtattttgcctagtagcaaagtacacacgctcttgggagtccgtcagctctgtgtactgggtgtactggggagtgtacccccttttttgacgcttctcccccgttcgggtgctgcctttggaggatcttttgctccttgagccctgggaagggcctgccaggctagcggttggagcggagtgcgagggagcttgtccatttatacccgagggatttccaaaatgagatgatgcgggcgccaagggttggccatgactatatctgggggtggtagagaactgtatgccacttattagtggagccgtggtagggactgtacccgaggacggtgctccgggcatgtaccctgctatcccggtgggatagtatcctccataggccactatctgggcctcttcaaggttgatatatttttggactctcttctggaagtcctgaaggctagcagccccctcttgttgtagttcgttccagaagggagttcctgtacggatgcctgcctggagaagcgcaagctgttgtccgtcatcaactttcttggtcttcgaggcttcctctcggaacctctttatataatttttcaaggtctcggtgggcagttgcttgatgttagtcaaggcactgacctcca

SEQ ID NO: 340597 - DNA, 597 bp, Cannabis indica
aggaacactaaaaagggatcacttgtctttaagtgtcagccctttaggtgcacaagtttctagcagatataaaatagaacatacatgatctatgccgtaggtatcttagggattagatgagagtaatttttatccttccttgattgatgtgattcttcataatggagtcgtcactagactcgttgattatcgtgtaatcgccgtaaaagaggcttacaccatctgtcaaatccttttatgggtgttctattacatttcccccatgccattaaatgtgaaatgactgttcgaacaggttctccttctcccagagatgcattgttgtatttctagctctaggagagtaaaggcatgtcttatgctcctctccgggggctcactccttgaaatgcaccttctatctacatatgacttaacaaagtctcttatttaacaaataaaccctagaatctcttttcttcacaattaagccctagcttagtaaaaattcataaactagacatagtctagttatagaattataattgatcaattaaaataaattgactgggtcttacaagcagtttgtctcaactagtatggggaccatgggcctat

SEQ ID NO: 340598 - DNA, 775 bp, Cannabis indica
attaaacttaccataataatatagaaagttttctcatagattgggtttgtaagtcttaacaagattataaacttcttaactcaacttatcaactgaataggaagaagagaaattggataattgcattaggaagtaaaataaaggatagttggagatcataataattcttgttcttattattgttattttattaaattttaatctttgtcttgtcatatttactttctgtccaacaacttttaataatcaaatagaactaaagaattaattgattggtaattgataatcaatcctcatgggaacgatactttatttattattatattacttatttcaattgtgtatacttgcatatgatatggcggttcgaacccagacccaaacctgaacccgaaccaagacccaaacctagacctggatttagaccttggccctaaactcagatctcggaccccgacccggccctagaccccgacagatcagacctggaccttgaacttggacctcagctccagacctagacccagaccccaaaccctgaaactgttcccgactcttgactctggccctagacccaaatccctaccttgatcttagaccccgaccttgtgcctgacccggaccccaaaccctcacactaaccccatcccctaaacccgaacccagccccgaccctggacacgaccccagacctcatccctagaccctaattaaataaaatcaacagataaaaatcaaatttacagaacacacttttatttttattttttaaatt

SEQ ID NO: 340599 - DNA, 915 bp, Cannabis indica
aatttgaaatgtttaaaaaatttcatgaatttctagcaatgttgaaaaaagaaacattaaggtaagtggttaataaagatcttgtgaactgataggggtggagaaatatttggtgaataagcagttcaatgaccattaagttgaacttcgaattgtatccaagcttacctccctagaaatttagattgcatattgatgaaagtaaaaggtctatgattagttactagtaattgcctaagtccttctaaggaaatactgtagtgatagaaaatttcagaaatatggaatggttgtgtaaaccatttcagattcatgggtgtcctaattttgaacttaagaaaagttagaactgttaactaaggtttgcatatttgatagctattctaagtgattaggggtggaccatcctatggtcattaagataagaaagtgttgtttgaacaaatactacttctctaagaatatgactaagtctgaaaacaaagtagcaaagtagaggagatatttttatcttgattccaaattgttctatcagcttattctctataagatggtcccagtgcctttgttgtcctggtacaacctatgaggtcaataccacttatgttcttagacagatagtcacggtaccttatcgtagtgggagggtttgaaggaactcaccctattatgacttacaagacactcgtgattaaatctattgttaatttaaacaggtattggatagtcagaataaggaactaagaagcaaagccaagagaattatggttaaaaccattcatatggaataaccacaagttttctattataaggacatgaaatgaaattttgataattaagtctattcaatggactcaacaaaactccatgttcttagtattacaagtttgagtttatctaaacctatggcttgtg

SEQ ID NO: 340600 - DNA, 963 bp, Cannabis indica
catggctgagcttgccatactctagaaggacattgctcaagtctcccggagacaaaaaggagatgactccgactctgactgtgaagaccggaaaccatgtgctaggcacatcttggaagcggagctccccaaaaatttaagatgcccgaaatggcagtttataccgggaactcggaccctagcgatcacctgtcacggttcaaccgagtcatgacagtcatgagagtcagcaatgacgccaagtgcttatgcttcccgctaacattgagcgggtccgcgaaagaatggttcaagaaactggagccaggatccgtagactgctggaataagctgcaaactagcttccggagacagtttgtcgccgcgaggaaagttaatctggaggttagcgccttgactaacatcaagcagctgcttacggaaacattgaagaatttcataaagagggttaaggaagaagccttaaaaaccaacaaagttgatgacggacaacagcttgcccttcttcaagcagggattcgtacagggactccgttctggaacgagttacaacaacaaggagcctccaaccttcaagatttccaaaaaagagtccaaaaatacattaacctagaagaggccctgatagtggcctataggggatactgccctactgggatagcggggtatgtacacggagctcagctcccaggaaccttaccagcagccgctccaccgatgagcggcatacaattttctgctatcccaggatatattcagggtcaagccttagcccctgcatcttctcattttgggaacccttctgggataagtggacaagtcccgtctcactccgctccgaccgcaagcttatcaggtccctctcaaggttctcagagcaagaggtcctcaaaaggcagcaaccggacggaggataagcggcagaaaagggggtacatgttggaatttattttaccaggatct

SEQ ID NO: 340601 - DNA, 539 bp, Cannabis indica
tagtttcttcctccccaattataaccctattctctgtatcagaacttcaaagaactttgatgcttagaaaatctagaaagtatcgttgattgtaatccatttattgtattgtataaagttctatgatcagggaatcaacaagatatatagatgctcaccataagcttttaatttttaccatatctagaattgtcaaaagctgttagttagttttcagttagttggttgtttgttgtagctgttatagctgttatagcagttagagtttgttactgccagctgtaattgttagttgtcctctctttctgttattagcagctatataaagcttgctcttctgtattttcattcgtgagattaatcaaataaagcagctccattttctctctcttttctctcattttctctctgtttcctctgtgttttctctgctggttttaccagctaatatggtatcaaagctgaatctgtggtgattcttcttcttcttcttcttttttgttgcttccgcttcttgtttgttaatggcgagaggagga

SEQ ID NO: 340602 - DNA, 580 bp, Cannabis indica
cttaattcattgccagaaacttatagataagtaaaaacaacaattaagtatggaagaacctctatcactcttgatgaggtcatctctggcttaaaatcaaaggacttagagatgaagacagaaagaaatggtggctctaatggggaactaaatctgagtagaggaagacctactcaaaggaagccttggcatgggaaaggaaggaatcaaaatcatagcagaggaccaaacaaagggcaaagcaacaaaggaagacctaactctaaagggccacaagacacagagggggtgttacaattgtgggaagcctggacacttcaagaaagactgttatttcttgaacaaaaacagaaagaacaaattcaatgggcaaatatgtgactataattcagaatccataaaccctaaacatagaacagatcaccaaaatgcaaatttaagtgactgttatgaagatggggaagtttatgttgcaggatcatcttttaaagatgattggatacttgactctggttgtacttttcatatgactaataatagatctattttgactgatgtcagggactctactaaaggaaaa

SEQ ID NO: 340603 - DNA, 748 bp, Cannabis indica
atatgcaattgacagatgagtttggacaacgtgtgcaaattctgtacaaagaatctcgagaggaaaataataatgtatataagaccaatgaagagctaatgatgtttgttaaaggtaccaaaccaattagggggagaatttggtcaaatgtcaattacttctatgtgccttggaatgatgatacacactggatatgttagtggtagttgacagacatagctggacaatattgatttatgactcgatttcagatcactggatctctatagaggcaatgaaaaaaggctgtggagccacttgcaacatattttccttttttacttaaaaatagttgccatattgagagcctccatcatcagtgtagtgatctcatgaatataaaagtagcacctacaaatactgttcttctgaacaagagaacgtaagttttatttaatatgtccacctttaaatccaaactgttaatattaatgctaacgtagttaaatttatctttataacggagattgtggtatattcatccttaagacaatggaaatacacattgctggtaagtgcaacaagtcagctacaatgttgctcaacaacgacaacatagatacaatgttacactatgcgaccatcatggtcttttatgttcttcaacaaactttaacgaacttaaatttgctttgaacgaccttgaatttatactatgcgaccatcatggtcttttatgttcttcaacaaattttaaagaacttgaatt

SEQ ID NO: 340604 - DNA, 453 bp, Cannabis indica
acactataatctttaaccaacccatatgttctggaacttaaaaagaattcatacattatatacctataatcatgaaataaatcatgtgaaccatgcaacataaaatgttatttctggtctttattaataagtaaatctgattatatgaaatgagttttatttagggcataaaacccaacatgttgttccatctatccaaccgcactacaatatattacagaacttacttcactatggataaatatttaagatattcaaactcttctaagcattcataattaattaatagaaaaagttaataaatgtatacctctagctagctaaaaacgatcaataccaaataagtcgaattcttacaaattagcagcctcacaacctacaatttaaagaaatactataaaattaagattttaattaattaattaactacttactagttatataatttatgag

SEQ ID NO: 340605 - DNA, 497 bp, Cannabis indica
gatctcatgagtataaaagtagctcctgcaaatactgttcctctgaacaagagaacgtaagttttatttaatatgtctgcctttaatccaaactgttaatattaatgctaacatagttaaatttgtctttatagcagagattgtggtatattcatgcttaagacaatggaaatgcacattgctggtaagtccaacgagtcagctacaatgctgctcaacgataacaacatagatacattcaggaaggcatatgcagttcaattatatgtgggtagtgcagatccttaattaaccatgtccttgttcataattatgaattttgtaattttgtggataaacttgaatttactctgaacgaccacaaacgaccttgaatttatactatgcaaccatcatgatcttttatgttcttcaacaaactttaaagaacttgaatttgctctgaacgaccataaacgaccttgaatttatactatgcgaccatcatggtcttttat

SEQ ID NO: 340606 - DNA, 855 bp, Cannabis indica
gttatccggttgaattggtagggactagcaataagctagttgggggttgtgttaaatgccaaaatattacatatttcatagtataaaaatacaaagttaattaaattttaaaataatattttcataaaattaatgttacatatttttacattgacaatattttatttagatttaatttgtttgtgtttgattaagaaaataacaatttgtgaaaagaaaagaaaagaaaaagaaaaatggtaaaaatggcattttggaatgtaattcagcccaacaaaaggagcccagccagcagcctagccggccccctttctcttcaccaagaaacagcctcgccacatggcaggctgtggttcgctcgccagaaggaaaacaggagcagcagctccctttgtcccctcacacgcctcacgcgggagtggcacgcacggcccctcctgggacttttgtttgctccactggccagccacgcaagtggctcttctcttggtccgagtcccttaaagtggcttcaaccactttccacgtggtattctctcatctcgccacgtgtctacatgcaaccaatgagaggatgatacgtggcaggtccggttcaactatagggtaattgcatttttactcacatcctaataagtttgattgcacattagtccttttacccttctataaataaaagtttaggattttagaattcagtacagtttcaaacagaaaaattcagagaaaacactcaaagcgctcagtgttagtttaccgctttaataagttaattttcttatgggttttcaagttccttattattaagaaggacgattaaacatagtctattaattaagtatttatttttatttt

SEQ ID NO: 340607 - DNA, 716 bp, Cannabis indica
ggtgtaaaatgcatctcgaagatgatttgttccagattgtcagaagtgcttcctaagttagtggacagtaatcaaggagcgtttattaaagatagatcgttggctcagaacattatgatctttcaggatttattgaaagggtactcaaggaaaaatgtctctgctaggtgcatcatgaaaatagatctaagcaaggcctatgatacggttgattggaattttgtgaatgatttgctgagaatgctctgcttcccttctcgcttcatcagttggattatgacttgtctgaagggcaccaactaccatatccttttaaacggcagaatccagggtagcttcaaaggaaagaaagggcttcgccaaggagatccgatgtccccgttattatttgtaatgatcatggactatctcacaaggctgcttcggcattactcgcatgaaaaaggttttggctttcaccctatgtgtaagactcttcgcttgattaatctgtgctttgcagatgatctggttatcttttgcaagggaaatcttaattcgataaggctcacttatgaagcttttgagaagttttgtaatgccacgggtttgtcagccaacacttcaaaatctcacatttactttggaggtgttaaaacagagactaaatccaagattttggagtgtgtgaagatagaagaagggggatttcccctcaagtaccttggggtcaacct

SEQ ID NO: 340608 - DNA, 477 bp, Cannabis indica
tatgaagcttttgagaagttttgtaatgccacgggtttgtcagccaacacttcaaaatctcacatttactttggaggtgttaaaacagagactaaatccaagattttggagtgtgtgaagatagaagaagggggatttcccctcaagtaccttggggtcaaccttaggcctactaaatggaaggctgaagactgtggtgttatcatagataagcttaacaagaaccttaattgttgggctagtagaaatctctctttcgcgggtcgtgctcaattaattcactcggtcttgcttgggataagaaattattggatgggaatttttatcattccctctaagataacagcagctattgacaagagttgtcgagactttttgtggggttcttcgggaaatagaagtaaattccaccgagcttcttgggagaaggtgtgtcttccaaaaaaccttggtggagttggttttcgagaggggaag

SEQ ID NO: 340609 - DNA, 841 bp, Cannabis indica
cattgtttgtcttacatggttaatatttcaatgggaccttgagacactagacactgtcccctatatgtatggtcttacatcaatcatttaagaccgtacagatctcgaaagataaatattttgtaagttttcttttctattagactctcccctatcgtgcctacttagaaataaatttacaaatatgaaataatcgtagaagctcataaaataagaataacctcgactctcgcctaccgaaacaacgttggattcttatctgatcgaataaaaggttgctaaatgttgttcattttagatgacctgactactctattcaaatgatggtatatttgactctcgcctaccgagacactgtatatctgttggttggaaacattagaaattatttaagatataattattttgtattttcacaagtctttcttacttgctacatgcttaataattttttaatagtatatgaattaatattgaaccttcgttttgttttctgttattataaaattgcttagaaagtatatcatttgataaaaaggattataaaacatatgcttatgatatcactctattttcttctataaaaatgagtggcgcagatgactatatacaaaatattctatcctaaaatgaaatgaatcctcgatctttgagaatctcctacttgtatatgcttactaaaggcaacttaaacttagagttagataagtagtggtggtccaagaaagaatcattactaaagaaatatttcgttaaatttaagtctttgagtttatattttagattctaaatagatattttcaatttcagtttccagaatacatttgcaatacagtataac

SEQ ID NO: 340610 - DNA, 733 bp, Cannabis indica
caaaactaaaactagtcatactaaccttacaattaaaactagcttgtcaaggatgtcttccaaccatgattcagttgaggactaagcgtgtggaggtgtctatggtttgtcctgtttgcaacagtcaggaagagtcgatcttccatgctcttgttggctgtccagttgctgcactttgttggaacagggttgggatcggcacagcagcaccacaacataacagtttttttgactggtgtgcttcaaaatttctggtttgtgatgcagatcagaaaaagcttctggttgctctttgttggtcaatctggaatgcacggaatgacaaggtttggaacaacaaaacgtcaagtgtggaaagtatagtattttcggctcaatcttaccttaatcaatggctaactgctcatagttctaatgttattttcacgagtcctggtcttattccaggtgacggagctgaacagtggcagccaccacatggagataacattaaggttaatgtcgatgctgctttattttccaacacaactcaatttgaaattggttttgtgattcgtaatgcacaaggaattttcattgaacgagttaccaagctttttaatggctcggccacaccagaatttgtgaaagcattgggtgtaaaggaagctttgagttggattaaaagaaatcaaccatgtcaagctattcttgagaccgactgcttagtttttatccaagccttgcgtagttc

SEQ ID NO: 340611 - DNA, 721 bp, Cannabis indica
atccattatttcatcccaaagaactagtaagtaagagattacacttttctttattttttcctatgtgcctacctcattgttcacatttgtttctcaagaagaaattatcacatttatttttcttttgtttttttttcttcttctttctttttacaatagaggcacatcacataacaactattgtccaatctcttactttcaaaattgttccccacttatacacttcattccccccaaacttgattaaaagcttatggcataataaggtatgttgagaatgaaaatagttaaagataacaaattaagcttagttaagtggtgaaattttttgaaataggctccgactcaactttgggtatactaggataaaactttgtaggtaagcttgaaaggctcaatcgatccaaagaaaatctgcctaaatcattttccaaataaaaatcaacaagaatttggcttcaagagagtatgtcaaacaaattctattccatgtcaagccaacattccacaatccaaatagaacaaaagtgatacgcgtcaaaaataaatgttttacatctaaatgaacaaccttctaatacacatccaatttaattcaaaaagttatgactcaagcacacggctaagatttcaatccattgcacaagtgaataacagtggttcaatcaatcttcgaacttagctatcaacacacgacactaaagatattaaaaactaacta

SEQ ID NO: 340612 - DNA, 1074 bp, Cannabis indica
ttaaaaacaagatagagtagtatacaagattgcccgagcaagactcgaaagtcagtcatcacctgacaagtcttttattttagacataatatcgttcccttttccaagcacgggagaaggtcaactaggctccctaatgcaaattgcatgttcaataggcctggccttggctggaagtttcttcctccttttgagcggagtcacctgctcttcctcggcttcatcttcaggattcaagggctcctgagcatattgcttggcccttgcacctcctttcaacttagcctcgtgcttcagttgaatcagctgattctccggaggagctcgttcagcccgtccagcaccagatttcttcttcctccccttcaatgacttaggaatgaaatcctttggatagagcccgtacttcacacagttatcctcagaggtcaattggatgatatttcagtcttccatcggcagctgagcaagcttttcagctctatccctaagagtaagagtaacggtagggcggtgatatgttggaatctactggaaccgagtatgggtgatgcccacgccgtccaccatgaagtactcatcaataaaatgcccaattttgctgatggtagaatccccggtgcccgtcaaccaattgaaaactggttgagagaaatagaagtacctcgacctgccttgcttaggggtggacgtcaaatcaaagaaacatctaacctcgtggggagaaggcatatcccacttctgggaggcatagaggaggaaaagggcagacaaatacttaattcccttgggagtgaactgggtcgggcagaggcggaagaagtctgccacattcttaaagtactggtgcaacggcaacaatgccccttgctgggcatgagcaccccaccaggcgtatatccccctttcacgatttatggctcggttattgtgggatggaatgtaacagtccaattcacccaggtagccaccctaatcgagagcccgcaggcgcgcctctgtaaccctggacgaagggctcacccacctggaatccagggtaccttgccttctgtgaggaaccgcagcggtaag

SEQ ID NO: 340613 - DNA, 542 bp, Cannabis indica
atactaatcttacctcatttccgaattcaggtgtgccaggcaaccttcgtggaacaattgctcggtgtattacaggctgctaaatcacatcattaataatataagtaagtgacacgctaaatcacttttcggggacttcaacttgaaactaaaagtttccctatcgataaataacatgcaaataccctaaacatcgcaaaaatgggaaaaactagggttcccaaatctgccccaaccaatagaccggttaccaaccagaattctggttctgcggggtttcctggggaccaaccagaattctggttcctataggtccctcgaaactggaattctggttcaatgcaggaaaatttcaaaaattcactacaacttcaaatcaaccccaaacaccaccataacctccacacctgctatgtagaccacatagaacatattcaaggcaataaaacacaacttcaagctcagaaacaagttcaccattaaagctccaagtttgagttctaaaactcaaaaattggttaactcttctatcagccacaaaa

SEQ ID NO: 340614 - DNA, 788 bp, Cannabis indica
aaaataatttccaacaatcccctggtatgaatttatttgttctcaatataactaatgaacaaatcggtgttaatttaacagaaagacctattggtgtgaagaaagcaaaagaaaaagtcaaaagtgaagaacagtataaaaaactaatggaacagagtgaatgacttgctgaagcattaagaaagagtaactgtgatagaaatgaaattcaaaaagaaaaaataggattcaaaagcaaaaaaatgatatggctacaatgagagaagaaaataaaattatattcatgaatttaaactctatatccgatctagagagtcgtgagtatattcaatgtgaaaaaaaaaagaatactaaaaaagagagcacagacatctcaacttgaagaataaggtgaaggatctgaatatcaggattctcaataccgagtatctcaacatcaatgaactgaagatgcaacatctttaggtgaatgatctgaaaatccatcaaaagattatagtcaattttataattatcttggcggaactggaaatgactttctgcatttttagatttagttaatttttttttctaagttatatgttgctttgttttggtgtcatgttagcgtgtttcattatcatcttagttttattaactttgtttaacctctttgtttgttttgtttccttaagtgtatctgaatttaattttatatgtttgcttaaatgtgtaatgttaaatgtataatgttttaatttttttttttattgagttacttttaattaatggatgtagtatatggtttt

SEQ ID NO: 340615 - DNA, 713 bp, Cannabis indica
cgatttagcatgcatctcatcaaactcattatattgcaagaaaaattctcaaaacttacagagatttcaacgagcaatggcgcgcgagattgggttgctgagatggggaaatcgattgtgggcttctggtctgggcaaacgaggttctggagagaaaaaagggcgaagtcgggtctggggaaatcggagcaagggggcggagaggagctgggttcgactcggctggagcgaggttcgggtttgctgggggtcgaatggtggtgggcggagtcgaaatggaggtgaacggagaagggggtcgactggagaggagcggttcgcctggaaaaatggaggacgaaggtggctcgaaatggaggttgacggaggtggtcgatttggggggctgactgcgttcggttgtgaggttcgaaggagatgcgatggaggggggggggtggtcggtttctggaggtcgaaggtgggggcgggggtgggtttttttcctggcagaaggaagaatggtggtggtgatggaggttgaaggagatgatagggctgggtgggattcgggtagggtagaaaaaaaaaatttgaaattaaatttttttttatgtaataatatataatataataaatataatattaataaaaaaaaattctgtttttttttttaataataatataaatatatataagtaaaataggagtaatatgtaatagatggacctttc

SEQ ID NO: 340616 - DNA, 672 bp, Cannabis indica
catgaaatacaatgttgaagttgaagagtacaatatatagcttcaattattataccactaactttaccttgataacttttggccattttttcaggtgccaaccatggacaattgcgttgactggggcttctgcaattgcctgtagctggctgatcttacactcagtattagtcactgtagttgtatcattactgatatgcgcatggtggtacatatttttgtactcttatccaaaggtacatacatagtctattttgcttgctttccccctctcttgtcctataccttaatgaaatttgcgatgtattcattgaagatttcattattgtgttaggcatacgaggacatgattgctgaaagaaggaagagggtgacaaacggtgttgaagatacgtttggattgaggaagagtcagtgatactaaaaacaaaatagacatgagtttctttcctgtcttttgtaaagattttatgtaggtctatatattaattgtatgatttcattgttgaaatttagaccaaggtgtttgccttcaaatgaatttgaattccaaggaaaaaaattgattacatttcatgaaaaagaaaattacaggcattgcgtggttaataactttacaagtattgattaggggtgttcatataattcgtaattcgtggttctaaaccccaa

SEQ ID NO: 340617 - DNA, 518 bp, Cannabis indica
ttataaatgcaatgggagttggctagaagaagaggtctatgcatgaaactcctaggagaaggctttccaagaattgaaccttcccggccgtaacttgaaataccactgatgtgcggcttctgaaagtgtagcaggaaatactctgcaccgcacatctcctcgtaccccttgcaaatccatttgcatttcaaaatacttaagttgagacaagggatcttctttccctgtgtacatcttccaggtcagtattttgaacttgaggggtaggttaaggacattgatctcagagtgaaggatgatccgcgtgcacggtccaacttgagatcagcgagtttttgggcggcgaggccttggaacatattttttaattcatccaactgtgcttgcacagatgggtgaactagttcagcctcttgtccgacctgtgtcacatcaagatctcttagagttgggtcatggattcgggtaccgggttgggtgaacatattgttcgtccagacccccccttctattcaaat

SEQ ID NO: 340618 - DNA, 850 bp, Cannabis indica
taataaactcattgattcgcaacaagctgcacaattaagttaaaattatgttaacacgcctaaactagtagggtgttacaatctggagctcctttctggaagaagactagcttttccaagaaactctttccaaagagaacaagagacttccgggaactcccttccaaacaacatctatcattgcacgagactcacttcagatggacaagctaagcttctgagatcacccttccggatgacgtctaactttttataacaagaacaacttttgaataccttacatttagaggaactataacacaatatctaagcgctagaagttaactgtgataagcatcaagtaatatatttatttattttattaacatatagcaatattaagaacaaaataaactttattcaaacaacagaaaatcatataaataaatttaagaagggccgattagtttagttttaatttagggataattacataaaataacattttttgtaagaaaaattatatttttacgtttaaaattttttcttacatttttacggtttccataaaaacaacacgaaaataataagaaaactacttaaaagtaacatgtaaataatatcaaaacaacaataaaaaacaacatacagataacaaaaaatcaataacaaattaacatgaatacaacataaaaaaaatcgtattttttataaataaaaatcaaaaaaaatcgtaaaaatgtttaaaattacgtaaaaccgtatttttgtaaattttttgttatttttgtatatttgtgaaataatcccttttatttatgatttcagtaatcaagggctctagattgaaatgggtcttaagaaaaaaaaa

SEQ ID NO: 340619 - DNA, 735 bp, Cannabis indica
gcgcctccgagagaatgcaccaccaaaggatcttatgtcactcaagtactttgctattccataacttgttccacagcattgaggccaccacacaatggccggctccttcctacgcttgagttaggtaagctgatttacttgtgaatctctcgttagactctaaggtccaacctcatttatcctcctcctgccctgaaggattgccccctttcaagatagcagagacagtgtctttgtcaaacagattatttagtttagaaatgtcccaagaaccagaattcgtgagaagatcagccacacagttcaaactaggcggaatttctctcattggtttcagaatgaaacctttcaaatgaggaatccaaagatccctccaaatgtaagtgtctctaccatgacccacgaacttacaagccccttttctcaggatcgccttagctttgaccacattcttccagaaccacaagtcagaatctttatatttgcagtttagaaaatcttttcctcgaagatatttgacctctagtaatttgcaacataaagattgacaaccatttagaatcttccatccccacttagccaggaaggccaagttcatttctttcgttttttgaaaaccaagacctccaaaagactttggaagacaaagtttatcccaagctcttagatgcaggccatggtttcctttctcaaaaccccactaaaaatccctgacaagaccatctatccttttaa

SEQ ID NO: 340620 - DNA, 993 bp, Cannabis indica
caatctcgaataatgaaatgttgttgctcgggtttgtgttcctaatattgataagcttaagaaggaaatccttgatgaagcccacaccaaaccttattcattacatcggggaatcaccaagatgtaccaggatcataaaccctacttttggtggtatgggaagaaaagatatatggtagagtatgtctaaatgcttaaccagccagcaaatcaaagctaaacattagaggccggcaaggttattgcaacccttagcccttcttgagtggaagtgggaggacattccaatggatttcgttattggtttgccaagaaccacgagaaagtatgattcagtatgggtcatagtggaccgattcaaaaagatagcacatttcttgccagttaagattacttacacagtggattagtacgctgaactatattaaaaagagatagttcgtctccatggagctcctaaatctattgtttcagatagggatccaaactttacatcgaaattttgggtgagtcatcagagggctatgggtaccgaactgatgtttactatagctttccaccctcagattgataggcaattggagagaactattcagatactggaagatttattacgagcctgtgtcatggactttgagggttcgtggagtaagtactttcctttaattgaattctcctacaacaacagttaccaaagtacaatggggatggctccctatgagatgttgtatggtaggaaatatgttccccaattcattgggacgaaattggagaaaggaagtacttaggcctagaattgttcaggggaccaatgaagctatagacaagatcaaggctcggatgcttacttcccaaagaaggcagaaacgttatgctaattcgaagcgtaaagacattacatttcaggcaggagaacctgttttcctgcacgtttctccagtgaagggtattagacactttgggaagaggggtaagttaagccctaggttcatt

SEQ ID NO: 340621 - DNA, 673 bp, Cannabis indica
tgcatctcttgaaactggaaagtggcacagaccaccctgtcatttccggtgacacccataaagttcaggattctagtaattactgatagccattgctcgactttcatgacatcaggacctcccagaaaaactggaggtgcttgcttgcggaacctttcatacaggggttccatccgattcactgccaccactggttcggcctgaacagtaggggcaggtgccactggaatttctagagcaggcattgcaggagcaccctgctgacgtaaccgttgaatttcattatcctgttcctcaattcgggcttgcattgctgcaaacctattttcccaattttgggcatcctgagcaccttgggcagcttgggcaacctgtggcgggttaacgtcacctcggccacgtgccctgcccctgagacctctacctcggccacggacatttgggggattttgagctccctgaccaacattagatccaaccgaattgccctggctcctggtatttcgcctggcgtccatactagtctgaacagcctgcgtaaccaagagctagtctggtcagattgtgatcaaagagaaacttactaatgccgcttatttgaaaatagaaaataaaataaataaaaaaacaatgcgcctattctactatcaggctactaacatgcttcctaaca

SEQ ID NO: 340622 - DNA, 505 bp, Cannabis indica
tatattaatgatagtttaattattttatgatgatttcaaaaaaaaaattgtgatagttcaaactgcataaagcgcagaaaccgcaccgcaccgcatcattttttgcggtgcagtttttgcagttttttagtatcgcggtgcgggtgcggtttggaaaattggaaaaatcgcatgtgcgagttggtttgaaaaaatggttaaaaactgcaccacccgcactgcgaacacccctaatagtggcaggtttatgtggcacttaacagccaaaaattaacaaaaagagtgttgaccaaaacgattgtggagtttggggaatttagccctaattttttaagtaagggggttaatttgtaacggacctcaaagtatagaaactttggccgcaaattactcttaaaagaataataaaaagaaaaataaaataaaataaaataatggtgacaaaatagtatcaaatgctaatatgcataattttatactgtacacagtatacaacatataaaaa

SEQ ID NO: 340623 - DNA, 739 bp, Cannabis indica
aagaaacgcaaggcaatatcaggcttctgacgaagctcgggtgatcttagaacataggcgacaaaattgggagacagtttaatcaagaatgttttacagaaagagttcaaattgggttccatattcgaagacccatctaataaatttagaatatgggcaacccatggagttggttcgaggtctcgtgagctcgagactacttcagatacatcattgagaggttctacccattcgggagggggaagagaggaggagttggtgaaaacccacctggagttcgagttgaaagtggacgttggcaccgaatttgagggtcctgaggaagagcagccgccatttttgtacggaatagaagaggttgttggaagggtaggatgagttgcagtgaaagagaggcgaaatctgtataaggttcttctcatcagagctttgagtattgtgtgattgtgtttaaaattattaccagttgtatatttgaataactttcatatagtcataatttcttttgaaaaactcaaatttgaaactttataagacatctctaacattatatattaaagagaaatgctattggtcaattactccaattaagtattgagtcacacataatttaatgtaataacttttagatgatatcgctagccaattgcaagataacacgtttagaaggttgttgcaagatcataaactatcataaaacgataatacaactataaggcaactatttgcacttgcatac

SEQ ID NO: 340624 - DNA, 769 bp, Cannabis indica
tatgtagacatgccacattatgtaggcaaaaattaggataacacattcgatccacactaagtgtggttttatactttaaatccaatccaattcgcacaataactcaaatccaatccaatccaatatgcaaaaatatgattggatcaattattttaaatttgctactttttattattgaattatttaatagttattgaaaaatatttttctcacataactaacaacaaaaataaaataaattattgttattttatgtctctaataataaaataaaataaataaataaaaaatttaaaaggaaaaaaattaaattgtatgtaaaaaaaaatgcttaattttgttttacaatatattctccttacatattgtaagaatcaaatatacatttgatctattaagttttaaaatatataagtatcataagtattagatttttaaattattacttttttatattaaaatattaattgtatatacaatttttaaaaatatatatataaacatgtgtgaattaaatttgatcggttacttctatatgtcgatccaatctaatctgcaagattggattgagtattttatgaacacacctacgattatgtgtcatatttttagacttgtcatgttgtgttgtgttgtgtttaagctttatattttttttaatattgttattaagcacattaaaatgtccaatactatattgatatgatacgttgtgagcaggcccggtcctgggcataggcgggctaggcctgtgcctagggcccaccta

SEQ ID NO: 340625 - DNA, 639 bp, Cannabis indica
ttacgctgtattttgttccccacctcgcttgttggagcagcgagtagctagtttaacaagtttactcattattcaataacctcttgggagcagctgtccaaggatttcaagaaacagttccagtctgctagggatagatgaactgaagcgaccttgctaaccaatataaagcagcagcccagtgagacacttaagacgtaattaagtcattttagcatggctgcggctagggttaggaatttggatgacaacacacaacttacagcccttcaagcggggatctctactgatccattgaccgcagagggtgagttgtgggatgacttagaaggtcatccagtaagaagcatcactgagttcaatgaaagggctaaggtattcattcagaaggaagaagcccgaaaagaaatgaatttgttgaaaacaagctcaagaagcaaactgtaataccctagagttgagaagtggattagcaaaaccctaattagataattatgcataatggaggaattatattattatatagttcaatatatgagaattaatttgattaattatatgttaagatcccgttggtgagccaggggcattttagtaattttgacctgagaagggtaaaatgatgaaattaatttaatt

SEQ ID NO: 340626 - DNA, 812 bp, Cannabis indica
ctattttatcatcttgattaaattttttgttgttaattttagtttcttgatactctttgttttgtttttcaatcataaaattattggtttacaaatagaatcataaatttaatctagtggtattcagtccaattccttgtggttcgacctcacctgtgtaagtttactacttgattacgtgcacttgcgtattgttcatatttttcataacaagtttttggcgccgtttctggagaattgtttaaaaattgatattgcataagattagattaaattctactttggttagttcttcctactgattgctaacttgtttctttcaacattgtcttaatctatctcaggaattgaaggtgtatgcgacgtcaaggacaaagtgtaatactgccggttgatcctaaaattgagaagacctgtagaagaaatggaagaaacgaaagataagaaagagtttcagcaagtgctgaaacagaagaagttatgtctgataatgctaatggcggcaacaacggtaataacggaggtgccattgaagaccaggcaaacggtcgtagtctgagaaactacattctcccaacactaacggggattaagtcttgtataagaccacccaccgtggaggccaacaactttgaaataaagccagccatactccagatggtgcagtcttcagtctaatttcgtggactcccctctgaacaccccaatttgcacttgtctaatttcatggagttctgtcagactttcaaggtaaatggagtcagtgatgatgccatccgcttgagactattcccattctcgctgagagagcg

SEQ ID NO: 340627 - DNA, 1009 bp, Cannabis indica
gtggcgtagacctacgtgttgcgctcaaaacgctaaatacaataaggccttagaatagttcatctcgattcttgttaccgtgtccaacctgattatgccttgaatgcataacccttaatctcaacatatatatatttatcacataattaatggtgccactgcactatttgtctatttgctatagacctgcgtgttacgctcacacacctatatatgtttatgtggcaagacctacgtgttgctctcacacgtctatatatgtctatgtggcatagacctacgtattacgctcacacgtctatttacaataaggccttagtaaggtttatctcggttataattaccgagtctaacctggttatgcattgctcgcataaccctattcatatatatttacgtaatccatacattacgttctttcagtggtttatcctgataatatatacaagatctaaccaagttatgtcttatacacataactcttgatatatatacatacattcaatatacactataatatataaagtcttagggtaataaccctaacttgcataccaaatagtctctcatataacatattagtgcatgctcaaaataacacttatagagattaataactctaattcatgctttcacttgattagcaatattattgtacattattgctttcttaccttcatataaattctagggtaataatactagactgcattactatcaaactcaaggtactaatttaccgagtctaactcaattatgccttggcgtataattctttattacaatatatttaacatggcgtagcattttcacattaataattactagggtaataaccctaggccattaaacggctcactttaggctaataaccctaatgtcagtttctaatttatcagcaatataatattcaatataagcaccaccttgcatatctctacgtgaaactactgtcttacctgttgtctcgcaaaggcagagattccaaatccccgggtgctcctgacca

SEQ ID NO: 340628 - DNA, 718 bp, Cannabis indica
tgatgaacctggaacaaagaccgtcaagaactcaaaagaggaaagttactctataatgttcacagaagaagatgcacgaggggttcactttccccacaaggacccacttgtgttggttgttcaactggccaacgctagggtccatcgagtactcgtagataacgaaagttcagttgacctactctatcgaatcgccctcacacgcctagcacgcacgtgcccagcccactcctgcacaccagcccgcgcctgtgcatgcccgacctacacccgcacccgtgttagcccgcacccatgcacgcacacactcacgtctataaggttcatacttttgacagattatattaatagtgattttagtcttatctgtggtgttcatctattgtaactacatgtgaatattttgttagtgtccacatcagtctgttatgtatttaataattgtcataaaatgttgttactgttggaaattattttaccaggatcttagatctactcacaagtatgttgattaacaccctaaatatgaacttctaaaacgattataaattaaacacatataaagtctgagaaaccttacattgggtgcagcggaataatatgtctccttccattcagatctctaacccttgtatcctttttgtcgcagagtattattaagatctgaacctggatctctttctctccttcctttagtgttgaatctccttcttgttga

SEQ ID NO: 340629 - DNA, 672 bp, Cannabis indica
tatatgggctttctctgctactccagcatttttaaggcctgcagaagcataccttgatcgatattcccaactaggggagtagtgacttgcgttgccgcaggcgttgttactattgcaatgatgtttgctgggatattaaccccagtagtcgcagctagtgcggtaggcagattgatgcaattatttacagcctgatcgcccattcggggatcacagggctcttccacatcacgaggcgcctgggagcgcgccctgaaaacaacattaaggtgatcgcgtagatcgcccctgtgaacctgatatcgtcctccttgcggtgtttccacaaagcatgacatagtgtacctgctgggtgtgcaaccatgcgaggatgaggatgcggatgcaacgtcgttgtcttgcgactgaggtctgttgcgaggattgcatcattcagggtcttccttagtatgtgcctcctgattggggtatcttgcagattggtctctcgatgttggttggttcaagtcgagtcctttcgggttggcccttcgttccctgcgagtacgattattacgacgtctagagttagttacttgaggattttccatgcgagtagcgggtactcgaggaggacgtcgagccttgttttgtccatccacctcagcctgtaaagcgcgtagtgttgggttt

SEQ ID NO: 340630 - DNA, 509 bp, Cannabis indica
aaccctagtttcttcctttgatatattttctagttaaagaagggttttgatgtatggttttgggaattatgaaagtgtggcaacaattggtgtttgaattagagttctgaagctaagcttaaattatttaggttgatttgagttggtttagtggtctatgttgttgatttggcaaggttggggtctaagaactcaaaccttgacctttaatagtggattgagtttctatgtttgatactgatttattgcttgattatggtttattataatatttacaggcattctggagagtattggagagtttggggttgatttgagtttagcgggtcgatttttgggttttcttgcacaaaaccggttttgtggaacctgagaaatcggtaaaccggttttgtcccgcagaaaacccagtgaacccacaggttaacatgttggggtttttaggaaccctagttatctccaaattgttgatttttacggtatggtcatgtctttcatcgatagggtta

SEQ ID NO: 340631 - DNA, 901 bp, Cannabis indica
agattggaaatcaaagtggttctttatattcaaagtcccaggaattagaactgactttaaccgtcgacctagtacgtcgcatatttcttgacttagacgtttttctgagttactttgaggttttaatctgactcgctcttttcttttagttttcacagatagaccgtctcgtcccacactcgacgcgactcgcagagaaatagctgaagttcttggaagcctccctgtacaagatcgagactggcgattgttatgtacaattgctaaactgcgcgaacacaaactgattcctgagaacgcgagtctttggagagagccggtgtacaacgaaccttctgaaaagcagcaagagcgaattgataaacgcctttccaagcaaactcctcgaccctcatcaggtattttatcgcatatgcaaacttagggtgttagaattttatctttattaatattaacccttatttttccttttgtaatcgcagaaatgactttcctaaagtccgctcctatgctcaaccgcaaactgaaacccgagacagcagcgacctctcctgttacctcccagaaaaggaaaggcgatgtggttgttactcctatcgcagattcctccaagaggcctgctaaaggtattcaagagaaagggaagagggttgtgatcgacccagcggttcaagctcaccatgtgctgtaccttcaggagaggtttgttagcgatgagttcttgtcaaagattgacaaggcatcttcagaggagctgcttcctcgcgctgcggagttagcttcgcagttcatggccacatttgtgaaggcttttgctgcacggcccaaagaggttgaactcgcgaagaaacatattgctcagcttcaagagacatagagttgaagcaagatgcgtctctaa

SEQ ID NO: 340632 - DNA, 503 bp, Cannabis indica
taggaaccctagttatctccaaattgttgatttttacggtatggtcatgtctttcatcgatagggttattcctcgttttattttaaagtcccccgggaagtattttagcgtgttagtcatcgagttttaaatattatggtttaggaccgtgtaaagcgtcgagctgcaattccactcaagctgactggcacacttgagcacgaaaacgaggtaagatagcataaaatataggggaattttcaatattatacctaaaattgaatttatttataaaatacctttaagaaaattatttacacaaataccaatgtgctacgttagcatacatatcgaaatttaaaaaaattaccgaaaatagaaaaagctggaaaaatttctgtttccagaaatttttgctttttaggagttctgaaaaaagcaaccatttagttgcttttgatttgaataagatatcacttggttacttttctactaaaaaaattatttcaaaattttacacatat

SEQ ID NO: 340633 - DNA, 546 bp, Cannabis indica
tcaatttttaattaaacctcaaaaatatcataaatttataataatctattaaaattaaatattattaatttaaaattgatatttttataaaaatatattttattttgaaattagggtttgaaaattggaaaaatccgaaattgggtgaaagatccccaaaaaaatcagattttgggtgcaaagcacccttgctgtgcacacacaggctccgtgcagcctcatccgcacgcgcaggaggctgctagcagccttgtccgcgcacagagggggctgcttgcagccttcgtgtgcgcaggtgcacgggtgggcttcaaacacaagatacgtttcagacacgcacgcgaggcacgcttcagacagagcacttggtcaccttcgctgagtgttgtgcgtgcgattgctcgagcatgggcactcaatggacgccgattttcaaaacaccataactctgtcattttttatcgaaatcgagatccgtaaaaatgaaagttgcttaatttttcacaaagaatccaaataataaaattttcatggaaaaatttcgta

SEQ ID NO: 340634 - DNA, 750 bp, Cannabis indica
aaataaattatttattataaaataaataattattattttgacaaatcaaaatagatttttccgaacttccatatacaacttttatcctccccttgacagtgtttcaaggtggtgatctgggaactatggacctataattctaagctccaataaattagattatttattgaatctcattaaccaaataatcgtgtttattaatttcatgattactccactataaatatggaattgaactcttagtaattatagaattatatttactgagttttactgcagtgttcattgatagaatcaattctagtgattagcccttcttatgccgattcataattagttttgatcaaattactgttttacgtttctaactacttctttatcctttaggaccgttaattcactagtgaaagtataatttagatccaatctaaatttgtgcataactttttagctctagtgttgaccttgcatttatccaatgacagtgagtcaaattaaagcgattaagaataattaaacaataaatatgaattgagattaagtaaagaaaataccagaattatagaggttcaaccccttgatagtggtaatagcctactcccctttagtttgcattgacttgagagtagagaagcaagaaagccttgatctctctcgaaaagctcttacaatgagatctgagtattttactcttgaatctaggttcctcgcaggaaaccaacaaaaattcacaactcaatcaattcaaac

SEQ ID NO: 340635 - DNA, 748 bp, Cannabis indica
tttttttatcaaaatgaattacccctgattctagcacaagatcatgggttgcttcatctctaaaagtgacaagggtacaacctgaatgcatcctcattaccttctcaactcccaaattcccccacactctcttgacaaacccttcaaacactttgaatggtggattagcacccaaaactaaacacacaatagcatttttccaaaaagaagcttcaatttctacttcctctaaatctagttcagcaataactctatctcccaatttcttgggttcagtatatgacaatcgagtagaaggggatacctggttcaatttgaaattactccagatttccttagcattagactgaaaattagtcttctccacttcttccgcccagcttaccgatttcggagaggaccagttctccttcagctcattatcaactgctgcctcgttcacctccagatcaaagcaggtatcatggaactcttcagtcggtgtgcaatctttggcctcttggattgaagggagatcctcctccgtttcagcacgttccaccgtaaccactggctttcgggttgctcgcttcttcttcgccatgggagagagatgggaaccacgcacgccagagtcggagactaatttgtgtatacacacaaaatatattacacatataaaaaaaaatatatagatagaatatatatacataaatcaaaaatacatatatacacaattaaaaaatcaatatattgtaagatatagtat

SEQ ID NO: 340636 - DNA, 656 bp, Cannabis indica
atttctatctcttagtatttcaatcccaagaattttcttggctggaccaagatctttcatatcaaactcagaactcagtaacccttttactttcttaatttcttcactgcttttgcttgctattagcatatcatccacatatagcaaaagaaacaccacagatctaacaccagcactcttgacatacacacagcaatcatagacacttttcttaaaaccagatttggtgatgtattcatcaaaccttttataccattgtctaggagattgcttgagaccatagagtgatttcttaagtaagcacacatggtcttccttcccttttacttcataaccctctggctgcttcatgtgaatttcctcatctaattctccatgcaagaaagctgtttttacatccatttgttccaattctaagtcatctatagctgtcaaagctaataacattcgaattgatgtgtgctttaccactggtgagaatatctcagtataatctataccctctctttgtgtaaatccccttgctaccaatctagccttaaatctggctgagtcacaccctggaatcatgtctttatgcctgtaaacccatttgcaactgataattctcccatcttttggtcttcttaccagaatccatgtcctattcttcacta

SEQ ID NO: 340637 - DNA, 502 bp, Cannabis indica
aaccatgcaacattaaatgttatttctgatctatctgaaaagacattctagaacaattcccacacaacagtagcaaggaaaacacaattgaactcaacatgccattgttgagtcaagtttgagctccattaactcaaacttgctcaaccccaaaaattaaacatcaataacagtacaaacaaccttagaatatcatttaagacctaaacaagctaagcctaatcgaatttcaccaacaacacaaaaccaaaatcatcaaagtcaatcctaaacctaacaaaacttcctattaacatgtataaatccatagttgagaaagcttagggttttaccttagattaagtcttcatattaacacctactagcctctaaaattgaaagaaaactccaccctaagttggtggttcttgctggccaaacaaggaagaagaagaagagtgaaggagccccccccccccccttttttttttttttttacctttttttttttttttctttttac

SEQ ID NO: 340638 - DNA, 519 bp, Cannabis indica
caaagtctcttaataaataaaaaaacctaaaatatcctttcttttcaaataagtcattgcttagtgaaaaaattcacaaacaagacattgtcttatttagaattctaattgattaatgaagaccaattaattgagactacaaaataatattatccaagttagtgtggggaccatggccctatgtaatcaagcttccaataagtaagtccgatttaccaagtaaatttcctaacttattaattttttctgactacactacagattcagaattaaactcttaattacatagaacgctctattaccaaaaatagatgcgatttgaattatacattatttcaatccaaatagtcaaagatcctctatagatgatctacatcgagtagggacaaatttaccattctacccttcaatgtattttatccttaaaatacttatctagttgtgaatgatatttcagtaaactaatataattactaaaatgagatctcaatcatttatcgtgttaagccaagctcgaag

SEQ ID NO: 340639 - DNA, 856 bp, Cannabis indica
gggtcagggttcagggtttagggtttgggggaatgagaatgagaattgaataaaagaaaatttaaaatgcataaaaatttgataaaaatcattaaattttttctcttgttacatgataattgtcgttccttaaatttcaaaatagaatattcattccaccaaaatggttgaaatggcattctattggaaagacattctaatactttaaaaagaaaataaacaaaagaatggaatgaaaattatttcttttccttccatttcattacctctaacaaaatgccacctaagggtctgtgttcaggggttagggttcagggtattgggtgttggggttagggtttggggtttaaagtttgggttctagcgtttaggatttagggtttagggttttacggtttaaggatttgagggtttaggggtttaggggatttgggtttagggttcagggttcaagtttcaggggaatgggaataggaatgaaaataatataaaatttaaaatgcataaaaaattgatgaaaatcattaatttttttctattgttacattggaattgttgttccttttgttatacccaaaatctagctggcactttagaggatgactcgtgttaaccttagagaatacgaatcaacgaatgtaatggcatatattaatttctaccctaagaattgaatatgaagatttctttcacgtgaaattttgttaaaatggccccttaattgaaaaattaaaaatattcttctttacatggtaaattttaacaagttctttctttaatcttacactcgttagtgttctgttaaaatctcaccctacacatctcaaaaattgtgaaattttatgaggatgaagcc

SEQ ID NO: 340640 - DNA, 1356 bp, Cannabis indica
actcagcgtgggaatggccagaagcctataatgagggatgaagagcccaatcgtggaggcactcaccctatgggagaagatacttatgaaatggaaaactattgccttagacgccgtttagaagaggcacagcggcggaatgctgaactagagcgtgatgtagttgcgactagggcggcacaagggactaacactcaaaatcaacctgaacctggagtgagaagaccacgaggaaggcgttgtgggtcgcgacccaggagacaggaaaatgcccgggaagaacaacctagggaaaatgagataccccctgaaaatcagaatgatcagccaaaaccctctcacggaaatgagaatgggaggcaaccagaaactgatgaacgagaaattcgtcatgaaaatgaggaggatcttgggactcatcctggagatctaaggtcacctgtgagaaatcaccagtgttcttcctgaactcatagagagagggctcgtacagaccctaatggggcaaatacaacaaatcacactcagggggacagaacggagcgtgaagaagcaagtgtgacctcgggatgctcaaggacccacaatcgatcaactcgaagaggagaaaataattgacgagctaatgatcgagaaaacatgggtaccagtaaatccgcgagtcactcaaggacaatgaaaccggatctgcaagagcacttgaatcgaaagaaacctgaccttcgccaataacatggtccaaagcaagaggatcctatccaattgcgaagagacgagttggtgcacacgttcaggagatatcaagtgggggaattagggagacaatcttgataagactcagacaaggagcttaagccgtatcacccatatatcatgaatacccctttcccttcgggatttcaaaacctgcatgtctcatcgtatgacggaaccacgaatccgatcttgtatttgaacaactttaacacaataatgcaagcaagtaatgtgacaaacaatttatgctgtatcttgttccctacctcgcttgttggagcagcaagcagctgatttaacaagtttactcaccattcaataacatcctgggaacagctgtctagggatttcaagaaacagttccaggctgcaagggatagacgacctaaagcggcctcgctaaccaatataaagctacggatcggtgaggcacttaaggcacacttaattcgttttagctcggctgctgctagggttagaaatttggatgatagtacacaacttatagccctttaggcagaaatctctactaacccctcaactgctgggggcgagttgtgggacgacttacaaggtagtccagtaaggaacatcactgag

SEQ ID NO: 340641 - DNA, 1458 bp, Cannabis indica
tcaagtaattctcagcaagtttaatgatttccaagccaatgtaagctcctagcttttccttcactagtttacttgagttttaaaagattgattttgcatgaaattgaggttatacttgttgttcttgctatggttgtttgttgtgttttctgaagttaaattatggttagaattgatgtttagagctagtttggtggtgtatgaggtttgctcaaggtttgagcttaagagctcaaactttgctctcacatggtggatttttattctgtgcatgttgaggcgttttattgctttagatatgttctacgtggtctacaaaactggtctggaaggtttcaattgatttgggattgcttttggatgagttatggaattttggaagtttcctgcactgaaccgaaattccggttcagggggacctgtaggagctgaaattcctgttggtctccaggaaaccccgcaaaactggaattctagtttggaaccggtctacctgttggggaaatttttggaaccgtagtttttcccatttttgtgacgtttagggtattgccatgttatttatcgatagggatatttttagtttcaagtttaagtccccgaaaagtgatttagcgtgtcacttacctatgttatgattgatgtgatttaagagcttgtaattcgccaagcagttggttccactcaggtttgccggcacagttgaattcataattgaggtaagattagtataacaatatgtatatgtatttacatgtttagtgtgcatgttagtaagcctgttagattacattagatgtgtatgttggcatttgtactatctgacagtatcacatcggtacgcctagagtatgactagcgtacagagtatagactgatattattgtcaatagtaccgtactttttgacagtatcacatcaatacagctagagtacgactagtttaccgagtataggctgttactatgttaaaagtaccatcgtacgaacgttctagactcagtactgtgtgggtcacagggatagcgttatgattgggggtatgggcgtccgatcataattcgggttattgctatgttattttttatgcttttcttatggagtctattgactcacagtccgatttccatgtgtatctaagggcaaggctaatgttgaggagccgtgagtacaagctggtgaagattgtacatgtcggggcggttaggcttggagcgtacgatctttggggacgttaaggcttttgctgtttagtcgctaggcgacaaatcttttgtatatgaataattaacttttgtaaatgtattttgtaaatgggatcccagaattttataaatgtattactttatgtttttaattaaataagcaaagtttaattatttacgattttcaataacctcgttgattagcaacgagttgcacagtacgttaaaaatcacgttaacacgcctatattag

SEQ ID NO: 340642 - DNA, 461 bp, Cannabis indica
tcaaaattcgctaaacccatttctattaagtcagcactcaactccctatcctcaattctaatcggcattgacttaatccaccttttggagatgactaattatctaccaggcagtaaggttccaaaccctttatcataactatcatgaggtctatccaatttactaaaaattctggctgccacataagaatgagtggccccagagtcaaataacacagagaagtaaaagatgttgatcgagaggtgacctgttacaactgacgggctagctttagcatttgcctaagttaacgcaaacacccttgctgaaggaggtttcgcagcaatcttctgttcttctttcttaagctatggccattctcttttgtagtgccctagcagccaacattggaagcaccctagtcctctacactctcccagatgatgctttttacaactggagcattctgggtaagtgtatcg

SEQ ID NO: 340643 - DNA, 638 bp, Cannabis indica
tcgaatacaacttgaatgatcgttgtgagaagcttgatcctacatttgatattctccaattgtggaagtagaatggactcaaatattgagttgttgctcgtatggaaaaaggaagtcttgactgttcaaatgtctacagtagcatctgaatcagccttttctacaggtggaagaatcctagatgcatttaggagttcttaatctccgaggatggtggaggctttgatttttttctaagaattggtatacttgtcagtatgaggaacctattgtacttcgacaatacatggatgaaaatgaaggtttagaagacatgtgaacaagttattccaggtaacaaattactcaaccattatatattaattattaattaaaattattttgtagatgttaaattttatgttaatgtaaattttttaaggttaatggatcatgtattacaaatgttgagactcttgacaatgcttctagaagttgatgtgggacagaaaaatcaactaaaatctcaaggtaattaacaaaaattgaattctactttcaagtttattttcaaagctttatatatcatagtttaatgcttgtataagtttatatttctttggatgaaaatgcaaagctattgtaagtattcttatatg

SEQ ID NO: 340644 - DNA, 518 bp, Cannabis indica
taaattatttattagattcttaataatttggatcgccgccttgaaacactatcaagagaatggattaagttgtataatgatattcaaaaaaatctattttaaattgtcaaaatagtaattatatattttgtaataaataatttattgcaaatttattatttaaataaattggagaaaatacaaaattttgtctagacaaagacatcgccattgtctagttaagacaatgatggtgctataatcactgtgttaagacaagggatacacctataaaataagtcgagccctactagatttgtgtgtagattaattaattaattaattcaaaagataatatttatttgaatttaaatttaaaaaatagttataaatatttatgttagttgagatattctctcaaaataattgagagattctcttcaagtggttgagatattctcttaagtggttgagagattcgcttaatcggttattatataatatttactttaaactaaatatttaaattcaaaataaat

SEQ ID NO: 340645 - DNA, 586 bp, Cannabis indica
tttggagttcgtatgagaaagttatgtctattttactaaaaagagatcgaagcagaaaaaattgggttcactggccgcggcgggggactacagaaagcccgttttttcacttttctacagccgccgcggcgaggatattgcccgccgcggcgccgacttcgtacaggtcaaggataacttcgtcttttctcgtttttgggctgaaaaactctatttaaaggaaagagggtcgcaaattaaagaggggagaccatatggaaccctaaaaacacaagaagaaggctcttggagcgagcatgggcgatctgcaacaatcctccatctagtttctttctcttctcttgatttttttatgtttttatttgtgtttagtttaattatggattcgattatgagctaaactctctatttagggatttgatggatattgactgagattattctatggattaatgttatttgattgttctttcttcctatattattgtgatttattcatatttgtgcttatttcatgtttaagcttgatcaccttttgcatgttctatgatctcaatacaaaatctgaaaagtgagtattgagaat

SEQ ID NO: 340646 - DNA, 579 bp, Cannabis indica
gaagaataagtggttgaaataaagtggtaaaattgtaactagagattggtccactatcttgtacagccaaggttgaatttttgccaaatattttattattttttaatccatataattcaaccctaaccctattgaagaatagtataaaaggaaggctatggtctcattatccaactaatgcctccaaagctaaaaaccttgatgagacctctttcttcttctatcttcttcaattcgaaacactaagcctttcttcacactaaataatttcagccattagtgatagagtgagtgcccacacacatcaagtggtatctcaatcatagtgccgtagtaatttcaactctaaagtacagtttcttatgtcactcgaccagagtactttgtttcctttatcgaaacctttgagcgtaggccgcccagcaggccatttacctaaaagtaaatgttcattcagtacttaaagtggtcatccaacctagtactttattggtagtattttcttaaatgttctccattccaataccgtggtactagaatgagttgcattttttcatcacacttacctaatttgtatgc

SEQ ID NO: 340647 - DNA, 629 bp, Cannabis indica
aatatttaaattcaaaataaatagctataatagaattggttaaagatatttatttaaatattattattttaatatttaaaataataaataaatttttaattaaatttttattattattatattaatttaaattaatgtaattatcctaaatttatatataccctataatttaggaaatctaaaaagattaattaatcatatcactattcaccccagagaaaaagagttattacccgtgagttgagatcaaaccaagaacacttatacagttttatcctattagctcatactaatctttgtgtgtagtggaaggtctagaaaatcacgatgtgagttcttcatcactattataaggatacaacttacgaaaagattcaagaatatcctgactcgctttaagaggtaaatatttcatgtcatctttttatttcatatttcatgtatataggtggtgatccttgagatgtggtacgatgataatcagaaaatatatttctgatgcatacctaatttagtaccacaaaactaacaaatagtatcaaagctgattctattcagggccggccctaggcataggcaggctaggcccgtgcctagggcccacactttccggggtccaaaataaaaaa

SEQ ID NO: 340648 - DNA, 984 bp, Cannabis indica
atttctaagtcaaagaaatgggtaaactaaagggtaagttttaattcattgtaacataacaactgtattttgttttagaatacattaagatttgtttggtacgcctttagatcctattgtattgtttattttattaaatttggttttatattatattttatatagaacattatttactagtggtgtctagcactacttagaggtcttactttgtgattagttagcgacattatataaaagttatcatattaaattacatgggattcaatacttaattatatcaataacaataaaatacaatagagagtgtactagtagtatcttttagtatttctcttttgtataatatttaaatattatatatagtatttcttaaaaaaaaaataaataatattatataaatattaaattgtgatttatattaaaatatttgtaaaaacccaaaacttcaaactaaactttaaagcgtaaataactaaacattgttggcattttaagaaacacgctatttaacaaaagtaattaacgtttcttccaaactaacttaattgacaatctggaaagcccctttttcaaaagccagccacgtgttcactgttggaattttatgccctaaataaaactcatttcaatataatatgatttgttatcaatagaagattagaagtcatttatgtttgcatgtagttttcatgtttattgtttaatgtgtacaaaatctgttaagtctagaacatatagttattcacaattacagtgatgtcaacacagtggaaggtaattgtgattatatgcttcaaaagagaatgtcccttgattcatcagtgcactggatttacattgatgtgatagtcagcgataaattatacttacaccttggataagtgttatgttttttctagaacattgtcaaagtatgctagtttcggatgtatggagtatacgttgggctgggatcgatattgatcttggtaaagatattat

SEQ ID NO: 340649 - DNA, 628 bp, Cannabis indica
tttatatatagttttataatatttttattcttttaacaatattattatacactgtttgtaaaaataaaaatagaataatatttttttggtaactgtgatcatattaattaaatattataatttaaatttaaacttactataaaactttttcctttttttttgtttgttttgtattaaatgtgactaaataacataaagtgtatctttttaacagtataattcaaattttaaacccattgcacatatttaaaaaatatctgtctaatattttttttttacccaatctacatatttacaaaagtatatttttatcattatttttaaacaaaataatcaaaaaaaatatttatatttcttaaagaattaatatgatcacagttaccaaaaaaatattattctatttttattattacaaacagtgtataataatattgttaaaagaataaaaatattataaaaatataaatattatggttaaaataaaattataattaataataaatttgaatattattatgttttctttttataaataacacataaattatttttttaataaaaaatgatgttgtttattgaataacataaaaaaaaaaaaaactaactatacaattaaaaatacacataa

SEQ ID NO: 340650 - DNA, 723 bp, Cannabis indica
aaaatatcatcttcatgtttgataccattaggaaatgtacttgcatacacatacaatggtgatgttccgatgtcaccataaacaattccaatgctttgaaaagctaagtgtaataccgttgaccatttcacaacctcataacctgaataataatcatccatcaaacaaaataaatcattttttcttcaataataatatctaaataaaaagattaagataaaagagaaaataataataatcaggcacctttgagccgtcatggcttccgtgacctaaataggtgcgagattcgatatcgaaagagtcgaatctcttaatagttttatgtgatattgaagaagaagaagattgttcttctgccattgttgtaacatttgccgttgtggactgatcttgttcttcttcttcggccattattactactttttacgatatttttcaattacttaattactacactctctatttttgttttcaaaataaatatatatttgactaaatcttttattcaaatgaatatttgttacacgttatttctttatttatttaatttaattgttttttgtaaatctatatgttacgtacgcgttattgatcataataatatacattattttattattattattattattatatataacagtttaactaggggtgttcattggatcacatccaatggattttgacccatccaatccaatccaattatttattggatat

SEQ ID NO: 340651 - DNA, 507 bp, Cannabis indica
atttttaaatttaaacctcaaatatcaaaattaataataatctatttaaaaataaatattattaatttaaaaaataatatttaagttcaaatatattaaaaataatattttattttaattttggggtttgaaaattggaaaaataaaaaatcccacaaaaatcgaattttggggtgcatgacacgcttgttgggcacacaggctgcgtgcagcctcatccgcacgcgcaggtggctggtggcagcctcgtccgcgcgcgcaggaggctgcaatgcaacctttgtgtgcgtgaaatacgggcgtgtgtgtctgaacaaggcgtgcgtgcgcttcagatagagaaatggtcccctgtcacgcgcggggaacacattctgtctgagtgcctggtgcactcgatgcaccaactcacccgaaacttcaaaaattcatatctttttcaatttttatcggaattgaattccgtaaaaaccaaaattgcttaatttttcacaagaaatccaaata

SEQ ID NO: 340652 - DNA, 907 bp, Cannabis indica
ctataccatagagttatcaatgtgttacccgagttaaacactatgatgcctagtgctaacattgtagcacaaatgccctttattgatagtttttgtgatggtccagaccctaactactatgttgagggcaatgatgaagtaagagacgaccaagatacagaggtccctgctactgtagctttgaacttgactctactatcgtaccaaataccacccaggcagctgacacaaaaaagaatgccctgtagagaaaatcgtcaaagacctggtactagtagtattcgttcagacggaaccagtaatgctagagggatcaattatgctagtcgtcctagtgttgctaaagggaccaatgagactggatttggcgattcattttcttcttcaataagttatgataaattcaaggagaagatgtttacaaaagaagacatcgaggatcatagtcattatatatctatgggtagcacaccaggcgggaagttacatctaggaaagttttttagagacaaagagtatttaaatatggttgttggcttgtatgcaatgaagaaaaggtttgactacttcgttaggaagtccgatattgctgtttggtacgttacatgtaaggatacagattgtgggtggagattaagagtgaagaagaacatactttctaacatgtttggggtgactatattttaaaatgtacatacatgttcccttgatctttgaggaaaagataattgtcaagcattacctttgatagttgcccatctaattaaggataagtttgcgattgacggctcagatcatttggcctctaatataaagaaagatatgcacaaggattacgagattcaaatgagttatgaaaaggcttggaggtgcaaagagaaggcactacacctagttcggggtacac

SEQ ID NO: 340653 - DNA, 549 bp, Cannabis indica
tttctcaccagctgatgtagaaaatattctaaccatcccgctgtcatataactccatgactgactgttggatttggcactatgaatgttctggggaatacacggtaaaatctaggtacacacttgcttgttcatcggaaaaccgggatcaaacttccagttctggttcacaagagacatggtggaaacgattttggggtttaactctcccatcaaaggttcggatttttggctggaaggtcattaattctgcattaccagtggccacaaatttgtttcatcgaaaggtaattacctctgccacatgctctctgtgttcacgagcgtgggaatccattggacacgccttattttcctgctgtcatgccaaggcagtttggcaaaatactagttttcaccttgattttcagaaagctagttacatgaaggatggtgactatctcatgtttttatccactattctcaccaatctgaattggaacgattgttttgtacaagtggtttatttggtcggatagaacaatttcattcatggcaaacaactcaagca

SEQ ID NO: 340654 - DNA, 804 bp, Cannabis indica
tcgcactacacctggaactagcagtagtcaacaaggcagaactgaagaacatgctcattttcgtcatgcaaccttctcaacgttctcctcttttgaagtttgtaccaagttcaaagctcctatgtggacaaaggaagatataatagaaaatcatgggctaactacttgtttacaaagtaaggaagttggggtgatagagcttggtaatttttatgaaaacaaggaagaactgagacaagtagtgggtaggtttgcacttaataacaattttgagtggatggtgaaagttccggtgcctctgtaagtcacgcggccagtaaaaggctcggatgctggaattatgagtctcggagccatctaaaaaaataaacaacaaagcaatattactgtcaaaaaatttaagaaatgtcgacataacgtcgacatcatgtgacattatcaaacaattaggaaccacataattttgtcgataaactgtcgatatactatcgacatgctgtcgacatttggtcgacattatcacaaaagcagcaacaaaataagattttcgacagcatatcgacaaactgtcgacatgcgaagaaaaatgtaactaaatttgcagcaaaccaaaatcgttggcaaaaggtcgacatcatgtcgacatgataaaactaagctatcacaggaagcactacaatgcattatcgacaacctatcgacataccgtcgacaaaatgtcgacatttcaagccaagactacataacaacaagacatggtcaaaccgtcgacaaattatcgacaacattgttcaaacacaaaaa

SEQ ID NO: 340655 - DNA, 361 bp, Cannabis indica
ctcgataatgtctcttcaacagttcccatctctattattactcaattacattaccattactactacttcacacaatcacaaccattaaagcaaaaaagagaaaaaaaaaaagaattctttctgtcaatgtaattttacggctccaatccaagtttttcccaaaaatatctcactttgttttcatagcactttcttttttcataacttttttttttccttttaattaattatagaataaatattagtttttccgctagaactaatgttttgtcttttgacttttttttgttgtaattttttcgaaattatataaatcgttacaaatacctaggggtgttcatccgatccaatccgcactttt

SEQ ID NO: 340656 - DNA, 731 bp, Cannabis indica
aaaacaatgaccttgaggagtggcttggcaatatgtatgtaatctaacaagaatactagactactagtgctgaaaagaatacaacaataagcaaataatagattgcactgtagcatttttaaaggagttagtacgaacgatcaactatgggtaaaaaatatttgtcaaaaactttgatagcgagttgtaatgggtttttgaaaagtgtgaaaaacacaaagcaaatttcaaagatctgaaacattaaaagtggaaaaactcaaaaaacccaaatcaaaaccaagagaattgaacaaaactcatatagcaaaattgtatacgatcatcaaaatacactctacaacaggaaatgacaaggggctgatattatatgaccctgaatatctacacacagcccctattcaatcatcgatatgttatatcaatggtgatgaagggattcttggatacaggggctagccaattgaggaattggctgggagcggtacctatttggaattggcctaatgcttaagtattcttttgtgcttttcgatgcctctgttaatctttataacattggattgtagtttctaaaatatgaaactacataagaataatgttaaagaaaaccacgatagtttgtttacattgacaaaaaactaagttgcatttgcgtgactaaggatatacatagagaaaaaaccatgattgtaaagggcttttgaaaagtgtgaccttgtgcgttcatc

SEQ ID NO: 340657 - DNA, 721 bp, Cannabis indica
ttttgcgttatttagggtattgcgatgttatttatcgatacggaaaattttagtttcaagtttaagtccccaggaagtgatttagcgtttcggttatcagtgttgtgattgatgtgatttaggagcctgtgattgatgtgattgatgtgattttggaatagaggtaaaattagtataacagtatgcatatgtgtttacatgttaagcatgcatgttagtaagcctgttagattaaattagatatttatttttgctttcatgctatttcagagtatcacatcggtacggctagagtatgactagcgtaccgagtataggctgatataattgtcattagcaccttactatttgacagtctcacatcggtacggctagagtatgactagcgtactgagtataggctgatatagtagcacatcggtacggctagagtatgactaacgtaccgagtataggctgttactatgtcaaaagtaccgtcgtacgaacattcgagactcgaaaccgtgtggcacacggggattacggttatggtcagaggtatgggcgtctgaccataacccgggatgtatgtatgttatatgatttatgcttttcttactgagtctgtcgactcacagtgctatgttattgtgtaggtaagggcaaggctaaagttgaggaaccgtgaggacgagcagatgaagattgtacatgtcggggcggtcaggcctggagcgta

SEQ ID NO: 340658 - DNA, 758 bp, Cannabis indica
aaaaacttgttttgagttctttttatatttatgactttgaggttgcttacttattacacttattgtgttgacaatggttaccaaaagtccaatccccaccctcgagatggctgagtgccacaaaatcttgctgggtcttcctttcggattgcgatcagtagatttccttttgaacgaagtcaatctgaggactgtcaacctccttggctcggaccagttcacctgtgactacaaggttccaaaatactccttgtgggagaaggtcacagtcccaagccgatgaggaaagccaggattacattgctcgcgtccactatctcaagaaagtaacccctcaggaagctgaagaagaatcatcctgaggtacatcgctagtaacctttagggatagccaatataatttttatacatgggataacttctgcatagatcgcataacccacaggtttgatagttagtaccctcgattccatgtccagcttagttgcactagttcatattacgggattgccgagaagtatggtaccaacttggatagggcaagtaatccaaattcaaattgggatttatctccaataaacccttatgatataaacatgatcacaaggtctagggagtttagtaattactatagttcttcctcgtcatcttctgataattatggtaacttcctttaagtgggagtttattccccatttttctattatctatttttgagtaagtgtttgatgtatttcttttgcctcgcagatatggat

SEQ ID NO: 340659 - DNA, 541 bp, Cannabis indica
aaaaacctgctcccatgaagaaggatgtaagtaagagagacacgtccaagttctgtcattttcatgcagactacgtccacaacacgaatgagtgcaacaacctaaagcgggacattgaattcttaatcagaaaaataacacgcgcttgtagaaatacgtcaagcctgatcagaatcaacgggctgcccaaatagacaataatcaagatctactaatacctctacaagtggatgagcatttacaagtcattattgtgggcccccacctagctggagactcgggcaaggctcgcgaaaggtatgcctgaaccttacagcacgagcaaaaggatgtagtcctcgtcgtagaggagagaaagccaaaaatgccacgggtaggggaacccgctataaccttcactgaagcagatgttgtccacgttcgcttcccgcacaacgatcccttggtcatggaagtgtagatattaaataaaacagtggcctagaccatgatagataatggagcctcttcaaatatcatgttcaagacaccatatgagaag

SEQ ID NO: 340660 - DNA, 549 bp, Cannabis indica
taaccattcttgcaggtgcttcttggtttaacatgctgggctcaaggaaggaaacaggttcttcaaaagccggtagtgaaagaagtcctcgagggaagaggaaaagaaaggacactactttctacactgggccttccaatgcatcttcatccgctctacactgtcatggatactacccccaatgacataatcaactaccacggcgaggtcagccctacccacaccaaccatcttctctcctaaaaattccttctatgggtttcctatttcccatgaaaaccgtacctctcgatcttgctgctacaaggaaaattcaaagggattttgaaaaacaacttgaggaggagaagaggtttttgtgtaggtaggccaacatactcttggctgtgaagagggccgagactttagaggggctctttgcctcaatgccaaccgggccaacagtcgacgttaaggctttggagaaactgttgggttttatgccctaaataaaactctttacaatctgattagttatcaatataatgaatttgaagtgattgatgtttg

SEQ ID NO: 340661 - DNA, 657 bp, Cannabis indica
acaactttctttggagaactacagaaacattctcccccacacttatttctcacttccattcaattttttctcatttagacacaactccttaagaatgatattacaatgaggcttttctttgatatcctcaagatatgaaatttttacctcaattttgggaagagtttcaagaatctccttgatgacctcctctttcttagattttttcaatctacttggaaaaagtggaggagtgacataagttggtacaattggtttgtatgaatttttcagtgatggtggaccaactaatgtaagagactcaacttttggtggatgactcttcaagtgatgaattgttgactcctttagttggaatcaaatcattaacttcttggtgtgttggtaattcaagttgtgtaccattttggatagtgatgccattgacattctctattgggttactctccacttgtgaaggcatagagtttgaacattgaattttatactcactcatagatgtttccactgactctacaagattctctaacttttgtggagattattgaaggctttggatagtttcatgacagctttgcaaaaactgcaaggtattagctgctaacatttcaaccagcttagcagtagttggttttttcactatatggtgcaacatga

SEQ ID NO: 340662 - DNA, 1060 bp, Cannabis indica
caaggtggaattaataagttagagaatttacttggtaaattcttgatctacttattggaagctcggttacataagcccatggtcccctcactagtttaaataatactgcttggtgactcagttaattgattttcattaatcaattttaattctaaaattagactatgtcttatttatgaattttcactaagcaagggcttaattatgaagaaaatagattttggggttaatttactaattaagagacttcgcatggtctattgaataaataatataaatggcaattttttttttcataattaattatatttattaaataaatagttttggtatttatatgattgaactggaaaaagtggtattattgcaagaagaataggtggttgaaataaagtggcaaaatggtaactagagaatggtccctttaagtggccaaccattaagtgtatttttgcccaatattttgttcttttttaatccatataattcaaacctaagccctagttgaaacattatatgaaaaaggaacataatgttctcatctcatctaacttaacctaattcaacctaccaaacctagttttcattctttgacaattagtagatgagagagatccttctatagtgatttcacctccttcattgttcttcacctattcggcctatagtgatagagtgccatgcccacacatagcaagtcaagtactcaatcatagtgagtatgacgatgttaaccaacccgaaggagagaaagagatctgggctcacatcttgataatactctgcgacaaataggaacaacggttagagatctaaacagaaggagtcattatattctgttgcacccaatgtaaagttttctaaactcttatgtgttcaatttcattattttagagatattcatatttaggatattaattcaacatacttgtttaataaatctagatcctcgtaagatattcccaacattagcctctcttggcaaatgttcatgagattacaagatggttacagtaagggctactctacttctattcgagagagagctttcttggaattt

SEQ ID NO: 340663 - DNA, 2242 bp, Cannabis indica
gcatgagaacatggagaatgcatctcaaataatgaattctctgcaagccatgtttgggaagcaatctaatcaaataagacatgatgttatttgtagcttcatgaattataagattgcacatgattgcacatgctacttgtagctacatgaattataagaaaggtgtccctattcgatctcatgtattgcacatgattgagctaatgcatgagacagagacacatcaggctatcattgacgagaggactcaagtgactacgatccttgactcgctatctccttgcttcaacgctttcaccataaattatgtgatgaacaagttagagtttaacatgactcaattgttgaacgagttagccgtgtttgagaaccttaacaaggataagtctaaggaaggtgaatcgaacatcgttaaagcaaaaccaaactctccttcttcttctagtaagaaaatgaagtagaacagtaaggacaacaacggcggcaagcccaaaggcaagaagtcacctaaggctaagaagaataaagccaaccttaagtctaaggataagaaggctaaaggcaagtgtttctattgtggcataatgggacactagaagagaaactataacaagtatctctccaagcttaagaaaggtaaataagattttgtaacccccttatgattaggcacgctacagtgactttctaaatacagtgcacacctttgctaatcaaagggttttctgagaaatcatgataaattaattggatttaacttcaatcttttataaacataaatagatattaacataaaactaggatcccgttatttaaaatttacatgcatgttcaaaataacctttacatacatgtcgcacaatgactacaaaatgtagcccaagtcgtcccgagaccaaactccacaggtcgcaccgtctcaacatgtacaatcatcccatgagctcaaaactcactattgttcagctttagcctttcttttacctacacacaaaagtaaaacctgtgagtcaacaaactcagtaagaaaagtttataacatacgatgtattgccgacttgtatctaggcgcccatacaactatccacaaggcttatcagatgagtaagaacgtttttaactaaggcacgaccactgtaccacatgcactatgtactgctactgtactagtgttggtagggtttgcatcgtacctcgagtaccactaagtgttgtgccacatacactatgtacttaactgtactagtgttggtaacacagtattgtacccattgaacatcatacactgtactaatgcactcagtactactgtactagtgttggtaacatatgaatcacataatcagcatgcatatattacacatacacatattcatatatgaatacattcaatgatagtcttacctcatttctaaattcaattgtgatggtcaacctgaacggaaaatcacgtgttaggatgcctatgcacattcacgtaaatgggttgttgggaatattttaccaggaaattaaaaatcctaaatatgaatatctctaaaacaatgaaatttaacacataagattttataaaacctttgattgcaacggaataatatgactccttccactcaaatctctaacccttgttcctttctgtcgcagagtattatcaagatttgagctcgaaacttcttctctcctatgggttggttaccaccgtctccgcactatgattgagtacttgacttgctatgtgtgggcatggcactctatcactatggctcgattaatgaagaacaataaaggaggctcaaaatcactatagaatgtgtctctcatctactagttgtctgacagagttagaaactagatttggtagattaaaaagtataggatgagatgagagcatcatgttccttttatagtatttcaacttaccgttatatctttttaagtcaatatcactggttgatcttaggtttatggatcttaatcctgatatggttagttcagcttagttttgttattcatgttcttagaggtgttcatggaagctaacaaatgattcttggtggatatttatatcttgggaacatggtagttcaattgagtgggagcgctaaatatagatacagaatctatagcttctaaagtatttagaagtgaaacgatgatttccttcgagcttagctgaatagagatgaatgattgagggctcatttcagtaattatattagtttacagaaatatcatttatagg

SEQ ID NO: 340664 - DNA, 787 bp, Cannabis indica
cataatcatatatgcatctactataatctttagagaattctcaaaatttttcaaaaacgctactcaaatgttttgcagcattttgatataaatgacatatacatagacgatgatgtgtttctggccatttaacagctagtgcttttgccgttgccgcatcttgatccgtaaggatagtttttagtttttttccagacattgtattagcaaatgtatcaaataaccacatgaatgattcagcagtttcatcataaagtagtgcagctccaaaaatagtagttcgcttatgatgattcacctcaagaaacatagaaaaaggtcgaccttctttatttttcttacaggtagtatcaaatgaaacaacatcgctgaaataagaatatgccataatcatttttgtatcaacccaaaagatatttgttattaactaatctttatccacctgaataacatagaagaagttgggatcttctaattgcttcccctgaaggtactcaagaacaccacatgtatctcctaacttcatttgaattgtttgttttgttcataaataattcttataatcaacgcgaataattccaaggctttcacgtcctccagctctctttgccattagttcccaagtttcttttggagcaattcctgaactgtcaactaagtctatttctgcagctagagcaggagtcagttttctttgtgatctgtttaaatgactttttgtaggagttgatgtgggaaatattttaccaggacctagatttactaacaagtatgtttcattaacatc

SEQ ID NO: 340665 - DNA, 724 bp, Cannabis indica
gggttgtggtcaggggtatgggcgtctgatcataacccgggatttatgtatgttcatgatttatgcttttcttactgagtctgtcatgcttttcttactgagtctgtccactcacagtgctatgtttatgtgtaggtaagggcaaggccaaagctgagggaccgtgaggacgaattgctaaatattgtacatgtcggggtggttaggcctggagcgtacgatcctcgggacatcagggcttctgtagttagtcgctgggcgacaagaattttgtaatagacagtgaactttttgtaaagtattttgtaaatgggatcccaaagtattttgtatgaaatattatgagtatttaattaaataagaaaaattttaattaatcacattttccataaaccttgttgattagcaacgagctgcacagtacgtttaaaaatcacgtaaacacgcctatgctagtaagggtgttacaatttggtattagagccgccaggttatctttcgaagatagtcacgacatgtacaatcatcatcagcagttaacatgtttttaattttcaaattaagcggcattagtaagctctcgttgatcatgacctgatatgccaacttcttgtttcgcatgttgttcagactagatggatgtcaggccaaataccaggagttagggcaactcgatcgggtcaaatcaaggttagggagctcagtttcccctaaatgctcgggg

SEQ ID NO: 340666 - DNA, 1378 bp, Cannabis indica
tcaaccaaaagaagttacaaaagcaattaattttgtaactcctctccatgttacaaagtgtaggttacaattttattaggttaaataaatcatatgttacacaatttatttaccaaatacttaatatatattataacatatattaccacattttaatctacatattattatattaaataatataacacaacatacctaaaataaggtaaacgacatgccttaaataatgtaaaaatgacatgtcttaaataaggtaagcaaaattaccactctataataaggtaaacaacatgctttattaggtaaacaagccttaaaataaggtacataacatgcttaaaataaggtaaataacatgtcttaaataaagtaaaggacatgtcttaaataagataaacaaaaattactaccttaaaataaggtaagacaagccttattagataaacaacatgcctaaaatacaataaacgacatattttattagataaataacatgctttattagataaataacatagttatatttcaattaaatttattttgcagctattttggtgaatgcataataaaaagagatatgtatcaatttattccaaatatatttaagtgatttcataataaatattttaaaattttaaatttaaatttttatattatcattttaaattttaaaaatattttatttattattaataataacttaaaaaatataattagtgaataattaaaaaaaataaaatatttacaacaactcacaaaaatacatatttaaaactaccacactaataacatttatattacctagtttatatatataaaggttgagatttacctgccaactctaaaaagaaaaaaaaaaaaacaaaaattatatcacaccctaaacctataaataaacaacaattaatcattaataataaaacaataatcaataaataataaaaaattaataagacaataaaaattaatacaaaaaataataattaataataaaacaataattaataaataatacaaattaataattaatcattagtaaaaaaataataattaataaatcaatacaaattattataatagttaataattaataataaacattaattaataattaacaaaaattaataattaataactaataataaacaataattaataaataataaaataataaaaaataatacaataattaatcattattaataaaacaataatcaataaataataaaaaattaataacacaataaaaattaatacaaaaattaataattaataataaaacaataattaataaataataaaaattaataattaataattaataattagtacaaaaaaaataattaataaaacaatacaaattaatactataattaat

SEQ ID NO: 340667 - DNA, 1049 bp, Cannabis indica
ctattttcgtgggttagttgggaaacttaacgttcttcttcctccacgcgtcaaccctaacattacactttaaaatcaagctttattgtgggttggatatttgaatatgggtatgacccaaaaggcatggattgggcgtggcccatgtgagccactgggcttatgggttctttgtatctaacttgtaagtgggctttgtaagtacttcgatcgttgggccttttcattgggcttagagcaatttttggccactacaattatctagattatttgtatgattttatgagttgttttgtttaatgctttctttgtgattaaattttaccacagaaatataaggagttttcacatagattgggtttgtaagctttaaccatattataaacaacttaattcaacttgtcaattgaatatgaagaagagaaattgggtaaataaaagatagttgaagattataataatccttattttttcattgttatttctttaagttttaattattatttggatttatttacttttctccaaaattattattgatcaaatagaaacaaataattaattaattggtaattgataatcaatcctcgttggaacgatactctacttcatcattatattacttgattcaattgcgtatattgcgtatcaattttagcaaacactgttcatagaatatgttgaagagaagctttaaacaagcatgagtctttaggagaagacttttccaagtctcattccgagagaaagtgagtgtatatctttaggagaaggagaagatctatcaaaaactcatttcgggaggaagtgagctaaggaaatttactacttagtgtgtttcagaggtcatattagtgaggtggattacaaagggttgtaacaaattattagaaagagtctaatgttgtttaagtcaattatttttgtaatatttgatactttattaattgatattataagtctttacatttatacaattttattaggaaaatttacatggtatacttatttttgttcattttttttacaaaaatactgtcaggcggtat

SEQ ID NO: 340668 - DNA, 1652 bp, Cannabis indica
ttacccagaatcgatgatttgtttgatcaacttcatggaaagatagtgttttcgaagattgacctacgatccggttatcatcaacttataatccgagaagaagacgtaccaaagactgcattccaaaccagatatgggcaccatgagtttctggtaatgtaattcggattgactaatgctcttgcggcctttatggatctcatgaatagggtattcaaggatttcctcaataactacgtcatagtgtttattgatgacatccttgtatactctcattcagaagaggagcacgagcatcatcttataatagtattgcagcaacttagggatcacaagttgtatgcaaagttgaaaaagtggaaattctagttgtcagaggtgtcttttctagggcatattgtcgggaagaatgggattatggttgatccaagcaagatcgagtcagtgaagaattggccgaggccaaaatcagtatcagaaattcgaagttttctcggtttagctgggtattatcgatgttttgttgagggattttctaagatctctatgccactgaccaagttaactaagaaaaatcagcaatttgtgtggtcagatcaatgtgaagcaaattttcaggagttgaagcaacgtttgataaagctcaggtgttagctttgccatcaaatcaagagaaattggttgtttatgtgatgcatcaagacagggtcttggatgtgttttgatgcaagctgacagagtcagagcttatgcctcttgtcaactgaaggattatgagcaacgctacccaactcatgacctagagcttgctgctgcgatttttgctctaaagatatggcggcattatctttatggttaaaaatgtgagatttatactgaccataagagtcttaaatactttttcacccaaaatgacttaaatatgaggcagaggaggtggctagagcttgttaaagactatgattgtgagattctttatcatcccgggaaagctaatgttgtcgccaatcctccaagttgaagaggtcctgggcaggtttccaccacggttttgatagcccctcaactagcttctgaaattgttagtgcagggattgagttgtagtttgaaagttgcacaacttgaccgttcaatctgatctgttagaaagaatcagaaaggcacaactaaaagatctcgagctggtcaagattcgagatgaggtattggttggtcggcctaaagacttttcaatctcaaatagtgaaaagttactgtacaaagctcgagtttgtgttccttgtgttgatgagcttaagaaagagatactcgatgaagctcacaccacaccttattcactgcatctaggaaccaccaaaatgtatcaggatttaaaaccctacttctagtgatatgggatgaaaagagatgttgtggactacatgtccaaatgtttaacctgccagcaaatcaaggctaaacatcaaaggcggacagggttattggaacctttagtccttcctgagtggaagtgggaggacattgtaatagattttgtaacttgtttgcctagaaccacaggaatgtatgattcagtatgggtcatagtggatagatttacaaaatcagttcactttttgccagtgaaagttacatattcagtggataagta

SEQ ID NO: 340669 - DNA, 714 bp, Cannabis indica
agtatttcttctcaaaaaaaaaaaaatacaaattaatttttttttctctctctcgacacccttacacccttatatatgtctagttttgaacaacgcactttcatatactgaaactgaatagccataatttctacataaaagaaaaaaaaagatttgttttaaatgttcatacacatacagagacgaagaaacatcatagttatacatatataagatgaatcacagccagcgaattggctatgattttctcatagcatttctttcaacctctatgctcgttctcatcatcatcctcgttctcatcttcatctgtaaaaaaaaacccatccaatcccaagaaccacaacccacaaaggtaacagccacctcattaccgttgacgaagattgactcagccaccgatggcttcagccgcagaagaatcatcggggagggtcgcttgggaaccgtgtacgccgccgttttggaccatcaaggagagtttgtagccgcgaaacgaattcatcccaggcttgttttgagtaatgccggattcggattctccacagttcttaaatctttatctctggcccaacatcctaatatagtgcccattttaggtttttccgaagcacctggggagagaattgtggtttctgagtttgttggctccgcaagcttggatttctatctgcaccaaaacccagatggtgtttcgctgttggactggagccg

SEQ ID NO: 340670 - DNA, 563 bp, Cannabis indica
aaagagttttatttagggcataaaacccaacatgactctcatccatagtcttcaatggctaagagatcttcaactacctgtgcattatattgagacgaattctcttttagtagttcaaggtttatctcttcaagagagctcacatctgattttcattgcttgttgaatcatattaatgttttagtttccaatttccctggagctcagatctcacatgtttatagatctgctaataccgctgcccatttattggatgctaattgtacatagttggaggaaatgcctctacttctaatgccctttgttttttttactttaatataaaggcattttttatctcaaaaaaaaatattaaatatcacatattttaatttaataaataatatataaaaaaaaacaactaactactaacaacttatcatatccatataatattgtgcctaataacaacactagaaacatagggaaatttacatggtatactaacttttgccatttttttacaaaaatactgccagacggtatttttactttttactgtgtttttttaaaagtttcatact

SEQ ID NO: 340671 - DNA, 580 bp, Cannabis indica
tctcgtaaatgaacatgtaagtaaaattatcaactttctattagcaatttcttttactaaacacaaactaactctatttttaaacaggacgtccctgaagactacgcaattcatacttggaagagaggccacctcagaaaaggaacagaagacacttggattagcgagacatgcaaagaactacatgtaagtttcaatatgttttttaaaaatttttttacaactaatgcatgatgttgttattgtatttctaatattttatttgatcaggagaaaatgcttgaagaggttgctagcatgacggatacagaagatgattccagcgatgggtctgctagcaaatacaagcaattaaaagctatgaataaagttcttgggagccggtcggactatctaagaggactgggttataaattgaaaggcagctcggaaacaagttctagtactcaaagtcgagctcaatcacaagtaccgactttatccattactccacaagattgggagtcttcgccgagttcatgttaaaaatgcgtgataagattgatcagtctggcacctccagtgacgcgtctctgcatga

SEQ ID NO: 340672 - DNA, 617 bp, Cannabis indica
acccctaactctttagaatttttgacaaacaaggaaacatcaattcacgattctagtttgccttctttctttctcaagacatgagcaaggcacccctaaatcctataatggcgtaaactaggtgtacgaccattccatagttcgacgggcgtcttaggaactgcttacgatggaacaacatttagaatgtcgtttgccatctgtatagcatatccctaaaaggatgtagacaaggttgaataactcaagcatagacctaaccattctaaaagtgtgcaatttcttctttctgctactccattttgctgtggagtgctaggggcagtatattgagattcaattccaagttcaattaaaagatatttgaactgcatatccatatactctccacccctatcagttcgcaagatctttaatgttttaccgaacttgttttgagccaaagcatgaaactcttgaaacttttcaaatgtttcagttttcttttgcattaggtaaatgaaactgtatctagagaaatcgtcaatgaaagtgacaaatactcataccacctcggcttgacataagggtccacagacatctgaatgtactaatccaaggggttgtttggcacgctc

SEQ ID NO: 340673 - DNA, 633 bp, Cannabis indica
agtgagggagggatggaaaaaagggaaaggtcatgagttcgaatttaagacctttaaactattaagctaatatatgatggtaaaaaactattacgctgcactcaaaaaaaataggaattaaaagttgtataggaaaaaacttgttcatttttatacctaacatgtaaatttaatttttttcttcatacttttcttttacctcaccaaaatttaacttctaaccataatctctaaggttcgagttaatattttgttacttcgtattactgatttcaaatgttgatttaaagaatacgaaagaaatcttgaaattaccaatacaaatagtgaatgcaatcacaattgatatttatggtaatccaaaatttttttataaaacaattaaaataaaataaaaaaatcaaatccaaatccaaaacactattttttataaaagaaaatatttatttttaagttttgtttttattctttttgtctctcacgatcatgtcgttttcctagtatcttagagtatcccataaaatgctttattatgatgtatagttaagaggttaaaaaaaaaagagagagagaaataaaaaaaaaaaaagcaatggctaaaagcttgttttccttcatcatcaaatgaactaa

SEQ ID NO: 340674 - DNA, 716 bp, Cannabis indica
taatatttcaatcgttgtccattgaccttgaattctcttccggacttttcatctttcaccacaacagccccgaaaggatacagttccatcaccgtaaatggacccgaccaacgggacttgagctttcccggaaatagcttcaatcttgagataaacaacaacacttgctgatttttcaaaaaaactctctctttgatcctactatcatgccactttttcatcttttccttgtacaacttggcctttttgtaggcaaacaagcacatctcatctagctcatttagttgtaatttttgagcccttcccgcagctgaaagatcgaaattcaggttcttaagtgcccaaaattccttgtgttccaactccacgggaagatgacataccttcccataaactaggcgataaggagacatgcctaagggagttttaaatatcgtacgatatgcccaaagtgagtcatctaaccgctgggaccaatcttttctactaggattcaccactttttcaagaattcccttgatttctctattggaaatttcagcttgcccgttggtctgtgggtgataagcggtggctattttgtgcttcacactatacttggctaaaagggcagccaagactttgttcacaaagtgtgtcccttcatcactaatcaacgccctcggtgtcccgaatcttgtgaagacattcttatgcaaaaatttcatcaccacctt

SEQ ID NO: 340675 - DNA, 1054 bp, Cannabis indica
tacttagagataaactcataaaacatgaaacaatggtgagttttcatatttagggtgttaatcaacatacttgtgagtagatctaagatcctggtaaaataatttctaacacagacatgtagaaacaatgataagaacgagccacctattttctattcctcataaacctctttcatgctcgggtcttgaccctaggtactctttgaagtgggggtgatggaggaaaatggatgctccttgcatacagggggttcagcagcccgagagcatggcaggatatcaggcatgggaggaagggttccctcaatgaaatctgaatgaagttaagattccacgagagaagccttaagtctagaaagcttcatcctctgggatagtcacgagaaccatctcttggtgggatacattagtaggaacctcagcttgggttcctttagtgagcacctcttctgcaggtcaacaagtgcatctttagcaatttccgctgtgctcaggtgaaaatcttggttgagatccattgctaccaacacaaacataaagggaaacctagctacttgaatcgacaaactaagagcccagaacaaaaattcgtcaaagtttcattccaattgacaaaccccaaagatctatatacatgcataagcctatgaaactcaaatagccagaaaaactatatagacggttctaatccccttttcacaacagggtgtttctcaaaaaggtccatctcaaagttgaaaatttatcacataacctacttcactattcaatatgcaaattttcataatcatagcttgaatgagaaatttctatcctaaacaagaaataacaagagggttcaactagggattaaagtacttacatgttgaatgaaaaggagatcgggtgttgttgtagaaattttcctagagccctcgaacccagtcgattaaacagtcgcaacaggtttagaagtcaaaatcttcatctagcagggtgttaggctatttttaacctaagtttcaggtcacattttatagttatttttcttctttattattatttttggaataga

SEQ ID NO: 340676 - DNA, 453 bp, Cannabis indica
tttggacgagcatcatacacaagctcatgggtaatttttttttgtgtgtaatcttgtttgttgttgttatatttagtttagaatgttgtttttatgcttgatctgtggattgttgttgttattttactgttttgtgtgttaaaatgcttgttgtccttgaatactgtattttcatggtttctgccaattttttttgtctggtccgatgggatccgatgtacccccgatggttgcccgatgcctgttaaaatttagttgaaagggatgaaggcccgatggggcccaatattaaccccaaatgatgttgggttttgtgccctaaataaaacccatttcaatataatcagattactaattaataaagatcagaaatcgcattctatgttgcatggttcacatgatttatttcatgattgtatttaatgtataaattctattaagtccaaaacatat

SEQ ID NO: 340677 - DNA, 790 bp, Cannabis indica
tgagattttcactatttcgattaaaatgattgttagtgcttgaaaactaatttttcactcaatgtttccaatagagaagtcatgcacaatgctcttggcttgtccttgtgaaatttcactattttttgagatatgtagggtgagattgtaagagaacactaacgagtgtaagagtaaggagaaacttgttaaatttaccttgaaaagtagaacgttttccattttgtaattaggggtcattttaaccaaatttaacgcgaaaaaaatatttatatttacgtcttactagtatgaaatcattgtaactcgtgggaaaaaatatttcgagatgggtccgtgccacatttcccaaaggggtaccattatcagaaatgtgggattttcactatttcgattaaaatgattactagtgcttgaaaactactttttctctcaatgtttcaaatataaaagtgatgcacaacgctcttggcttcatccctataaaatttaatgacttctcgagatgtgtatggtgagattttaagagaacactaacgagtgtaagaggaaggaaaaacttgttaaaatttaccctaaaaagtagaacgtttacaatttttaaattaaggggccatttgaacaaaatttaacgtgaaacaaatcttcatatttacgtcttagtaatacgaattaattgtgactagtgggaaaaaatattctgagatgcgttcgggccacattttccaaaggggtaccactatcaaaaatttaagcaaagtaagttggattagctcccccttaatgtgtg

SEQ ID NO: 340678 - DNA, 552 bp, Cannabis indica
ttacaccctaaaaaataagagaaagaaagggtgttagcacataaaaggatgtgagatcatatataaaaaatatatatatatatgagtgtgcacatgagaagataggccattattgatacattttgatgaatagtccgtcacttacccgaaggatatcttggactcccctagtgacggtatcaccttcgtaattggacatgtcacgcactacctcaacagttgcagtttttcgaacaaggaggtcgtcgtcaatgtggttgtcgcatccccaatggtcacgagcatacatctacaaacataagtaaggagagtgagcatacaagcatgaaatgaggtaaccaaaaataaataaaaaatgctaagttaaattcacttgataaagtatttaggctagttaattaaaataaattagataaaaactaattcaattacaaaaattagatgtaaactaaatttgatttaaattaaattggaaaaatctagttttgttaaattggattggaataaatctaatttaaattaactaagctgaatgtaatttttttttttttt

SEQ ID NO: 340679 - DNA, 824 bp, Cannabis indica
ccaatggtaactccacaagataaacgctcaattctctatcttcaattctaattaacgctgatctaacccacttccttgaaataattaattccccgttaggcaacagggttccaaatcccgtctcaaaaacatcactaggtctatcaagttgattaagaactcttgatgacacataagatcgagtagcactcgaatcaaacaaaacagtaaaaacaaaaccgttgataagaagctaacctgtgaccacagaaggactggcggcagcatcagcctgggtaatagcaaatacacgaacaggtgcaggtttgacttcaggctttggttcctccttcttcaattggggatagtctttcttgaggtgccccactgatccacactgaaaacaagctctccggttgcaagtccagcgatgatgtttcttacagcgcgggcactcaggataggagtaagtctgacgttcccctctattctggtttcctcgaaaccttttactttgccctgaacttcccgaagatggaaatattctttcttttgctcaaaagtggaatcaccactctcttttccaggaccagaaatagggagagtagtggttccaccaacactaggagtctcgcgggtttcatgcaaaaattttactgctccttcagctcgaagagccttatcaaccatttctgcataggttgcagtatcatttgttgtaataaccagttcatgcctaatcttggcattcagtcctgccaaatacttctccttcttactgaaatctgttggtacgattccagacgctaacttagccaagcaatcaaacttggtggtatactcag

SEQ ID NO: 340680 - DNA, 925 bp, Cannabis indica
ctcaactagtgtgggaaccatggccctgtataatcaagcttccgataagtagatctagaatttacaaagtaaattctctaacttattaatttctccttgggccactatagattcggaattgcactcttaattatataaaagttctatatgttccaagatatagatacgttatgactatcttggatcctgggttaaaggtgtgtgtaagtggtatttgtgtaattttttttttttatttgagatgtatatttgtttatgaaattattacatagaaaatataaattgacactttatttacaaaaatacctccataaggtatggataacatttatactttttatgtgattttaattatcaaaatacattttacactatcacttacacaatcaaactagcagtgtggttacgcgatagttgcatcagacgaaggtttcaatcagacgatagttgcatggtagttggccaaaggttgcatcagacgaaggtttcaatcaaacgaaggttgttatatggttggccgaaggttgcatcagaagaaggtttcaatcagacgaaataattttagcgaaacttttatacaactgtaatgcaattgttatgaaacattaaaaatgtaactctatctacatgtctctttatgatttaatatgaacaaattcactatttgaatttggaaaacaacgaaaatacaccaggataaatattttactatagtattgatgtaattttttttggattatacttgaactggattgtttgggaactctagttcaactttttgaaatcaacgtttcatggatctgaaaattgaagtcaggacattagttttatgcaaattaaattgaatttctggttgaattttagtttcgtagtagtttttctacacgttttttttttcatgaattcgaaacagcccctgttttga

SEQ ID NO: 340681 - DNA, 1214 bp, Cannabis indica
cattttctccttgatttgctcatcacacagtgtatcaacttgaattacaaattctcttccttgttttcaattgcccaaacatattttgtcaatgccaccaagttccattctaatatttttttttagaccaatgcctcatgctgccttcggctgacacacactctcccaagctattaatccaggccctgttgttgtatgatggcccctccagagataggctctacaaatctgctcaatgtcttcaatgatcttcttaggtagaatcataatttgactccaataagaatgaatagacatcaaaacacactttactagcaccgctctacctgctagggacaagttccttgaactccatgttcttattcttgctgtcattttttcagctaacaccatacattctttactagaaatatgttcggcacaaataggaatgcctaagtatttaaatggtacctcttttttggaaaaacctaacctgtcaatgatcctttgcacctcgctttcttccattccacagcagtaaatggccgatttatcagaattcgattgcaaccctgatgtacaagagaatagtttcaatccttgaagcaagtaatgaatacttttgaagtctccgtggcagaataggataacatcatcgacaaacattaagtgattcatctttagttccttacaccgatcatgataatgaaattctagcttggttccaatttgaatcattattcttgacaagtactccattccaagaacaaaaagaagtggagacatagggtcaccttgtcgaagacctcatttcccctcaaagaatccatgaagagatccattaaacattaacgagaaccgaggagtgcatacccaggtcataaccagtttaatgaagtccccaggaaattgaaaagcctggaaaatctcttcccgaaaatcccattcaaatgtgtcgtaagctttctgtaaatccagcttaatcatacaccctggccgagctgccttccttccatagtgtctaatcaaatcctggcatatcacaatgttgtgagcgatgaaacggcctgagacaaagcctccttgattctgtgcaaccagatctagaagaagagtcttgagccgagagcaaatcaacttagttgcagccttgtaaataacattacaacacgcaattggcctgaagtctcttactgtgtttggacacttgcttttagggacaagtgttagca

SEQ ID NO: 340682 - DNA, 514 bp, Cannabis indica
atgagttaaattattaatttgtttatctggtgttattattttatctttaaactaattaaaaatgagttaatattaaaaactcaatataataatttctcatattattgaaataaaagttttataaaaaagtaatttatttcaatttaattttaatataattttattaagtaattattattaattaaaatatataatttattatatataatttaaaatattcaccgtaaagtgagagatatttactagtttattaatattagaaaatatatatcttatttaaaacatttaagaaaaattaattttaaaaaatttaatgtgagtgattgtattataagtttttaaataattatgataagtttattttaattataaataaatatttaaatttaatatttacagtaataaatatttaagttatatttttggaactctataggtttctagttattaaatgtcaagttattatcaacgtgtgattttcttttattggcatatttaaactaatttttttaaa

SEQ ID NO: 340683 - DNA, 523 bp, Cannabis indica
gcgcccgcaccgcaaaaaaatacagtttgaaagtctttgcggtgcggttttgaattgttaatatgtggttcaaaccacacgacactgcacattataaaaataccaattttttatatttatttaggtccaatatgtgaatgtccaactcaaagcccactaattattgtattattgaaacttaattttttttcgtatttattttcaagccttatggtatttttgacaggtgttgatcaagctttgttctatttctgatagtttatttgttggtgatagtccaaaccgcagaaactgcaaaaatcgcactacaccacaccatttttatagtgcagtttatgcgattttttagtttcgcggttgggtatagtttggaaaattggaaaaacctcatgtgtgggttggtttaaaaaaatagtcaaaaatcgcaccactcgcacagcgaacacccctacttcctgggaaaccatcttgcaaccacgtagcaacacaacgcaaccaaaacaaaaattcaaccagaaagaaa

SEQ ID NO: 340684 - DNA, 737 bp, Cannabis indica
tctgatgtggcatcacatactggggacacgtggaatcgacttcacctatctgtttgaaagagatatgccaaacagaacatcgcatatatctgcacggacgaagccttcctagtcgggcagtggagagtccgaacagcgtgcaaacacttatcaacctcaacacttgcatcgttaatcacaaaagcaatccctataattctgggatcatatcacagagatatggcaagctgtctaaatctcttaatcagtgtattgtatatttaatgtgtaatcttaaccattacagccgttgtaaacagaagggaaacttttccctcaaagcttatagccctataaatagtgatctattctcactgggcgaagggtggaaaaactaatctaagagtatatactcagagatatctttgtaagagctctaagaaaggaatcattgcattatttgttcttaagtcaatacaaatcaagagcagtaggctattactgaactgctcggggtcgaacctctataaaaactttgtgtctttatttatttcactatattacatctatattatactacttgttgcttacaattaagactcattgtcgttggccaaaagcgaggtcaacaaggagtaaataccattttggaccctgtgttttgcaaaagttaccaattagaccatttgttctgttaaatgacaaatagaccttatattttccaaaaaagtaaaaaataagaccctgagctcaatttt

SEQ ID NO: 340685 - DNA, 380 bp, Cannabis indica
atttttgttgttttccaaatttttaatggtgaatttgttcatattaaatcataaagagacatgtagatagagttacgtacgtggaaacactgtgttgatttttaatgtttcatatcagttgcattacagttggataaacattttgctaacagttattttgtctgatgcaaccttcagccaaccacccagcaaccacccaacaaacttcctctgattgaaacctttgtctaatgcaaccttcggctaaccactaagcaaccttcatttgattgaaattttcgtctaatgcattttttcggccaaccacccaacaaccatcgtctgattgtgtaagtgatgatgtaagatgtattttggtaattaaaaagcacataaaaggt

SEQ ID NO: 340686 - DNA, 704 bp, Cannabis indica
acaaagaatatataaaatacaatatacacacatttcatacacacatattcaataaaatatacaaatacgtatatatactatatattgaggtttcaattattacctaataaccgcaatccgacgaccacttccgtaaaaaatcccggcacacatacaacacaataatattactaataatataaaaaaacccaaatactaatttacaaaaacaaaaaataaaacaatgtacacattataaaaaggaatagaaataatatttataccttaaacgaggttgagattcaaggatttctcaagaaaaaagggtggccggattttaaacccaaacttttctatttgggttcggataacactcaaagcaggtaaaaaataaaaactttttaggtgtatgtgattaagtatccaaaatggaagatttttttaaaaaaaatgggctcaaatggtttgagaaatgggggagatcgtgaggcggtggtcggcgagggtttcttctctcttgttttttggtttgctgggctgtttgttcgagtgaggaagaagctgaacaagcgagggtttcttatataaccctatggcgtcggttcctgtataggaaccgacggcatagggtacacgtgtcaactaaccgtgtaccctatgtcgtcagttcctataacggaactgacgccatagggcttagactaaaaaaaaaaaataattttcca

SEQ ID NO: 340687 - DNA, 851 bp, Cannabis indica
aggttcctctttcttggtctgagaataatctctgatgaagtggcccgccatgccacactgaaaacatgccttggcccaacattcaccctgatggtgcttcttacatttaggacactcgggataagatcggaatgaggatccgcggccctaacggccacctctgtttccccgaaatgttttattaccccttgatgctctgaaagcctcaaccttccgtttgtgatcaggattgccactgtcggtccccttactgatattaccactagcaggagggttcgatgccgtgacggcatcctttgcagtctgatattttactacatgttgctcagccttctcagcaattaaggcaagctctaccactttcttatacaaagtatcatgtgaagtggtaattttcaagtcccgactgattgtggcattcagtcctctcacatatttttgtttcctggtgaaatttgtgggcatcagatcaccagcaaacttagacaaccgatcaaactccagagtgtattcagccactaacattttcccttgagtaagtttcacaaagtcttctatatgtgaagtcctcacagcaatgttatagaatttttcctcaaacaaactcttgaattcttcccaagtcattgtactgacgtctcgggtctgtcccacaatatcccacaaaacgcgggcatgatcttgcaacatgaaagttgcacagtttactctatcatttcccgtcacccccatattatcgaggatacgggtaatagtgctcatccactgctcgaccttaattatgtcagtacctcccagaaaagtcggaggttgcagcttcacaaactgctcaaatacagaatctctatgcg

SEQ ID NO: 340688 - DNA, 1172 bp, Cannabis indica
gggtccaagttcgtgttcaggtttgagttcgggtcttaagtcccggtctgagtccaggtcccgatttgggttcgggtacgagtttgagtcccaatcctagtgtgggtccaagtttcggatcacaggtccgagtctggttcttaggtcctaggtctggcccctaatttttgggtctgggtctgggtccaggtctcggtcttggtttaggtcccatgccacaggtccaagttagggtccaagtgttggtatgggttcaagtttgagtttgggtttaggtttgggtcctgttactgtcccaaatttgtgttcaagtccaaaacatggcccgattctaattcttggtttaggatcgagtttggatcctggtttgggtttggatactgatccgggtccacgttattccagttctggtcacgggtcttgggccgcatcctatgtttgggttttggtccacgttcggggttgtgtcccagtagtcatgtcctgtgttccgggtccaaggtcttgtctcgtgtctcgagtctgtggtcgagtttttggtctcggtcctggtttcggggcctagttttcggtccaagtcccccatctaagttcggattccttgtccaagtttgggtccaagttcgggtttggggcccaagtcccacatctaggtctggatcctagttcccagtctaggtccaactttaggttcgggtttgaatcccgagtttcgtctgagtttaggttccagtatgggttcaagtttgagtcagggttcaagtcccagtcttagtccaggtccctattcgagtttaggtcgagatcctgatccgggtctgaattaaggtctaggtccaggacaaggttctgctctgggtttgggtctgggttcaggtcctgagtctgggtctaggtgcgggtctgggttttagtcctgggttccagtctttgtatgggtatgggtctgggcccgtggctaggttaaggtttagggtttagggtttagggttttgggttttgggcagtagggtttagggggaagtgtatagagtttaggatttagggtttaaggtttaaggtttagggtttagggtccgcttagagttcaaatttcaatttcgggtcacatgatacgatttaaggtttgggtctgggtctgggtctgagtcctggtctgggtctggtccgtg

SEQ ID NO: 340689 - DNA, 720 bp, Cannabis indica
aaaataccttgatatttctaaaatcaactaatccaataatctcatcaatatttctaactaaaactgttgtgacatttttggcctccaattgggtctccagggacgccaaacttgaaaatatttttatttcacaaataactcatattatattcacgtatttcaaataaatccccgtaattaacaaattacgcttatatatccacttatgagtctttagggtcaccgaacctaaaaatatttagctcatattacattcaccatgctatataaatctccgtaattaacaaattacaattatttactcacttatagcaaaatttaaattttatgctgaaataaattagtaggatcataatcccacttattacctgattaactcataatataaatataaaccctaattaattaccattagacttatcgggatattacaatatcagtacctcccaaaaacgtcagaggttgtagcttcacgaaccgctcaaacactgaatctctatgcggcgacataaaccacttgttacccaccactagcataggaactagtggtaacatttgctcaataggagctgccggtgctggttgcctcaaccaatgtaatttttcttcttgacgaagtatgacacctcacattccttgaaacatctgctgccaatcagcaggcggattagcattgccaacccccgcattatccctaggatttagcggaggcgcaagcag

SEQ ID NO: 340690 - DNA, 765 bp, Cannabis indica
aagttttcaatttttcaaacaatttgtaaatcataaaaattggaatatgtccaatgttatacaacccatataaaaatcaagttcaataattaagttgagtccttacctctcccgagtcgttaaactttttccaaaagacaatcttaagctcttaagtcccgagctccaatattgtttagtccaatcttacatattactctcacctataccaccaaatggttagataattatcattatcgcattctacattcaaaatcgagtccaacaacatataatatgactatatttgaaatttggggttctgaaacctcacctaagcggtccacattaacaatcgtggctgtaaaaattggaataaccggaaatgtcactgaaaataggggtagtgtatattaaaacaaccacctcgacgagtagatcacacccatgccaaccgtttgtcaaaacggtacacgatgtcacccgaaagtcgccgaaaaggggcgtagctataaaaatatcaccggaaaaagtagcgaaccggggaaaatggtttagtgtaggttgttctcctcgacgagctgagtttagtggtgaaaacgtctcgttaaacggacgctggaggtgaccgaaaaatctgttcaaagtttgaactcccaaactttgacttgcgatcccaagctaacgacggcgagagaagcggcgccgcttggacggtgcggtcgccgacacttgggctttcgatttgtcgggtgcgtggggtcgggcggtggccggaggtgggtc

SEQ ID NO: 340691 - DNA, 770 bp, Cannabis indica
ctagggatttgaccatgcattaaccatggtatattcattgggaatacccaactttattgatagttacagaaatacatgtactataattctgggaatcatcccacaaaaacactataaataccccctcaaagctcattaatgggggtcgagaattttgggttgcataactgcaagaagagtaaatactcaccaagaacattctctgtattaaatacactcataatatacagactcgtggactaaggctcattaacgccccaaccacgtaaaaatccttctcttaatttcttacagctctttaaactcttattattttattggttgccgaaaacctcagtcaacatttttgtgctttcattgagagctgaagaaggcttctgtaaacatacactacatcactacaatggtggagactcgaagcactcatcaaccttgccctcttgaagatgctcaagacccgaatgaggaagacgtagcctcaagagcagctgagggttccgaggaagaagaaggaattcctgatgatgattacgagggaaacctcgatgagtacgcctacgatgacggtagctactcggaatcggtgcttttaagacaaaaagttgtcgatcatgaagctgagatcgcagcccaaaaagcacaaaaccaaaagatgcaagaggtaatgctggccatgcaaaaagccatcgaggcagctggaatccacgtgcatcccaaagccatgtccgctagatttggaaaggaactagaggaatgttgggttttatgcc

SEQ ID NO: 340692 - DNA, 936 bp, Cannabis indica
tcaactatctcatatagcacccccgtcaatttccatatgcatgcagtgtccactcaaccatccaactaattcacacttgcatcacgcccttttggctccctcgatgtactaagttccaatgatgcggccttctgtcatgcaaactctaacacccttcttgaactttgcaggctcacatgactactaagtctcactagcacgaccctctggcctccacataaactctagtgccatctcagcacttgcgctcggtcttctcagccctgctggcttctttaattcattcattccacaactctgcacctctatcgatgcctttgtgtgacttacgctcaccgacacttttacaagcccacacatcccactcaactgccttggcgcttctatatggattaaataaaactcgcatgtgaacacttccaagtacaaccatcctctgaagattgcggcctctgcccccttggtctccatgtgcatccctcttgagacacaacgtagcaactaaagcattccatgtctgtcccaatttgaaccatctcggttatcaactctcgacctctgtcgtgactaacaagaatttgatggtccctgcactacatccacactcctgccactaagctttcttttcaacaaaagcgcctcttgcggcttacgatgtcactcaggataacttagcctagtataccaagcatacagtatggagtatcccctcaatcttgtactatgccaacgagtttcaaacattctgttgcgcctctccacaattgcacatggtagttgtctttctagcatccttcctcacgcctacatcctctctaggataggccaaccaggttcacctcccacttagatgaacttggctctgataccaactttcataggctcacctttttaggcagcggaacaatcgtgcggcaccttgacttctctaagcca

SEQ ID NO: 340693 - DNA, 1035 bp, Cannabis indica
tgggtccagatccggatcccaatctcgggtcccagtttggtaccatttttggtgccgggtcacgagctgggtcctaggttcaagttcgggtactaggtcctgttcctagttctgtttcccaggtttgtatccttattctgggtccatgtctctgttattgtgtggagttgggtctcggtctagcttcgggttcgagtcatattctctagtcgggtttaggtctgtgtctgggttttgatttggtttggggattgggtttaggtcctagtcctggtcctagcctgagttctgttgtagttccatttgtgattctgagttcgagtttgggtttgagttcgtgtcggagtttgagtcctggtctgagtttgggttcgattctgaatttcagtctaggtccagatcaggctctgggtgtgggttcacgtcctgggtctggattcagttctcggtctaagtccttggttcttatcctggtctgggttcgagtttgggtccgggtgtagcattgggtctgattctaggtgtgggtgtttgatttcgggtccttgtctttgtttgggtttgtgtccatgtttggaccccgatttgagtctaggtttggctctaggtcgaagttcgggtcccgattgcgtgtccatgattggttctgtgtgaggatctccgtccaaatctaggtcgagcatttcgatcccagtctgggtcttggtccgaggccaggttcgtatccacatccctatctaggtccgagtccatgatttgggtccaagtccgggtctcaagtccgggtctttgttccggtatgggtacacgaccgtgtccgggccagagtcccagtctcagttcaggtctgaggctagctctgtgttcggttctaggtcttggtccgggtcctggtcagggtcctagtcttgtcctagggttcttaattcgacaattcttgttcaagttctaattttgggtcccaggtctaggtctgggtttgggtttggttcttcgtctgggttctggtcctagtctgagtcccagatctagaca

SEQ ID NO: 340694 - DNA, 520 bp, Cannabis indica
aatataactattcatgcgagcaaattaaaaaaatacaaagtgataaaaatccttaaagtatattcaagtttgcttaaggcagattataactgcaattgcgaggcagaattggcaactgctcactacttaagcaagaagattacgagcaatggacaaacccaaaagtgatgtatatttgatcaaaatatagttgtttacattgtgaataataacgcaagtaaatacaattgtattaagttcgaataaaaacaaaacaaggcatttaagataagaaaaacataagactggttacatacttgtctttacaaaaatgccacaaggggcaaaccattaagtcattctcctaagcttatgatgagaagggaagacgatgaactcgagaaagaccgtcttcatatagcttgaaaaagaccgtctacacataacttaagaaaaatcggctacacgtagagagccatggtctctgcacaggcctcattcccctcatcatcagaagatcccatttcctgaagccgagatc

SEQ ID NO: 340695 - DNA, 825 bp, Cannabis indica
gttttgaaagaatttcgtaaggaagtcgatgaaaatttgcattacttgaggaaaatttgaagggttgcattgatcataaggttggagaggatttaactttttatcttgatacgaagttttcataattgaaagatttgattaaagatagtattgcgaatgttgtaccacaggtgaggtgttttggtttcttttatgattgaaattgtttatttttagttttatttgttaacatgcaatgatttttatgtgattttgtttttgtagagtaatgaggatgaggatgaggatgacggtggtggtggtggcgttggtagtccccgtaacctagatgacattagtgatgatgttgaggtattatttagtagtttttagattttttagtgtttcatgtgtttgtatgttgtctttttgtgttattagttgcgctatgatagtatggtgctatttttagtatcccttattatgtgcttttttgggttatgatgttgttatttataatgtggtgttgttattttttattgtagcctactgttaagggggaaggtgaagatgctggtgatgtgaaggatggcaaagattgtgttgatggtgacggtgatgtttataaggtctggtttctttttattattatttaatattttctattatattttttgctacttaattgtttcttttctgattatattgtgcaagaaattaaaaatatatctgagatgtctgtgaaagaagttgatagtcaagattttgatggtttatcttctttggaaaaggttaattttgccaattaattttttacagaacagttttgtgtaattattgtatttt

SEQ ID NO: 340696 - DNA, 611 bp, Cannabis indica
gcccaagcaaattgatgggctggcccatgaaaaaaacaagacaggaagtccaaattcaaccatagctaagtcatatagatccaaaaggttaattcgaatcaacgagtaatcaaagaaatgtggatatagaccctcatgggtcattggaaaagagtattcaaaaatatgttagagagtgcctaccgtttgagaccaatcttacgtggcacgtccccaaaaaggatcccaaagaatcagggggtttgttccctgtgtgagatcttggaacacgcacagtaaaaaggaaaccacctttttacctaatgcacactattccgacattgaatcctcacaagcgacgacacacacccaattgtcattatcaaatagtaacatcccgtatggatggcggttacacccagaattcagtctcacctactcaacctagtagtcaatattcaaatgtatatacctcatcagtgagctcaatttctcatagaaatgttgggctttgtgccctaaataaaactctatttcaatgtaattttttctattcaattatcaataatgaaacagatttaatttcatacttgtttaatgtgtgatttggttcatgtgatcatctatttact

SEQ ID NO: 340697 - DNA, 563 bp, Cannabis indica
agatcctggtaaaataaattccaacagaaatgcgccccaaaaatgaaattaaaggcagaaaattctcgcgcctaatggtgttacgttttaccggcgcatttgatttgacatcgccggtattactatgttttgccagcgcaaacatggccggcaaaagtaaacccaaaataaaattgggagtccagatgtgttttgtctcgaaaacttttaccggcgcatgtgacgaaatgcgccggcaaaaagtcctttacttgtagtgaaaatacgctggcaaaaaggttaaaattttaccattgcacatttgcagtggctaaaatctaacttttaccagtgcatttatgcgctaagaaaagtcatttttgccagcacttttcattttatgctggcaaaaattctaataccaacgtgaatttgccaattccttttgccaacatattagaagtaaattctattttagcaataccaaacttttgccagcacaaaaatgtgctcgcaaaagtaacatttcttgtagtgtatagtgaaagagtacatgcccacccatagcaagtcaagtactcaat

SEQ ID NO: 340698 - DNA, 864 bp, Cannabis indica
gattatattcataactccacaggatctctacaacacttagggtggaagaagctattgacatatgtagttcaaatactttgaactctagactatactcaatacaccacagtatctctatgacacacatattttgactagccatggatataatataatgaacaaattagaaatttattagaacttattcttgatcctataattgttccacttaatatgttactgtagtaatagaattgataccaatgaagttcttggacatagtatcacagtaccttatctgagtcggataattttcaaattctatcccatcattatttggatgacactagtgatagattactatgttatgatcatgataggaactttagaataaaacaaagaaagtaaatctgaccattcatatggatagaattaacttatcagaatttaaggataagataggagaattttgcaaagtctattcgaatgacttaggcaaaatccctagtccttgtgaaatgttttctcgtaactctaatgattacttaatcttaagcaagtattttacattattgtttatactagaatgctatgttgatgacttagtctagaaggaacttatagtttcagactaagacattatgtcacaataagaggtccctgagaaccgatgacaagaggctaagtgtacacttgtgtacgaacttaactagactcctactgttgagtgggagccatcaagatgtaatcaaacaaggaacattaggagacaatcaaggaagaatctctgaatgtgacctatatgttagatgatagggtgtatattagaatcctcttatctacaccaactcagaatattggagatggtggttactctgggggtgg

SEQ ID NO: 340699 - DNA, 582 bp, Cannabis indica
caacaacaatattttcaataactatcattcattcacactcataaacaattagtaacatcttttactaatttaagagtgaaaaaagagatgagagttacatattcaagtgatcatcagtttaaaggatttgcaactcctattttgagatcattctacacaaattttgtaactccataatgtatgttacaatttgacaaaattaatactttgtcacacttaattatttataacttaattatttaatctacatattatattatataaaataatataacataaagaaatcaaacttttctgctattttgttcatctttgtttctgcttcttttctctgcaactcgcaaggctttgcctcaagctcttacatggtatcagtcgcctttgactaacgtcttcaatggagtcgttgtccacaggccagccggttcctcccagaactccttccacaaacacggcccttactcaggctgtcgtcgagcgtccaaatcagatgaacaatccgttttctcattctctcacatccattcttactgttaaactcgatcgcactaactttttgtcttggaaatcacaggttctccc

SEQ ID NO: 340700 - DNA, 616 bp, Cannabis indica
atcatccaaggagtattatttctcccacttaggagattatttaggtcggtcccggatgggttttggacctccggtgcccattcccttggacccttcggcctatttatcttctagctggttccgtccctcggacagctatctcggggatgatgcagtagtgttatggttcgggactttgctagggccgaattagagagttagggtaggactagcttgattgtgttttgctaagtgtgtgttgcttttatggatgttctaacactttgcttatttttttgttgcagcagccgtacccatggacgaaatcttggccactcttgctgaagcccatagtcctgatgcttcccctcctcctacttcttctcagttggtcactcccgggagggcttcctccagcgccccttcgggcactattgtcttagtggacgaggaggaggtacttcttgaggaagctgaagaaggtgaggaagagcaagagatcgctcttgcgcgcaagcggaagggcaagatggtggaggaggagccttctaagcgaccccagagggtggacactccggccccgagtcatgactctgggattccctctgaggcagaggaatacacagtgcctcatggc

SEQ ID NO: 340701 - DNA, 549 bp, Cannabis indica
gtagatttgactaattgataaataaaaaggtatttttcaatatacgccgtaaatatattttttagctcatattcataaaatcaactccaatagtggtgtcaaatatactctaaatttcacacttgttaaaaattgtgctaaatttggcacaaaatatagcatgagcaaaactttatactacaattaatatcacttattcatttacttttttaccactcattaatgtttgataattttttacattttattcatatatttaatgagatttttatacactttcaatcaaaatttgatacatttgtttgaattttttacacttttctattaaaaataaagttaatttatccataatgtattaaagcacaattgttaaatttgggccaaatataatatgagaaaattacactacatacctcttttaaatagatgcccttaatttttatcgggttaatttcacaaatgcacaaaaataacaaaaaaataacaaaaacacggtttcacggaattttaaatatttttacaatttttttgattttatttacataaaat

SEQ ID NO: 340702 - DNA, 766 bp, Cannabis indica
cccctttcagcggtaataggctagtccagttggagtgttattgatctcaatgcttgaggagagttctctagagttatgttctccaagagttcactcctcaagtgagtttttagaatttgagagaaggagctcaagagtatgatctcgtgagtatcaatttcagggtccctttacaagtgatttcaccccccttatatagatattcatctaggatttaaaatcccttaaacataggtatgccctcccgtaactatagttcggttaggttcaagatacaaaataataataaaataattatttaaaaaataaatatctcttcacttatcactttttgactatattttcggagcagctctaacagcacgcgtccctcgtatttagcggacccggatggtcatgggtacctgaggggagctaattgggtcggttcgtgcccatcaggtccttgagataatttgacagctgaggagccctttacaccttagcacctgacggttgcaccttggcacctgacggagttgggagcttagtgcgcccaaaatgctcctctttggccattgagctcctctttggccaatgagctcctccttggcccatgagctcctccttggcccatgagctcctccttggcccatgagctcctctttggccaatagctcctccatggccaatgagctcctccttggcccatgagctcctccttggcaataagctcctccttggcccatagctccaccttgttggacctccatatctagagtaaaaa

SEQ ID NO: 340703 - DNA, 775 bp, Cannabis indica
agtgttgaaaatgagaagaaaataatttttaaggaaaaaatacacttaacataaaacaatattatttcagccaataaatcataaataacatttatttttcatttaataaaaaatcactaaaagacaaaatactaatggggcaaaaagaccattttgcccctccacactaaaaccacataaataacactaaaggggtatttttgggaaattctaaattcccggccattcccgacattcccaatgtctaacaacccgtcccaaactactaacatactaagctgtgatttctactgagccaaacgccgagttccgaaataccgggcaccggaaatgcaaaatatgaaaactactgaataacataaccatgcatttctgaattccataaataatagtaataaattatttaaatagctataaataattttcataattaatccagattaactgctaatttccaaattaaactaagcgggctttacaggttattccaatgtggggcccaaaacaacaattcatccacctttggccttacatttgaattgcataaccctgtcaaagaagagttgttctagactttgataactcaacattcgagtatgtttagcaagttcagacaaagtctgaactttactagagggacatacttggttaacatgtcttgtaatacccggaattaagaaatggattagcaaaaccctaactagataattatgtataatggaggaattatattattatatagttcaatatatgtgaaattatatgaaatttaaca

SEQ ID NO: 340704 - DNA, 1195 bp, Cannabis indica
tttgatgagaaagcatcatggctttaatcttctttatagcctcactggttcactgaacttagtttggaccttgatatttcttatccccagtttcatccagtgagttggggaacggtacttcttactatccaacatcataccctgattactaatgttgtatgaaaactttatcaaagataaatatatgatccatgaaccttcgaaatccatcacccaaactcgtaacatatccttcagtatctaaattgtcctttaagaccagttatctgtgtcagggtggatagttgtactgatttcagcttcataccaacggtctttaggaaactttcttaaaacttagaggtgaacttttgttctctatctgaataatgaacttcataaccttatgaagacatactattttctttacgtattcatatggaatcaaacatgctcttggttcaaggtaaaccaaccacagaatctatagtgacatcctcccatttcaattttggaagtgtgataggttgtaataaccctacaagtgctgatgctgatttgtttaacagaaaattgtgacttccataacggtggctgtagtatagatcgggcagtcgattccacagggaggtaattatggacaaaaatgttagtagaaatataaacaaaaggctaataaatagtaacaataataaccaatgatttgtgatttttgttttggtaataaacattaaaagaaagtaaataaaagtgtaatcaatagtaaaagaaagaaaggattcaagaatcatccatatgcttgtttagctattttgtacccttgattcacaaagttgacacaaatgatatagcattaaagttcattatattttgagtagtatacaagttcttgcaaataaaagaaatgacttaatcttatgtagaacctagaaatgacattatacatcaagcaataatgcaataaaagattaaacataaatattatttttactaaatagtgatacatagaaagagcataactaatcatatatatctttagtaaaaataatgacaaaaagatacaaataaagatggtggtgatagtgaaggaaatgaacattataaatactttcttaatttttaaatacataggaagagcatgactaaacttatatgtttaataaaaagtaaataaaaatgaacataaagatagtacaagataaatactactattact

SEQ ID NO: 340705 - DNA, 534 bp, Cannabis indica
catacaacttgtgatccctaagtcactgcaataccattcgaagatgatgctcatgctcctcttctgactgagagtacacaaggatgtcgttgataaacactatgatacaattatcgaggaaatccttgaataccctattcatgagatccataaaggctgcaggagcattagtcaatccaaatgacatttctagaaactcgtagtgcccatatctggttcaaaatgaagtctttggtatatcttcttcccgaattatgagttgatgatagccggatcgcaagttaatctttgaaaataccgtttttccgtgaagctgatcaaacaaatcgttaattctgggtaacagatactttttcttgatcgtcaacttacttagttcccgataatcaatcacattctaagggaaccatctttctttttcatgaacataaccggagctccccagggcgatacactgggtcgggtaaacccaatatcaagcatcccctgaagttgtaacttaagctccttgagttctgctggagccatcctata

SEQ ID NO: 340706 - DNA, 567 bp, Cannabis indica
ggcttgtaataactgcttgccaacggtggttcaactgcgtactaagcgtgtcgatgtaagtcctttatgcccgatttgtcacaatgaacatgaaactatactccatgctttagtcacttgccgtgaggttcgcaaatgctgggaccgtgttggaatcggtacatctgtcactcctggcgctagtttctttgacttgtgcagtgtggcttttcgcaacaactctgctgctgtaaattgcagaattgtggtcgtgtgttgggctatttggggagccaggaacaacctggtgtggaacaagaaaccatttatttttgaagacgttgttgcgtatgcgtttcgctatcttgaccaatggaaatctgctcaagtatcttcggattcatcgtggccgattctaacggctgctgatgtgggagagcagtggacaccacctgacggtactagtgtcaagataaacgtcgacgcgacaatctttaatgatgggaggagcttcggcttgggtatggtggctagaaactctgatggtttgttgattgagggaaggatgaaatgttggaaattatttta

SEQ ID NO: 340707 - DNA, 809 bp, Cannabis indica
tgcggaagacggtggtaaccaacgcgaaggagagaaagagatctaggtcatatcttgttattactctatgatagaaaggaacaagggttaaaatttgagcgaaaagagtcattattattcctctgcatcaatgtaagattttctaaactcttacgtgttcaattttatcgtattagataatttatatttagggtgttaatgaaacatacatgttactaaatctagattccagcaaaataaattccaacagtttattcatccatccaaccgcagcatatgtattcggggaacctacttcactatggttgaatatttaagatattcaaactccactaatcattgataatacctcgggtgttctaattaagtatttaggccaaggaatgaacatgtttgctacttccttaatatatctgcacccgtcaattgagattgggaattcaacatcctcttgcagcatttctgaaatcagaacctgggctttgaatcatcgtagtctttacagtgaactttgattggaccctcatgttcgtacagataagcttgggccataatgttgtcgatattatcagagcagagatatactagctgattaagagccctctgttcatcgaaattgtacatcagaggtggctcatttagggaaacaaactcctaagcataattttatggtcgaccctcatcttcatgagcgtattgttatggaacatacacttgatgagccacctctccttcttcctcatcctcattctgctcttgttgggcaatatttttcttctatttaagggatttgatttctgcttttaatt

SEQ ID NO: 340708 - DNA, 720 bp, Cannabis indica
tctctctcattttttttttttttgaaacaagtagcatttagtttctgatattaagaatattaaattttaaaataaaataaataaatgtaatgcatttgggccttttacgtgtccatatttataagttaacggatgtggtagtaacgggtgtaaaagaattgtaacattaggtagttttgcctctgaatataaagataaggtatttaagtgtataaaatctgaaacattaggtatttatgcagcatatttacccttaaaaaaatagtggtatttagagaaattttagagtgacatattatcgctttatatctctcctttatagatacatatatagtgcgtttggtaatacttttttaatcagttttctattttttaattaaaaaagtgaaaataatttttaaaaacatattctataaaactgctttcacttttaaatatttttattgagaatcaaaaattaaaaaaaaaaaatcactttcataattttttaaacagtttttttatttccataatcaatattttagacttcgaccacaacctgaaccttaagacctggacttcggcccgagcctcagtctcggactcgaaccacggccccggcccctgactcagacctttatccaacttaaataaaatcaaaaaataaaaataaaatgaaagttatagaacacacttttgttttctgtttttaaaattaaaaaataaaagaagttatagaac

SEQ ID NO: 340709 - DNA, 554 bp, Cannabis indica
cttatatctacaccaactaataaaggttttgagacggtggttactcaggggtggaggaattattctagaagagtgttaaaacccatatatgataatttaagctccatcaatgaagataaataactttgatgtttcaaaaacactagaaagttatttaactagaaaaaaattctataccgcgttatctctattccattgcgaatagaattagagataagtcttctgtatattcatatgcactttataagcagtgaagaattcagtatccctaaatgagtaatgcacatagcatatttgcataatgttttatgaacacaaaggaagtaatggtggaaaaagcagtagcttaccacagacttacagttccagtaatttgggctgagtcaaatatactacacttgatctggagtacaagacaatagattgattgaaatgtactacttgttttatgttagtgcaagtgggagtttgttgggattttatgccctaaataaaacccatttaaatctaatctaattttttatcaatgatagattagacgtcatttatgttta

SEQ ID NO: 340710 - DNA, 1701 bp, Cannabis indica
gggattaacgactgagttgccatatatacactctctatatcttcagtcagaatagtgaatgtagtgtatttggcatgattccctcggggagtctgtccagatttgtcagtgaactttcatttcttcccatttccttgcttgttgttgttgcttgaatggttgcaacttgagcttgaattgttggaatagtttggaagttgggcagatgttccagtggaaggagcctttgttttgcctgactttttttcaccttctgctcattgaatggcttcttcgagcttgataaagtcttcggctgggtcgaggacttcaatgccccttagtatcatagataactttccatcctcggttacccgcgaaactttggtcgcttccatcatgaatttgctgatgtatgcccggagtggcttgcctagtcgttcctttacttcgaccaaatctcccaaatgcaatcggagcttgcgcgaggaggagaattgcgcatggtattcagaagagaagattttccatgaactaaactttccaggagccaacttgaaataccattgttgtgcggctttcgacagagtggcagggaatactccttgtaaatccatttgcatctcaaagtacatgagatgggaaagaggatcttctctcccagtatacatcttccacgttggcattttgaacttgtgaggcagtggcagaagattatctctggtgagaagggagttccgcgagctcggtctaactcaagatcattattacgctgtccagccatgccatgaaacatatttttcaatttgtcaagctggccttgtacagctgggctgacctactcggcattctggtcgacttggattacgtcagcgtcatgttctccttcttctatttagatcgttccttaggtcatgggttgctcccaacctttcaaacacagaagagcctggtttccttagtgattgattcgcttggttgacaggtggaatagcgccattagtctggttggaaccgtcaggtatgactcctcttgatgaattaccgaagaaggtctactcgcctaccgctttgcccaggagtgaaactcgtaactagggattgggcggctgaccactagtagtctgggaagtattcatcgttggatcctcttccgtttctcccaggggaatgacgttcgatgattgctcacctacaatttggtaggctcttcgtatcagcacggtggcttgccgactacgatctttaatctctgcatggtgagcccttaatgcctccatctctttatctctccattcagcgaacatacgcctttgtttgtcaaatgcgagatttactgcagcacgcagttcgtcctgatcatgatgcagggtgttgttatgaccctgcatgagtccgagcttgtcacggagattttgcaattcggttgcgtctccgatggtcgtctgggtgttgattccaggcggaacagtcgtattatgaatgccctggttgggtgcggaactgttattcccagtctcttgcacaccaggcacaactccagtaataggaactatttcaccattcaccatgtttcctgtctgtccgggattaactgcaggcgaaacccttgaactccttgcgtcctctgatgcaggatccagcgtctctgaatttgctaggtcagaatgacctctaagagttttcactatcatgttgtcggttgagtatcgaataaagagc

SEQ ID NO: 340711 - DNA, 749 bp, Cannabis indica
agaaggaacatgaatgagcttgattcgattgtggtgacctggtctcgaacaatatgacaatcgatgtcgatgtgtttggtgcgctcatggaagacatcattctcgggtatgtggagtgcaacttggttgtcacagtatattgttgcaggggtggaatgtgagatcccaaagtctttgaggatgttgaagagccataggatttcgcaagttatgttagctagggagcggtattcagcttctgcagaggatttagacacggttgcctacttctttgatttccatgatattaaagagttgccaaggaagatacaatatcctgtgatggaacgcctggtgtcaggactagtgccccactcagcatctgtgaatgcatggagttggaatttgttattatgttgtggaatgctagggctgcaaagtaagccttgaccaggtgtgcctttaaggtattgaaggatttgaatggcagctttcatgtgaggttgccttggatcatgaagaaattgacaaaggcgatttacagcataggtaatgtcaggccgtgtaatggctatatagaggagtttgccaattaaactcctataggaagtaggtgttgggttttatgccctaaataaaacccatgacaatctaatatgatttgttatcaataagagaattagaagtgatttatgttaacatgtagttttcatgcttatggtttaatatatgcacaaaatctgctaagtccagaacatatattcattcac

SEQ ID NO: 340712 - DNA, 859 bp, Cannabis indica
ttcaatcagaaataggaggtccaattcaaggtataatgcttagccttcttctttatggttttctttagctcaagataggttaattgcatgattttagtgatttgaggttctgtagtgtgcagctagtttgggtttgaattctgggggttaagataggtttgttttagttgattttgtgctgagatagctagttgtgctacggattactcaaacttgaagttggctctctaatggtatttttaatttctgagctatttaatgtgttctgttgcttgaaatggatttagtatagtatatgcaagtgttctatggagtatggtagagtttgggctcgaattgagttgtggaggacatttttggggttccctgcactgaaccgatcgaccgattttggggagcctataacaaccggtcgaccagttgatccccaggaaccggtcttccggttgggaaccagtctgctggttgggcttttttcagaatcctaccttaaactaagtttaagaataagcatactatgaatgtatattatttactagttcatgcatgattttataaatgatgtaattgatgtaaaaaattaattttatatctaaaaattttaaatacattgaacattataatcttgaaaaataaaattaattaatataatatgatagaattttcaaactattaaattaattgaaatcttaaattaaatataagtaaagaaaagaaaagaaaatattacttctaaagtattgaactcgtgacattttaattattttaagagtgattattataaaattattataagttgaatatgttataggtttttataagtataattattgttttaaaaataaatttaattaaaata

SEQ ID NO: 340713 - DNA, 481 bp, Cannabis indica
gtaaaaataaaaagcccctaatttaattatataattaataaatatatttcaattcacatttgtcacttgcttgttcacttatttaaaaaatgtattcgatttttttaacaaacatattatttatttgatctaaattgctatgattaatttgttgacagatccaatgatctgattttaatcatagttcaattgtcagtatatcaaataaataatttgtaatatgtaaattttgtaatttctttcatttttgatacacctagaaacatgataggacctatccaaattagtttgcataattgagcctatatctttacttttgggcttagatgcatacatgaagcccatttatttctggatatttcaatggactaggtgttggatattatatttttaccaggatcttagatctactcacaagtatgttgtttaaaacaccctaaaatatgaactttctaaaaacgataaaattaaacacatataa

SEQ ID NO: 340714 - DNA, 502 bp, Cannabis indica
tttatgggatcccgaaacataagaaatctttttagatggtttgtaaactttaaataattacaagtgttatttttattccgtaaataatttaaagtttaaattttgctcttatttctagtaatctcagtttagcaggattaggttatgttatcaaaaatcgtaatgtgcctaactgctagggcgttacagtttgggattagagcactaaggttttaaaacttcttgtagaccagctgaacatgtacaataatcgtcagatacaagctcgactcatggtgcagtaagtgttgaaagtaaatgcttaactgcttatgtgattacttatttactgctttctattttaggctatatatgagcatctagaatgaatgtgatatgaaaagtatgattagtgtattaattgataaatattcatttaataaaaaaaataatatgtttgagttagggttaagacaataagcgtgtaagtgtggtattagtgcctaacttaccggcgagcatg

SEQ ID NO: 340715 - DNA, 627 bp, Cannabis indica
acgggatccggaagagaattggtgaagcaattgttaaagagacatccttgaatgcaatggaggagagggcctgtaaaggccaaaaataatggaacccgatcccaacataaaagacactgctggaatcctatttgacgtccctattgtttatggaaccggaagtaactcacagaacaaagggacgagagaagaggagaaagtttgttccaaagacaggaaaccatcaaagaatgaaacagaggggacatgaggagacaataaaacaactgaaaggggaattgggttctggatccagatttgaagtactcacaggggaagtttctcagctatgtgattcaatctcggaatagatatttgaagcggcgaactctgcatcgcagggtcgccgagagcaatgagttctcttttttggaatgttcaagggcttggcaacccttggactgtttcggctcttgccacccatgtcaaagaatacaattctggtttggttttcctttccgaaacttgctcgaaaagtgcgtatatgaagatgattcgtgttcggttgggtttcgatggttgtttttgtgtggatgctaaaggcaaaagtggggggctggctctactttggaaagctcctttttctgt

SEQ ID NO: 340716 - DNA, 611 bp, Cannabis indica
atttgacaattcatgcttaaaaattgtgcatggtcttttagtataccacattaaaatgtataggaatttaatactctaaaattaattaaatcctaaaatatcctcctcataccttccctctttctcttggccctcactccctctctctttaactctcaccaaacccaaccgatacccacgaccacataactagactgaaccaggctcaaaccaaacttacgaccaccgcaccacctccagcgaaacccactccaaacacaaaacgtaggacaaaactaaggaggatatcgcgaaaccacaaagagaaatcgtgaaacccaaagcccaaaaatctatgagctcaaccaccccgaaatccatactcatcgttggagttctcaactcgattatttttgcatttttttatacagtttttgatgatgtcgcgaaatatcgctaaatgttgatatatcgtgaaacatcgctaaatgtctctatatcacgaaacatcgcgaaacacattgctaaatgtcgtgaaatcataatcaagtttttgcgatgattaacgatgtttagcgatgtgctgtgcatttttttagtctcatatcacaaataaattgctaatatcatcg

SEQ ID NO: 340717 - DNA, 605 bp, Cannabis indica
tgtttggacttgaccatgagtgtcggatagataaagatgtcttggatgtgtgcgagttgggatgggtcagaactaatgttatgactatttggtgcaggtatagtggttaacatttaagttaataattatatttgtagatttatatttataaaatattgtgatttagttatttgcaggagcattcacttaatattagtgggttgaacaatacatatgtctttttaaatcctgcttgagtatcctcaatagcttgtaaagatcctaagcaacgtacacataatctcactgagatattgatagaaatacaacccgattaatggttgatttgtccctgaaatccactgtaggtaaatttttgttttaatatatgtaaatatataattattatggagttgactatactttttaattatgtgtagtgaatattggacggtgataatcattcagcctgctactcagtcagtgacattcgttgacccaaagaatatgccaattcagaatgaaattagaatatgccaattcatttttttcattaatttaacttctattactaatttggtcactaataacttctctttggtgtagtgctttggaaacctataaga

SEQ ID NO: 340718 - DNA, 1030 bp, Cannabis indica
gtcattactgtatacacttgtaatcgtcaccatcttaaaaattaataatataataattgataaattattgttattactgtatcttgtttgtacttttgaaaaaaataataatataacaatcaataaatccatataaaatatgatgatgttgaatagagagaatggagagtatcaataattaataaatgaaaatataataagcaaaattaatttaaatcgtgcaatcaaaaaattattttgaaaggcattctcaaaaagctaaaaaataaaaataaacataagagatcaagatgataaatagttttttttaaaaatgatgatgaataaagagaataaaaagtattgacaaatgagaattagataaaacataaacaaaattaatataatgtacttttttacttcgttaaatccttcttatataatataagtgctcgtttatcattaatttagttgaaaagaatttttgttgaagtatttcctatggataatatgtacatggtcggtcgtgagttgaaatgagttataggcacaagaaaaaaataggtccttaatataaagtactcaaaattaggggtgggcatcatctattagaatttgtgtacctattctagtgtatgttagtctgttagttagttgattgttattacagtttttactgttctttctttctttggtttatatcagttaagttagttaagttcttaactaactctgtactggtttgtatcatagtcggttgtatggttgtatataaaggcatgttctgcctttgtgtaaatagaattcattcattcagattaataaaacacttttattttcttttcgtaacatggtatcagagcaggaaagatagtctttcctgtccgatcctcttccccagctgaatcgtgttcttcatctccgattgagctgtgtttccttccgctgatctctctctttttcttgcttaatctcaatcgtttctccttcgattgattttctgcaatgtcttctaataatcgaacgaatcaaggtactcaagatgagtcca

SEQ ID NO: 340719 - DNA, 724 bp, Cannabis indica
tctagattcacttggatttatctacttagacaaaagtccgatgttattactattattcctgagtttatttcctacatacaaactcaatataattgtgttttcaaacgtttcaggtccgataatgctcctgaacttactttcaaagaattattctctaaacatggcattttacatgatttttcttgcatagagacacctgaacaaaacgccgttgctgaaagaaaacatcaacatcttttaaatgtggctagagctttgctttttcaatcaaaaattcccattcaatattggactgaatgccttcttactgctgtctttttaatcaatcgcacgcctacaccaaatcttgcaaacaaaactccttatgaaattctttttggcaagcaacccgaatatactgatttaagatgttttggatgccttgcttttgcctcaactcttacttctcatagaactaagtttgagcctcgggcaagaacttgtgtgttcttaggatatcctaggggagtcaaagggtacaagttatatgatcttaacaccaagcagatttttatttcacgaaatgttgtctttcatgaacatgtttttccctttcacaaacttaatgctgctactgaacatattgatcctttcttgcctattatttttccaaatgaccatgtaactaacactcctattgcagattaccctatacaagaccatagccttgtttctcctcatttta

SEQ ID NO: 340720 - DNA, 860 bp, Cannabis indica
ttcagtaccagtttcattattttgcatttaattaatcacttaattaaataattaaactggtgaatattaaaatacggaatttcattcccgaaagcattcatttatcatctagctagcttgttgttggaggaggttgcaaacttgggacagattagccaattttaatgtcattagcaatgttatttgctttttctgtggtgtacaagagagactcgtggacaattatttatttagtgttattatagcatggaaattgctgaacaaatttttgggtggattggaataggttcaacaagatctgatttggagaatactctgatttaatagaagtaaacaatccaagtgtagaagggagttatatactgttgtttgtaatgctttagcgtatcatttgtggggtgctagaaattatttttttaaaatcacaaagtttatactgtacagaatgtagttaatagaattaaaataaatgtaactttcagttttcttattttaaaagaaagaaaaccaatagagaggatagaagttggtttgaggctttaagttgttctggttgtaattgttctaaagtgtattgttctctattttgcaatgaagcttaccattaccaaaatatatatgtattatattttaattttttattattttatgtatgttgttgtcgtagtattgatatgatacttttctagttttttagaaaaatgatctcgtaaaactatacaaatataaatcattaaaaaaattaaaatttatctttggggccattttattcaaaatatatgtatagggattctctaatatggggcgggttgttttttccccatattataaagaaggtttttgaaccaattatcatgtag

SEQ ID NO: 340721 - DNA, 815 bp, Cannabis indica
aaataaatcatgtgaagcatgcaacatagaatgatttttgatcttatattaattagtaaatctgattatattgaaatgagttttatttagggtacaaaatccaacactttaagcctctctaatctcaaaaaatgctcgtgcaagagctatgggggcatggatgaactaagaattgctatggcttccaacaataatggtttaacaaaaagacattcctacactaaaggaaaagaaagagttacaatggtaagggagaacagtgttaactctgataaaactcttatatatcttaattattggtatgcttccgtcttgctagggaattctttgtgccagacatccaagaagcattcacttcaggcaacaagattgatgaaatctcctttgggagtctccagccaccactttccatccctctaagacctggaattgcatcctcctctatgaggtgtttatttattttttaattataatttatttgtttttgaaattatttgttatttttaaatattaacacttttttaataattattgaattaatattattttacaacaatattatattctcatgtgtcattttagtcaattaattaagtttagccctattaccttaattgaatgataattttgtttttgatcacatgctttgtttcttgatttatgagaaatgttaaaatgtattattggtgtttatcagtgtcatacagttattagtataaggataattaaaatttttgcccctaaattattgagattattagatttaaggatttttcaaattttagtaaaaatgtttaacatggataaaagttcag

SEQ ID NO: 340722 - DNA, 866 bp, Cannabis indica
tcctgatggcttcaaggaagttaagaccctagttccaggctcaccccatcaaggtgctagcaaaccatccgcttcggcaagtcttacagaacccagaagcgtcaggaagactcctcaaatgggccatggaattaagccagttcgacatacactacgtaccgtgtatttctataaaggggcaagccgtagctgacttcataatggagtgcaatgaagcagaagctagtgcaagcgtgccagtaccacaaactccggcatggaaggtattcgttgacggagcgtcaaatgagaacggatccagtgccgagatagctatgatatctccaaacggactctggcttcaggcaaccctacgttttgaattcccagcttctaacaatgaagctgaatatgaagccctgatggcgaggttaaagttggcgaaaaccgtgggagccacaagagtagaagtcttagctattcgcaactagtggtaaaccaagtctcgggagaatatcaaatgcgtggagagaaaatggctgcatacatagccattgtccaggaactgctcaatgagttcacgaaatacaaagtggaaagaatccccagagaaaagaatgctcacgcagactgtttggctaagttggcatcagacagcgagattgagagattgggggtggtgcccgttgagcgcctctcggaaccgagtatcaaagttaaagttacggtggttacaatcgagcaagagccaaattagatggaccctatcatcaaatacataaccaaaggtgagttgcctcaagaaagggccctatccagaaggctacagtatcaggcacattgatatgtgatgatggatgatattctctatcgaagaggactcagca

SEQ ID NO: 340723 - DNA, 691 bp, Cannabis indica
cgaatgaaatggcatcgatctccacatgtttggtgcactcgtgatagacgggattctcactgatgtgaatgccagcggtattatcacagtacattcgtgctggggtgattggagtgacaccaaaatcttttaggagcgcattgatacaagtaagctcggaggttgcatttgccatagctctgtattcggcttcagcgaaggaacgagagaccacttattatttttttgatttccatgagatgagggagctgccaaggaagatgcaaaaaccagagacaaatcgtcttgtgtcttggcagctgccccaatcagcatcagcaaacaaggacagctgaacgttggctgaagagaggttggtttcagcataagctctgatttttggactggtttttgcaggaaaaaagagcccttgaccggggttttttttttgagatattgtagtatgcgttgtgtggcatggagatgaggtactcgtggagacgagagaaattgacttaagtggttaaccgcataggaaatatcaggcctagttatggtgagatatattaatttgccaatgaggctacggtaagaagtaggatctttgagcaactcacctttgtctttgcttaactttatgtttgtttccattggtgtggaaacaggtttagcacccaagtaacccgtgtcatttagtaactgtagtgtgaag

SEQ ID NO: 340724 - DNA, 992 bp, Cannabis indica
gtcccatcttgtctttaaagcccttgaattgagtaggaaataaaggtttagttagaatatcagcaagttagtcttttgttgaaacatgaaccattttgataatcccttcttgcacttttctctctcattatgtggcaatcaatctcaatatgttttgttctctcatagaacacaagatttgcagctatgtattgtgcagatttgttatcacaatacaagaatgcaggcccttcatgttcaactttaagctcctttaagatagacaaaagccaaataacctcacatgtggtatttgccattgccctatactcagcttctgaagaagatcttgaaacagcatgtagtttcttgctttttcatgaaaatattgatgctccaatgagaatgcaaaagcctatagtagatctccttgtgtctggacaagaagcccagtcaaaatcgctataggcatgcaatttaacttcagtttttgttgcaaacaacaagccttgaccaaggctgctcttaatatattgcaacactctttctgtagcatgaaggtgagtaacacgaggtgttgcaagaaattgactaagcttgttaactgagaatgagagatcaggcctagtgattgtcaaatactacaactttccaacaatatttctaaaaagagtcgggtctataagttttccttttacatcctttccaagtttgaggttaggctccataggtgtattcgtgggcttgtagcctaagtgtcctagatcctcaagcagttgcagggcataacgtctttaagagacaaaaatcccttgttcagatcgagctacttctaagccaagaaaatactttagatttcccaaatccttaagctaaaatatgtcattcagtcttactttcaaggcttggagtttctcaaggttattgttgttgggttttgtgccctaaataaaactcatttcaatataatcagatttattagttaacaaagatcagaaataacattttatgtt

SEQ ID NO: 340725 - DNA, 1305 bp, Cannabis indica
gtgaagaatccagattcaataaagaaggatattcgggctcagatctttataatactctgcaacagaaaggatacaagggttagagatctgagtcgaaggagacatattatttcgctgcaccaatgtaaggtttctcatactttatatgtgtttacttataatcgttttagaaattcatatttaggatgttaatcaacatacttgtgagtagatctaagatcatggtaaaataattccaacaccagcgcctaggttgacatttgggactgggcccagcgcccaagccaacatattgttaacctgggttgtttccaatcaagatcaccaaaaagtgttacaggcatttttttattagaaataatgaagattcaagcaaacttagggataaaaccataaacttgagcctctggaaatagggcccagcgcgcaagttgataatcaacctgggacattgccttcaattacttaaatgccaaatctgattcgaccaatgaattcagaatgatcaaaaatggggtagtataccttgtcctcaagtttaagaacctcgaaagtatcaaaacaagatcctgagagcttaaaaataggatacctaacacccaagttgataaatagcctggtgtgctgggttctgcttatttgattctaattctgttttgaccgtatgtctagctttctccaataactaagatccatgaagttagagaagtcaaattcacaactttgtatttcttatttccaacatgggaaactcacttggaaatgaagagtttcaaaactctattttttgcaaaacagcaacatctctgagaattggtgaccagcttcgccagaacattgaaacaaacgtccaggatgtttttactcttacccaacgtccaggttgatgtcatatgtcaacctgggtgttgggtcatgaactaaaacggtcataactcaatcaatattgattcgattagcgcaattaaaacttgcatttcaaagataattagattctctataaagttatgtctcacacttcaatcgaaattcttaagatatcagcaccaaaatttactcccaagtagttacaaaaataagctctagtttacccgcaacgggacccaccgggcttcgaaaaatggccatcaccattgagagctaattttcactgttagatcatcatttatggtcaaaaatgtctaatttgtattgttcccctatttttttggggccccttcacctataaaaggagagctcccgggtgattgattaatttcttactctaagtttttattttgcctaatttgtttcaaatttattttt

SEQ ID NO: 340726 - DNA, 521 bp, Cannabis indica
ggtccaatctgtaacttttgcaaaacacagggtccaaaatggtatttaccctaccttttattttcaataatacttatttagtaccttatattttgaaataatacatatttgataccctaaagtaaaatttaatcaatataattttattaatttggcaaaacgaatgtcagttatatgtaattaaataattaaatttgaatctagaatttataaaattgaagataatttaattatattgataaaattttatcaaaaaattttgagtttagggtaccaaatatgtatgtttttaaaatataaggtaccaaataaatattattgaaaatacagggtaccaaacttgtaattaaataaaacataaggtaccaaatatgtatacacccaaaaaattatataaatgtaacgtgaaaataatatctaaacaacaacaaaatacaaacatacagataataaaaaattaacaacaaattaacaagactactacataaaaaaatcgtattttctgtaaataaattaaaaaa

SEQ ID NO: 340727 - DNA, 1549 bp, Cannabis indica
tattacccgttgaccctgaaatcgagaaaacttgtaggagaaaccgaaagaacaagaggcaagaaagagtttcagcaactgctgaaacatcagaaatcatggctgctaatgtgaatgctaatgctgcaaacaatggaggtaataacggtaataatggtggtgccgttgaagatcaagctaatggccgtagcttgagagattacattctccctactcttactggagtgcagtcatgtatcaggccaccggcagtggatgcgaataactttgagatcaaacctgccatactccagatggtgcagtcttcagtccagtttggtggactcccttcagaagatcctaatctgcatctctcgaacttcatggaactgtgtgagacttttaaagtcaatggagttagtgatgatgccattcgtctgagactgtttccattctcactcagagaacgagccaagagctggttgaattccctgccacccaactctattgccacttggaatgacttagccacgaaatttttgtcaaagttctttcctccagcaaagtcagccaagttgcgaggtgaaatcaacaacttctgtcagcaagataatgaatctctccatgaggcttgggagaggtttaaagatctaatcagaaaatgccctcatcatggcatagagaagtggatgctggttcacaatttctacaacgggttggttggtaacactagaactcttatagatgcagcagctggtggagcatttatgagaaagagtgcaaatgaggcttatgatctgttggaggagatggctctaaacaatcagcagtggccaactgaaagaagtcaaactaagaaggtcgctggtgtgctagaggttgatgccattacaaagctgacagctcaggttgaggccttaacaaagctaatcgcagggcaagctaaacaagcccaagttgtttgtgagatatgtggaggtccccatcacttttctgagtgtcaggcagatgtggatgatttgccaatggatgaagcaaaagccattggaaattattcgcagaacaacaacaacaattatgggttcaaccaaggtggtaaccgaaggaagttctatcagcaaagaaatcagaaccagacacagaaccaacaatacactcagcaacaaagctctagtggaaattctagtttgcagaccgatttattgttacaattcatgactgaaactagatcttccattaaagatttgcagactcaaatggggcagctagcgacccaggtagcaacccgtcctcaaggaaatttgcctagtacaactgaagttaatcctaaggaaaactgtaaggcaattaccctgaggagcggtaagaaatatgatgggcctgagatgatacaaccagctaatgaagagattaaagttcaaccagagccaaccccaacatcaacagaagagaaggttactgatagccctgcaccaccacaacagtctccacaattcagtattgatcatcatgtaaagataccttatcctcagagacttcgtaagaccaatctagacaagcagttcacaaa

SEQ ID NO: 340728 - DNA, 595 bp, Cannabis indica
atataccatactctatagcatgcacgaaataacgcttacagaggataataaccctacttcatgcttttacttgattagcaatattattatacatcattgtttccttacctttgtatatatcctagggtaataatcctagaccacattattattaacttaggatactaatttaccaagtctaacttaattatgccttgagcgcataatcctttatttcaacctattaagcatggtatgacacttaaaatcatttaacaagtagggtaataaccctaggccagataactgctcacgttagggtaataaccgtaatcccggttcttaattaatgacatccatataatataaaacatgagcgccaccgtgcttagctctacgtgcaaactactgtcttacctgatgtcccacaaatgtcgagattccaaatcctcgggtgttcctgagcaagcatcagtagtcctagtcacacattcccaagatttcacaaatagggttaatcctaaaattcactttcaataatcacataattaccattacatttagagattaaaatatagagctccaaactagctttccaatgatataaagaacgtcc

SEQ ID NO: 340729 - DNA, 791 bp, Cannabis indica
ataaaataactcagttaaaaaaaaaccgatctcacaaactaaatatatactgtaatatttttattataataaataataatattattggtatttaaatttatttattaatttaaaaattctattcaaattaatatactagaagataatgattcaatcctataccattttttaaagtatcaacattattctcttcaagggtagttataatgctaagggaataacattccaaggttaaagactcaaaacaaacaagataatgtttcacattactattcccttgttagcattaacccattccaaacacccgcttagagttttgttttaacaaattcatatgaaattcttttcccaattttaattattaattatgttgtggtatttgtaagtcgattttgcatgtatttttctactaattggtattttttttttgaaactactactaatttgtattcagcattgaattttttggttccatttttctactctctgtttcaatttggattgatactttttagtagcttatatatatatatatatgggtatgcttttaatgggtattacccatatatgagtattttattcttgaccattggatcaaatatctaatggttgttatttataatcattaattaaacattaaaaaattaatatttcttattttgttattctctatattcctaaaatagataaaactattaatagaaataaaagatttataaatagaattgttaattaaaaaataaaacacactaaaaactaacaaactattttttaataaaatttattttaaa

SEQ ID NO: 340730 - DNA, 597 bp, Cannabis indica
aaatacagctgttatgctgtcgatttttttttagaaaataaaaaggaatatgttcttttgttattcttattacttacctgctttggttatactgatgagagccatgttgatcatgtccggtgcatattgttgtttcatgacctagtctttgtgttatcataggtagatcaggtgtgcactcacctgtaggttaaagacctagaatctgtacagggagtgaattaaatctgagcccctgtatgatagtggataactgtggggatattatttttcttttatattgatgagtggtcctgattttgttactaatattttcctattaatataggagttaatccattacttttaagttagtattttgtgatataaattaaagggtcatttataagctttatctttcaacaagggtcaaagtatgacctttgaccacccaagttatggatattacatatctgccacggcctagggctcgggtcttgaaattaacaatggataactaatagcaagctcggatatatagacccatggtccccccactagttgagataatattacttgtaagactcatttaattggttttgattaatcaattataat

SEQ ID NO: 340731 - DNA, 453 bp, Cannabis indica
gattctttctattttgtagtccgtgaactcgtggagtagctccccgactattgttacgtactcagccattcgctcgccgcgtgtttggtattctcctgatatctggtttacgaccagagggaatcactatagacttccactcttttggctcctacgtttttctaatttcagtcctgctattatggcttcatattcggcctcattgtttgaagctgcgaagtcgaaccgtagggccgcctggagccgcagtccggttggtgatatcatcgccactccggctccggaaccattttcattggaggctccatctacaaatactctgcatgtggggattcgcggtagcctcggcttcgttgcattcagtaataaagtccgccaaggcttggccttttatagagattcgggctatgtagtgcaagtcaaattgacttagctccattgcccacttgagga

SEQ ID NO: 340732 - DNA, 948 bp, Cannabis indica
ttatatgaatagttaggtcttctgttagcacagattttcgttaacaataataagcctatttcgtgatagggtcatcacagaaattagttgaaatctaagaaagaataataaagcaaaaagaacactaagttttacgtggttttgcagttaactctgcatagttacgagtcaatcttattcatatttttctaatacaaactagggttcttttctctcaagcatttttcgtcccttttttctgtacattctacccctatttataatggcatagggtggcagttaattacattcagatacaaatcccacaacaatatttccccgaaattgtgggctttaattacgctccacgtaaataaatacaattattatttgaatatcacacagttgtgatttaaaccgcttttaatgggtcaacactgatgtggatttatatacgctgcaaagtgtatcacgcctggggcatctcgcttggtacttgaatactcaatagcaacaataatattggctgcgagttagagcttttcccatatctttccgaggttataatgtaaatccagtcgtctctatgcttgaagacctaacactccatctaacaatcgcagttcttagtgacaaggtgagctttagtagccaacatcatttgaatgtcagcctctttcttagagagctaacgcgacgtagcaatagatctcattgaaagatgtctggagctgattagtgaagacaccaggagtatgccttcctatagcgagatagatgtctcgctaatcattattcatgtccttcaagctgttacacttagttagtataatgtatattatacgctaagtgttctcctactcgccttgtcaacacctctttacacatagcgatgtattatagatgtcatccttacaattatggcctctgatgcgaaatggtttctcgtcaatacgtgaatcaatagtt

SEQ ID NO: 340733 - DNA, 530 bp, Cannabis indica
ggaataactcattaattgagtatgtactagagtatatttgcagcccactgactgtaaagtcttaggcgaggaatcaatgtacaaactggtacgtagagtattaacgagaaaccatacgtggctagaggagaatagtgaggcacccgcataccctaacttgcaacaagcaaactaaccgtaaaagtcgaatcggctcgaagagcaggattgcgagatggtcatttcgctacgaggaagctgcctatagtccacccatctaataggagcaaggctcataaccctgtcacaacaataaagtttctgtcgagacatctctagaatcaacaattaaagacgtgtttaataacaatacttctgacccagtaaaagagggaaaatcacagatgtgtggcttttaaaatcatgtaccgcatttacaatttataatcatatcccaagatttaagggataatgactgtaattacattttggtcaactttgtaataaactgtcactatgcaattataaatagtggcaggtaagatcaaaaa

SEQ ID NO: 340734 - DNA, 583 bp, Cannabis indica
aaggagtacgacatatcttctttattttttctgggaatatgagagccttcatgtatagaattaagaaaatgtattaagattgcagcatagacaaatgatataaatttgaaataataacacaaaatgaattaatagtaagaaacacaccttttctgagtcgatatcaagcctcactgtctttggagagcaattaagattcacaaaaaaattcatcatatcgacaaaccaaattgcatcatatttcttataatgatcaagaaaaatgaatattccattcaacaaattggatgactctattgatatattatgattgatatatccttcataacaaaatgatactaattttggagcttcaattataacttccttttcatctatagatgaacaagtacaattcaacttcaaagttttcaagtgatgattcgagattttaacatgcttcaaccgcaacaacaccaaatcacacaaggtcaaattctcaagttgatgaaggtttgaaataagatattctaacgatgatgaatcttccataccgtaaacacaaattaacacgagatttttaattgccttgcatacagagaga

SEQ ID NO: 340735 - DNA, 939 bp, Cannabis indica
atggaggcttgaagcagggacgttacaaagggagttcaagggttccgcctgctgttaatcccagacaaacgggaagcgcggtgaatggtggaacacctcctattactggaattgtgcttggtgtgcaagagactgggaataacagttccgcacccaaccagggcattcataatacgactgttccgcctggaaccaacgcctagatgagcatcggagacgcaaccaaattaaaaaatctccgtgacttgctcggactcatgcagggtcataacaacactctgcatcatgatcaggacgaactgcgtgttgcagtaaatctcgcatttgacgaacaaaggcgtatgttcgctgaatggagagataaagagatggaggcattaagggctcaccatgcagagatcgaagatcgtagtcggcaagccaccgtgctgatacgaagagcctacgaaactgtaggtcagcaattgccgaacgtcattcccctgggagaaatggaagatgaccccacaatgaatacttcccagactactaatggtcagctgccgaatccccggttacgagttctactcgtgggccaagtggtaggcgagcagaccttgtccggtaattcatcaagaggagtcatacccgacggttccaaccagactaatggcgctattccacctgtcaaccaagcgaatcaataaggcaactaggctcttctgtgttcgaaaggttgggaacaacccatgacctaaggaacgatctaaaaagaagaaggggaacagacgagcagaatactgcaacgatcgtgcaacctggagtccatactcaaatccccgctcagaaggacgctgacgtaatccaagtcgaccagaatgccgagcaggtcagcccagccgtataggcccagcttgacgaattgaaaaatatgtttcatggcatggctggacaacgtaa

SEQ ID NO: 340736 - DNA, 684 bp, Cannabis indica
agaaacaataccaaatgacaacttgagctcccacattataatgaaacaacaaataataatatataaagacaattggctcaattctagtcgcattgcattgacccgaaataacataaaacttagagaaaacttaatacacattgaaatgatcaccaaaccaaaataattgcgcagctagacggagagagaaagagggaattcaaatttatgcacaattgtaaaatgtttgtaccataaaccgattattacttcaaacatggaagtgtatattgttgggctttgtgccctaaataaactctattttaatgtaatctttgccattcagttatcaataaagaaatagaattattttcattacttatttagtatgtcatttgattttaaattgttaatatgcggttcaaaccgcaccgcaccgcaccgcacattataaaaataacaatttttatatttattttggtccaatatgtgaatgtccaacccaaagccgactaattattgtattattgaaaaatgtttattttcaagtcttatgatatttttgacaagtgttgctcaaattttgttgtatttatgatagtttaattattggtgatagtccaaactgcaaaaatcgcaccgtccaattttttgcggtgcgatttctacaattttttagttttgcggtgttggaaattattttac

SEQ ID NO: 340737 - DNA, 570 bp, Cannabis indica
aatcatctttaaaagatgatgcagccacatagacatctccactatcataaccatcacttaggtttgcattttgatagtcattcttagtcttgtttgatttgtttgattcctcttgatgatctgaattttgtttcccattgcttttcttgtaaaagtagcattctctcttgaaatgccctaactttccacaatggtagcacccattaggatctttaggaccctttgaattagacctccctttgtgatgatgatttttgcccttatgtgaacccctactagtgcttgaacctctactagtgcttctatccttattttgccacggtttcttttgtccaggccttccgctacttaggttaacatccccattagtatgccccggtctttcaaccttcatttccaaatcttttgatttcaaagctgagatcacttcttcaagagtgatctcaggtctcccatactaaatggctgtcttaacctccctgtaggattccggtagtgaattgagaattacaattgcttgattctcatcacttaaggcctcattttcccccgagtttgctaactcaatgt

SEQ ID NO: 340738 - DNA, 905 bp, Cannabis indica
aaattcctggccaatcctgacattcccaacgtctaaataaccgtcccaaaatactaacatactaagttgtaattttactgagccagacaccgagttccatgttaccgggcaccagaaatgcaaaattatgaaaatcactaaataacataaaatgcatttcagaattcaacaataacagtataaataattatttaaatatctataaataatgttccataattaaacataattaactgctaatttccaaattaaactaagcggtctttacataaatgcacatcaaataacttacctcgagaattacggttgatagaaatattcaaactcgctgccacataggcagaagcgagataagaataataattattaacaagcgaaattggcgagacaataagtccatctcgagataaagagaatacgcaactcattgacccatatactcatgagtaagagcttgcaactcattgacatacatactcgtatgtacaaagaataacaacattcatccatctcaatttttatacgttgaagtaaccacctcgctaatgccttccaaattagcaaaagagaatcgcgagaaggattatatctctgtacttcgcattttttctacaaagatagtaaagaaaaataacatatactcagcgagagtcatccaatatagtcagcataactccctatggataaagataaaagagtagatgaacggttatttaagattatcccatatgcacaataatgaaacatgagggatgtccacatttcatgagcggttatgaaagaatagatctcaagggaataactgtcaccctacatatctattctatataaagtgtgcctatataactgaattcttggtttatgagaaattcatgggttactttttatttatatttaataaaata

SEQ ID NO: 340739 - DNA, 861 bp, Cannabis indica
aaatattgtgtacatttgttctcctaaagttaaattttatgaataaaaatttattatttccaccaaaacattctcagctatatataatttaatagttgaatttaaattaattaggaactcatattattaaagacaattgatcgtaatgataaaattttaccttgtaaggtatagtattgctattagtgtaactcaatattagatttaatttattttattttaataaatattatataaaattgctaattaattacatagcgacacttcattatagtgctagattctatggatataccatttaacaatcctcttaaatatgctattactaggcatcttatgctgtcatattgatatacagggccgaccctaggcataggggagctaggcccgtgcctagggtccacactttacggggacccaaaataaaaaataaaaaatttattagacttttatttaagtaaaatttaagtgtattataagcaacaaatattcatagcttagttagttgaggtggatggcataatgtccaaggtcatgggttttgtgacagctgtcaatagtcccgtgatccgtaaggagaaataccgggtaagctgtggaatcccacatcgccttgggaaggtcaagtgtgatgattctgaggtatgagactacacaattgaagagagtttaaatggattgattggtactacctatattaacaaggtatatcttgttttctggtagcccatcacggaagaactccacagttaagtgtacttgacctggggtaattttaggatgcaggaagtgtgtggttcaaatcccataatactcttcttttgatatttttttatatattttttagggccccaaaattta

SEQ ID NO: 340740 - DNA, 548 bp, Cannabis indica
ttttcccttagtaaccttttacttacatagtaaataggttgttggtgcttaccctcttctcgcactatagctgcactaatcgcatcttccgagatggctaaataaagaaataacatctctctagttataggtttttccaaaatcggaggtgttgcgagatgccgttttatgctctgaaaggcctcttcgcactcctttgtccactcgaactttttgttgtctcgtagtatgttgaagaccgacacacatttattagttgactttgaaatgaattggttaagtgccaccattcttcctgtcaaggcctgtacatccttaggcttttccggggatggcatgtctattaatgccttaatttttttaggatttgcctcaatacccctcgcgttaactatgaatcccaaaaactttccaaaggagactctaaaggaacattgttttgggattaggttcatgttatacttttttaatattttaaagcattccgcgaggtctgaggattgatccttactctttattgattttaccaacatatcatccacgtaaac

SEQ ID NO: 340741 - DNA, 696 bp, Cannabis indica
cttacctcgaatgtggagaaacttttgattgcacttaaaacctttagaggaaaatcaactcgaacaataccttaaatacatgaaaatttggctcaggcatcacggcatcaaatcaaattctaaaccaataatcttaatcaaaatacataccttatatcctttatttaatgttctagctgaaaaacccttgtataataatacccttgaaccttagcatatgagttgtagtactttatatgattttggtaatatgatgaatgggcaaacgagagagagaaaaaaaagaaatatggtgtgaggttgcttgattttatggtatcagaaataaaaatgaattaactagagttaaataattaaaatgaattaataactcactaaatgacacatggcatcctaaagtttccttgttgctatttcggttgccgcatgatgcaaaggtggaggatttatctcaattagttgagaaagatgtgtgcatgcatgtacacgattatagacttgacccttatactattcaaactattaaccacttttgtacgtacaagactacttcctaatattaagaaataactcttgaaggattttgccacctaatctaataattccctttagattcttagagctatacgtccaagcataataaaaaaattgctaattatactaccatgattttctctcttcatgacacataaccat

SEQ ID NO: 340742 - DNA, 1050 bp, Cannabis indica
gtgttagtcaatttcacctgcttagtacaccaaaaaaactacttagcatatctcccaaataaaattctaacgcatcagaaaattgaagtactaaatgtaccttttccacttgtgtgaccaccgtggtctcgaatccacttgtacactgatttgcactgttttgtggtccaaaagtcaattggagccacagtgctgtccacgtgactagcagtccagtcaacatgcgtcaaatataccagctgccaccaaacaaaaatacatacatctattagcaccgcagtacacgagagaataaaattactaccatcacaataattcgaaaacttacctgtaaaaatatggtgcaaccggagacatttttcgtgttcttagtcttgtaccgctgtagagagctcataagatatcgaaacccagcagtcgcccaattcttcttcttaattgaccttgtatcaactaaagagtgcatgtagctagtgctgacctcggtaccattcttgggcagcaacacagttccaatacaaacaagcagaaacttaatgagaaacaggtaatcgctctcgctgctttccttcagctcattctccagcaaagtcagggaaaacctatagtccttggcctttaaaattaggtcaaactcaacgaggtcacggtcactttcggttgccacgggttctcccccatccctgattcccatgacatcctcaaacagcttcgacgatagttggatcgttcttccaaatatctccagccgagaagtggttggatccacatgatcgatgagccaactaactatcttagcatcgatgtacggggcatcctcccttaagaatgtagagaaactggcatttctgaccatttcttttttagcgtcgttgagaagtgggactattctacccaaacgttcgaaggagcaacgaccagaaacttgaacatcccctaccccttcattgttctcaatccctggctcagcagataatgtctcctttaacttcttccctttccctctaacaccaaccttcgagggggaagcctcaacttcatatgaagccc

SEQ ID NO: 340743 - DNA, 696 bp, Cannabis indica
tttgtgatagtttaattattggtgatagtccaaactgcaaaaaccgcaccgcaccgcaccattttttgcggtgcggtttttgtgattttttagtttcacgatgtgggtgcagtttgggaaattgaaaaaactgcatgtgcgagttagtttaaaaaaataatcaaaaactgtggactacccgcatcgcgaacacctataatatttttttagcacacttaaaaatataaaaatacaacaaatacatttataaacttttgattaatatacataattatttaatttttaagtattatataattattataaataattaaaaaaaaataatgtggtctacaatgcctactaaatatggtgggacactgtagacaaatccataaatggtgtaacttatagtgtgttgttggagtgtttatagtgtaaaattacactatatttaagtttatagaggcccgttggagttggcctaaggctgaaacaatatttataattgttaaaatatacatattattttaaaatatatttttttggtgtcatccatataatgtttattattatattttttttaaaaaataatttgaatagctaacaactctaaaaattaccataaataatcccacataacattaaattattgattatttaagtaaacataaccttttctaataaaaaataaaaaaaaataaccatgtggccatt

SEQ ID NO: 340744 - DNA, 512 bp, Cannabis indica
atattataattctataactaagataatgaaaaaaataaaaattatatattaatttatttatagggtgtgataaaaatttaagtatttataagtaaaaatttaaattttaatgatgttaataattattttatatcaaaagttatataaatatgattaaaactttaaaatatacatataatttcgtaattgtaaaaaaaaatatatgaaaatgtaaagctcaaatttaagattggatatgaaaacgagctgacgtgtttaagaaatacggactggcacgagcaaagcatgacacaaatctgaacacaacacgaaaataccagacctataagtcatgttgagcttaccctttaaaaatattcaaacgacaagacacgatccatatttttctgtggcacgacacgacacgtcccgttttttgaaaagcacgaataaatatgggtgcacgacacgcacaaacttacaacagtaggtcatagtctaaaattttgaaagtgtacttttttttttttttt

SEQ ID NO: 340745 - DNA, 663 bp, Cannabis indica
cttcttcctcatacacgataaccaacaaccataacagcacccatacccacggaaaaaccctcgccaaccacccataaaaaaaccctcattctccctcatttcttcaccattttaccccatttttgttttaaaatcttctatttttaatacctaaacctatattgtaaaaaagtttagttttttttcctctatcactataaccgaacctattaaaaaaaaaaggtggtgttataactccgaccaccgattttggtggagaaaacgttgaatctcaacgtccattaaggtataaatataatttctattcattttattaatgttcattgcttttttttctttttcgttaattttttttttggattttcctattttattaatattatgttgttgtgtgtgcatggtgaccgaatttttgttgtaatttatcgccggattatatttgtaaggtaaatatttattaacttgatatataacatatatgtatatattttgtattttattaaatatatgtttatatattgtgtgtatatattatctgtgtaaattgtgtaattatattgtattgtgaatgagaatgaggtagtagggatttaattagtttataaataaagtttttaaaattgtgttagtgtgatatataattgattatatatgtatatgtat

SEQ ID NO: 340746 - DNA, 1071 bp, Cannabis indica
tagctagctcgaggtatacatttactaacttttacttttaattaatcatgaatgcttagtagagtttgaatatcttaattatacatccgtagtgaagtaagttctacaatatattgtacttgttaggattttatgccctaaataaaacccatttaaatataatcagatttattaattaataaaagattagaaatcattttatgttgtgaaattctatttttgataattaccaagtgaaattatcaaacaatttaaataatgcgtacttagtaaaattgtttgaacagaatttgtctctcttctatcagacacagtatctgacagaacagaaatatactccagaaagtaaaatgtagaaaattaaaatgacacgcaatattttatacgtggtatcagcaactctttcgaattgctcctagtccacggggccatgcccagagaaagaaatttattagatgaatcacaagtgtttacaaaaacaaattgacttatacaaataaagactccctctttgaatttgttgcaactattgtaaccaattcttctaatcaaatttctgatgtaccgagaccttaaactcccttcaattcgtagcacttgcacaccatgcaatcttcctcccgaagagtgtataacttacaatcttttttctgaagacttgcaatcttcctccctaagagtgactaacttgcaatcttcctccaggaaaggtgactcatgaacaagacctctcccgaagcttgattaacaatatccaaggtgttcaacctgcacaatttcaacaagaaacaatacagagtaatacaataataaaatactaagaacttgttggactcaagttcttcacacaacaaagaaaaacactctctaactttgaaaagtaatatagaattgatacaccaagagagctaaccaatactagcgacttaagggtgaatttatacactttagaaaccctctagatcgtggtcaagcaaccgagaaacgatcatgtgacagtcagtagtcccgtgatccgtaagggaaaacaccgggtaagttgtgcaatcccacaccgcctggggaaggtca

SEQ ID NO: 340747 - DNA, 1143 bp, Cannabis indica
ataaaagatgaacacaagaacaagataaaacttggtctactttggctgtgtgttgtaatatattcacatttattatatatgtctatcttaagatactgtgttggctattcttatgtgtatatatgaaatattggaaatacccttgccaatttgggttattaatcatagtgccatttcactaatctttttcccttttaattattatattattataaaacttttggacagcatggatgatggtgttttgaatattttcattaatttaattatttattatcatgaatatactattacatacaataattttatcataagttgttaagtttgaattttgttttaagtaaaaattattaccacgtgaataaaaataaataaaaaaactcagccatgcatgcatgatgtgatcacatcaatgtactaataataatttgtattcgtatgtaaattatgaatttggtaaggatccttataacttaatatatttgatccaatatatacaaataatataatatgtgtcttagctagtgagagggagaaatattcaataggggcaattgtaagaaaaaaataatttgggggcaaattataaataactaactataattttttctttttaccaatttaatgtatacaaaatacatataattctttttgtttggagggctacagccccccaccttacaaagtggctgtcttgaccaatgttcatttgttaggggaaaagttgtttattagtaaataacttgaaaaatatatgatgcgattctatgcaatatacctaaattaaaactcacgacacactagctcaagcagtatagtaagtagtaacattaatttatcatatgtggtatagactaaattctttttaataataatttcgtagattctgaaagttaaatttctcccatcttaaatgtaaaaggaaaaatggagtaagtcacaaatttcgcaactggttcagtgattttcttaatccaatgatcacacaagtaccgtaagtccaaaatattggagagtagtcataattgcatttgttctttttcagagtgaaaattaggggaaaaagaatctggtttaggcaattttgttatttttgggaagtttaggggctattattaatggattcatatattgggtttttcc

SEQ ID NO: 340748 - DNA, 1959 bp, Cannabis indica
agaccttacaaagtctcttaattgacaaataaaccttaaaacctcttgtctctcaattaagcctttgcttagtgaaaattcataaataagacatagtataattgattaattaaaactaattaattgagtctacaagccaatattatctcaactaatgcagagaccataggcctatataatcaagtttccagtaagtagttcaagaatttactaagtaaactctctatcttattaattcttcttgactccactatagatttggaattgcactcttgattatatagaacactctatatgttccaaatatagatacactattagttatttattgttttaatccaaataatcaatgatcctctagagatgatatacattgagtagggataaatttaccattctacccttcaatgtattttatccttaaaacacttagctccttgtaaataatattttagtaaaataatataattattaaaatgagtactctaccatttatctcatttagccaagctcgaaggaaatcatcgtttcacatctatgcatttacagaagttatagattctgtttctatgattagcgctcctactcaattgtactacaatgttcccaagatgtaagtattgggaagatcgaattggtgaactttaatgaataactcaaagaacacaaataatacaattgaaccagaacctaaccatctcacaattgagatcaaatatctaagatcaactaagtgatagttacttagaaagatattacagtaagtttaagataccttttctatgtgaatatcagtccagtccgatgtataacaatacatccaatacatgtttactttaccaatgccctagaaaagatataccactatccaagtgtaagtaaactatattgttgttatcatattagtggaaatttcgtgtattgataaatcgtgagactaatatttaatcgcataatcttgattactttctgttgggattttatgccctaatatggttctctcaaactgtccatctgtctatgcatgattggtagtactcaagtaaagttcagatcctaaggcttgttgcaaagccttccaaaaccttgatgtaaattgaggatctttatcagacacaatgcttgaaggcactccatgtagtcaaactatattgtctacaaaaatttgagctagccaggtaagcttgtaatcctttctaattggaatgaaatgagcagacttagtcaaacgatcaacaatcacccaaactgtgtcatgcttcaaagttgtcaatggaaacccagtaaaaaagtccattgtaatcttgtcccacttccattttggtataggcaaagattgaagtaaacctgaagatctttgatgcttagccttaacttgctacaaactatacacttagctccaaagctagcaacatctcttttcataccttcccaccaatattgtcttttcaaatcttggtacatctttgtacttccaggatgtacaaaaaacttggatttatgggcctcaatcaaaatggactccttaagatcagggatatctgcaacaactagtcttcccatatggtataggtacccttcaccattaactgtccacctatctagtttctcaccatcttggaattgattccaaataagttttagtttttcatcttgccaccgatgttgcttaacttgttgaagtagtactggtgtagccactatgctagatacaagctactttttccccttcatagaattgcaacttataatcacccattgtgattgtccttttccagtcctcaagagccaaacatgccaaagtaccataaggctttctacttagtgcatcaggtactacattagctttctcggggtggtattgtaaagtgaaatcatagtcctccatatactcaacccatcttctttgcctcaagttcaagtccctttgggtaaaaagatacttcaagctcttatgat

SEQ ID NO: 340749 - DNA, 884 bp, Cannabis indica
ctatttccagcggcccatttcatctatcatgcatttgatggacagtgatgtgtagtttttttctttttctgaaagagcgcatgatgtgtagttgacacgtacgggattactaaactatgctacacattttctatttccattcattctcaaattttattttctttaatattttttctaaggaaataaattgtaattcgcctgaggttgtattttgtttaataacaaataaattatagaattatgtcaaatttcaaattttcatatttttaaggtatttttcattagtatgtgataaccaagttagttagttagttggtttttgtcactgtttggattagttagttagcttcttggtcttcttttctacatttaacgaattctggttttataacagaattcttgttttgtatttgtacaatactgttgcattataaataaatagtaagtcctcattattgaggcaagtgttcaagcattccttgtgtcactctttctctttctattctcctctgtttctccttgttcatggtatcagagccactgacctcggtcaatggcttcttctggcgacaactcgtctccacacggtgtatctaatcctggtgctcatcctcctgctatggtagtacaatcatggaaccctttctctcattctcttacttcttctctaaacatcaaactcgatcatacgaactttttagcatggaaatctagttcttcccacggtgattggccatgatcttgacgaaatcctagtcactaacttgtctccaccacgacttctaatcaatggtgctccatatcctgcttaccaataatggcgcaagtgttgcaattattttaccaggatctagatttactaacaagtatgtttcattaacatc

SEQ ID NO: 340750 - DNA, 876 bp, Cannabis indica
gttgacagactcaataagaaaagcatataacatattagataataccgacttgtatcttggcacccatacacctatctacaaggcttaacagatgagtaagaacgttctaactaagatacgaccatgtaccactataccacatgcacttagtacctccatcatactagtgtaggtagggtatgaaccgtaccccaagtactgttaaatgttgtaccacatacaccgtgtaccttcctgtactagtgctggtaacaccgtgatgtactctttagacatcgtacactttaccaatgcactctgtactgctaccgtacaagtgttggtagtgtatgaatcacaacaagcatgcatatatatatatatatatttcacacatgcatacattcgcatacatatcatatgttctacactattcttacctcttttctaaattcaagtgagttggccgacctaaacggaaagtctcgtgctggatggatgccctaatcacatattaaaaactgggtaaatcacacgtcaaaaccctaatccgggaaacccgaacctacaacttaagattctgttattactaatagggactacaatatcctaggaggtaggaaaatacccaactaaggtactgaagtggacatgaattgagaaaacgagttgttcgggaatctgtcgaaaccggttaactgttttacaggtcctggcaaactggttgactgatttgcaccaggtttcccaaaacaactcaaaacttgctcaaaacttgtccaaatgccaccaaactttccagaacacctaaaataagcatacacaatatattccaatcaacagcacccacaaaaatgcacaaatacaaaatataccatggatgaaccaagcttgagt

SEQ ID NO: 340751 - DNA, 1352 bp, Cannabis indica
tctaggtcctctatatgcccctagccttcctagattggatgagcatgtcatccacgtatacctccacattttgtccgatctcgtctttaaacattttattcaccaacctctggtaggtagctctggcattctttagaccaaacgggatgaccttacaacagtatagacacatatctgttcagaaacttgtatgttcttggtcaggtggatgcattctgatttgattgtaccccaaataggcatccatgaagcttagcatctcgggctcagctattgcatccacaagctgatctattcttggaaggggaaaacaatccttgggacatgccttgtctagattggtaaaatcaatacatactcgcgattttttattgggcttgggtaccagtacagggttagccacctaagccgagtagaaagcttcaatgatgaacttattattacgtagcttctctacctcttcttttaacgtttgcgcccgttccttatctaatggtcttcttttttgttgaatggggcaaaaatttgggtcaatgtttaaggcgtgagatattacagaaggatcaataccgaccatatcctcgtgtagccaggaaaaaatttctaggtttgctcttagaaattttattaaagctaattttactttgagcaacaaacctttgccaattttgagtttcttggtcgggatacttgggtcaagtttttccactggccctacatttttacttggttccccaagtgggggatccaagtcctcgtcctcggcttgggcaactccctattgggcaatactttttccgttgcctgaactctggctggaggaattttcctttttgaccttagttagggctgttgggattttatgccctaaagaaaaccgatttcaatttaatctgatttattatcaattgaagatttgaactcatttatgtttacatgtagtttttatgtttatggtttaatgaataaaatttttgttaagtctagaacatatagttattcacaattacaatgatgtcaacacagtgggaggtaattatgattatatgaatcaaaagataatgtcccttgattcatcagtgcactggatttacacatgtgatagtcagcgataacgtatacttatagcttggataagtgttatgttctttccggaacattggcaaagtattctagatttagatgtatggagtatacattggactgggaccgatattgatcttggtaaagatattacaatcttaccgttgtctctttcgaagtcaatatcactggttgatcatagatcaaaagatcttaatactgacatggttaggttcgatctcaagagtgttatttgtgttctttaattt

SEQ ID NO: 340752 - DNA, 1406 bp, Cannabis indica
ggataggagtaagtctgacgtcctcctttgttctggtttcctcgaaaccttttactttgtcctgaacttcccgaagatggaaaagttcttttcttttgctcaaaagtggaatctccactttcttttccaggaccagaaatagagatagtaataaccccaccagcagtaggaggctctcgggtttcatgcaaaaattttactgctccttcggctcgaagagccttatcaaccatttccgcgtaagttgtggtatcattcgttgtaataaccaggtcatgtttaatcttggcattcagtccagccaagtacttctccttcttaataaaatccgttggtacaattccagaggctaacttagccaagcgatcaaactttgttgtgtattcagtcacagacattctctctccttgtaccaactcaacaaattctttccgctttgcactgctgactgcctcattatagtatttagcattgaacaattcccggaattcctcccaggtcattctggcaacatcctttgtaagggatatcatttcccaccaaatcaatgcatcttcctgaaattgaaacgtggcacatgccactctgtcatttccgaccactcccatgaaatttaaatttctttcaataacggtcaaccactgctcagctttcagaaaatcaagacctcccagaaacactggaggtgcctgcttcctgaatctctcatataaaggctccatacggttaccaacaacatgttgctcagctggcaccgcagcaggcggttgcgggggaagctcaacaggagcatcctgttgcctgagtcgccggatctccacttcttgctgttcaattctagcttgcatttcagcaaacctttgctcccaatcaaccagagcctcaggtggattctcctagccacctctcggggcaccaccgcagcctctaccgcgtacatgggggttttggggatttctaccaccccgaccacctccagtctcaaccatttcaccctgcctttgaacgtttctctgggcgtccattgttaggctatttttagcctaagtttcgggtcacattttatagttgtttttcttctttattattatttttggaatagaattacgcttgttttctttgatttcaggtttctacacttggaatgtataaattggataaatttcagaaaacagtgatctataaaatagagaaaatgttgaaagaaaataaagctgaaacttcaagcctaaattcgactaagttgtgatcatattttggacaaagttaaaacaaacaagttttagatctcttttttatctttccaacgcatcttgaatcagcccatttggagttcgtatgcaaaagttatgctcattttactaaaaagagatcgaagaagaaaattccatctcgccgcggcgaga

SEQ ID NO: 340753 - DNA, 901 bp, Cannabis indica
aagaagtgccaaaagtttgaatggtctgacgagtgtgaggaggcattcaaaaaaattgaaagagcacatggccaagcctccaatcctgtcaaaacccgttctcggagaggacctgttcctgtacttagccgtctctgaacacgcgttagcgcggccttagtccgggaagaagagaaaactcaacatcctgtgtactacttcaacaagcacataacagaggtggagacgtggtaccccatcatcgaaaaactagttttttgcctcctaatggcttcaagaaagtggaggccttatttccaagcacacccaatcaaggtgttgaccaatcacccactccggcaagtccagcaaaagccagaagcttccggaaggctcctcaaatgggccatggagttaagtcaattcgacttacactacataccccgtatctccataaagggacaagcattggcagatttcatcactgaatgtaatgaagtcgaggcaaccgcgaacgcaccggtaccatcagtcccaacatggaaagtctttctagacggagcctccaacgaaaatggatccggagcgggggttgcaatgatatcccccgagtggactttgacttcagacagccctacggttcgatttctcagcctcaaacaacgaagccgagtatgaagccttgatagcagggctgagattagcaaaggttgtgggggccaaaagagtagaggtctacagcgacgcccagctggtcgtgaacaagatatcaggggagtatcagacgtgcggtgaaagaatggccgcatatgtaacgatagttcgggaactgctccacaaattcacggattataaagtagaaagaatcccccagggaaagaacgctcacgcggacttcttggctaagttagcttcggacagt

SEQ ID NO: 340754 - DNA, 1437 bp, Cannabis indica
tcgaccctttgcccagtgaataggatcactatttatagggctatgaggttggagaggaagtatttaccttctcgttacaattgatataagaagaaagattgcatagtaaatacagaatacacttattgtgggatttggacaacttgccctatctttgtaatctgatccccaagttatagggatttccttgatgactcacgatgtgaaagctgaattcgctaagtgtttatcgttctgtgcgagttactgactgcttcatcttaaggaagcatacgaggtatcttgttcggactatatcttgcgagcagatacctggagttgatttcacgtgtcaccatcgtgtgatgccacgtcagagtgcagaaattgggataacatttgccccccaactctgtacgagacttccgaagttgcgtgtagacttcatccgagctatcttttcattggaatgggtgacacgtgtcaggtgcatctgttcgcgactggatgtgaggctgactgggcgtcccttcagtttttggctaataaatgctctgacacaattaagattttgaaatctgattttctatcaccacggttgaaaggtgcacttgattgcttttgatttcccatattcgcttttggggggagccgaggcgtgtgatgttcttttcaaatgattacaccttttcgttgaatgttcttattctttaatccgttgagtactcctggtcagcatatttgcatgttttaatgtttgatatcccgagcaaacactcatcatgtgtgttgtcttttgtagatgaacccaggtgagttttggggaagtgaacaccaaatcgaccaggatttgcttcaactcttgcacaaggattagcctcaacttcgttctagtccaacttcttcgagtgacaaatattttagcttaagtcttccatccagccataggatgatggctcgtacaaaaaatacaatgtgtagaatcgagacatctgaccctcaagcggcccagcatgccaccttacccagtgtcgaaaaagatccgtccttccaggaggaggagggtcatgaaggggacgccaaagtcctagagattgaggagtaggatgatgctcgtcctagcagtccttatgaggcgaaggaagaggaggaggttgcacccccaaactttaggggatacaatgaggttggggagctggtcgacgcggatggcgacgtcctggttgaggtcgtggactatgcaagtgaggaacttactgctacggttcctcatagaaggcaaggtgctccaggtgccaggtgggtgagccttccatccaaggttaccaaggcacgcttacgggatctcgacccggacggctacctgggcgagttagactgctatattcttgctcacaacaatcaagccacaaaccccgaaaggggactgtgtgcctggtcgggtgctcatgctaagca

SEQ ID NO: 340755 - DNA, 750 bp, Cannabis indica
gtgagcaacgtgcctccatatgcagcctttaggaatgtcccgtcaacaaccataattggcttgcagtttggccaacctttaataacagcatttaatacaaaaaatgcatattggaaactatcatcttcttgtttctctatgtcaattattgttcctgtaattaaagcagtcatttatcgttaacagtaatatttagcaactgttattcaactagatagcaacgcaaaaacaacatttctagttcaacaaatgtatttcaaaaaatattttccttgtacctagatttgttttttgtagcatgtacatgtaccttggtaagagattgtatgattccttagtatttccatgtagatggctttgtgctcggtctttactacgccatgctttcatgtaattcatctttattccgtatttgtctttcatttctccctttatatctgcaggactacactttgttttcatgttcaagaattttagttttacgaaatctgctattaactttgcagttgcttgtcgttgatctccaaatcttattggacccgcacatgtgtgttcttcttgatcactccttattatgaatgtttatctgtttccattttttaaagcctttaaactccatttgcagtttgagtccaaacaaacaatattgtattctttagtgcaagattttaccactttgtagtgaaatgttttcttgattgtaaagtagcatagaccacttattaatgtatcttttgttgggttttatgc

SEQ ID NO: 340756 - DNA, 1569 bp, Cannabis indica
ttttccattttccacaccctaaaaccgaaaatcttaaaccccacccacgcctccgtaccatcgccctcctctctcgccgtcttcctccctctctcgatctccctttcttctcgtctctctcgtccatcaatctccacccacccctcctcccgtcagtctccctctcctctccatcgcatacgtcagactaccaccacctcccgtcggtgtccctctcatctccgtctcatacgtcggaccaccaccacttcccattcgtctccctctctctctttctctctctctgaccttggtataaatatatttatttatttatttatttttatttattatatatattttattttgttattgtataaatttaatgtgttttaaagttagttgttattgtaataaaattaattagttgttttattttaatttaggtaaaattataaaaccaatgcaagaaaaaaatgaggaaaaatctgtatttttttctctttttgttttacattcccaacggtttaaaacagtcgcctgtaacaaggtataggcgacggttttaaatagttgcctatagtataggacacggtttaaaactgtcgcatgtaccttgttataggcaacggttttaaaccgttgggaagtcgacattagcgacggtttttaactatcacttactttgtccattttgcgacggtcgtataggcgacgattatagaaaccgtccggaatactttaaatgaccactttatcaatctttctaaagcatcaggttttgataaaacttgccttagtggctgacttgttaaaactttaattggatgtgcttggaaatatggtcgtaatttgcgagatgtgtgaattaggcataatgcaagtttttcaagaggtgggtatctcgactctacccccaataatcttttactaacatagtaaacatgttgttggtgcttaccctctattaaggcctttattttctctggactggctttaattcctctcgcattgactatgaaacttagaaattttcctgagaaaaccccaaaaaatatttctaagtttcatgtcgtattaactaagaatgttaaaacattatgtgaggtcctttgtgtgatcctcactttttactgacttcaccagcatatcgtcgacgtaaactttcatatttcgtctaatttggttctcgaacatattgttaccagtcgttggtacattgctccagtattttttaatttaaatggcatgactttgtaacaataaatatccatgtttgttacaaagctcgtatgcttttgatcagggacatgcattttaatctgctatatctagaatatgcatccataaaagtcatcaactcgtgtcctgctgttgcatccactaactggtcgatattgggtagtgggaaacaatctttgggacatgccttgtttaaaccaaaaagtctatacaagttctccaagtgtcatctggttttgggacaaggactgaatttgagatccatgagggataaaatgcctcacggataaaatcattagttaataatttgtcaacctcttttttgagtgcaccttgtctcttagaatc

SEQ ID NO: 340757 - DNA, 628 bp, Cannabis indica
tagtcagatatatgagagggagaactctgaggacaaccagtagcaactgggtcattattctgggatagggaggctgtcaaagctcttggggagacaccaggttgtgggacttgaacactgaagtgggaaggattaaaagtatagaggccattctggtgtatcccagtgagtagaatggcttgattgacctgatctttcacaaagcaaaaatcagcatgaaactcaaaaaagacattattgtcacgggcaaaacgagagacacttaatagattttttgtgagttcaggcacatgtaagagattatttagcacaagagggtgagatgaattagaattaatgaaagattgacctatgtgtttgatagacagacctgatccgtcgccaacatagagctgatctgggccttcatattcagtgctactggtcagattttgaacattcggtgtgcagtgatttgttgctccagaatcagggaaccagctggtgtcatctacttgtgaggtttgcacaagattggcttgagtagtagggggaatggaacctggaaacacccctgtaaagcttttatcgaacctgtaaaagcagtctattacagtgtgtccaagcttgtggcaaagctgacactgaa

SEQ ID NO: 340758 - DNA, 721 bp, Cannabis indica
agtacccccactccgggttcttgagtttcttggaagactcgtcttaggaccagatcaccaatagcgaattttctacttttaacttttgagttaaagtacttagtcactttcttttggtaagccgccattcgtatttcagactcatctcggagttcgtcaatctgatccaatgctttttgtaataaagctttatgtttgttgttggatcataagttgttctcctgtgggatgggaatagcgtttccaccgggaccattgcctcacaaccgtatgccatttaaattgtaagtggccggttgtgattcttggggttgttcggtaggctcgtaacactcttggcagttcttcgggccaattgtttttgtaggccagcacctttttctttagagtgactttattgaccgcttcttcttgtccgtttgtttgtggccttgccactgaggagaagcttttgatgactccgtgttggttgcagaagtcgattaattcttcgcagtcaaactgctttccattgtctgagactatcttgtgaggcaagccatatcgacacactatgtttttgataacaaagtctagtgcttttttagcagttatagtcttcattggctcagcctccgtccactttgtgaagtagtctactgctactatggcatactttacccctccctttcctgttggtagggacccaataagatctattcccagaccgcaaagggccagg

SEQ ID NO: 340759 - DNA, 634 bp, Cannabis indica
cctgaaccagacccagacacgtaccccagtcccaggtcaaggaaccaaaatctggctaggacccagacccagatctggaccgggacgcggacccgaatcaaaactcagataacgactcaggacacaaacgcgaactcagacacggacttgaacctagtcccaaacccaagacccggactgagattggttactaagacctggacccaggagcccgacaaagattggggcccaaactcaaaattagaaccagaatcgggacccaactgggactggaatccaagacccgaccccggtctcagtcctagacccagacccgggcacgaacacagaccaggacctaggattcgaatcgaaatgagaccgggacccaagattgggatatagatcatgactcacgaccgaggcctaaactaaacatgtagtcggtgtctagatcttggaatcgtaccaagacccaaacctggagtaatttctagactaggacccaaacgcagactcggactcacgacccgaaattggaacaagaacctgaatgaagaccttggaacaggaattggacgttgacccaaaaacggatctagacgcagaaccgaacacagacccgacccaactgggatcgatagctggacccata

SEQ ID NO: 340760 - DNA, 374 bp, Cannabis indica
tcaggtgagaaaggagtttcgcgtgctcggtccaactcaagatcattgtttctttgtcccatgccgtgaaacatatttttaagttcatccagctgtgcctgtacgactgggctaacctgctcggcattctattcaatttgcattacgtcagcatctttttgagcgagaatttgagtacaggtttttcgttgcccgatcgttgtgacattctgatcgtctactcccctccttctattcagatcattcattaggtcatgggtcgtccccaacctttcgaatacataagtgcctggctgccttagcgattgatttgcttggttaacgagtggaatagcaccattgatctggttggaacctgttggaattattttacc

SEQ ID NO: 340761 - DNA, 530 bp, Cannabis indica
tcctttagtggactaagtgaattgaatatgtgttatatgtggattctttgtggctgaaataaaagttattatttacatttatcaattatattcaaaagttagaaaaaatcaaagaaaatcaaaacagtttcctctctagcctctctctcttttggcctccttgtgtagcaaggatctttggctttttcttggtgattctagctaaattcatcaaggtttttgtgatctctaagtgctggtaaggtttctatacctttccctcttgaatttgttgaaaatgatgaacaagatgagtgttgcatggttgttttgttgtgatacttgctgctgtatgttgttgttaacttctgtagctaaaacattatttaaaatgttgattcaagcatgatagggttggtgattagttggatttatcaagagatgaaaattttactcaaagctatggtttttcaaagtgaaattgtgagttttgttgctgtgtttgttggggtcgatttcctgggttttcagaggttatattatgcatgttt

SEQ ID NO: 340762 - DNA, 635 bp, Cannabis indica
gagaggtatgcccgaacaacacagcacgagcaagaagaagtcatcctggtcgtggaggaaagaaagcctaatgttccacgagcaggagagccaaccataactttcaacgatgcagacgctgtcaaaattagatttccgcacaacgacccgctggtcgtggaagtccagatagccaatgaaatggtgggcaaaaccatgatcgataatggagcttcttcaaacattttgttcaaggctgcttacgaaaagatggaactccaactcaaggatctaactccatgcctccagcctaactatggtttctccagtcaaggagttgcacctctaggacaaatccggctacccctacatgtttgacaagctcagatgagcataactatcatggcacagttcttaatattggatgttccttcagcctttaacgtaatgcttggccgaccagcactgtatgacttaaaacctgtcacatcaatatttcactcgtgcctgaagttaaagaatggggtagggtgtcttacagggaagtaaaagtctgctcgggaatgttacaaccttgcagtggccaaggctaagaaggaaatatgctccagccaaagcccagacaagggaaaaacattcccaagtaggaaacttcc

SEQ ID NO: 340763 - DNA, 720 bp, Cannabis indica
ttgaatttgtttgaatggactcgaaagagtttgacattacaatagcctttgatgcttgagcaactcctctcttaatagatttatcgtgtctcttctttatgtctttggtgacttttccttttaaagcctctgcagtttgatgagctttcacgaccttcatttctctaggaacatcaacttgagtattgggttcaaataaaatgtcatgagaaacccatctttcttctttttccccaatttggtgtgcgcatgtgcaagcttgtagaaaaatactgttatttttggtgtcactatttttcctgtaaaatagcacacctaattacaaaagtgtaattttttagttctcagcgtaattagagatgaaaatgagaatgggtcccaccgggcgtgctaaaaattatgttaagcaaaaattttataagtataatattaaaacaaatgcaaaatataatttcatatatgccaaattcatagcataaaattttattattttaagttcgacccatccaagattataagaataatctcttaattacaatcctttcatttaaaaggaaacaccttatgattcaaattacgatgatattagatataattgagataaattttggaaaaattaggaggaatttagaattacagctgaacttagtaaatttaattaattgagctgcctacatactttctttgtgaaggatcaagccacttgtagttcataatatg

SEQ ID NO: 340764 - DNA, 634 bp, Cannabis indica
gaaacgacaagttgagaaaaaccagttttcacaccctgctgcaaaatccgggtaaccgattttgcaggcagtgtaaaaccggttttacccagaaaacctacaaaaatcaaatccccaaccaaaacatttccaaactcaaccaaactttcaagacttgctaattagaccttaataaacatttctaaagcaacaaaacaaagcttcatgcaaaaatacacaaactaccattaaagctccaagctttgagttcaaaactcaaacttggttaaatgtaataaacatgcatcaaacctactttaaatcaccataaacaaccatattataaacccataaaccaaacccaagcaccattaacaatcacagcaacaagtttctcattttaccataaaaatcataattttgagtttaaaatctcaacacaagtctaaaacccaagaactaacaacaaaactagcatgaattcactcaaataaacccatcaaaacttctaaaaacaacaacaacacatagcagcaagcacaacatccaaaaactaagcaggcaaccattttcttacttgattttcaagaaactaaagagggaaagagtaagagctatacctagagcttgaattgtactcaaaatactgcttgaa

SEQ ID NO: 340765 - DNA, 633 bp, Cannabis indica
tggatcctcgactttgggacccaagcaacaatattggacctgtggaagaactagaagagattgagatcgacccagatattccggccaggaaactcaaaattggaaaaagtttgttgctcgaagtaaaatcagcattgataaaatttctgagattggacgtttttgcctggtcacatgaggatatgttcggaatcggtccttctgtaattttgcacgtcctaaatattgatcccaacttttaagcaattcaacaaaagcgaaggttgttggacaaggagcgagccctagccctgaaggaagaggtagtgaagctacgaaataacaacttcataattaaagctttctacccggctcgggttgctaatcctgtactggtacccaagccgaaaaagaagtggcgagtgtgtattgatttcacagacctcaacaaggcgggccccaatgactgttttccacttccaagaatcgatcagcttgtggacgcaacagccagacacgaaatattaagcttcatgggcgcctactcagggtacaataaaatcaaaatgcatccaccagaccaagaacatacaagtttccgaacagatttgggtctctattgctataaagtcatgtcgtttggtctcaaaaatg

SEQ ID NO: 340766 - DNA, 781 bp, Cannabis indica
cagtggctcatccccaagcaaatagttaagtcaaagcagttaataagacactcaaagataacctaaagaaacgacttcaagttgctaaaggaaactggccagaggaacttactgaagtactatggtcatactgcacaattgagaaaacgtcaaccagacaaattccattttccatgacatatggtgatgaagctatgctgcccgtagaactcgaaccaccgtcccacagaagactaacatataaccaagaagttaatcatacactccttgcagaatcacttgatgaagttgaacaaaaactaaccgcagtaaacttgaaactgatagcccatcagtaaaaggtagatcggtattttaacaaataagagagcatggaaattttttgtaggagatatggtcctaaaaagagtatttatgaacaccaaagacagtacgacaggtgtgctcggaccaagctgggaagggtcatatcaagtggccgaagtgctaaaatcggaagcatacaaactgggtaagtatgacgaaaaaatgcaactcgttctagtaccaaggtattggaacaaggaacacttaagaaaatactaccagtaaaagtaccaggtaggatgaccatgttaagtacaaaacaaaaaaacatttactcttaaactgaatggccttctgggcggaccacgcccaaaggttcggataaaattacaaagtactcaggtcaaatgaccacttatgaaagtacaatttttattttttgcaatctgttttgtttatgctaagctaaagatca

SEQ ID NO: 340767 - DNA, 979 bp, Cannabis indica
tgtttccaagagggggtgaattaaaaaattaagctaattttggtaaattgaaacttttaacacaaagctatgcaattaacaacttaatcaagtaaatgcaaataatatagcaagcaattatatagagcaaataatcaaacttgtgaagtaaagagtttaagggtatgaaattgcaaattctccatatttacaaggttcgatagaactaagctacctacgtccttggtcttcaaagctatagacctaactttgagttccactatcgagccaagttaaggagcttgactaacccttacaaccgggaatttttcaccaaggtgtttccaaatctcttacaatagttttgtactgccaaggactatcaatctctttcttagattattgtagtgacaatctcactctaaccgagttatttacaatactggtactaacctcacctcaatcacaattttgaaatgtgtttgaaattacaagaaaacccactttagaagtatgacgaaacaatgaaaaacctagagtgattagcaagcacacttaaagaattaagcacaaattttggctcaaagtgtgtgaaaagtgtttgttggattttaaacttgggagctcattaaaattacttaaataggtttggtatatgaaataaatgttcaaccaacttgaatttttgaacaaaaattgagtttatatagtgttgaaataaaaactagtagttcatagtcattagcacacttttcaaaaaattcctagaaaaaacaatctaccgttttctaaacggtatgccatttttacgaaaaacgggctgttgtttagattacatgagaccgaaaacaaggtaggggcaaaatcccatttttgggcgctaaaatacgcataactctttactcgtttatccgattttaaaaattccagttttgttctcttagttaaatgatatgtgatcttagtcaatttaaaaaatttagatatcatttttgtgaaa

SEQ ID NO: 340768 - DNA, 514 bp, Cannabis indica
aaaatgtatttttatttaatcatttattttaataatgaaaattataaattaaagtttgtccgaaattaattgaaaattattttccaactttaatttaattttcgaaaattatatataaatacataaaattcgaaaaaaataaataaataaataaattaaaatataataaaataaaatttaaaaattatctaattcaagttgttctaaaataactaaatttttaactcaaattattttcaaacaaaaaatttaattaaataacaaattaagttattaaccacttaatttgaaaaatattccaattaagttgatccagaattaacaaactttcaacttaaaataatattccaagaatctctcaataactaattcctagaattcctcaatttaattttgaatttcaaaaatattcaaattcaagttaattcaaaaatttgttataagtaactaatttacaacttaaataggaatatttaatgaaacataaaataattaagcttcagaagaatcgaat

SEQ ID NO: 340769 - DNA, 1188 bp, Cannabis indica
attttgtatcaccccaggaaagccaatgttgtggcaatgcgggaattgagtttgtagttgaaaagttgcatgacttgacactccaatctgatttacttgatagaattagaaacacacagttggaagatctcgagttaatcaagattcgagatgaggtggtggctggttagcctaaagacttttcaatctcaaataatgaaatgttactgtataaagctcaaattgtgttcctaatgttgatgaactcaagaaagaaattcttgacgaagcccacaccacacctttttcactgcatccgggaaccaccaaaatgtatcaggatttaaaaccctacttttggtggtacgggatgaaaagagatgtggtagattacgtgtccaaatgcttaacctgccaacaaatcaaagctggacatcaaaggctggcaggtttattgcagccactaaaccttcctgagtggaagtggaaggacattgtaatggattttgtggttggtttacctagaaccacaggaatgtatgattccgtatgggtcatagtggatcgattcacaaagtcaacccattttctgccagttaaaattacctatacagtggatcaatacactgaactgtatgtaagggagatagttcgtctccatggagctcctaaatccattatttctgacagggatccaaagtttacattgaaattctggatgagtcttcagagggctatgggcacaaagctgaagtttagcacaactttccatcctcagactgatgggcaatcagagagaactattcagatactggaagatttattacgaggctgtgtcatggactttgagggttcatggagtatgtacatgcctttaattgaattctcctacaacaacagttaccaaagtacaatagggatggctccctatgagatgctatatggtaggaaatgtcgttcccctaatcattgggatgatactagagcaaggaagtacttaggtccggaattagttcaaaggaccaatgaagctataaacaagatcaaggctcggatgcttacttcgcaaagcagacagaaaatttatgttgatccatagttcagagatgttacatttcaggcaggggaacatgtttttctacaggtttctctagtgaagggtattaggcgcttcaggaagaggggtaagttaagccctatgttcattgg

SEQ ID NO: 340770 - DNA, 1726 bp, Cannabis indica
ttgccccttgtggcactttttataaagacaaatttgcattcattgatggccaactttgcttttattttatcttttatttattgcctcacatctttaagtttgaacttaatatatttgcttgttagtgtttttattcacaacttaaacaattatactttgatcaaatttaaaatactttaagtaagcacttccactactcttgttttcccttttatatttcctaagtagttaataatctactatgtacacaagcagttatcgtctaccatgctttctatttgcaagtaatttatcagttctacttcgtgtaaagagttataatctgatttaagcaaacttaaacatactttgaataattcaccctgtgaattactttgtatattggtaattgtctgtatgaatagttaagccttctattcacaccttaggttaagtatttttttcaaggcatcttggtacctcgtttaatacattcctataaaatgcgagctgttagatgttcaacttcgtatgtaacttagggttgtctttatgagttaaatcgcatttacaactgctactttggaattttatcacccatatatgacttcaatcaattacttgaaaaactttacaaaaatttaaaatggagtgggcttgcaatatattatgtatttctagaaaaattacagttgatcatacacatatttatgcccctaaagtatttttaaagaataaaactttttaattacttggaaaatacttcaactttattaataattgaattttaaaaattacatcacaaaaatagattatagcgtgaatgtgtgtttactggaaatagggtcgcaaatgctcaacattccattggttctttattagcgagttgttaagccgagccgatttataaaccccggttccaactatttcctcgatcacataaggatcctcctagtttgggtaaatactccagcagatgcatctcttgtgtttgcaattacttgtcttagcaacaagtcaccgacgttaaatagccttttctttactttcttattgaaatatcttataactcggtgttggtatgctgcgttagtaatctgtgactctgtacatttttcttaaagtagatccaaggaaaatttcaagagttcttggttttcttcttgattatagaaatctcgtctgtgggtcacaatattgacttctactggcagcattgcctttgagccaaatgccagcgagaatggagtgtgccctgttgctattttctccgtcgtactgtgagcccaaagtacttgtgatagttcatctactcatctacctggtacaacgtctaacttctttttgatagtatccttcaaggttttattaacagcttctacatgcccatttgcttgaggccttgaaactgaagagaagctcttaataattttgttcctttccagaacttagtgaataactcaccatcaaattgagttccattatcagatactatcttaatgggtattccaaatctataaattatgttcttgatgacaaagtcgagaactttcttacgggttatggaaactaaaggttcagcctccgtccactttgtgaagaagtcgactaccactactgcatactttgctcctcctcgccatgtgggcaatgccccaatcaaatcacttccccatatcacaaatgggtatggcgagatcatcattcttagttacgttggtggtatgcgaggtatatgtgaaaatct

SEQ ID NO: 340771 - DNA, 768 bp, Cannabis indica
gaagtcaggtatgtccctgaactaaagagaaatttacttttaattagtgaacttgtatctagaggttgcactataaagatagatggtttaatgaaaataatgaagggtactaaaatagtaatgtaaggagacatcaggaatgggatttactatctgcaagggaagactgttgttagaaaaacaaacttagttgttaagagcagtgataaagacaatacaagactatggcacatgagattaggtcatcttagtgagataagtctttatgaattggagaaacagggcattctcaaaggcaaactaggaaagaaattggggttctgtgaagaatgtgtgtaaggtaagtgcagcagagtgaaattcactccacgattacacacaaccaagggtaagttggactatgcgcactctgatctatggggtgcttcaagaactaagaccattggggtgcttgttatttcatgagtatcattgatgactacactagaagggtttgtgtatttcgactcaagacaaaagatgaagccttcaaaacttttgttaactagaagaaattgatagaaaatcaatttggtagaaggattaagaagctaagaacaaacaatggactagagttttgctcagatcagttcacaaagttttgccaagaaaatggcataacaagacacaagacagtgatcaatacaccacaacaaaatggaatagcagaagaatgaataaaaatttgcttgaaagggtgagatgtatgctgagaggtgctggcctaga

SEQ ID NO: 340772 - DNA, 645 bp, Cannabis indica
aaatatgtttcataataacttaataactagaaccaatttgcacatatgtttattgtgcatggatttttggagctgttcaaaaaatagagtacttagtttaaaaagtctattggcacatttttgaactgaagggtacaatatataaattcaatggatttgacatctagagtgttcatcgttgttaaaaattccaagttggattcgatctcaatgtcaatttttttgtttcccctttaattgaagcctcctagtcatgtccttagtctgccatacataagctttcattcatgaaccacttaataaaaagtaatttaaatttaagactaattagtagtaatagacattctcaaaagcactgctttttcctaaacgtgtaagatgaatagaaatggttgccatagagacaaactattggactttctaatactaaaacaagtaattgacaagcaatatctgttgttactgatatttcgcaataccaaaaagtacaatttaactggaaaaagagagaataatttgagagatgacaaatgcgagtattcaacctagaatggcgagtactcgaataggaatgcgagagtaaacaacaaagctggaaaaataaatgagacggtgaattatagtggttcagtcagatttcgttct

SEQ ID NO: 340773 - DNA, 1117 bp, Cannabis indica
gccactttgattctttccaacaagtcggactgaagtgttatattatgcagtctctcactgacaaattcaatgtttgctctagacatctctgaggctaattgaggagaaatcattaccatattgaaaatatgatcaggtcctttgcgactcgatccatctgccacaacgtttgcctttccaggatgatacatgatttcacagtcatagtctttcactaattctaaccacctcctttgtctcatgttcagatccttctaagtaaaaaagtatttgagacttttgtggtcaatatcgatctcacaccgctaaccatacaagaagtgtcgccaaatttttagggtaaacaccactgctgcaagctccagatcatgagttggatagctctgctcataatctttcaattgtcgtgaagcataagctatgactttatctgcctgcattagcacacaacacaaaccctgccttgatgcatgcaatacaccacaaacttctcttgatcagatggcaaggctaaaacaggggctgtaatcaatcgttgtttcaactcttgaaaacttccctcacacttatctgaccatataaatagttagttcttcctagttaactcggataacgacattgcaatcttggaaaaaccttccacaaaacatcgataataacccgctaaaccgagaaaacttcgaacatcagtgactgttttgggtctaggccaattcttcactgcttcaatcttccctggatctaccataatcccgtcttttccgacaatatgcccatggaaggatacttgtgacagccaaaactcacactttttgaacttcgtagagagtttatgatctctgagtagttgcagaaccattcgaagattctgctcgtgttctgcttctattaccggagcatttgttaacccaaatgacataactaggaactcataatgaccatacatagtacgaaaggctgtcttcagaatatcttcttctcagattctcagctgatgatatccagacctcaagtcaatcttagagaataccgtcttccccttaagttgttcaaacagatcgtcaattgtaggcaaaggatatttgattttaatagttaacttgttcagctcccgata

SEQ ID NO: 340774 - DNA, 509 bp, Cannabis indica
ctttttaatgattacaaaggttatttctgtcatgttcctatttttttgaaaagacgcattccctctggttttggtggttgtgcggtttcgaggtacatcagaattaaatggccatctttcctactttcgctttgaatcacgtccattggatcaaacctttttttgatctaacaaaacaattatcatggatataaaataagaaaaaggaaccacctttgcaccatttcagagagtttgagaaaaacccttaaacttcttcgtcaaggatcaccattaaatccgtccaaagacttgcatgccatccttgtccttgacctttttcctgtgagtttccttcgacttcattttctcaaggcgatccttgcttcgtttgaaaatttgcagacagaattctcaggcatttccccaagccctaacttcaaacggtaagtttctttcttctttctcatgtttgttacatagtgtggatcagttacttgattcgtttgtatcgttatcatctcatctgg

SEQ ID NO: 340775 - DNA, 1166 bp, Cannabis indica
ttggggtgtccaaataggcggcccgtgacacccgacaacattggaacgcggtgtatggctcagtagaatcacatcttgatattttagtatagcgtggcggtattgttagacattgggaatgtcaagattagccgagaatttagagttttcccaaaataccctaagtgatttgtatgactctttagtataggtaagggcattatggtctttttgcctattcagttttgtctttagtgggggtttaatatttagttttaaatctgatttataaagcttagtttggctgaagtaatgtaattaattaagaaaatcattcatttactgattttatgaaatattagaaagttagaaaaaatcactttttcactctcaagtctctctctctttcggcccccccttagagcagctagggttgggtgattttctgtggatttcaagctgttttctcaaggatttagtgatctcaagttcttggtaagcttattgtagctttttgttaatttcttcagttgtaaggaaaagaaagttttgcatgaattgttgttttgcttgctgtacttgttgctgttgttggtttatgttttaagtagctatattatgttggtttatggtgatttgagcaggttttattagctagttagttggatgagcagcctttgactttttgaactcaagcttgactcatcaatggaaaattttgattctgtgtttgggtggttgttttgttggcttgaatatgttctataggttgtatagaacaggtctggaaagtttggattgaattgtggttgttttggttgagttatgaaattttaagtaattcccatactgaaccggaattctggttcagagaggactgtaggatacggaattccggttggcttccaggaatttttcccaaaatcggaattttgattgggtaaccggtctaccggttggggcagttttgggaaccctaatttttcccatttttgtgatatttagggtattttcatttcatcgatagggaatcttttagtttcaagtttaagtcctccggaagtgatttagcgtgttgcttatcagtgttgtgattgatgtgatttaggagcctgtaattcgccgagcagattgttccactcaggttgaccggcacacctgaattcggaatcgaggtaagattagta

SEQ ID NO: 340776 - DNA, 1128 bp, Cannabis indica
tcggtacgactagagtatgactagcgtaccgagtataggctggtacaatatcgcatcggtacggctaaagtatgactagcgtaccgagtataggctgatattatggtcaatagtaccgtcgtacgaacgttctagtctcaggaccgtgtgggacacggggtttagggttatggtcagggttatgggcgtctgatcataatccgggatatatgtataatatatgatttatgtgtaggtatgggcaaggctaaagttgaggaaccgtgaggacgagcagatgaagattgtacatgtcggggcggttaggcctggagcgtacgatcctcgggtcatcagggcttttgttgtagtcgctgggcgacaaatattttgtaaatgaataggcaacttttgtaaagtattttgtaatattataaatttttaattaaataagaaaattttaattaatcacgattttcgttaaccttgttgattagcaacgagctgcacagtaagtttacaaatcacattaacacgcctatgctagttagggtgttacagtgaagaacactaagaatttcaaaattggtagagagaaaagaagaagaagaagtctcaaaacactagttgtctgatagaatgaaaaactaggttttaaagctatagatgcattagttggataatgagaagtttctcttctttttatactaattctcttagggttaggatatacatagtttgaataataaatgataaaataataggaaaaataggacctagtggcgagcccctatgttggtccatcactagttagatttttgccacttttctcaatcatttatctatttttcacaaataccacttttttcactttcaatcctataaatgacaaaattatttatttaattattaaaattaatcatcaaataaaatttccatttaataaagtctcttaattaacaaataaaccctaaaattctatttcttcacaatcaagccatatcttagtgaaaatttataaatgagacatagtctaattttagaattctaatttattaattaaaatcaattaaccgagtcttacaagtagtgttgtctcaactagtatggggaccatggtcctatataaacgagcttccaataagcaga

SEQ ID NO: 340777 - DNA, 675 bp, Cannabis indica
tttgtttttcaaaggatatatccaagtgaacctagtgcaatcatcaacaaagtgaacataatatttaaaaccttggttggatgtgatgggagaaggaccccataaatcagtgtgcacaagatctaggacttttaaggctctagtgttggaattcttaaagggaagagaatgagatttgccatattgacatgcatcacagaaatgatcagtttcatttttcgaaattttaacattgcaagtatttaaaacttgatgtaaaactctagaggatggatggcctagtctcctatgccaaacatcttttgtggaaatagtaaacttatcagtttttgactgttttacacaagatttggttttaaaagctaaaccagtaaaggtattacaatcagaaacagtgaacttaggtgttgaaaagctgagataggctgacttgttttgaggattttgaagttggtagagtccatccttaagcatcccttgaagcagaaccctccttgttactttgtccttcacaaaacaagagtttgagtgaaattcaattattacatcattatcagaggtaagttttgaaacactaaggagatttttagaaatggtaggaacaagtagcatttcatttaattttaaacactatccagtttgggtgtatagtttgccatttccaaaatgagaaat

SEQ ID NO: 340778 - DNA, 1123 bp, Cannabis indica
aaaatataatccaacatgttctccaattaaattaaagttattaaataacaactaaacacaatctaaaataatataaaacaatcgcaacaatatttagcaatatcaaaatttaccacctatccaactgcagtatatttgaagaacctatttaattacgaataaatatgtaagatattcaaagtcatctaacatgcatattattccacccatctgcccacagtacaatatatcacagaacctacttcagtatggaaaaatatttaagatattcaaactcatctaacattcatgattaattaataataaatattagtaaatgcataccttgagctagctaaaaaccgattaacaccaagttactaactagttaatttattactaactagttataaatgagtaactagttagtaataaaaatacatcatggccgaccacttatgtagcaatttaccatttattttttttcattattttgatgccaaataaatctaacctaaccctagcttgtttcctataaataggtagtgatggctttagggaaaagatgatgcatctcattcctgcagataaaattcaaagccttcttcctaaccgtagccgaaacttctcttcctctctcgtcctcccttctaaaccgagcctatagtgaatgagtgagtgcccacacacatcaagtagtactcaatcatagtgtgtaaggctgtgaagaatacagattcaagagaaggagattcgggctcagatcttggtgatactctactacagaggatacaagggttagagatctgagcgaaagaagacattatattccgctgcaaccactgtaaggtttttttatactttatatgtgtttatttcatattgttttagaagttcatatctggtaaaataattccaatagttcctgccaaaactttggtgaatggatcaacaacgttttccttagtctccactttctccaccagtacattccctcttgccacatactctttgatgatataatatttcctttccatatgtttccttctcttgtggcttcgaggctctttactgttggctatgtcaccagtgttatcacaaagcaaaaccagtggtttttccattccaggaacaacaccgagtc

SEQ ID NO: 340779 - DNA, 442 bp, Cannabis indica
tcaaattcctacaaattttagtaatgtacattgctttattttttgttttgtaattttttttaagggttttctaattctatattattaagataacactacaacaaacaaatgtctatctctatttttgctaaaatgatgaaaactatgatgtataccagtgagataaaaagtatttaaaaatcgagataaaaaataccttttataccgattttttcaaaaaaaaaattaaaataaaaatggataaaagagtactttttatcccacttttttaataaaaaaaaaaaaaaaaaaaaaaaaaaaaaaaattaaggatgataccctttatctaactttttttagtaaaaaagggataaatgtgacatttaatcccacattttgcaaataaaatgtaggttttcaatttatttttttaaattatattacatttcatttattttttaac

SEQ ID NO: 340780 - DNA, 826 bp, Cannabis indica
aatttttcaaatttgttcatagaagtttgttttttctgcttttctttcagtatcataaattctttcttattaatgttttcagatttgatttgtaactatatgataatttaattttgttttgttttgctgctcttttatttttattccttattatagtgtttgccttttagattttattgttgttcttgccgtctaatatgttattttaggttgtgctgtatgatttttatttgtatcttatactggtattagaaattgtttaccaatatagcattgctctgaaaaataatatacctcattattagagggaaacttacaaaaataatgaaatttgggttaatttttacaaaaatgttgtcacatggaaatcttttcaaaaatactgtgtatttataaaacaacagtggaacacaaaataaaatagaacaactaaaaacaatagtggagcaactaaaaaacaacagtagaacaacaatgaaaacttaacactatacacagtatttttgaaaaaaattctgccccacagtataaaagtaaaaaagttggaaatttcagtatgtggtataattatcccttattagaaacaatataccacataaaaacaataatataccacattattagaaacaatataccacattattagaaacaatataccacatttacgtgatgcaaaactaatatatcattgttctaaaaaattatataccacactgttaaatcgtcaaagatgcaaaatttacaataaacatctttgtcttccgttctttatataccaccgcacttagaaatatatagcacactatttaagcaatatactgtaata

SEQ ID NO: 340781 - DNA, 845 bp, Cannabis indica
aaattgatgcccatctggtagtttcaagggaaacgggcttggttcacgtcatcaagttaactccacacaagtgtaaagtttacttacgggcaaatgttaacctgtaaacttttcttggtgacgtggacatcaatgtttgacatgtggcatgaaggatgacatcacgaatttgagtagacccgagtcatagtagtcgacctgggaggggaccctagccctacgctcaggttgactttgggatctctaggatggaagtttggacttcaaaaaattgaatcaaatccactatctttcattattctataccacaaagacatggagcaatctaatccaagccacaagagctgaaattacacgaacctgcaatttggaagccaacctgggcacctagggtttcacctgacacctaggttgacatcctcaattaggattttagttttcgggactgtcttagtacaaaatggtcaaaacttgcattgagatatctactagacataccacagacatattagaggcatcataatcaaaattagagcaagttaatttttgagcactcgaggccccaaggccccaagcatcaaacaccaggttgaaaatctatcaatctgggcgcctttcaagtgtctgattggagatccaacttttacaatgtattcgtcttcatcaaaaatggggaaataggtcctctcagaggaaaaataacaattcacgggcataaataacagagcccagcgcccaagttgaaacttagggttggccctgcgcctaggttgacattttaaatgtcaacctgggccatttaaaatggatttttttttaggaattcttttgagcatcttctctgt

SEQ ID NO: 340782 - DNA, 869 bp, Cannabis indica
gtaatattttaaactttataaaataaaagttacagaagttgggatcccaaaaacatttacaaaatattattacaagtccttttcttttagccggcctaagcggcaaaatagagtcccaaaaacacaacattggtagaccccaacctgctttgtctgatatggcccagacatgtacatactctcacacgtctatttatgtctacgtggcgtagacctacatgtttctctcacacgtctaaatacaataaggccttagaatggttcatctcggttacggttatcgattccaaaccgattatgccttgagcgcataactcttaaatctaaatatgatcatatacttatcgtagcatagcatatactcaacttatatcactagggtaataacccttggctattaaccgctcctattagggtaataagcctaatcccggttaccgttactcacaaatatcatattcaacataagcgccaccgtgcatactctatgtgcaaactactgtcttaactgttgtctcgtaataacaaagattccaaacccgtgggtgcagctgatcaggtgtcggtaatcctagtcacacaatctctgattttacaaatagggtcaatccctaattccactttcacataatataaatttggcattcaaaatatatataatcatatagagctcggaacgagctttccaacgatataaagaacgtccaaaacgaagtcccgagtcaaaagttatggccaaaacaaaatttagaaacaggatggctctctgctgggtttttggctgcggccactgggttcgaaaaacccagaaaactagattttaaggtctaaaaatgctcactttttcatatattcgaaccttaatcaaa

SEQ ID NO: 340783 - DNA, 1076 bp, Cannabis indica
acttacggggttggagtttaagcatttgacatatacatgtagttcatttttgaactctagactatactcaatacaccacagtgtctctataacacacatattttgattaaacatggatataatataatgaacaaaattagcaaattattagaacatattcttgatcttaatttttgttccaattaatatattactgttgtaatagaaattgataccaattaaagttcttagacatagtatcacagtaccttatttgagtgggagaaattttttaaaaaattataagctcatcttcatttggatgacacttgtgatagaaactttaaaatacaactgagaaagtaaatctaactgttcatatggatagtaataacttatcacattttttaaggataagatagtagaattttgcatagtctattcgaatgacttaggcaaaattcctaatcctcatgaaatattttatgggatctctaatgattacttgatcttaagaaagtattgtatattaatactagattgttgtgttgatgacttagtctagaagaaacttaaagtttcagacttagatgatatgtcacaataagatgtccctgaaaaacaatagtaagaggttaaatgtacttctatgtatgaatttaaccagaatcttgctgttgagtgggagctatctaagatgtaatcaaacaaggaacataaggagacaatcaagaaatttatgaaagtgatctatatgttagatgataaggatgtatattagagtccttatatctcaccaactcgtaaccaatttgagatggtaggtattattctagaaggatgtaaaaacccatctatgataatttaagctccatcagtgaagatacatagctttgtaatttcgaaaaatactggaaagttattcaactgaagaaaattctatactgtgttatctctattctattttcttggatagaataagagatatgtcttctatttattcagatgtacttataaacaataaaaaatttagtatgcctagatgagtaatgcatatagaacgctctatatgttccacgatatagacatgtcattag

SEQ ID NO: 340784 - DNA, 596 bp, Cannabis indica
ctttcgatacagaagcgcctggttgtcttagcgataaattcgcttggttgacatgcagaatggcaccgttaacctagttagaattatcaggtatgacctctcctgatgaattactagacaaggtctgcccgcctactgctaggcccacatgtggaactcatcaccggggatttggcggctaaccatttgcagtctgggatgtattcatcgttggatcttcgtctgtctcgcccatggagatgacacttggaggttgctgacctacagtttggtaggcttttcgtattagcacaatagcttgctgactactattttcactttctgtatgacgagcccttaacacttccatctctttgtgtctccactcggtaaacatacgtctttgttgctcgaacgcgaggtttaccgcagtgtagagatcttcctgatcatgatgtagggtatttgcatgaccctgcacgagcccaagagcaacacggaggttttgtaactcagtatcatctccaatggtcgtttgagtgttagtaacaggcagaaacggggtatgaatgccctggttgggtgctgaactactattcctagtctcttgcatgcca

SEQ ID NO: 340785 - DNA, 835 bp, Cannabis indica
tatatatatatatatatgaggtattgttgtttataatattactattgatattatgcatgttttgtatattatataatatatattttttgaaaatatattatataatatatataatgtgtgtttaggcttaatttccaacttaattggccaagtgatcgttattaagtaagtgtacttgtttgtttatttgcttaaccattagagaatcattttaatatgtgaggccaactaaaagtgttcaattttggaatctttatatgttatatatattttatctcctcaacaaacaatattgggctttagaaaatgagctatcaactctcttttacattgtttatttatacactaaacttaaattcataaataaagcattcggaagtgtcttttctttccttttgtattcgttactttaaatttaaattttcattattggaatcaaaggacagcatttattcaaattcaaatatatgatggaagtaggaactagcccataacagaataatgggaaataaaagtttgtagtgtacttaattattgtctcacaatagttaataatataatagaacagaatagttatagagtagtaaaacattagtcttcataagaataattgatgaaataaactttttctttcttctatgtaattaatatttctgaaaaaaaaaatgttaaaaaggtattattagtgttaaccactctcttcgttgtcatactgttattgatgtaattaaatagcttaattagtaactttttcccttgaattttgacatgtattaaattatgctcatgaacttttaagatcgttaaaaattctccctaaactattgagattgtt

SEQ ID NO: 340786 - DNA, 900 bp, Cannabis indica
tagtttgattttttaagatacctataaaataaagtctaaaaatattttgagaagtaatttaagtttttttaagtaaacttaagttttttaataattttattaattttctcaaaattaatagaatattataatatttaaaattaatttattttaataaaattggcaaatttttgtatcggttaaagttcaggaactaaaaataataacttttaacggtaaaagaaacggaacctaacagaagagacataattatgtaactgttatatttcagagagaatttttaacaaaccacatattttaagggacaaaatcaagtagtgtgaaaagtttaaaagctaattattcttaaattatataagattacaattgtggggctttggatattactacctctattaatagtactgtagacattgtcccacatggaataaatggtgaggtaatattcacaaaagaattgcaaataaatttgcagcaattttggtgtcgtttggtaatacttttgttttctaattttttaattacaaaatgaaagtaaaatttttgtttttaaaaattttgtttttgaaaaacaaaattgcgttctgtaaccacttttatttttcaattttaaaaacagaaaacaaaagtgtgttcagtaaagttcatttttattttcatttttttttattttatttaagttgggtctaggtccgggatcaaattcggatccgggtcagaggtcgggttcagcacaagggtcgtgggagaggatttgggtccgggtcttgtcggagtccaaaatattgattaagaaaaaaaacagtttaaaaaaatattgaaagtgattttcttatgtttttaaaattttgattctcaattaaaaaattgaaagtaaaacagttttatagaacatgattt

SEQ ID NO: 340787 - DNA, 651 bp, Cannabis indica
gttcaagatagaaagaaacttattaaaacaataaagaattggaagaagttatcctcgacccaaggaaacccacaaagtgtggtttacattgggaagaacctggaagagcagctaaaatagcagctaataagttttttaaaggcgaaccaggatcaattcgcctggagccatggggatatgatagggatcgaccctaacattatctggcttcatttaaatgttgatccaaactacctagcgaagaggcagaaaaggagacccttggattcccgagagacaaagggcactaaaataggaagtggacaagctgttagtcaatgactttatatgcgaggtattttatccctcgtagatagctaatcctgttctcttcccaaagccaaacggaacttggagagcttgtattaatttttctgatctgaataaggcatgcccaaaagattgttttccactaccaaggatcgaccagttagtggatgcaactgctgggcacgagcttatgtcatttatggatgcatattctggatataaccagataaaaatgcatgtcccagatcaagaacatacaagctttgtaactaacatgggactctattgttataaagtcatgccatttggatgctggggcaacatatcaacgattggtaaacg

SEQ ID NO: 340788 - DNA, 593 bp, Cannabis indica
ttagtttaaatttattttaatattctagacttttatattgttatttgttcgagttaaaaatatttttttacaactacatatattctcttaaattttaatttgttcaaaaattaaaaaagtgacacacttatatgactatatacacaattattattttatcatttttcaaatttttatattttgtaagtttagtttaaattatttaaatagttaaaattattagagataaaaattgacatttttttacttaagaaataatttttgtagtatacattataaattaaaaataaaaatatgaactttaaaatagtttaaaagtgatgatgtggcatctcatattttttttatagtatttttactattttgtgagagcttcaagctttgtctaatgaaaaaaaaaatctactaactttgtaaaaaagtcccacattgtttagaaagtattgtagttttctatatccaatctataaataagtttttctttttcgctttcattagtctaatcattattatttgctatagtataaaaaatattttagcaaataaatattttttttgtatgttattttttttttgactaattaataaaatta

SEQ ID NO: 340789 - DNA, 544 bp, Cannabis indica
cgtaaaataaacaaaatgacaacaattattatacctgaagatatagactcaaagggatggaagagttttgttaactgtttgtttggattagtggattagaaattacaatgcgaaaatcagattgcaaaaggaaggaggattcaaaaacttggttaaaaaatcattgaaaccagaaaaggaaaataaaggattgcaattaaagttatcacagtgatgatattgaagagttgggaggggtcgaagagaaagaagtcattgaaggaatggaagatattttatgtgaaataaaagttttgtggcatgaggataacgtcatggtgaatcgaggggatgaattgtggcttgaagaaagaggaaaagaatgtggtagtgaggcagaaaagcaacataaactgcctataaagatagatagcagaaatgatggagttgataaggggaatctaaattgagcaagttctcttggcataatagtggcaactttgacgaacatgggaatgacaatagtatctaatgaggaacgagaggtagtggaggagggtaatga

SEQ ID NO: 340790 - DNA, 1021 bp, Cannabis indica
cgtacattcaatatatactatattatataaaattagggtaataaccctaacttgcatactaaataattactcataaaacatattatagcatgttcaaaataacatctattgagggtaataaccctaacttgctttcagttgattagcgatgttactatacatcgttgctttcttaccttcgtgtaaattcttgggcaataaccctagaccacatttctataaaacttagggtactaatttatcgagtttaatttaattattccttgagcgcatagctttttattccaacatatttagcatggcataacacccaaaatctttaattactagggtaataacccctaggccatataactgctcattttagagtaataactctaatcacggttcttaattaatcacaaccatagtataaaacatgagcgccaccgcacttaactctacgtgcaaactactgccttacctgatgttccatgtatgaggagattccaaatccctgagtgctcctgatcaagtgccggtaatcctagtcacaattttcgggatttacaaatagggtaaatccctaaatccactttcaataatcacatatatagcattacatttatatattaacatataaagctcgaaacaagctttccaacgatataaagaacgtacacaacggagtcacgagtcaaaagttatggccaaagtaaaattcggctttccccgatacagtccaaccggaattccgattgtctgggtagaaataacacgaaaaatctcaacttttaagcccccataacctactcaaatcttcctcaatcaccaccaaattttccagagcatcatcatataacatattaaacatattttacagcttaaacacaataattgctctaagaatcaaaaaagtgtcattgttgagcaagctttgagttcttgaacttaaacttgctcaaccacacaatcaaacaataacaaaaactcaattaggtctaaatcttcaatagaaaataacccaattgacagaaactaa

SEQ ID NO: 340791 - DNA, 1577 bp, Cannabis indica
catagtgtgtaagactgtgaagaattccaaacaatagaaggagtttcaaaccaaatcttggtgatactctactacaaaaaggatacaagagttagagatctgagcggaatgagtcatttaattccgctgcaaccaatggaaggtttctcataccttttatgtgtttattttatattgttttagaagttcatgtttaggatgttaaaaacatacttgttagtaaatctggatcctagtaaaacatattccaaacaaggtcttcatgactcatcatgattctttaacaagattgttcccacacctttaatctcacacgctttgttgttcccaagaagaattgtgcccccatgactctctgaaagagtcttaaacagttctttgtttggtgtcataagaaatgaccaccctaaatcaaaagtccaatctccacctgaatctgatctagacatcacaagtgcatcaaatgacactgtaagtgcatcaaacgacccataaacatcaactacatcagcaactccatgcttcctagacttgtgatgattttccctcttcagtttagccttcaaagccaaacactcatctctaaagtggccctccttcttgcaatggtaatattgcttttctacagctccattagagcttggccctcctgtggagtttctagaattggatcttgaatggttaccttttgtagccatttgagttatgatttcccttgtataccctcttggggaattttcccttaacaatgagtaatccttctccattggtctcatctttctcatctcccttcttctgaattttcttagaattcaatgcaaccttaacctttgtcatatttagagtttctttgccatacaagatcgtatcaacaaattggtcatacatcttaggaaatgaactcaacatgattagagtctggtcttcatcatcaatttttaccccaagattattcagatcaagaatgattctgttataatcatctagatgtcttctcaattcctttgactcatccattcgaagtgtgtaccgcttcttcttaagatacaatttgtttgcaagagatttcttcatgtagattgatgccaacttattctagagacccaaggccttgtcttcatctgaaatttccctcaaaacctcatcaccaagattgaggagattatgtgctttggcttcaatctcaagtttcttcttgttgtcttcaattaatttcatggcttcatcatcaagtgcctcatagatcccttggtgaactaaaaatgccttcattttgattctccataggctaaaatcattcgaaccattgaacttgtccacctcaaaccttgttgaagccattaaaaccagttcttgattgcttgaatctggttcttgaaagttcgagtttaattattgaaatgttgaagatgaatcttgattggttgaatgtgattcttgaactctaaaccctgagctctaatactgtttgtggtgaatcctcaccctcaaaacaggttgtaacagcagtaacaatgtccaagaaacacaattcaaaattaaaaccaatcacaaaaccaaaacttgaacttaattga

SEQ ID NO: 340792 - DNA, 697 bp, Cannabis indica
acttacaacaatatctctgaatatgaattcttagataatatctctttaagtaagatctctcgaccagaattttttcaaccctttgcccagtaaacatgcatcactatttatagggctatgagcttagagaggaaagtatttcccttctcgatggatataagcagaaagattgcataacaaatacagaatacactgatcgtgggatttgaacagtttgccatatctctgcaatctgatccccaagttatagggatttcttcgatgattcacaatgcgaaagctgaattcgctaagtgttggcgctctgcgcagattgctgatcgctttggtccgagcatgcatacgaggcatcctgcttggactatattctgcgagcagatacttggagtcgattccacgtgtcaccatcatgcgatgccacgtcagagtgtaaaaattggaataacattttccccccaagtctgtacgggacttccgaagttttgtgtagacttcatccgagctgcttttgcatttcgatggatgacacgtgtcaagtgcgtctgttcgcgactcgatgtgaggctgactgggcgtcccttcagtttttggctaataaatgctctgacaattgatatttcaaaagtcgattttctctcaccacggttgacgaatgcacttgattattttttatttcccatattcgcttttaaggggg

SEQ ID NO: 340793 - DNA, 753 bp, Cannabis indica
gtgtcagggccaagcagtatgctcaggagcctttggatcctgaggatgaggttgaggctgaagctgagcaggtgaccccattgaagaggaagaagaaactcccagccacgcccaagcctgttgaacatgcaattcgcataagggagcccacttcacctgttcggccatctcccccctttgctggaaaagggaaggttgtcatgtctgaaataaaatcgatgtcaggtgatgatggacttttgaatctctgtgcgggcggtcaccttgtattttctttacttttgagcttcttgacacccatgccttatgttttctgatggctgttttctaaccacactgtttcggtagatgctctaaggaagagaatgccttagagacagccggccttgagttgttcttcgatttctggaaggctaatccctgggccaattttgactacttgggcgaggctaaggacatgtaccttgagtgctgcacgacccaagttgcttatggtgggaacgaggcggctgcttcgacctgtgaccaagatgcttcaacctctggccaggctgctgatgcttctcctgttcgaacaacagatcctcctgctccagttggcccagaagaaccgaaccaagagcctgggactccagctgtttgaacacttctctttttatcccctttatatatatatatattatattcggcctcaaggccttttttaagacatcatgaccgaccaagcggtctttaaacttggaattatttttc

SEQ ID NO: 340794 - DNA, 1439 bp, Cannabis indica
gcttgtttgagtccatataaggaattaaccaacttacaaaccatatctttcttctctttaacttcaaaacctttaggttgttccatatagatctcctcttctaggtctccatgtaagaaagctgcagtaacatccatttgatcaatttccatgtcaaattgatttgctatagatagcattatccttatagtcttgtacttggctactggtgagaatatttcattgtagtcaactccttctttctgtgtaaatcctttggctactaaccaagccttaaatcttataggttcttccttgaatctgccctctttatgcttgtatacccacttacatgctattatccttttcctttaggccttagagccattatccaggttctgtttttctttagtgaaaccatctcctcatccatagctttaaaccacttcttagcatttggccctgtcattgcttcctcatatgtttgaggctctgtatttagtgattccatagctgacatgaaggcataggctatgtcttcattccagatattgaaactatacttaggattagggtttggtgtcctcttctctctgtctctagtcaattggtagtcatctagagcttcagtgggttgaataacctcattttcatctccttgttgctcttcattctgtggttcctccctgttagagttttatgcatgctccacctgatcctgatcaggttcatttccagctggttccatctgatttatatcaggttcttcttgatcatctagcctccatagaagaggatcaaactgtattgtacctgcatggttagtatctactgtacctgcaggattagtattaagtaaacaagaaaattcattttctttaaacataacatccctgctaattatcgttttaaaaccccctttttctcttaaccagattctgtagcctttaactccttcaggatatcctagaaaaaccccttttatagctctaggttcaagcttgccaacactttggtgcacaaatgtactacaaccaaacacccttaggtttgagagatcaggtggtataccacaccacctttcctcaggtgttttaaattcaataacacttgaggcacatctgtttataagataagcagatgtcataacagcctctccccagaaaccatgtgacgaaccagattgtattaacatagatctggctttgttcagaatggttctattcatcctttctgcaacaccattttgttgtagtgttaatctgactgttctatgtctttgaatccctgtttctctgtaaaacatatcaaattcattgttgcaaaattccagaccattgtctgtccttaggtttttaatccttctgctagtaagattttcaacaagtattttccagtgtttaaacctttgaaaagcatcatttttattcttaagtaaaaagatccatacttttctagaa

SEQ ID NO: 340795 - DNA, 514 bp, Cannabis indica
ttaaacaacatacttgtgagttgatctaagatcctggtaaaataatttccagcagtgtcaccatcatgtgatgccacgtcagagtgcaaaaattgggataatatatatatgtcttgaatttttaaaaattagatatatctaatattatattattaatcttataaccaatttaaaaaataagataattatcgttagaatataaccaattttattaaaaaaaataaaataaaataagtttgaaaaattttatggtaagaaaccctaaaatttctattcaaacctaaactaactaatttttcaaattttcattttatttttgccaaaattaattttaattaaaaaaatatctaataagataaaatgttaaaaccaacatttatccaatcttataattttaatttaataaaatatatttaaaaaaataacaaatttgaaaaaaaaaaattatatggttagcaaaattttaaaatttaaactagattattttttttaaaaatattttaatgtcaaaata

SEQ ID NO: 340796 - DNA, 535 bp, Cannabis indica
ctcactcattctgttcataacagcaaattccatctaaagagagttgagagagcgaggaagcccgattacccacatcaacaagtttcctttgcaaatcaaagcttatgtgggtttgaagctcaagaatcaatggctggaggtatttcgatccttatttatagtgcatatatgatttattaattccgcactttattcataatcatgtatgtttcagtttatacatataaattgtctaacagttgacacatctgacacgaaatatatagaagcatgttaaataaaatataatatgaacacaacacgatgatagttttgtcactcctacataaagtaaatccaacttttttataccgcacccgaagcgcgggccgtttcctagtttgatgtatggtaatgtaaatgtgtgaggtaaataaaaaaattgaaattttaattaaattattttaaagaataaaatagaaaaaatgatgtgagtgctctaagaaatatattattcttttaatttttttcttaaaatatacctctcatttatttt

SEQ ID NO: 340797 - DNA, 671 bp, Cannabis indica
caccaatgaatgcaaaaaccttaaggatgagatcgagagcttgattcgattgggtcacctctacgagtggattaagaaccagctgcaccatctcaacccggttctggcagcgggacctttgccccaaggaacgctagggggtgcgcccggagcattggcaccattcgcttccctgggggaacctcagcagactcccggcctaccactgagacccaatggaagagtggctataatctctggagggccccatatcagagggactacacgaaagtaattaaagcgctacgtcggggcagtaaaacacaacgaggtttgggaagctactcaactcccagctcagaggccccgactcatggaccaaccaattgcattcacagaagaagacgtaaaaacggtgcgttttcctcaccatgaccccctggtcatagagactcccatcgccaacaagattgtggctagaatactaatcgacaatgagagttctgtgaatttactctttaaagaagccttcacagcgataggcctcacggaccgggatcttttgccaagcggttcccaactcacagggttcaatggaacaacacttatcccaatgggaaaagtgaggttgccagtcaccttgtgtccggacacaccccaaagcactttaaatactgcacattcgtggtggt

SEQ ID NO: 340798 - DNA, 554 bp, Cannabis indica
atccgatccgatccaattggatatttaaaaataacatctgatctgatccgatcataattggatatccaatgtttggcggtcggttgtaattagatcggtcggttctcattggattggatcaatttatgcacacccctagttgaaaggttgcccagtgcatgaaacttgttcaccctgaccagtcaggaccctaccagtagttgtacatttctgtttttgtaggtctccatattgtctaccatccaaggttggaaggttgcacgacactaacctgcccgattagtgttgatctgtctccaacgtgtcttctgctttttgctatgtggaggtgtcacgtcaggtgggtaaaaattacgataaaatttgtccctcaagtccctattcgaacgtctgttcgggtagggactttacacatactgtaatgccctttgtcgtgtaggtatgcccagtcgaatattggtctcttcgaatgacataattttatgacagttattaattttacgtcgatcaatatgggaaactgtgcgattgctgcacatttttccatgttaaaa

SEQ ID NO: 340799 - DNA, 561 bp, Cannabis indica
tagtgtcaaaccactacaaaaaataagagaacactgaagtcttttaaataagtgaactccataattttttcaagtgtgccgtaaaaattttgtccatcttcaccggggaccataacaccgctattttgtgttttgcggttatcatctctttccttgaccaaaaatttaataccgttcactatgcaccctagataaaaagaaattgctgcattcgctgggttagcgatagcatacaactcatctgtcactacaccctggttgctcaaccgtagttcattaatccacatatcaggaaaaaaattaaattaagaaaagttgaacagttattgagaacaagattaagagtattgagaggcaacaaggcttactcgagttttgaacgatttagggaactcagtctcttgcactttttcaatattgcctacaccccttgcttgaagcaactccttgtgctcactatataatataatgcacttagtaagttaagaattttttaaacgaagtcgactatcgtatgtttgtgtttatggaattttaaacttacttgatatacggctcaac

SEQ ID NO: 340800 - DNA, 638 bp, Cannabis indica
gtaacaccccaaactcttcaagacgtttttctttatgccagcgcatttctttagctgtatgtcgggaactaaagaatctcttcaagcgaggagtgataggaaagtaccgcaaccgcttgtgcggaattttgttacgaacatatctattggacttgcaaatcagacaaacagtagcggtggcatgttcgccatgaaatagagcacaatcgtattgacaaatatcaatgttctcataacctaaaccaacatcacatagtaactttcttgcgtcatagtagtttgtaggacaattattatcctttggcagtaattcatgtaagaattttaacaacatttcaaatgaactatcactccacttgtttaggactttcatgttcattaacttcacaacacaagttaaggcagaggagttttcacatcctttgaacaaaggactattcaaagcttcatatagtttctcataacgagcttgttcagcagcaggtcgactatctacaataaactcatctgtagagccaatattaacaaattcaacaccagttgcatcatgcaatcctgctcccaagtcgtcatgctcgtatgggacgtcctcattattttctatttcttcctccaattcttcctcaccatggtagatc

SEQ ID NO: 340801 - DNA, 782 bp, Cannabis indica
taacagaatattcttttatttttaaggtatattttgttaaaccaagaaatgccgttagatagacacttttaatatataaagatatacgaattgtgcaccttgtatggctaaagcttttgtttcgcattgtttattaccacgcctaattcttatgcatgggagatcataacattaatttaattttgaattgatgtggtagacatttccagtcatctgtcggcttttaaaattccataattatatatataaaaaagcacatgacaaataaattggattatacgtaaactatggagaattatgatgaaaaatatcattgatcagcaaaaaaaaaagataatcaagaatgaatataacatacatacataaaaactcttaattatatatcttttttacttttctgatttaaaagtaacatgtatatattttaaagtcaggatttagactcttatctttatgtactcaccatctttttttatttttactcaatgtggaattttgaattacacactcaacaatccttttcttgaataaatgactatgttggaatataacaattagttaattattctgttatcagttactttgtaatcttgatttaatatgttgtactgaaactaatataaataaaggcacactcaatctatgttttagattgaactttcattttccattcaattcacttccatattttcctctatttcttttttgttctttgctcaaagtctgaactccatatttgagagttcttacatggtatcggagccatgtcaaaccaagaagac

SEQ ID NO: 340802 - DNA, 366 bp, Cannabis indica
tcatcgggaccaactcgcattatagagagtcgatctctatgcttatgcaggaatatagagaggatactcgcacatatcctgatacctgcgagttagatccattctctcatcccgcatagtacgagttatagttatgcgattcagactttggtcatactcgcagtatctcgctgactctatgttggccgaggtctaaacttcgaggagtctctcatggacgtctcagctttcattagaaatctgagtacacgtgtcctttaaacaggagtctggtctcgagtttctaggtgagagaaatctcactataacacacattttgttttatattagtgcaagtgggagtttgtcgggttttgtgccctaaat

SEQ ID NO: 340803 - DNA, 1149 bp, Cannabis indica
gtaagtgagttatggtcttttcagctagtgtatatgggctgtcaataaggtgtatattgattataaatacactttataacacttaggtctagtatctcttttatacactttgaattgtattcatatctttagaaaatagagtcttcattttgtagagaagagtgtgttcgtctcttattttgtttatatgtattttgtattatctcgagtctgtattcaagtctgcaaaaaaagaattacaacagtgctgactcgggaggaagcaagcactcttcaaggagatcgaagggagttcgagcacttgaagtttcaacaagattcgattagaaggtagaagacttcaagcttgcggcatacaataagaggaagtctattaatgcataagtcaattattttgtatatttgagatctatctaataaatcttatctctgggcgtagtctcgtgaactagtaacaatctacaagaattgttaaaactgcgtacaataaccttatatgcttttacgtttctacactgtttgtttttttagtttattctgaagttacataattaccttttgtagttacagaaaattgtttcagcacaaattttattattaaaatgcatttaattaagaaattaattaaataataaattgataatattaaaataataaatttcaaaatataatgatttttttttatgctagatgttgctctattattgcaggtccatgtcatttaaaaaggctaattaggatttttttccctaaacttatacatgtaccaaatcatgccccctaaacttttaagatcgttaaaaatgccccatgaactattgagatagttgaatttaaggactttcgtccaaatttagtaaacaaaaattctaacaatgatgaaagttcaaaggggatgatttagtacatatcaaagttcgaggggcatgatttggtagatatcaaagtctggagagcatggtttagtacataaacaatcactgaaacaataaaattgaatgaaattagacaaaagtccttaaatctaacaatctcaatagttcaggagatttttaaacgccaaaaaggttcaaggggcgataatttgatatatgtcaaagttcgagggaaaaaaaatttctaattagcctttaaaaaaattaaaagtga

SEQ ID NO: 340804 - DNA, 573 bp, Cannabis indica
aagacccaggacgcgaacccacacccggagcctgatctagacctaaactaaaatccggacccaaacccaagctcagacccagagtcgaactccgacctgaactcaaacccaaactcaatctaagaatcgcaaatggaactagaaccgaactaggactaggagtaggaccaggaactaaacgcaaacccgaaccgagatcaaaacccagacagaaacctaaacctgaaccgagactaggactcgaactcgaacctagacggagacaaaaacccaagcaataatcgggacctggatccagaatcaggatagagacctgggaaacaaaactaggaccgagacatagtacccgacccagacccgaacttaaacctaggacctagctcgtgacccggcaccagaaatggaaccagactgggacccgagattgggatccagatcaggacccagggcttggacaaaacctgtagtcggtgtctggatttggaacccaaccctggaccccattcctgacaaggatccgaaccctcactcggacatgaacccagtccaaaacccaaaagtggacccgaaccc

SEQ ID NO: 340805 - DNA, 1413 bp, Cannabis indica
cctggtctaggtcgcgtgtctcaggtcccggcaagggtttaggaccaggtttggtccaggtcccagtcctggtcgtggtccaagttcgggtcctaggtctcaagtccgagtacttgttaaggttcttgtctgcgtttgggttcagttctactctcaagtgcaggtcctagtcaaagtttcagttctaattctgtgtatgggttggttccaagttcgagtctgggtccacataagggttggggtcggggtcctagtgtaggtacaggttttttatatcccgttctggtccaggtctgagtctgggtctaggttcgagtcttaggtctgggtcccaagttcgggtcttggtctgcgcctgggtttgggtcaaggtcccgtgttttgatctcgacctgggcctaggtaagtattcaggtttgggtctaggttcatgtccgagattgagtcccgagttcatgtttgggttcaggtttgagtctcagtctgagtttgggttccggaccgggttccagactatgtctgagctagagtgtcggggctaggttcttctctatttccaggtcccaatccaggtccaggtcctggtcagggtcatggtcgtggtcctgttccagggtcttggtcacgttttggttcaagtttccaatttgggtcccaggtctgggtctggttccaggtcctagtccagcttcgggtccttctctcagtcccagattaagatattgactatgggtcttgtctaagcccggttcccagatcccgatacaagatcttgatcccaatcatggatcctagtctggcttcggttcatgtcccaagtttcggtctaggtctgggaccatgacttagttccagttctgggtctcaatcccaattctgtgtccccgagtcttgttccatgtttgggtctgagttcaggttagggttcgggtctcaagtcctagttcgggtttggattaaggtttcgaacccaatcccaaggtgggactgtctcctcgtgtgggtcctcgtccggttacagttttgggtctaggttcaggtcctagtcctagtcctgttcctgggtctcgatttgcttctagtttcagttacagtttcaagtcccggggtatgggttctggtcgagtttgggttcgggtcctaatttgggtccgagacgaggtttagttctaggtttcaatctcggttagggtctaaggtttggtctggttctggtttcgggtccgggtgcacctctcggtctcgttccaagatcccagtccggtgctagttcaagtttcgatttagttcccgagtgtgggtctgggtcttggtatgtgtccgagtcttggtttgagttcgagcttgggtctgggttctgttgtaagtcccaaatcaagacaccgacaacaggttgggtccaagcaccgagtc

SEQ ID NO: 340806 - DNA, 502 bp, Cannabis indica
tttatccatggtgaagacaaaaaagatgctcttatcaagattgcttccaatcccccatgggaaatcaggggccaaatacatcacaacagaatcactccacaccgcaaagcccggataataacaaacgaacgaatcttcaagagcaattaaaggttcaaaatctggcaaatctatcatacggaattcctcactactcatatcaaaactgaggatcttttccattccatatagactcatataccagtaacaaacacctccaaaagatacagcactgcgtagttcagaatgcaccatataatccattacgtcttgagacacattgatctctctccaagaatcagaattcaatgtgtatacctcaacttgacattctttgttatgaagccaaatggaaacaaatttgtatttgttgtttctagaatcatgttcaaatcctatgtagcgacaataagcttcaagcatatcatcctttggttttgggagaatcatagattctttcaaa

SEQ ID NO: 340807 - DNA, 798 bp, Cannabis indica
taagttcatcaacgtatgcgtcttccgaatctgcgagttgactgttcatattccgatgttaaactcgcaggtttatcattatgtttaggatgtctgcgtccttagatagtcgccttttgtggacatcgcatgacgagctgatagaacctagacatgcgagtctatattggtttatcaaggctgcagggttcttaggaccaactcgcatttatagaaagtcagtctcctggtttatacacggacatggggaggatactcgcacataattcgatatatgcgagctattctcttgtctcgaatgcgatcagactttggtcatgctcgctacctctcgctgattctatcttaagcgaggtttgaaacttcgaggagtccctcatggacatctcagctttcattggaaatctgagtatacgtgtcctctaaataggggtctggtctcgagtttctaggtgagagaaatctcactataacataaatatttgaaaaacctagattttcttgtagaaatttgaataatgcttaatttaagatattttgacatataatatgaataattatggtttatttattattttattcttataataataattgcctaaccatatctattttaaaattgatttattttattattttaattttattaaattataagattagaaaatattgttgaaaatatctatttggttattttcaaatcatttatcttattagatatttaatttaatttgataaaataatttaaataaaccttgatattttaaattagtttcattttttttaattttaaatttt

SEQ ID NO: 340808 - DNA, 551 bp, Cannabis indica
acatgtccacatgttcccactctcatactattacttcatttatatcggcttttaatgctactaaatcaactaaatggtacacaaaagtaccaagtgttgtgagccatatttttctataaataggacctaaaatgattgcaaaggcatgagatttcacgtagagttattatactaaaattttgtctttttttttccttcttctttatttcactttattaattttagtgtaaaaacaatgtcttttctaggctaatttctttggcaggactcaagtgtaaattcatgcaatttttatttttcttatatattgattctctttgttcttcatttccacatttgttatattaaatttctcttcttttaaaattgcactttaaatttaatagtaccttatatataagttcagtcatgcttttcttatgtaagttaggctattaattattagggtgttttttatataatatgatttttactgtattctgccggtggtattttgtcgatttaaattatataatatgatagcattttttagaagtagtattaatttaatt

SEQ ID NO: 340809 - DNA, 1608 bp, Cannabis indica
gccactcactcatatgtggcggctaaaattattgataaattgggtagactatttgatagctatgacaaagggttcggaaccctactgcctagcggagagttagttatctccaaaaggtgggttaggtctatgccgatctagattgagggtagagagttaagtgctgacttagtggaattgggcttagcagattttgatatcatacttggaatgaatttttttgtccaagtattctgctagtattgactgtaagtggaagatggtgatctttcgaccctagggtgaggaaccatttgtgtttgtgggatcagttcaaggatcttaaattccagtgatctcggtattgaaagccaaagagttgttacaagatgggtgtctagggtgtctagggtttttggcagtggtattggataccacacggcccgaatcagtttggctagaagacatttaggtggtttaggaatttttagatgtgtttctcgatgaacttctgggtttacaaccacagcgagaaatagattttgttatcgacttagcacatgggcagagtcagtctctaaagcaccttatagaatggctcctacaaaacttaaagaattgaagattcagcttcaggggatacttgacatagggttttctcaacctattatgtcaccttgggaagctccggtgttgtttgttaagaagaaatacggaaccctacacatgtgtattgattatagggaactaaacaaattgactatcaagaataaatatcctttatctaggatcgacgacttgttcgatcaacttcaagggaagatggtcttctctaagattgatctctgatcgggctatcatcagttgagaatccgagaggaggacattccaaagactgctttctgtactaggtatggacattatgaattttttcgttatgtcttttggactaactaatactccgacaacttttatggatctgatgaatagggtatttaaggatttccttgatatatgtgttatagtatttatcgatgacatccttgtgtactcccaatcagaagtggggcatgaacaacacctttggaatgttttgcagcgattacaagaacacaagctctatgccaagtttaaaaattgtaaattttggctgtctcaagtgtctttcttggacacattatcaataagaatgggataatggttgatatgggaaagattgaattttttagtgattggccaaaaccgaagacaatacaaaagttagaagttttctaggattacctggttattatcgtcagtttgttgagggattttctaagatctcaacgcccttaacagaactgaccaaaaagaatcagtggtttctatggacaaataagtttttaatagttgaaacaacatttgattacagctctagtattagcactaccatcggataaaaagaagtttttggtttattgtgatgcatctagatagagtttgggatgtgttttgatacaagttgatcgggtaattgcttatgcctacagtcagttaaaggaatatgaatagcgatacccaactcacaatttagagcttgttgtagtggttttttccctggaagatctggcgacattatttgtatgggga

SEQ ID NO: 340810 - DNA, 797 bp, Cannabis indica
acaaggttgcttctaacatccctagtccaactttcttcaaacttgaaacatctcttaaatttagtacccatcccccctgtatcaaggcacaacggtctgtggtctgagttgctcgtttggaaggagctgagaatagctttaggaaagagatgaagccaggctccattcacaatgcccttatccagggcagatttcacatggtttttaccagaccggtgattatcccaagtcatcatatccccctgaatgttcatattgattaggccacgggactctacaaggtgggaaataaaagggataaagggatcccttcccatcgacccctcccgctcagagggcttaaggacaaaattagtatcaccaaaaatcaaccaaggcccaccaaatctgtctcctaaagtcatgatctcagaccagaaatgtttttttgcattgttgtaaggcggtccatacacacacgagaggagccacaggtgagaaggggggtccgaatagaccagccccgaaatatggttacgcgagcaagagatacactcaaaactaaaaccactcttccaagctaaaataatacccccagcagtcccaataggcggcacaataatattaaagtaaaaatggagagcttttagtatacgtaccaggggcttagcatccaccttgagctcagtcagaaaaacaaaatcaggagagcgcgatctgagcagggactttagttcgcgaactgtagaggtctgccccaaccctctacagttccaagcaacgcctctcatggctcctgtggaggagatttgacattc

SEQ ID NO: 340811 - DNA, 819 bp, Cannabis indica
atgcttatcacatacttcctcaggatttagatgtaaactttaaatctcaatctgaaatatttaccattgaagcaacacaaggttagcctatttcctcaacaaataatttatcacactaatcattttaatcatatcccgctcaaacaaaggaaaccgtactgactttgtatcataaaattccttcaaacaaaatcaaaaagtcctttactgagcctgctccaaatctttctttgtaaccctataatttggagtcaccaaactgaaccatttttaattcttttcaataaatcaaactactacgtaatgccaacaaattctcctatcacgaactcaatccgtgctctgtttatatttcccagcaaactttggtgaaatctctttctggttatatctaaacctcttcgggctaaagcatctactatcatttacgttccaagagtgctagaaaatcttacagttatcatcttcaactaaccctaaccattattgcagcttcatgcttaaatccttccaagtgaagatatgtttgaagcccttgtgatccatataaatttcacacttttcatcagatagataatgacgccaaactctcagtgcataaataaccgcaccaatttaatatcatgattagaacaccactattcacactccttcaattgtccaggtgcacaggcaataatcctcttaaactgtatcaaaacataatctattccttatttagaggtgtcgcaataattcataatctttttctcacagactggcaatgttagcactggtgcaataggtaacttttatttcaattcttttcacttaattcca

SEQ ID NO: 340812 - DNA, 662 bp, Cannabis indica
ggacacaaccccaaacctggacctaaatacaatcaaatgacgcggcccaagaccttggacctaaacaggaataagaccgagatccgaatctagacttgaggtttcggcgtaacgcgtagtaagtgtttgaatccaagacccggacccggatctgtacccagacccggacctggacccagactgggatccaaacacgatctcgaactcggaatacgaatcaaactaggtctaggactagaacccgaacctgggaagtagcaggacccaaacctaaacccaaactcagactagaacccataccgagactaggacttggatcgggacctgtgactttggacctaaacaaagaccaggacccggagcgagactcagacccagacccaaaaattggggctggacgcaggacctaagaaccagactcggacctgggatctgaaactcggacccacactaggagtgggaaccaaacgcgaactgggacctgaactcagttagggactcaagacgataacccgaactgaaacacaaacttgaacccggatcgggacctaggacctggaatagatgggggacccaaaccccgaaattgggaccccaaactaggaccaaaacttgggcctcagaacttggatcaggatcaaggacctgacccaggcccaaat

SEQ ID NO: 340813 - DNA, 563 bp, Cannabis indica
tcatataaatacactagtcaaatgttgttctcgataaaacccaacagtgtcacaaccttatcaaacttcaagtaccactggtgagatgcctgtttgagaccataaatggatcatttcaatttgcaaaccaaattgtcatttccattttcctcgaagccttcaggttgagatatatagacttgctcactcaattctctattcagaacaacagtttcaataaccatttaacccaactttgaatcagagtgcacaactaaatccataataattctaaatgaatctttagtgaaaacaagtgagaaagttccagtgtaatcaatacactctttgagtaaagcctttagccactaaacgtaatttattattccttttagttcttaaaatccacttgcagcctattggtttgaaaccatcaggtaatagaactaacttccacatattatttttgtccatgaacttaatctcatcatccatagcttttatccattttacagactgtggactattaactgcttcactataagtgagaggttccataaaatgaccaagatcacattcacctt

SEQ ID NO: 340814 - DNA, 1964 bp, Cannabis indica
tttcaagttttttcttcagtgtatccttcaaggtcttgttgactgcttcaacttgaccattcgctagaggatgcgccactgcagagaaaattttgatgataccatggttcgcacaaaaatcagtgaaagattggttgtcgaactgcttgccattatctgaaactattttgtgcagcaatccacttaggaaagtaatcaaccgctacaactgcatactgcactcctcctttacctttgggtaattgtccgatcaggttaatcccccaaatagcaaagggccacggactttacatctgtgttaactcgtaggtggagctcgtggtatctttgaaaatctctggcatttgtcacacttcttgacataggcttttgaatcttcaatcatcgttggctagaagtaaccttgccttagaattttcttagataagatttgcccgggggcatgatttctatagaatacgttgtgcacttcagataggagtcgtgcagcttcttgccgagtaacacatctgagcaacagaattgagaatcctcttatgtacataattctctctactatgatatactgtgcagctttccttctcattttttgagcttcattccgattatctgagagtttcccaaagtcgaggtaggctactattggtgtcatccagtttggggaagtatcgatcatttcgatttcttctatgctagtgatgctaggctcttcgaggaactggataggaaccaagtttgccttgtgacttacattgctgcttgccaatcgagctaacgtgtctgtagttgtattttcttccctgggaatttgtctgagactatagctttttgattgtgcgagcaaatcatgtatttttctcatatatgctatcattttttctcctcgagcttcgtattctctggatacatgatttaccaccagctgtgaatcactgcagatttcaatgtgttcggctttcatctcttgggctagtcttagcccagcaattagagcttcgcactcagcttcgttgttaaatgttctgaatcagaacttgactgcagcgtacaggtgttgcccccaaggcgtgacaagggcaattcctacacgacatagctgatctgtggctgacccatctacatgtagtttccaggttggcttatcttcattgttacttggctgaggtgtttgtatcgggtcggggctgctttttggaatgctttctttcttgcctgtgcattctaccacaaagtctgctaaggcttggcctttgattactgttcagggttggaaagtgatttcatactggcccaactcgaccgcccacttgagtagtcgtccgaaagcatctggcttttgcagtatttggcgtaatggttggtcagtgtatacccaaaaaggatgagcttggaaataaggccttaactttcttcttgctagaataaggcagtaagcgagtttttctatgaacggatattggcccttgacctcaatgagtcttttaatgatgtaatagactgggtgttgtatgctgtttttctctctgatgaacacaacactcacgtcatgttccgtgacagtaaagtatattcccagttcttctccgtctagaggttttgagagtacgggaggtcttgcaagttgtgcctttagttctttgaaatttttttcacattcctccgtccactcaaactgcttgtttcctcgcaggatgttgaagaattggacacactaatctgttgattttgaaacaaatctgctaagctgggcgatccaaccagtcaagctttgcacttctttggcttttgttggcgagttcatatccaggagggcttgactcttctatggattggcttcaattccacaggcattgacgatgaagcctagaaactttcccgagcggactccaaaggaacattttaagggatttagtttcatattgtacttttggaggactttgaagcattcgtccaggtcgtctatg

SEQ ID NO: 340815 - DNA, 1027 bp, Cannabis indica
ggcataaaacccaacagttggtgtgcggtttatcaagtagacagcagtgtgtataaggtagggccaatataccaaggctatagaagattggaaagccaaggctcgggccacattaaagatgtgttgatgtttttgctcaacaactgagttttgttgaggtctctcaacacatgaattatatatttgaatccctttttgaacataaaatggtttgatattgagttcttttgcattatcacacctaaccactttgatatttttgttaaattgggtgaaaacaaggttatagaattgtggaattagaatttgcacatcaaatttggatttcatcatataaatccaagtatctctgctatggtcatccacaattgtcaaaaaatatttataaccttcgatgctttgaacatgaaatggaccccatatgtccaaatgtattaaatcaaaacaggcagcaacaatattattttgtgaattgaaaggtaatcttttctgttctgctaagtgacatatggaacaaggagaaacattaatgtgttcagaatgtaattgtttattaagcaaatttgttgtgaatatggaaggatgtccaagtctagagtgccatgaatgggcactgttacaagtattattgaactgattacaagtagatgaaaaaggagttttgtgagatctgtcagattgcagcaagaagtatagattgccaatccttttagcagtcccaatcctcttgttcattgtgccatgtaatgtgcaagaagagttggtgaaaagcattctgttagaggtgttgttgagataactcgatacactaaagagattaaatttgaatgtaggaacataaagtacattcgatagttgaaaatctggtgagaaaataatatcacctgagtgagaaacgttagtggtcgatcccttaggtaaagtaatagtgttagctttagtatttttgtgcacattagaaagaagagaaaaatcacagcaaatgtggtgtgaagcaccactatcaacaatccataggtgattagaa

SEQ ID NO: 340816 - DNA, 1045 bp, Cannabis indica
tcttgttcaaaaaccactactattgccaacccacaccacaccaagtagaatttttgacaccttacacacaatccatgtagtacttggccatgatacttcctctgtgcactcactcaatgcccaatttatccaacaccactactctgttcaaacttgcaatatttccaacactaccacaaatccaagtcaacaccatttcactaattatcaccttcatacaaacacggcagagacagttaggcattcaaaaccacaccaaaaattccaaactacaaccccaatttaaaactatcaatgaatccaaattaactcctttataccaaataaaccctcttccatgcatcaatctattcacaatcacagtttgtctcaaattcacaaattttcctcagcccaatattcttcaacaatttcaccaaatttccattcaagccatccaagccaaaattatcacactgctaccacacttaaatcacaatgacaatccttagcaccctttaacagaatattaacagtccatgacagccaccaagtatgcaatacaacccaaaataactttcaaattaatttacccaatcaaaacttagcttgaaccggtgtcttgactcgggttgatgtaagtgccgactgaaatggctcagctgggtggcttcgaagtcaggtggatccgttgagtgtgagctggttcgtgcgagctgctggaggttggtggtgcggtctcaggggaaatggaagttggttgactggtgtcgggttgtagctgggcataggtcgtggttctgatatgagtgaacagaggttgggtttgtgagtggtagtcgaatggagacttggttcgtagtggcttcgggtgatttcgacttggttgatggtgaagctgagttgaacggttgcagggggaatcgtggtgcaattcgaatggtgagtggaagcttggtctgtcgagtttaggcgagctggtgcgatttggtggtgagccttgagtgaggttcgggttgctaggggttcaggcgaaatcgaagggtggttgcgatttggtggctac

SEQ ID NO: 340817 - DNA, 1365 bp, Cannabis indica
gacctggacctggacttggaactcgaaccgtaacaaaacctagacctagacctagacctaaaaccgtaaccggaccaagacccgaaatccaacccagacctaggcccgaacctggatcccaacccatacctcgactcgatgcagaacctgagacccgaaactagaacctgaacaagaaccgccagaccaggacccttgaacaagactaggatcgtgacgaggacctagacccattcctagaaacgaactcagacctagccccaaacccaaaccgagaactgaactcgagcccagacacggtcgtgtacccagaccgggaccgagacgcgaacccggacatggacctagattctggaaacgatcccaaacccaaactttgacctagatatccgaatacaaacctggactcaaacccagaccgagatcaaaactcgagacctagattcggacagagaccctgtcctagaaccacaccaagacccgcacctgagacccaaacccagacctgaacccgaacacagacccacaccgggatttatacttagactcagaccccgacccaaacttagaccaggactcagacctcgacccaaactcagacccaaacccgaacccaaacactgaatggaaattgaaactgggactaggacccaaacacgaacatggacccagaccgggacctatgacctagacatggatgggggacctagacttgggcctcagaacccagacccagatcaaaacttgggacttggacctgaacttggaactagactcgaaccctgatctggacccagaccgagatcggaacctgaatctagactcggaccaagacttgaaccccgattgggtcctggactcggaccgagacctaggactcagacctagactcgggacacgggattcagaactgggactgagacccaggatatgaacttggacccggaccttgacctaggacccagaccgaaacctgggaccccaagtggaactagactaggactcgagactgtgatccagatctagacccagggcttggacctgacccgtagtcagtgtttggatctaggacccatatacggactcaaaaccagactcggagtcggaccaagaccctggcccagacccagacccgtaccccagaccagggtccgagtccgagtccgggtttgaatccgggaactagaatctgactaggacccagacccagacccggatcgagacacggacccggatcaggacgcgcatctgaatcaaaactcagatcgggactcgggacacgaagtcgaaccgagacacggacttggacctagactcgaacccaggacgttgacccaaaaacggatctagacgcagaaccgaaca

SEQ ID NO: 340818 - DNA, 660 bp, Cannabis indica
ttaatatctcattatttgtcttgaagtctattttttttctttttcttttcttaaaggagtataactattaaataataaataacactgtttaaataaagcaatgtattgtattaattattacgactaaattttttaatgcaatgtatgttgtattatttaatacataacaaatggtccgtagtagcttgtattataatatctacataagattcgaggtcaacaccaatcttcgatccggactcggacccgaacctaaacccaggacccgggacccgaacttggaccgaacccggacatgggacccaaacccgaacctgggactcggactcgggacctagacccagacctgggactcgaacctgggacccagactcggacccagacctggacctagaccaaggaactgcaaactgagacttggacctggacttagaatttgggatttgaactcgagacccggaccctgacctgggacccagacccgaactcagacccgaacccgaacccaattctggatccggacccgaacttggacccagacccgcgactcggaccttagacctgagactcaagacccaaacccgaaactcggaacccgaacccgtagttggtgttgggatcgagtgtattaaaaatatattataactttatacaatctat

SEQ ID NO: 340819 - DNA, 1292 bp, Cannabis indica
cgcatgcatgccttattaatgctctttccgttttttttttctaaaaaattacactattttaatacataaatgaccctagcagctagtatagcatgtttgcattaatttacacgctgaaaaataaggaaaataaaaaaaaatagtaaaaggaaagaaaaagagaatggaattagggttttaagttattagcctcgctctctctttctttcttctctctctattccactgggcctcattcctcttttttttcgtctgcccatagccaacccaactccggtgactggctatcgaaaacgaacaacataaccgaaatccttgcccccaaaaacctctagatctgccactcacttttgcattttgtcggataaatctcatatccgcctccgtctcacttttttggtgttctttatgcctgtgtggatctctctctctctttctctattttctcaggtcaatgagggttcgcgtcgacggagctttgagtttcaaggaagttcatgcacgacgaagcttcgagaaccagggctgttcgtggatgacgaagcttcagagcttcgagattcgtggctgttcgaaatcgactgagctattgggttcatagtggttcatcgtcgataatggagttcatcgctgctgattgtgaaaatattttgctgttcgtggtctgtaattttgtaattttgtaatgttgccttgcagatggttctttggttgctgtaaagagactgaaagcgtaaacctggtggagaattgcagtttcaaactgaacggtacgtgggttctgtatgagactaactgagtgattaaaattttatatatagtttgtgtaatttttctttattaaaatttatgctcaaatctaatattctgtttaaaatttagtattgttgttattgaattattgatctgatttgggctattaatgtttgtatttgagatttatttgtaaagttctagtgggtgttttaagtttaatcttttttatatgttatttcgattttttttgttacagtttattgttttattaaaaattataaattagatatttcttttaaattcaatatgattatattttatatttagttaattttatttattattgttatatttaattgtatttggatataattaatataaattattatttacaatatataaaatttaaattaaatattattttttttagacaaatatttaatatagtggcactttttgtgtgtcactatatctcaaaaaatattattaaaaaagaaaaaaaaagatatagtgacacttcatgtgtgtggctgtta

SEQ ID NO: 340820 - DNA, 777 bp, Cannabis indica
tgaactctagattatattcataactctacatgatccctataacacttaaggatggaccatgatctctatatcccttaggggtggatcataatctctatatacttaggggtggactatactattgaaatatgtagttcattttgaactctagactatattcaatacaccaaaacactctttgtgacacatattttaaaaaaacatggatgaaatataatgaattatcaaattatcagaataaattcttgatcttgatttatgttcccttcaatatattactgttgtaatataaattgatactaataaaagttctttgacaatgtatcacactaccttaattgagtgggagaattttaaaattctttacccatcttcattttgttggcacttgtgataggaactctagaacactactgagaaagtaaatctaaccattcatatggatagaaataacttatcagaattatgacaataagatagtagaattcttgcatagtctattcgaatgacttgggcaaaaattcctaatcctcataaaattttatgggatctctattgattacttaatctctagcaagtattttaaactcaagttaaaatactcgattgctatgttggtgacttagtctcaaaggaatttacaatttcagattaaaataatctgtcacaactagatatccctcaaaacaatagtaagaggttaaaagtacttccatgtatgaatttaaccagactcctactattgagtgggagtcatctgagatgtaatcaaacaag

SEQ ID NO: 340821 - DNA, 1239 bp, Cannabis indica
agagctaaggcacaaaacaaaaacaatacatgcatatctgtatataatatatacatatatacataaaacaaaataaacaatatgaatacatatggcaaaagcatatttaattacttttcatccacactcctttaaatctaaatatgaaaaagtgagaacaaaaaatattattacgagatgaattaagaaataggaaaggttactagaaattagaagcaaaaataatagaaaattctcatcacccaaacaacgaaacacaattgatataaaatctaatcttgaatagcaacaaaagtaaatttatatacacagagtcataccataatttaaatttctctactatttacctcatctgatgagctccgtttgaagaaggcttgcacggctcggcaagaaagacagcgtcgtcatctccatttgtctagatctagggtttccattccctcccataaggacataccgtaagaaacgaatcgtgggagacccaattcggacgcccaatctaaggtccaccataggaacccatcggagacgatgaagctcggagaaggataatttttccaggaaagattgatgaaacatgctttgccttgccttaatacatatattaatttgtatcttcttattagtatttgtacgtctcaacaactatataattaattaggaaacataccgcgcttcgagttcaattatttaaatgtttgttgtaaaaaaattaattaagttaccaatcttaatcttagatccattaagctaaatatatgtcattaatagagattttaaaaggtgttaaaatcttgtttgaacaaatacaatgattgtgctacttctcatcatttttttttatacattctttatgagctaaatatgattataatagtccattaacgatacaccttcaaaattattacactataacaatcaaacttaccacttaaggtcagtttggtacaattgtgttaagagaaaaacaactgtagctatgctgtaggaaaaaataactgtagcacaactgtaaaaaaaaattaagctaaatttttggtaaattataaattttaaattgttgggagttgttaagattatattatagtaataataataataataatattttaatctatttcattaaaattacaaatatatctataaaaaatatgttatataaattttttattttgcatatatttttaattattatttttctatagtataaatttatatgcatttgataaaaaaaaa

SEQ ID NO: 340822 - DNA, 888 bp, Cannabis indica
ttattgtattgaaagatactaataaaaatagctatatatagtattaggaaagcattaggatatacattactttttcatttatatctatctatcttaatactactagtagtatattataatttatttaaaaagtagttaactcaaatagaattaaataatagtgtttatcccgttggaaatgtcaattaagaaagcttagaattttccaaagttgtttttggatgatctttttcaaacaagacagtcaacttttataattgatataaatagaaatggatcaaattatagtttcattatatatatggtaggatttaggttctttgctttttattaaattacgtactaaaatttattttagatgatatggtcttagtaagggatggtgacttaaagaaggttatgaagtagagtgctataattcagttgctactaccctttggctagttgtaataatttttagtggggttctggttgcttagttcttgttgtttggtagattttggtcaatttgataattttctaataaaagttttattctggttttctgcttttttcaagtatttttcaatgagctaggagcggtgtttgaagatgttatagctttattgtctaaatttccaggggcagttttgtcctatttggctcgctttggatatttagcggcccatggtttggcaaaatatgctctgcgattagacgatgagctatcctggttcgaggatgttccagcgccggtggcggacgtctgcatcgtaaatttatgagtgattctaatcactttgtcaaaaaaaaaaaataactacactattactattactatagtttgtacataaaactaaagttgtaaacatgttcttactttataaaaagtatggttctaaatttatt

SEQ ID NO: 340823 - DNA, 528 bp, Cannabis indica
tggatggtatcatgttgtattgagtgttatttgatgattgattgatgtttgtcaattttcgtgaaaaataattgaatatttgtttctggaattatttttattggatagtatggacaaaattaagacagttacttttttactgaactcaatttgatttaatttgaattagttatgattttttgaagtttcgaaaaatatcggagtcatgcaactacacacgcgcgcgcgcgcaagaggcttgtccctcggacagcacgcgagctgtaatgccctaattataaggcacgctacaatgctttttcaattatagtgcaatctttgctaatcaaagatttttttcgaaaaacgtgtcaaattaaaacttttgcattaaatattaaactttttaatataataaaatatttacaagtgtcgggatcccgttttcaaacttttcaaaattattgttccaaaatacacaaattgacaggtcgcacagcgactatcaaaatacaactcccagatgtcccgagaccgaacactccaggt

SEQ ID NO: 340824 - DNA, 611 bp, Cannabis indica
caatcgaagcaggagctcgacgaccttgtccgtaccggtcgctccggtcatcctccatttctgggcttcctggtgtgaagcttcaaagcacatggcaaagtcttctcccacctcgccatcgatttccctcttgctaatttcttaagggtttctctcttttcctctttttgtcaatttgggtacgaaatctttttttttaatggatgttgattgatctcctttgaatgttttaggttgaggctgaagagcaagctgaaatttctgaggtcttattccatttcggctgtgccattctttgtcttcgccaaggtatggtttttgtgtgctgttaatcagagttttgttttgggcatttcggaatttgagttgttctaaggctatgggttgatcttgttgttgttgttaattattacagtgattttgtcgggattgtatcactttctttatttagctgattttcttaggtacataaattactgctctttcacttgaataatagtttttgttaaaaaataaaactttggtttttaacattctggtgtttgataaagtaaggccttgattcattcgccttctgtgtttggggggggggggactttagatattccatg

SEQ ID NO: 340825 - DNA, 1083 bp, Cannabis indica
attcaaaatagagcatcctgttcactggcctgtgccactgcggctgatatgtacattgctgctacgacctcgaactcgtagctgctcaacctttgctttccctttacctacaccataaagcacccgtgagtcatagagactcagcaagaaaagtgaataaaacaataaccagtaatattcattaattcaatctcatatcaacatgcttacacatttacacaatatcttaaacacacaatcccggtactttataaagtacccctttaccattcgttaaccacgagctgaatatgtcactatcattacccgatgaagcaaacgataagtaagaaacctatacgcagtttcaagagtaattattcacaacggtaataaccgcttccaaccctcggtcacaagagagactcaacaaacatttaattggaaccttgataataatcaaggctataaccattcaaccgctaacatttagccacatacggtgcttaccatttttcttacctcaattcagaactcaagtgtgtgcgagccaacctcagtggaaggatacttgacaatctcgggtcctatgtcattacaaaagtaaatcaataaggctctattccaaaacactgtctaaaacacgcataaaataacctagggttttctacccaatcttatggtgaaaacaccctaaaataaaatacatcttttggctctaatctatttctcatactatagagctcttcataatcttcgaaacggtatatagaatttctaaaccggacacccgagtgaaaagttatggctaaaatacgaaaaatcggggattcttgaaaactgaccatccagaattccggttggtgcagccctaccatccggaatttcagttcaccacaacagaaactcgaaaatttcagctcttcaaagtctcaaaacttgctccaaacctaaccaattgttcccaaactatacagaacagtataataaccataacacaacatattccaagctttaaaacacaataattcaatctctaactcaaaatcacatgttcaagtgaagaaaacttaattttaagcttcatccaatgcaactcaagtc

SEQ ID NO: 340826 - DNA, 1373 bp, Cannabis indica
aatgtccgtcgcttgaagagggcagacagaacaaagacgaggatgatcctcgtgcacgagttaaagtaggtcccggtccattcggtgttcgcttccccaaaattcacctaggttcatctacaaaagacagcacacaagatgagtgtttagtcgggatatcaaacattaaataggcaaatatgccgactacgagtgctcagcagattaatgaataaaaatattcgacgaaaagtcaaaactcagaagtttgaaattttcgcgagttagaaaaaataaatttcatgaagcttagaatgagcaagatgaaagataggcattgcgcagttcaaaaagcaagcattatgaacgatgaagtcgcatgaatcgttacaaaggaaaattgtagagtttataaacctagggttttctacatatcttctacatcaacgttaaaattgcattcagaaaataaatgtgcaaagtacaagtaaaagaaatcgagagcttactcaaggatcgaacgttgaacgacagttcccgtgaaaattcttcagcaaactgaaagctaaaaacctctattttcgctctgaacttgcttagcaaagaaaattggtgaaaatgtgtttgtgaataaatgctcggttgtatttataggcaaatagcaaaaagaggtaatcatttgagaaacctcagatgcctcggttcccccaaaagcgaatatcaaaaattaaaagcaaacaagtgcaaccgtcaaacgtggagagagaaaatcggatttcgaagcattaattgcgtcagagcatttcatagccaaaacttgaagggatgactagtcagcctcacatcgagacgcaaacagacgtgcctgacacgtgtcacccattaaaatgcaaagacaactcggatgaagtctacaagcaactttggaagtcccgtacagacttggggggcaaatgttatcccaatttttgcactctgacgtggcatcactcgatggtgacatgtggaatcgactccgggtatctgctcgcaagacataggccgaacgggataccttatacatttgctcggacaaggtcctctagaccaaacagtgggcaatccacgcagaacgcaaacacttagcaaattcagcttttcatcgtgagtcatcaaggaaatccctataactttgggatcatattacagagatatggcaagctgtccaaatcccaagatcagagtattctgtatttactatgcaatctttttgcttatatgaattgtaacgagaagggaaatacttcctctccaagcttatagccctataaatagtgattcatattcactgggaaaagggtcgtaagattttgtctaagaattgatattcaaagatactgttgtaagagctctaa

SEQ ID NO: 340827 - DNA, 667 bp, Cannabis indica
agctttttttcaagtttgtacaggtctgaaattgaggatcttcgaatccttttggttgctcaacataaacttcctcattcaaaataccatttaggaaggcagatttcacatccatttgaaacaatttaatattcagaatacaagcaatacacaaaagtaaacgaattgattctaatcttgcaacaggagcaaaagtttcatcaaaatcaataccttctacctgtgtgtacccttgtgccaccaaacgagccttgtttctcacaattgtaccgaactcatcacttttatttttaaataaccactttgttccaataacatttataccttttggtttcggaccaaatatcagtgaaaacgtcacaatcccaagaattatcatgtctcccaacgaatcgaaatggccattcaagcttaatagaagacaacttcctttagcaccatgttttgctatgataataaataaaagtcaaggacaatctcttaaacatgttggattatatttccctaagcaagtatttacccttcaattatatgttgctgtctctcgagtcactacaagagaaggattgatcatactaaacgatgatgataagatggaagatagaaatttcataaaaaatagggcttttttcataaatgtacaacaaaagcaacataattacaaaaa

SEQ ID NO: 340828 - DNA, 512 bp, Cannabis indica
tggcccattcactaacttgtgcaacaagtttcctcacacaatagttcaaaaaaaattttgattgaatttctaaatcacattttatttaactaagagaacaaagttggaatttttaaaatcggataatcaagtaagaagttatgcgcattttagtcccgaaaaatgtcatttttccctctgtgttagccatccggaattcttgttggaatccggaattttggttgtcatcaatccgaaattccgattcccatatggaattccagttcacggctgactttgtctcgggaagcgcgctaacgactatttttctcttgaacactatataaactcgatttttctctcaaaaagtaagtttgttgagcatttatatcaaatacctaacctacctaagtgagattaatgagcttccaagtttgaaatccaacaaacacttttcacacactttgagccaaaatttgtgtttattcatcttgagtgtgcttacttttcactctaggtttccattgtatcat

SEQ ID NO: 340829 - DNA, 905 bp, Cannabis indica
ttcttgttttgaaagtggcaagcgtggtattcaatgtttgtggggatattattttgggaaagtgattatatgctcttattacttgggtcctagaaagattaaggtgtttaaggtattttgagccaaaaataatatcttttatcctacctttaccttagcctaacaatacaagcttgataaaatcctattgatccttggttgagtctttgtctacattagtggagagggaagcattgagtcaacttatggagacaaaatgttaggctttaggattaaggtcaagcttgttctaggaaaaattgagtttgttttgggaaaagctatgcattagctattgggaagaaacacttgcattataattttatcactttattaacaatttagtaaattagtcaaaggcattggcaacaggcataatcatcatcatctttcatcctcattttaataaagttttgagagcatttatcattgttaagttgcatgctaagtgaagatctcctctctttgtctcgaatcttgtgtgtcatttattttattttgtgtgagttgtgttttgagtcaattttctttgtcgtatgtcttttattcatctttaagtcatcactcgaggacgagtaatattttaagtttgggggtgtgataactcttgaataaagagtaatttgtcatatttttttagcttaatttgtgtatgtattttacttatatttagttcttttcctcctcttttgtgagaatatatgttattttgtatttttatgttcttttgggtaatttagagttgttagtgggaattattaagttttatttgggttttggtaaagaaaagggcttaatagagaaagtgcaatattttgcggaagttttgctggaactttgtgttgggaattattttaccaggatct

SEQ ID NO: 340830 - DNA, 538 bp, Cannabis indica
ctcgttctagtacaaaggtattgaaattggggaacatttaaggaaatactaccagtaagtgtacaaggtctgatgaccacttcaagtacacaatgctagaaatttactcttaagtaaatggccttctaggcggatctcactcaaaggtttggataaactaactagaactcaagtcggatgaccatctttaaagtactgttttaaaagtacaattttttttagtctaaattagctacagatcagttagatcatgtaataggtttaataattcaataaatataagttactacggtaacaaaattattccaaccaataagtgaataaagatattaattatcattctaattgtgtcaattacttttatagaaagttatgtatttaccattaaaatgtgtacaaagggtctgcttgaacccaaaagtcaaacagacaaaaattgaacttgtgaaatgaagtgacaaagagttataagtttgctcggtcacttgggggcaactgtacccatacaaagcattagtaaataacaagctcaaaaaaa

SEQ ID NO: 340831 - DNA, 552 bp, Cannabis indica
tttgacttatacttatctttcatttatcttcgcagatatgacttttttgaagtccgcacctgtcctgaagatcaagccgaagggtggagcaacgacgacctcgcccgttgtcgcccaaaagaggaagagcgatgcgatggctacccttgccacagactcttccaagaagctggccaagaccgcacaggacaaggggaagaaagtcgtaatcgatccacctgttcgagctcgcgacttcttagccatgcaggagaagttcctggccgagatcccttctgaggagcttgttacgcgctctgctgagttggccgcgcagtcgatgaccctgttcataaaagctgctgccactccttcgaaggaagccgactcgctgaagaggcaaaatgcccagtttcaggagaacataaaaaggctgaagcaagaagtggctaggaaggagaaggagcttgaagagcttagcaaggctaaggagcaggcggagctcgaggtcaagaactcgcgggcgacgattgaggagatgacccgcgatttggagactgagagagagaatgg

SEQ ID NO: 340832 - DNA, 521 bp, Cannabis indica
gccacggactttgcatctgtgtcagcttgttgggcggagctcttggtatctttgaaaatctctggcatttgtcgcacttcttaacataggctctcgaatcttcaatcatcgttggccagaagtaaccttccctaagaattttcttggataagctctgtccggcggcgtgatttccacagaatccgtcgtgaacttcagataggagtcgtgcaacttcatcttgtgtaacacatctgagtgatggcattgagaattctcttctatacatgtccccttctactatgatataccgtgctgccttccttctcattttttgagcttcatttcgattatttgggagttcatcagagttgaggtatgttgctattggcatcatttcaatttcttctgttccagtgatgctaggctcttcaatgaaatggatagggaccaattttgccttgtcacttacatttctgcttgcgaatcgagctagcgcgtctgaagttgtatttgttggcttttatgccctaaataaactc

SEQ ID NO: 340833 - DNA, 568 bp, Cannabis indica
gaccagatcatgaagggtatacggctgcagggttgtcgggttgtgaaggtaaacacctaaaccagatatcaagtaaatccttgcaaatagcaacttctagatagaaagtaaacaagtaaatccttcgagatagcaacttctaaaattactacaccagataagagcacctgaataagatgaaccacaaaaacatgtcacaaaaaacagctgactggcaataggctgataaaagacacctgaaactgactaggctattaaaagacaccaggtaatgtataacatactatatgtctaatctagatcatcaaatgcatttaacaaagcaagagttctagaatattaaagagtctccatggattgcagattcaatggcaagtgttgcactagtgcttctaagagcattagcaaacaccaccctttttttttttaaatagggaaaccttaaagttccagcatttaaaatagcaaaagaatgagatataatgaaaactaacataaaattaaactcattggttaattagattaataacagaacaaaaaaaaatattaaacagtgaggctttaatat

SEQ ID NO: 340834 - DNA, 712 bp, Cannabis indica
cagaggatgggatgggttttccatcaataaaatactcagcaaaagatgctacgaaaacaccacaatcacttaacaacaacaacaaaaacatcataaaaacacaaaaaatacactagaaaatggacaaaatcacataacaaaacataactttacaaaataagaaaaaaaaaacattgagcattatgcacaaaacttacgatgtgacctgctcgggtaaaccatcaacagcaacaatcggaaacggttctatcgtgataaacttagattcactgcgaaggcctctaaagtctaacatagagaaataatagggtaaaataacaaaaaaaaaaggcttgcaagcctctttggcagttgtcatatacctgccagaatgcaatgaattgtacagatatatttgccgctcggatatgtttaaacgaccacaaatccaatgatcctgcaatttgacattaataggcataacaacgtgatcgaccaagtgccaaggagtggcacataatagcttaccaccacgaatgtactgtgccacattatgagaaagagacaacattgatatatcattgtttttctcaacaaacttatcatacaagtttgtaatgctagattaaaaaagacaatcagttgtggtgaccttgattttcggttcaacagcatactttattttcttacgaagatagtagaaaataatgtcaatgtgctgcaaataagaaaa

SEQ ID NO: 340835 - DNA, 896 bp, Cannabis indica
tttagggtgttaataaacatacttgagagtagatctaagatcctggtaaaataatttccaacaactggctggtgctgacgactcatctttggatgtgttggtgggcggagtcttgaaggagcttaccaacgttagtcttttcttttcgacatttcccttttggcttttcgtacttagctccttatgctgactttctccttcatgcaggcttgtttatagttggcttatacctactcccaggctaaatctgctgcttccaagagtacggctctgtccgacaccttgagggcggagacagacttagccaagaaagaagctgaggaggccagggcggagactgcagctattcgccatgagttgggtgaggccaacaagaagttgtttgctgccgagaagaaggtcaccatgttgacgaaggacctcgaggctgctgatcgctttgaggaaaccatcgagaccttatatgctgaagttgatcgtcttcaggatgagaggacttctctgcgggagatccttgttcggctgaaggacaatgaggacgctcaggctgccgaggcggaccgcttgaaggagaaggtcaatgctttggagactgccggcctcgagctcttctttgatttttcgaaggctaatcccaaggccaacttcgactacttgggcgacgccaaggacatgtacctcgaatactgcgcggcccaagctgcctatggtgggaaagaggtggctgcttcaacttccggccaaggttctgaccaggctgctgatgcttctcctgctcgaacaacagatcgtcctgctccagtcggctcagaataaccaaatccagagcctgggactccaactgtttgaacattgatcttttatctctcctatttatatatatatatatattatat

SEQ ID NO: 340836 - DNA, 1148 bp, Cannabis indica
aaataaggcatgctgagtcctcttcgatagagaattttgtccatcatcacataacggtgagcttgatactgaatccttctggacaatgccttttcttggggcaactcaccttttgttatgtagtcgatgatggggaccatccagctgggttcttgcccaaccgttgttaaggcctctttcattttgatgcttggctctgccaagcgttccacaggtactatccccagtttctcgatttcgctgtctgaggctaacttagccagacagtctgcgtgagcattcttttctctagggattctttccactttgtagtctgcgaactcgtggagcagttcccggactattgctacatacgcggccattctttctctgcgtgtctgatgttctcccgatacttggttcactaccagttgggaatcgctgtagacttctactcttttagctcccacgatttttgctaatctcaaccccgctattagggcttcgtattcggcctcattgttagaagctgagaagtcaattcgtagggctgcttggagtcgaagtctgtttggggatatcatcgcaacccccgctttgggtccattctcgttggaggctccgtctacaaagactttccacgctgggactgttggtgtgggtatgtttgtggtagcttaagcttcattgcactccgtgataaagtttgctagcgcctgcccctctattgaaatgtgtggaacgtagtgcatgtcgaattggcttaactccattgcccatttgaggagccttccagacgcttctggcttttgtaggacttgccggagtggatggttggtcaataccttgactgggtgagcttagaagtagggtctcaactttctcgaggccttcaggaggtaaaaaactagtttttcaatcactgggtatcgcgtctccgcccttatcatgcgcttgcttacatagtaaatgggatgctgagttttttcctcttcccgaactaagtacgtgctgaccgcattctcggagacggccaagtagaagaacaagtcttctccgagaacgggcttcgataggattggtggcttggccatgtgctcttttagttttttgaatgcctcctcacacttgttggaccattcaaatttttgacacttcttcaagatgtt

SEQ ID NO: 340837 - DNA, 583 bp, Cannabis indica
aatttaacctttaaataaataattgttattaattgaatatgcccaatacaaattgggcctaaattaaactatcatggtgatcattttatttttagcaacttagtccatttaaatatccaaagttaaatgggttttccaatatgcatctaagcccaatagcaaacatataggctcacataaaaattgatttagatggatcctatcatattactaggtttatgacacagatgaaagaaaattacaaaattacttgttacaaattatttaactgatttattaacaattaactatgattaatttggatcattggatccatcaacaagttaatcatgaataactatacgttcaaatttaatagaatttatttattaaacatatagtcatgaaagtaatcatgtaaaacatgcaacataaaataatttgaaccgtgacaatcttaaccactgtagaccgtaaccgcggaaactgtttttagtggtttggttaattcggaccgtttatcacgtaatggttcgattgaggttcgtaataaatagttaacggttaaactgggtcggactgtttataataaataattgattta

SEQ ID NO: 340838 - DNA, 508 bp, Cannabis indica
ttattaatgttagaaaacaattatattattgagtgcttaccaatatctaagaataaaaattatattattatattgttgagtggtaataataatagaaattattgactgcaaagaatagatatgatagggtaaaaaaaaaatacaaaaatgagcccaataagtttcgaacctgtgaagtaaaggttgaaatattgagtgcttaccaatattcctaaagacaatcttctattatttagctacagtgatattatttaaatattagaagagatataaaagaaaatttgtattgtaaattttattgtgatagaattaacaaatacatcataaatattgattctaacacttaacaaaagaattctattagtttattttaagaaaaggagcaaaataaaacacaaacaattgagtgacgggggtgtataacatgattttagcatacaaaacagcgttgttttgaaaaaatggttggccaaaaaattattaaaaaaaatatactaatcattttggc

SEQ ID NO: 340839 - DNA, 745 bp, Cannabis indica
gacagccctaaatcaaaatgtatgtgttaattgaattttttcatttaaatatcagtagtttaattaatgcaacaacctctctcggtttgaacaattagttttgatcccaatattatgggtctgtcttcgattacttctgctatttgtaagcattcatcgtggactttatgcccccacatcgtcaaacatactggtttgaagctacaactttgtaaagaaataaaaaaaatgtattagcataaattttgttaaatagtatttaatatatcgcaataaaaatgaacacaagggtgtatttatagtggtagattaaatgtatagtttacctttcatcaattaaatatatctcttgaattgtatgtagtccatagggagtgttgacttcttttggtgggttcattttgagagcaatagccaaaatatctaataaattgaaatattaaatagttagtcaatgaggaatatatatttatgaaaatcaaattgtaaatacctattggtttgctgaattctttaggtgtatgcaggtcgctaaacggaatgaaatcatagtttggtgctgatatctggttgtcttctgtttggatttcttcgatttctgttcttgagttcactgtccaagaatatttgtagtctcgctttttatcgaaaggtggggctgttttttttacataggcgttgctgatgtagtaagtgtggaacacttccaaagtattttctctagcatcaatttcagtgccaaata

SEQ ID NO: 340840 - DNA, 554 bp, Cannabis indica
gcaataggcctcacggactgggatctttaaccaagcggttaccagacgacgcggtttaatggaacaacacttattccaatgggaaaagtgagactcccagtcaccttgtgcccggacacaccccaaagaactttcaaatacttcacatttgtggtggtggactgcccaacagcttacaatgcaatcctcgatcagacgaccctggtggattttggtgcagtcacatcgattaggcacttgtgtctgaaattccttactcaggaggctgggataggaaccataagaggaaaccagggagaggccaggcagtgttacaacgttgctgcccaccttcccgtcctaatggtccatgaattattgagccgggaatggtagaagaagatgtgttggatccccgtgtgggatccaaaaaaattgtagaccccatggaggacgtcaaggaagtgtcagtgtgtgacctcgaccccaccaaggtcctccgactaagaaaaatcctagaactggaggaaaaagaagaaataataaagacagtaagggctgccacagatgttttt

SEQ ID NO: 340841 - DNA, 633 bp, Cannabis indica
catatcttttgttgattatcttacgaaaaggttctttcactgagaaaaagaaaagtttcccacagacggcgccaaactgttttggtcggaaaacagtcaagatttctttttgggggcctttctttttccagttcttaatccgcttttcttttacgtgatccttctctatatatccactacgtcttttttgcttgcatgggttatctatcatctacccattgttatgttgacacatgttcccattctttcattctttttgccctctgccacgtgtttgtattttaatacataactcccttgttacacgtgtttgtgcctttagcgggttttaaagttattattctccctagtttcaacggtgttgtgtccgtcggcatcacattcctgaatttatcaatttcatactttatgctttagtttcctccctacttccgacggggttcttgtctgcggggatccgagttctcctccgccgggggcctttattccgtaagtacttttacctgggtccccttttgttgtgttttaggtactccccgtcggcgttttaggtatttcctccatcggcaaggtatccgggtgcctcttcgggtcctggtatactattttacttgtagttaatccttgattcgt

SEQ ID NO: 340842 - DNA, 512 bp, Cannabis indica
cacatacttgatcctgtttatcgtgttgtcaacactttggaaagtaaacatgactatgtgaataaagtttcctagatttatcagacaatctacaacagagtttacttgcatttgcagaaatgctatgttctttccagagcattggttaaagtaaagcttaggttggatgcatggagtatacatcggaagggaccgatattgaactttgacttagatttatcaaacttaccataatatctattcaagtcaatatcgcttacttgatcctagatcaaatgatcttaatcctgttatgataaggctcaatctcaagtggcgcaggtcacccggtcattaccaaccactcttataaatttgagtatacgctcaatgactttgagccactactcagccttcattacatcaagacctcccagaaacactggaggtgcctgcttccagaatctttcgtacatcggctccacacggttgccaaaacaggttgttctgttggcaccgctggaactgccacg

SEQ ID NO: 340843 - DNA, 1051 bp, Cannabis indica
tttgggtcccaggtctaggtctgggttcgggtttggttcttcgtctgggttctagtcctagtttgagtcccatatctagataccgactactggtctgttccaggccccattacccgaatcccgagtcaagatctggatcactgtcacgggtctcggtctagttctagttcaggttccaggtcccatttttgagtttgggttcgggatcgaggctgggttgcggttctaggtcacgaccctggttctgtgtccctagtctggttccctgattgggtgtgagttcaggttcgggttcgggtcccgtgtccaggtttgggttgggatccgggtctggctcccaatttgggtctaggtctgatttgcagttcgagtcctagtccggttaccgttcttcgtctaggtccaatttaagttatgattctaagtacatgtcggtcaacttccagtttttgtcccaatttttggtcagagggtacgggttcgggcaacttttaggtttggactgggttcaagtctgagtgtgggtttgggtccctgtcagggttcgggtcccaggctgggtcccaaatctaaacacccactacaggttttgtccaagccctgggtccagatccagatccaaatctcgggtcccagtttggttccatttttggtaccgggtcacgagctgggtcccaggttcaagttcgggtctgggtcaggtactaggtcccaatcctagttcttttccccaggtacctatcatgattctgggtcaagttcccggttattgtgtgggtttgggtccctatctaggttcggtttcgagtccttgtcaggttcgggtttaggtctctgtctaatttttatctgggttcgggtttgggtttaggtccttgtcctggtcctggtcctacgcctagttcagttctagttccatttgtgattctgagttcgagttttgctttttgtttaggttggagtttgagtcctggtttgagtttttgttcgggttcagatttcagtctaggttcagatcaggcttcaggtgtgggttcgcgtcctgggtctt

SEQ ID NO: 340844 - DNA, 1086 bp, Cannabis indica
ctaggtcaaatttaagttatgattccaagtcaaagccctaattccaatcccagatcaacttccggttttggttccaattttgggtcatagggtacgggttcgggtcaacatttgggtttgggaatgggttcaggtccgggtgtgggttcgggtccttgtcagggttcggctccaatgctttgtcccaaatccagacacttactatgggttttgtccaagcccttggtcaagatcaggatcccaatctcgggtcccaatctggttccatttctggtgccacgtcacgagctgggtcctaggttcaagttcgggtctgggttgggttctagctcacggtcctagttttgtttcccaggtccctatcctaattctgggtccaagtcccggttattgcgtgggtttgggtcccggtctacgttcgggttcgattcctagtctcggttttggtttaggtctctgtctgggtttttatctgggttcaggtttcggtttggtccttatcctggtcctagtcctagttcggttttagttccattagcgattctgagttcgagtttgggtttgagttcgagtcctggtctgagtttgggttcgagtccggatttcagtctaggtccagatcaggctccggggtgggttcgtgtcctgggtcttggtttaggttgggtctaagtcccaagttccaatcccgatcagagtgtggattcagttgtatgtctaagtccttggttctgatcctggtctgggttcgagtttgggtccgggtccgggtctaactttgggtctgattctgggtgtgggtgtttgagttctggtccgagtctttgtctgtgtgtacaggtctggaccctgatttgggtctaggatcggatccaggtccaagttcgggtcccgagtgcgggtccaagtttgggtctaggtcagtatctcggtcctgatctaggtccagcattttgatcccagtcagggtctcggtccgagtccaggttcgtatccagatccctatataggtccaagtctgtgtttgggatcaggtcccagatttcggtccaggtccgtgtctcagttccggtctgggtacacgac

SEQ ID NO: 340845 - DNA, 409 bp, Cannabis indica
gggtgcctcttcgggtcctggtatactattttacttgtagttaatccttgattcgtcgattacccgttccttcctgtttttccttctgtttccgtcgacactccctttactcgttccttgtcatttatcgttttcatcctttttgtccgtagtgctcccttatggattggtgacatggattgatagtttggtcatatcgagttgggcctacctttatactcttgggcctgggtgtatttattttgatgggcctttttaatgtgggccttttggtagtcctttattttgttgggccgtttatttccaagttcgattttttccccccaaacatggtacatttatattggcacacctaatattatttatttcaaaattataattttttaattttaaatatttattttatttt

SEQ ID NO: 340846 - DNA, 503 bp, Cannabis indica
agcttagcaggtccctctcaaggatctcggagcaagaggtcctaaaaaggcagcaaccagtctgaggataagcggcagaaaagggggtacactcccaagtacaccctgtacacggagctaatggactcccaggagcgtgtgtattttgctactaggcaagatacacactaccggagaccgcctcctttgtacagggatagctctcggagggatcctaacaaaaggtgtgagtatcacaacgacatcggacatagcaccaatgaatgcaaaaacctgaaggacgaaatcgaaaacttgatccgattgggacatctttacgaatggatcaagaaccggttgcgtcacctcaatccggttcaggcagcaggacctttgccccaaggagcaccaaggggtgcagccggagcattggcaccagttgctcccccgggagaaacccaacaatttcttggcctgccaccgagatccaacggaagagtagccatgatctccgaaggacccca

SEQ ID NO: 340847 - DNA, 504 bp, Cannabis indica
ttgaggtggttcattgatccctccatcatctcagcctctatctcggccttggccttggcctcggcctcgacctcgacctcgacccactctaactgaccttctaggaggcatttctaaactcctgaaccacacaaaccaaaacacatcaagatcattttgatcatcaattttacatgaaaataatgttaccctctcgcatgcagaaatttaaggcaacttaattataagtaataaccacttacagtacagtgagtcgagctcgtctcatggcggtgaactttacatgttagggctaaccacattctttaggaccgtattgctctgataccatattgtaacaccccgatttccgagatgtcacataggatagtccgtataaaacaatttaataagataaagacaatcaaatacttctttattgaaaaatatccaagcatgagatctcattgtttaaaacaaaatacttttagtactgtaaacttaaataagaactagttaagtcaa

SEQ ID NO: 340848 - DNA, 967 bp, Cannabis indica
tgatgtgtggctccactatcaataatccaagaaaatttttggaataaagcttgtaccagccatgttgaagcagcaggggcattgtttgggtcatcccgagattgtccttggctcaactgttggctgagtaaagagatgagctgctggcattgagtggtaaggtcagcctgagtgttgttggtggaattttctggtttagagcttgctgtaacagtattggcagcagcttttcctttgtcagttttctttttatccccataacctggtggaaatccatgaagaaagtaacatttgtccacataatgtcccggtttgccacaattagtgcaagaaggcctgggtttctttgatttggggttggtggtggatgaagagggacgaaccgatgatgcaagagaagacaaatcagaggaacctaaggtcctttgtctctcttcttgaactatcatcgaaaacactctagataggttgggaagaggttcatttaggaggatttgggctctcacaggggcaaaagattcattgaggccggttaggaattgtaatacttgattttgattgtagtaatcaagaaacactttcatagcaccacaagaacaagcggcattaggttgaaattcttttagctcatcccaaatggatttgagcttggtaaagtatgtggtgacggattgatcaccttgttgcaaacgtgtgagttgagtttgcaattgaaagattcgaggtccattaccctcattgaatctttcttgaagatcatgccatatatcggtggcaagatcgaaatacatgatactttgtgctatttcaggtgacacacagtttacaagccaagacatgaccatattattgcaacgattccaagagttaagaagggcgttaccagattcgggacgaggaagagtgccatctatgaaggcagatttgttctttgcattcaaagccatggttatacctcttttccaag

SEQ ID NO: 340849 - DNA, 537 bp, Cannabis indica
gtctgcggcaaaggttgccaagatagaagggaggccaacaaagattggctcctccgtaatgatccaggaatggggccatgagcgtatcttgattggttccgttcctattttcttgcccactgtcgcctcagtgatggttacctctgtggaggaaactgaggcaacactgacttctcaacctcggagaggtaaggcaacaaaagggaggagggggataaacatttcaccttcaccaaaccctcttgaaacgagggaattagtaggaggcaccccgattaggcctccgaccgtaatctctgtcaaccgcaaaggtcaacagggggcatctgctgagatcaatgaacactctttattagatgaggggtgtgggacgcctttctctttcccaaagaaggctagaagcgatagtgtaagggttcccaaagcaatccctaactcattctgaaaagaacatggtgactggatgtttctcaagggataccgaccaacaaggtgttgggttttatgccctaaataaaactctgtttcaatgtaatc

SEQ ID NO: 340850 - DNA, 721 bp, Cannabis indica
gtccccttcttcttggcggtggagcagtctgacaagtcggccggtaccctactagggtccggtggatcggtaccacccccgtctccaccatgataagtggatacatcagctgacattactttttttttaaaaaaaaatatttcatttataagtaatagtaacaataatttaaaattaataaagttaacttgaaataagaaatattaacttgcaattaataattgtatgatttacaaaataaagtgattgaaaattaatcatccatatcactatcattattaactaaatgatcattcacatcatcttcacaaaggtcaactaaaatttcttcgtcagattcttcagtagcatcttcgtcgtccacgttgcggtcatcttcgttgacaggcgaacttggttcagtgccaatgtccataggaggttgattaggtagcaaaattaactccccaagatcaactgttaacacaaaattggatgagttggtgtcgtgtaccaaatcagtttcgacgttagcatcatcatccacgatatcccaaatttgtcggtgatttacattctcaactattttccaatttttccctctcaataaatcatcgagataaaacacttgctttgcttgactagcaagtatgtatgggtcatctttataccatacaccactgacattaatactagtgataaggttctcgacgattgttttcttccgtcttggatttgtatt

SEQ ID NO: 340851 - DNA, 664 bp, Cannabis indica
aggaacaagtcctctccgagaatgggcttcgataggattggtggcttagccatgtgctctttcagttttttgaatgcctcctcgcactcgtcagaatattcgaacttctgacatttcttcaagatgttgaagaagggaatgcatttgtctgtggaccgagagataaagcggctcagggcagcaacctttccggttagactctagacatctttatgtttcttgggggaaggcttgctcaggagagtttggattttttctagatttgcctcaattccccgctgactgacaatgaaacccagaaacttccccgacttaaccccgaaagtgcacttctttgggttgagtttcatttagtatctccggaccacttcgaagcattcttctaggtcatctgcatggctagtgcacaccttcaatttgaccagcatgtcgtccacgtatacctccatatttcgccccagaaggcccttgaacatccggttcaccattcttttgtaagttgcaccagcattctttagtctgaaaggcatgaccaggtagcagtatacccccttatcggtcctgaagctagtgcactcctgatccgtgatgtgcatcttgatctggttgtaaccggcgtatgcgtccatgaaagacaatagcttgaatctggaggtggcgtcca

SEQ ID NO: 340852 - DNA, 831 bp, Cannabis indica
ctgaagtaacaaaagttgagaaggctcccgagtctttgctagtttgtatgctaataacaggtgtcctgctgagaaccaatttttggaaggagctacaggcccggagaccagaatcgctagtcgagttctttgccatggcagaaccgcataaaaggattgagaattctctggcagaattagagaaaggcaaagacaagcgtaagtcaccagtgccgtggtcacgatcctgcagtccccgagggaaaagttccaaaggctgaagcccaagaagacgcagtccacggagacagcgaagtatgaaattggccaagtcccctccaaagaaggaatcctcgccgaaaagaaaaggtggaccgcgcttcgtgaattatactgagctcgcggtaccacgagaccatatctacgctatcgaggagaacaatggggtcttcaagaagccacccccgatcaggagaaacagcgacaagagggaccccaaaaaattctgtaagtaccataaagatatcaggaggggaaaattcagcaaatataaaaggaacgaggaaagtcatccccgggcggatgacaaagaggagaattaaaacgcgagtggttcgagaacgcctcgcaattttttgaccatcataggcgggccccatatctcaggtgactccagaaagttgcaggagcgatatgcaaaggaagccaaggagaagccgctcaccaacgtgaacaatctcagtgagacgaccagaaaagttattcaaaagagaatgcaacgacatcacgttcatggaaagtgatgcgagatgggtcgatcaccgcattctgacgcactggtcattgtcgcca

SEQ ID NO: 340853 - DNA, 1023 bp, Cannabis indica
tgtttaaacaacatacttgtgagtagatctaagatcctggtaaaataaaatccaacaggtacttgttgagacactgctgggtttgtttcccgagccagtctttaacaacttcatctccttcttgtttcctcttttcgaacaaatacttgagctctttcattgaactcagtaatgttttttactaggcgaccctgtaggtcatcccataactcgcctccagcagtggagagatcagtagttatccctgcctggagagcagtaagttgggtactatcgtccaggttcgtcaccctcccagcagctgtgctaaaacaacttcattaggccttaagcgtctcgcccgactgttgctttatgttagtgagtgaggacacttagggtcgcctatcccttgcggcctggaactattttttaaagtccttagacaactgttcccaagaggtgattgaatggtgagtaaacttgttgaaatagctgctcgctactccaacttgcgaagtggggaacaaaatacagtgtagattgtttgtaacattgctggctcgcatgatagtattgaaattatttaaatgcaaggccagatctgtggtcccatcatacgacgagacgtgagggttcttgaatccttgggggaatgcaatatttatgatgtttggatggaatggctcgagctcctcatacgagtcatatccagactgctttccctgttccccgacttgatacctcctgaatttttcctccaactcatcaattcgcaattggatagaatcatcttgcttttgaccgagctattggcgaagatcgggttttttctggttcaagtggttacgaagatccggctgtggctggttattgctgttaacgaacctcgtcctactcagggactttgtctgtaaagcccgcttagttaatttggaaattatcagttgaatgtgattaattatgaaattatttatagctatttaaataatttattactgttatttatgtattcaggagcttgcctattttgcatttccggtg

SEQ ID NO: 340854 - DNA, 661 bp, Cannabis indica
taaaataatttccaacacatacaagcttcgtaaccaatatgggactctactattataaagtcatgcccttcggactaaagaacgattggaaaacgtatcaacgattggtaaaaaaaatgttcgcagaccaaatagggcagaatatggaagtttacgtcgatgatatgctggtaaaatcaataaaaagtaaggatcatacctcaaacatcgcagaatgctttaagatattaaagaagtataacttgaagctaaacccgaaaaaaggttccttcagagtttccttagaaatttttttgggatttatagttagcatgaggggtattgaagaaaatcctgaaaaaattgaaggcattaatagacatgccgtcaccaacaaagcctagggaagtacaagcccagacaagaagaatggttccacttaacagattcatttctaagtcaactgataagtttgtgccgttcttcaacatattgcgagtcaacaaaaagttggagtggacaaaagagtgtgacgaggccttttagaacataaaaaggcatctagcaacgcctctagttttggcaaaactgattactggagagacgctgtttctttatttagccatctcggaagatgcgattagtgtagctatagaagagggcaagcaccagcaacctattt

SEQ ID NO: 340855 - DNA, 789 bp, Cannabis indica
catgcataacaaagctgcagaaaacaatctctaactcatgcaacaactacagtcaccaatttcgaaaatttctctttgaaacttaagcttttgaatagaaaatccataactttaaacaacaccactaatcatgcactaccagcagctcaattcaactcaaataatcatgctttaaacttcagaaacaacatcaaaaacacagcagcaatatcaactcaactaagcatgcaaaacatcatctttttcatcaaaaattcaagaaaacttaaaataaagctagaggaacataccaacaacaagagatcacaaattcttgctaaaagagcttgaaatccaagaagaattccccccaaacccagctgctcaaaaccgaaagagagagaaggaaagagagaaagagaggttttttttctttaaattttctaacttttctaattttgaaataaaggaaaaatcatgcaaatccaaccttatattcagctaacacatttcaattaaaaccatataattaaccaaataaagtccactaaaggacaaactaacaatggggcaaaatgaccattttgccccttcacactaaaataacataaagagcactaaaggggtattttgggaaattctaaattcccggccaatcccgacattcccaatgtctaataaaccgtcccacaatactaacatactaagttgtgattttactgagccaaacaccgagttccatgttaccggacaccggaaatgccaaaattataaaaatcactaaatgacataaaatgcatttcagaattc

SEQ ID NO: 340856 - DNA, 1288 bp, Cannabis indica
gctatactaaaatactaaaatgtgattataacggccaaacgttgcattccttgccgggcataaaacatgcaaaaatgtgaaattccatatatgacatatgtaatgcattctaaattcaaataaatctccgtaaaatagtaattcataactaatatggaagtttcataattaaaccatatttatctgctaatttccaaattaaagttaagcggtctttacaattatccccccttaaaaggatttcgttctcgaaatctaacctgtacaactctggatactgagccctcatgtcggactctaactcccaggtggcttcctccacattgttgtttctccagagtaccatgaccaaagctatggtcttgttccgaagaaccttatcctttctgtctaggatctgaactggttgttcttcataagataggtctgattgtagctcatgattctcataacacagtacatgagtaggatctgaaatgtatttttgtaacatggaaacatgaaacacgttgtgaactgttgaaagagctggaggtaaagctatacgatatgccactagtccaaccttctcgagaatctcaaatggtcctgtaaacctagggcataacttgcctcttttcccgaaatgtttgatccacttcattggagacacttgtaggaacacatgatcccatacttgaaactctacatttctgcacttcggatctgtataactcttttgcctactctgagaggcaagcattttggccttaatcttctctatggcttcattagtctgttgcactgattccggacccaggtatttcttctctcctgtttcgtcccagtgaatgggagatctacactttctgccatataacaactcatagggagccatccttattgtactatgttaactattattatacgagaactctatcagtgataggtacttgctccaggagccctcaaaatccataacacaggctcgtaacatgactttcagtatctaaattgtcctttcagactgtccatcagtctgaggatggaaagttgtactgaatttcagtttggtacccatagcccgctgtagactctgctagaacttagaagtaaacttcggatctctatccaaaattatagactttggaacaccatgtaatctcactatctccttgacatataattctgcatattgatccactaaaaatgttgttttaccggttagaaaatgtacagacttcgtgaatcaatctaccacaacccatattgaatcgtacatacccgtggttctaggtaatcgaaccac

SEQ ID NO: 340857 - DNA, 818 bp, Cannabis indica
aaggtgatagaacgatcaccttgtttaatacccctcccaagaacaatcggtcccagctcatgtccgccatgaattattttatacctcacagagctaaccgtagcaataataatatcaatgaaccgcaagtcgaatcccattttactcatcatagcttgaagaaagccccactccacccgatcataagctttactaagatccagtttgagcgccatatagccttctttacctttacgctttcttttaagatagtgcataacctctaacgctatcataatattatcaataataaggtgtcccaggatgaacgcagattgatttgaggatatgatctgaggaaacacttctcttaaacaattcgcaagcaccttagacactatcttatacaagatgttgcacaaggatatgggccgaaggtcacccatcgaagtaggctgtttcttttttggaatcaatacaatattcgtgtcattcagtccatcaggaatactgccattcgcaaagaattgacaaacttggttcataacatcactcttcactatttcccagtattttttgaaaaaatctggggtcataccatcaggaccaggagatttatcaggatgcatattaaacagagcacttcaaacttcttcttccaaaaccggcctaagtaaagacaaattctgatccacggtaatcgaaggagtaatctcctttaccatagttgagtaatcgaccacatttaaagtaaataagttagtgaaataatcaaccataacgttcgacaacccatcctcccaagtaacccaattacccacatcattcataagccgagt

SEQ ID NO: 340858 - DNA, 1437 bp, Cannabis indica
gaggctctagtgcctcccctccgcccaagaagtccaaggctggagagggatctttagagaagaggccttctggagaggtcattcatctttctgaggagctaactactgcaaatccttccagtcccatatctgccaagtctaaggtctctgggccaccaacatctgggtccgaacttgtgaggaggattcctgaacgggtgcaagcaccaactccatccatgcccgtgctgcttgaggtcaagaagggcacggaggtgatggcccatcacatgaactggctggttcctgaggtcggtgagcagctggctggtgctgacaactcttctctggatgtgttggtgggcggactcttgaaggagcttaccagggttagtcttttcttattgacacttcccttttagcttttcatatttagctttttatactgacttcttcctttatgcaggccagtttgaagttggcttatacctactccagggctaaatctgctacttccaagagtacggctctctccgacaccttgagggcggaggtggacttggcctagaaggaagctgaggaggccagggcggagacttcagctgttcgccatgagttgggtgaggctgctgatcgctttgagaaaaccatcgagaccttatctgctgaagttgatcgtcttcaggatgagagaacttccctgcggcaagttctccttcggctgaaggatgataaggatgctcaggcgatcggggcaaactgcttgagagagaaggttgatgctttggagactgtcgaggctcttctttgattttttgaaggctaatccgcaggccaactttgactacttgggcgacgccaaggacatgtacctcgagtactgcgcgccccaagttgcctatggtgggaaagaggtggctgcttcaacttccagccaagcttctgaccaggctgctgatgcttctcctgctcgaacaacagatcatgctgctccagtcgactcagaagaatcaaatccagagcctggcactccagctgtttgaacattgatctttttatctctcctatttatatatatattatatatggtcgtaaggcctttaagacatcatgactggccaagcggtctttaaacttggaattaattttcatcttttggacaacgggctgatcgacagcttttaatctcggtactttatgctcttgttatccttaatgaatttcattctttgtttataattgcagtgcaattgtgattgttttatgtttaccagatgctttctacaggtataggtgccccccaagtgaccgagcagacgtatgactcatggtcacttgtctttcgcaaatatattgcttttctgttcggtgttttgggttcgactgaaccttttgtacgcactctaggtaaattataatcatgatgattttttcgactcaatagaattggaaatacta

SEQ ID NO: 340859 - DNA, 862 bp, Cannabis indica
taagtttagaaccttatttttagtggaaaacattttaaagaaaataaaatatcgggattaagcgggattatggaatttgaccattttacccctagctttagaattacttaagttttaaccgaagttcattttggtaattttaatgggggtttgggtggctattttaggtggtgacacctagcttccattttcagccaagattactagattaatcttcgcattttgaagaaaagaaattaagaaaagacaaaagaggaaataccaaaaattcaagagaactttctctctttctctctttcggctgaagcaaaccaagggaagggccagctttttctccttaatttttagaaattaagctaaggattcaagtattcttggagctaaggtaaacctagaacctttggttgtgtgtttttaagcttttactttagttttatgttgtgaaattgtgaattgggggctgttagggttaggagttgatgcaattcgaattctaggcttagtttgagttggttttaggtcttagcagttggttttgatgtttgatttaggttttgtgcaaatttgagcatagaaaccttaactttgatctctaatggcatgttttgattcagtgagtttttcttcagtttatttgctggaatatgttgtgtatacactaattaggtactctggaaagtttggtagcatttggtggaggattgagcaagaaatgaaatttcttgagtgaactggtgcaaactggctaaccggttttacacgtacgtgtaagggctttcgtttctcaattttcgtcctttccgtgccatggtttggtgtttccctatttcctagagttagattaatccctagaaagtataac

SEQ ID NO: 340860 - DNA, 1265 bp, Cannabis indica
agagataattgggtaagaagaggcgccgacgagggagctgtcaacaggagcgatcgtcgaaggagaatgagcagtggaggacggagcttcagacggtgcgatcgtcgagggaggagtcggaaagaacattggagagggagcaggagtcgcacgaggagtctgatgaggagcttcaaccggggaaggaagatcgacggcgctggcggcagccggcgcagaggaatggcctctcgtctgaaccatggttagggttagggtttgaagaagattctagaatgagagagagaatagggtttcatctgataccatattaggatattaggaaaaaagatatttctcattatccaatgaaatgggaaaaagtggtatttacacaaagtggtaaaaacctaaacaaagcccaaaataaaaataaacccaatataagtccaatcctaataaaaagaaaccaataactaattctaaaatgagcgattaaagtgaggatatttcctttttttatatttatttattattattattattaattttttgaagaatgaatatttcattgatataataattggagtaaaaaataatagaaataattcatctaattaagtttcctattcactctcaaatatacacacaactaaacgatgagatatcatgaagaagaaatagtgaaataattgaaatattaaataataaggctaaatcataaagcatggctcaatgccataatacaatcaaattcatcaaaacttaaaagtagaccaaacaaaaaattgcttcaatgacattaccaccgccatataatttgcttgaataatattaagaactctaatcaaaaaattgctccaatatataatatcatcactgtcacatattgtttgaatgatattaagaatccatataaaaatataataacatagtgagattcataaaataaatatctataaaatagactaaaattttgaaaaaaaaaaaaaactaacaataccacgtgaatacataaattttttatttacctaatttttttaatttacaaaaatagctatagtaaaacaataataattttaggttgttttattgtttatttagttgtcattatagttgtctatgaggttagttttggttgttttaagtattgttgttgaggttgtagttatttttagttattatttttttaacttttacttgagtgttattcctgttccacgataagttctacacggagtaagcaaaggtagcacatcaattcaaattaggaataatctcgaatt

SEQ ID NO: 340861 - DNA, 724 bp, Cannabis indica
gtgggatcaatgctgaatgcaaggatcgtgggattgagtctgagtacactgatagtgggatcgtgtgtatgccgtatccacgtaaattgatccctaagttatagggattgagctgatgactcatgatgcgaaagctgaattcgttaagtgttgattgctctgcacggattgttgaatatcttactcaggacatgctcgtgaggcatcctgctcgacctatcttccagagcaaatgttccaagtggactccacgtgtcaccattctcgtgatgccacgtcagagtgaaaaatttgggataacaaatgaaaatttcttggtttaagttgatctaaaattaattttcaaaattgaaaattttcgaaatatttacatttaaaaataattcaattcgaaatttagtgggaaatgattattaaaatcaaataaaatatatttagaaatttattctaatttaggttgatctaaaattggaaaattttcgactttaatataattttctatttaattaaattcattagaatagaaataatttagtatcaagaataaaattaacttaattattaattctaatttaatatctaagaaaacactataatttaagttggtctaaaattaattaaattaattttcaacttaaatatattttaccatttaattaaatttcttaaaatagaaattaataattaagtattttgaataaaattaacttaattattaattata

SEQ ID NO: 340862 - DNA, 863 bp, Cannabis indica
gtgattatattactaaataaaaatcgttagacctcactgtcattatataacaagttagaaggaatggaatcaactggaataaccccaaatttctagtgggagaactcccacttaaccacattatgggcaacaagattacaagttctactaatattattgaaaatacaactagtaaatagaggagaatatctattacaaaatgagacgtagttatccaatgcccaacaggacgtcttcttattgagagcatgataactaccctcgagtcactctctacgatgacaaacttggaacctatatccttcgcaattaatagagccaagcagctggtcgccgcctcaccacatagcgcatcaaagaagtccagccgagccgtttgaatccaaaccaccctactaagatggtttctggcaacaactgcagtacacatgctttctaatcccatttttacatcacaattcaatttaatccaatcctcagggggagaaaaccagacctccttccggcataaatcggggaaagaaaataaaaaagcatgtagatctacaaaagaagtataaatagagtcaatacacttcttcacatcaactgtatcattattatgtacctttgcattacgggttcaccagatcgtgtcaacaacaatcgaagcataaaggaaaacctcctcagtagcaattcccttgtgtttcaggtcccagatgaatttgacccaatcccacaagcggatactagtgtgacaaataggataaatgccccaaggcgaggacctccatgcatgtaattgttgggaatattttaccagggtctagatttactaacaagtatgttgaattaacattctaaatatgaattctctaaaa

SEQ ID NO: 340863 - DNA, 1022 bp, Cannabis indica
tattacttaattgatgttgtttctttttttcctcacaaatgtttacttttacacagggataggatttgtaacacactataccgatataactcaaaaataataaaaaaataaataaatttgagtgacacatttaacttccgtgttaaatttgggtcgacatgtttaacacgtttattaaacatgtcatttttaggtcaacacgcttaacttgaaaatgacattataacgtatataagtatttttatttttttatatcatgtaaaataaaataaaaatatattaaaaaatctcataaaaacacttttattctaattttcgtaataaaaaaaattatgaattttataagtaattttgtgtttatatccataattatgttaattatgttaacttcgtgtcatgtcataacatgtttaatcacgtgttaaatgtgtcaatctcatgtttgtgtcataacacggttattaaagtgttatcgtgtcgtgtcgtgtcgtatgacatgctaagaaatagtgtcgtgttcgtatttgtagtcttaacacaaataataattgtatcgtgtttatgttcaccataaacatatcgtgtcataaatgtgtcgatacgataatataaattgtcagccctacttttaaccccttcaaagatttatcaaattatttaatttagaataaatactatttttttttctctcaaattatgactctggtagaatttatctcttatttatttatactaaaaaaatcttctaaagtctatttagttacactgtttatttttctacatagcttgtggatgtagcatcaacgtgatgcggatatggaacaactccaaaatacaagtgttgacgcataaatttggtcaactctcgctcactagatagacaagaggagaaatatatttaagtaagcaaatagagagatacaaaaaatttatagcaattcattcctcgtgtcacgacagcaatagagctatgtctactttgagtttttatttctcacgagatttacaagaaaattggttaa

SEQ ID NO: 340864 - DNA, 532 bp, Cannabis indica
tgagtgggagtaatgagtaggtatcagattaatccagaaaaagagcattggaagacagttaagaaaatcttaagatcaagaagaggaactatagttagttgctaagggtgatattttaatactcgtagactactccaaatcaagtatctatacttgccttaatgctagaaagtctactgatgaaattgtgattactctggggtgaagtagtgatttcggagaagtgtaaaaacatatctgaaatctctagctctactagtgagactgaatgtttaagttatgggaaagacactcattcagtctatggaaagttctatacagtttttcgcgttgtacacataatgaattaactactagtgtaactttctaactaacacagaagtacttgccaaatagttgtcaaatagtaaagaatccaatagatccatacagtagatcttaccttgatatctttctaagtcaatatcacgggttgatcataggtctatagatcttaatcctgatataattaggttcaacttagttgtattat

SEQ ID NO: 340865 - DNA, 706 bp, Cannabis indica
aaaagtgtaaaagtctcaactccgatttccttacgggtattgaaagtacgtatttgcattgggagggtgacactcttttggagttggaaatgtagcaattaatgcacaaatgagagacgataaatattttttaggataaacaatttgaacaagaattgataataagatagacacatcaaaccaatagaattcaaatgacaaacaacatttgggatttatatgaaacacttacaaattaagagccaaagaactaactactaaaatagaaaagtacaatgataaatatgtatatatatgtatatatatttctttattttttatagagaaatatgatatttctctatctttttttttttttttgaaataaaatactaaattgaaacactttttttagagagaaaataatattactctagttgtctcaccttttttttattatataaatatatatattttttttatttagaaaagatgcacactacttgaaaattgaaataaaatgatgttgctcttgttctataaatatatttttttttatgattttttttctcttttatttacttttttttattattttttttactaagagtacaacatatacgaaggaataaaaatacaaagaaataaaataagattacaaagaaaataaaaaaaaataaaggttactttattacaaaagaaattaatccctctagtaaatgtcatg

SEQ ID NO: 340866 - DNA, 799 bp, Cannabis indica
tttttaattaataaaactaaaataaattaagggagttcttttttttttttgagataaaatgctattatattggaacaaagagttaaaatataataggcataattggtggagggacttcctccaaccatgaacatttagtttccgtcgaaagagcgaacctagccaacaagtgagtggcattattagcatatctatatacatgtgagatttgggctccagggagattggaaactaaaagagagatgttgcgaagcaaacaatggaaatcagaaactagctcatgcgaagaaagcagtcctttaactacggtaagggagtccgtctcaattaagtgcattggtagtcgaaggtctttgatccactgtggactatgcattaaagctaatgcttccataatgtctggtttgaaacagcctttgaaaggcaatgacattgtagcaacaatgtcacctgaactgtttcttaaaacagcaccaaacccggacatttgattccttacattgactgttgcgtatgtgttgagtttgaggcgtcccgaaggaggattcagccaagagacagcagaattacttgctgaagatgaggcagtagctgtgtctgattccctcacagctgatttatgattagcagagtgaaattcatccaaatatgagagagcaaaatacaggagaacatcatgtggtttcggtttcgatccatgtctctccttgtttcgttttgtccaaacgctccataatacagttacaaattgttcaagctctaaggaggaccataaggttgagactgttgggttttgtgc

SEQ ID NO: 340867 - DNA, 559 bp, Cannabis indica
tactaatctaactctaagtttaaatttccttaagtaaacatatacaagtaggagatattaagatcaattatttatatcatttcgggatagaattttgggaatatagtcatccgcgccattaaatttcataagagaaattagaatgacattataagcagataatttataaactattcatctaatgttataccattcaaacaaattctaaatgaatacgctaagagaaaaaaataaaaggataatttcaaattaaaataagagtccaacgatgtcccggtaggagagagtcaaatttattcttattttattaatctcttcattgtttcatattgtaaacgcttgtctaagttgtcatctttggatgaacaactagatgttacaattacaaatatttatctgtcgagatctaacactattatgtttgtctaatgaatgacaatcctttgggatttgtcccattaaatcaacaagttaagttagaccaacaatgaagatccgaaattatactacagcaattaataacaaaaaacaacatagattcaatataaattcacacaca

SEQ ID NO: 340868 - DNA, 582 bp, Cannabis indica
gacttgaacctgaacctagactgggaccaaaacccacacaattacttggacctggatcaagaatcaggatagtgacctaggaaacagaactaggaccgggacatagtacccgacccacccgaacttgaacctaggaccatgttcgtgacacgacacaaaaaattgaaacagactgggtcccgaaattgggatccggatctggacccagggcttcgacaaaagctatagtcggtgtctggatttgggacccaaccctggagtcaaaccctgacgaggacacgaaccctcactcggacctgaacccaatcgcaaacccaaaagtggacccaagcccgtaccctgtgacccaaaattggaacaaaaactggaagttgccttggactggacctaggacttggacttggaaccataactgaaattggacctaagcctagaaccatatcggacaaggtctgggactccaaatcagacatagacccgaactgggagccggacccggatccgaacccaaacctggactcaggacccgaaccaaaacctgaactcagaccgaaacatggaaccagactagggacacagaac

SEQ ID NO: 340869 - DNA, 516 bp, Cannabis indica
agtccaaactgcaaaaactgcataaaccgcaccgcaccacaccattttttaccgtgcggtctttgcaattttatagttccgcggtgcgggtgcggtttggaaaattagaaaaatacatgtgcgggttggtttgaaaaaatagtcaaaaaactgcaccacccgcatcgcgaacacccctagctgccgacactggaaaagtcatcgaaattggtattgttcccagaaaaatcactaaaaaaattaccaagaagccggtttcttgatgaaggaaccagtttcttggtgattttttcggcgacaataccaattccgatgactttttcgaagtttgctgtcggtgtcggaaaagtcgacagagtagctgtcggtgtcagaaaaattatcggagttgctgatggcatcgataaagtcatttgaattgccattgtcactggaaaaattaccgaaaaaatcatcaagaaactgaattggcatctgaattcgtaatttttctaagaaaccagtttcttagtaatt

SEQ ID NO: 340870 - DNA, 805 bp, Cannabis indica
tgctcattggacttcagtttcctcctcttcattcaaactgtaatgaattgtgttagatcccccagattttccatcatgtttaatggttcgactcatgggttctttgaagcaaaaaggggattgagacagggagatcctatgtctcctttgctgtttgtgcttggcatggaatacttatcccgaaaattgcaggaagttggagacaaaaatgacttcatctttcatgaaaggtgttcagaattgaagatcaatcatttggcttttgcagatgatgttatgctcttttgcaatggagactttaaaagtattttctatatgcttcaggggctgaaattgttttcattaacatctggtcttcaaccgaatccccaaaaatcagcaatatactgcagcaatatgccacaagaggaggttagtagagttcttttagcttctggtttctcacagaaagaaatgccttttacttatttaggcgttcctatttgtgctaaaagaatttctggaaatgaatgcattgctttcgctgaaaaatgacagcacgaataagaacttggagctctaggaatctgtcctttgcagcccgagtagttttaattaattctgtgctcttggctattcatgcttattggtgccaagtgtttatcttgcgtaaaaaagtgatcagacatttggaatctatttgcaaagcttttcgttggaaaggtcaagcttgtgcaacaggtccgggtctaatcgcttgggagtctctttgccaacctaaagctactggaggtcttgggttcaggaaaatcagagaatggaatca

SEQ ID NO: 340871 - DNA, 802 bp, Cannabis indica
tgggatcaggggttcaggggtcaggattcaaagttcacggatcatggtttagggtttaggggaatgggaatgagaattgaataaaataaaatataaaatgcataaaaaatttgataaaaatcattaaattttttctctagttacatgataattgtcgttccttcaattttgaaaaagaatattcattccactaaaatggttgaaagggcattctatttgactgacattctaatactttaaaaagaagtgtacagcctatggagaacccggaatgatgtgatttggcaaaaatcaagtgttaacccggttcgaattatagaagaaataaagtggactaccaaggctcggattgaaagagtattgcccaaaaagattaagagcattgataaagagtggttttttgcattgtagagcttatacataatctgattagggaagtttatacaatagcatatatatctcggccttacttgggtgcgcataggttgtaaaaatttgttttatgcaatacaattcattgatttatcaaaaataaaattactttaaaaagaaactaaacaaaataatggaatgaaaattatttcatatccattccatttcattacctctaaccaaatgccacctaagggtctgtgttcaggtgttacggttcagggtgttgggctttgttgtttgggttctagcgtttaggatttagggtttagtgttttacggtttaagggtttgagggtttaggggtgtggggtttagggttcacggttcacggtttaggggaatgggaataggaatgaaaataatataa

SEQ ID NO: 340872 - DNA, 638 bp, Cannabis indica
tatgggatctgggtcgcaggtccaggcgtaagtctgggtttgggttcgggtctgggtctgggtattgatcccagcttgggtctggctcattgttcggttctgcgtctagatctggtttaggtccaggtctaattctgattccacgatccttattccagttcttattcttatttcgattctcggatccaagtttgggtttgggtccttgtttggaagtggttccaagttcggtcttggtacgattccaagatctagacgcccactacgggtgtggtccaagccctgggtcgtgggtcaagatccgtatcccaatcttaggtcccggtctcgttccgatttggatcttgggtcccagtccgtgtccgggtccaggtttgggaccgagaccggggtcggggcttgggtcacagtcctagtcctgggtcccgattctggttctaatttttagtttgggaccccaatctatgtctgggtcttgagttaaggtccgagtctctaatcccgagccaggtcctgggtccgggtcttggtccaagtccatgtttgggtttgggctcgtgtcccgagtcccgattcgagttttaattcaggtctgcatcccagtaagggtcgtagtttgggtcgttagtcagattcta

SEQ ID NO: 340873 - DNA, 930 bp, Cannabis indica
acagttagtgaagacaccacaacaaaatgggattgcagagagaatgaacaggacattgcttgaaagggtaagatgcatgttaaagggtgctggcttagacaagaaattttggggagaagctctgcaaactgcatgttatctcattaacagatgtccctcgacagcactgaaatttaaaactcctcaagagttttggacaggtgaagtaccaagatatgatcatctcaaggtatttggctgcactgcctttgctcacatcaaacaagataaactggagtctagagccataaaatgtctgttcctgggttaccctgaaggtgtcaagggttataaactttggtgtctagaagatggacacaagaagtgtctcatcagcagagatgtgatatttaaggagcatgaaatggcaatgaaacttaccaaatcagaggccaatcatgaaaagcaaagtgtagaacttcaaacagaacaagagaatgatgaagttgcagatcaggtggatacatctgcaacacacagagatcaccatactgaagaagaaacagggcatgaacaagagtcttctgagcttcaaggttatcaactggtcagagatagagtcagaagagaagtaaggcctccagaaagatttggatatgctgactgcattgcttttgcacttgcagcagctgaagaaatcgaaaatagtgaacctaccacctatacagaagctgttataggaaagaacagaaagaaatggcttggtgccattaatgatgaaatgggatcactagaaagaaataaaacatggattagagtacctagacctaaaggacagagggtaataggttgcaaatggatttttagacacaaagaaggactacctggtgaagaaatcagatataaagcaaggttagtagcaaagcagtttaatcaaagagaaggaattga

SEQ ID NO: 340874 - DNA, 710 bp, Cannabis indica
tagcatatatttgttggcatctcggtgcaactctaagtacaccgcactgttgcccctgatatgataatctgacggctatataaaaatatttgcctaaacatatatctaatatgttaaatctgatggcaactgacatgtacgctaaaaatgtataagcatatgcataaaactatactaatcttacctcgaatccaaattcaggtgtgccggtcaacctgagtggaacgaacagctcggcgaattacaggctcctaagtcataataatcacaacactgataagtgacacgctaaatcacttccaggggacttaaactcgaaactagaaatttccctatcgataaataacatggcaataccctcaataacacaaaaaatgggaagaactagggttcccaaatttttcccaaccggtagaccggttctacaactggaattccggttctaggaggaaacccaggaaaccaaccggaattccagttcctacaggccattctcaaccggaatttcggttcagtgcaggaaacctcaaaaaaatcatttctcatgcaattcaaccccaaacttcatgcaaccttccagacctgctaattagaccccaatgaacatattccaagtgataaaacaaagcttcaatcacagaaacgagtttcaccattgaaggttcaaaattgagttcaaaaactcaaaaacttgactaacccttcaaaca

SEQ ID NO: 340875 - DNA, 611 bp, Cannabis indica
ccacgtgtacaagtgtgtacacgtggacagtccaccgtggcacttaattgtgatttttggacggaggtgtgcaaagcaaaacggaaccacgatttaggtagtttggctgccaaaaatttagtttttgtggttaagtgttggaaaccgtaaagtttaggaggtttagctgccaatatccctttttttttttggttttcagaaaagaatcaccatagcccaaaaagagattaaaaaggccaagaacacacttgataattttgaagagtctctccaacgaaaaaggaaaatgtaggctaatttagatagggtcctttataaggaggaaactattagaaatattttactaggatctagatttactaacaagtatgttgattagcatcctaaatattaatatctctaaaataataaatttaaacacgtaagagtttagaaaactttatatttattacaacagaatataatgttgcgaatattttaccaggatctagaattattaacaagtatgttgaattaactgttgggttttgtgccccaaataaaactcatttcaatataatctgatttactagttaataaagaatagaaataacattttatgttgcatggtt

SEQ ID NO: 340876 - DNA, 1446 bp, Cannabis indica
gtggaaaagatgactgctagaatcagagtttggagctcaaggaacctctcatatgctggtagagttatgttaatcaattcagttatgctagctattcactaatattggagtcacggtaatttggtctgatttagtggcggtcatggagtttgtattcccctaaatgatgtggcctaagtagaggccttagaagtagggcacgaggtcggagtgatgtaaacccaccgcaggttgcccaggctgcccaagattaggaaaataggtttgcagcgatgcaaaccaggatcaatgaacaagatgatgagattcaacggttgagacagcagggtactcctgcagtccctactctagaaatatcagtggcacctggccctactatttaggccgaacatgtagctgcagtgaatcggatggaacccctgtatgaaaggttccgtaagcaggcacctttaatttttctagggggttccgatgttatgaaagtcgagcagtggctaacagtgattaccaaaatcttaaactttatgggcatcactggtaatgatcgggtagcctgtgccacattccaatttttgagaggacgttctagtatggtgggacatggtgttcctaactcatgatgttacaacaatgacctgggaagagttccaggaactgttcaatgccaagtattacaatgaggcattcagaagtgctaaaagaaaagaattcatccagctgactcagaaagaaaatatgagtaatactaaatatacgactcagtttgatcgcttggcaaaattggcctcaggaaccgtgccaaccgattttagcaagaaacagaaatacctggacgggttgaatgcaaagatcagacacgactttatgatcactactaatgccacaccacctatgctgatatggtggctaagacactacgagctgagggcgcagtggagtgcactttagagtctcgagggactccggttattggcggggttgctactcctcctacatcaagctttagtaggggaggtagtggctcgaccactaatcagaaaagaaaggcacctactgcattcagcagagaggtttcgggggaactagggtcgaggtaatcgttagggtagctatgaaactcgatacacttacccagagtgccccagttgcaaaaagcaccatctgggggagtgtaaaggtcaggggtgcttatggtgcggtatgccagggcattacaaaagggattgtccccagctcaggaccaaaacaccaaagactgcagcaaaacccactccgacaagggtgttcgcgataactgaggctgatgcagaagccagcccttcagtggtaacaggtcagctctcggtcaacaactcttattactctgtgttgtttgattctggggccactcattcctatgtggcagccagaatttttagtaaattggatagaccgtatgatagttat

SEQ ID NO: 340877 - DNA, 736 bp, Cannabis indica
ttattggttaatgtttacttataacagcattgttatattagctactaagcattataatgtggcattttataaatggttagtattattttataataatatttatcaaattaaattataaaaaaattaaaaaacattatcacactttaaatggtgtttcttgtgttaagaatcatggggttccatctcaaaattaattggcaatgagtggagtagcccatgtctcatttcttatgtatggctcaattctttaccatttattctcgtgcgataatgtccacaacatcttgtattatttttctatttatagtaacatgttgtaccgggtgttcaagaattctaacaaagaatggttagagattagcattgggaataaaatcttatacagttcgttatactgtaaacaaactagaactccattaattgattctagttaaatttacttttgatgttacacgtaaatcccatactaaataaataagatgtttgttgcttcgatcgaaaaaaaataatatttatggggcttaatcccataggaagtgttctgcaatggcttgctcgctctggcgatttcgaatggagatacggtggttatctgtaacccatcaactagaaagtactgccctattctggtcttatgggtacgatcctgttaaacgcgattataagttggtaaggtatggtacatcattttttacaaagattataactgtattcactcattctatcaacgtgaggg

SEQ ID NO: 340878 - DNA, 1209 bp, Cannabis indica
tgattttaatttgaatcacatatattgatagacacgtagtaaatgtactgtgtatgtttagactatacatgactgaaccgatatgtaataaatatcttttattaactttctttttacaattaaaagagtttatcataccacaatgatgatcattaatagatcagcctgaatcttgagtatacataaactcttatttgtgttcattgagttctttgattcactggttgaagtttcttagagaagatcattcttacaacttctactttgggagcttaataacatgagtggctgggaacatgttatataatagtggaatccaagctttcctaatagatcaaatattagttcccttatagtgttaattttgggagtactagcagttggatcaaaatctataataagttataaattaactgttcacattaaattaatggtacataaatcaagagataattagaaggataaaacagtattttgacaaactctaattatgaactaataattggaggacaaactacttatattgattatatcaatagactacaagtaagaattctataaatataattctatattgtcaaagagtacaatttcatatttatagtggcgtaataatagaattaataagtcagattattctattgatgagattgataataatcttgggtttattagaactttaaattataggtacatggtccccgagtcacttctatagatcactgtccatgggaaggttttatttgatgaattaatttcgagtgagaattaatttctatgggaaataaattcttaagcacaaaatagtaatttgtgaaattatttttttaaattaattatgacaattatgaattgtataattaatactattttaactatttagttttattggataaaactatattaattagttaaatataatattattcttaattaatattaaagagagaaatatattattttagaaataataatatttattttaatccttgtgaaataagagattaatgagaattaataaattattatttattggtaaaataaatgataaatcttatttatgacaaaattgagaaatcaattttgaatcttaatatatggcccacacgtgtaggcccattctacacgtgtaaggtgacatataaaggttcatgattaatttagtttacttattttattaagttaaaataatttaaattaaattaagtt

SEQ ID NO: 340879 - DNA, 977 bp, Cannabis indica
ctacacatcaataacaacaattcaatgttccaaaaaattgaaaaatggggaattgcccagaagaacataaagggcttaatttaaatttcaaaagtaaaaaaagttacttgatttgggataaatctttaatggtgtaaatgggggttttggcactacagagattggaataagccttggagagagtcttctcaatgttttcggatatcccattggagcgttgatccgccatttccttccacttgttcagtaagtactccaccacctcttcgttctcggagcattttaccacaagcctcggcctttccattgtcccaattttctgtctagggtttcgtcaattcatgatcttttaggtgaaagatgtaatctttttagagttgcagaagagagaaactgaagaacaaggaacttcaaagtcccgccccagcttcggaactatcagagtttgaactggttaatgggcctacatgggcccacttattataaccaggctctcaagctataaatgggctttggtccaatctttttacgacatattttcaaagaaacgacaatattccttgtcaacgacaacatttataaaaaacgacaatatccttaatagtaaaactcaaaaaaaaaaaaaattctactcgatgtaacagcatgactttctggatgcttaaaaccagagatatgtagttaaataagactgtttggattttagccgagagcgaaagctcttcaagaccatactctaagaagtaagcaagtaaaaagtataaaattcctataactgatatgtgattttcgagattgtttgagctaccaaagaggtagggaaggaatgttcttttcattcatgtaaaattcactaagtttaaaagtaatatcagtgtgtgtcaccaaataagtatagtattttaggaggcgtttggttgagaggaacgaaaatataggaacaggaatgggaatgggaatggaatggaataaaattt

SEQ ID NO: 340880 - DNA, 1000 bp, Cannabis indica
agatttaatcataagatggttaggttttggctcaactgtactacatgtgttctttgacttgttcattacaagcttaccaaaagatcatctcaatactcatatcttgggaaaacggtagtgcaattgagtaggaaagctaatcatagaaatagagtctatagcctccataaaatacttagaagtgaaatgatgatttccttagagcttggctaacatacataaatggaagagctcttactttggtaattatattagtttacaaaaatatcacttataataagcttagtatattaaggatacaatacattaaacgataaaacggtaattttagtccctactcaatgtaaatcatctatagaagatcattgattatgtagattaaaatattggataacatatagcgtatctatttttggtgaatataacactctatgtaatcaagagtgcaattgtaaatctatagtagagtcgggagaaattgataagatagagaattttctcagtaaattcaggaacaacttattgggagcttaattatataggctcaaggtccccacactacctaagatagtgttgtcttgtagactcaattaattggtttcaattaatcaatcaaaattttgagtaagactatgtcttaattatgagttccactaagcaagggtaaatttgtgaagaaaaggaaatttaaagtttatttgttaattaagagactttgaaaagtctaattaataaataagttaaatgatagttttatttgataatttatcataattattaaatagataaaattaacatttaaaagctttgaactagaaaatggtattattgagaaaagatatgtcttgacataaaatgacatttttgaaatccatgggcttctaatgaattcaggcatggtgtttataaacggcttttttttggaataattacataagacacaattttttataaaatatttacatttttacgttcaacataaaattaacagaaaaactac

SEQ ID NO: 340881 - DNA, 470 bp, Cannabis indica
cttgtttttattttcgttttcagagaaataggctttcataaaactatcatatctctctccccataggtccgttttcagtgatctaggtaccgttttaaagataatttaatgatctctctccccatgagaaatccaaggttagggatgaaatgattaattttggcaattttatgcgatttgaatgcaattttgtgtgcgattgtactatttggcaatttatgtgcaatctttgtgcatcgttatgcgattttgttgactatgtgatattgtgcgacgtaatgcgatttctttccattggtgtgcgattattgtgcgacatcataactggtttatattatgttagcttaaggcgatattgtgcgatttactgtgcgatatagtatgctgatttgaaatgtaagtttgtttgtatttctttgggacagattcatctgtatttgtgcctgtactgtatgttggaaattatttta

SEQ ID NO: 340882 - DNA, 735 bp, Cannabis indica
ccgacgacttttccagcaccgactgctactccggcgacttttccggcaccggcagcaaactccggtgacttttccggcatcaatgacaaataaaacttcttaaataaataaaaacattaaatatgggatttagaaacctaattacatatatatggcatatcaaataccataaaaaaacctaaaaataaaaaaataccatataaattggccaaacttaaatgtgccatatttatcataagaacttttaaaattccatactaagtgtaatttcttctattaattattattattataaattggtaatgataagaagaatatatatgcagattggtttaatattgtggactaaatatcaaataaatcccttaaaaacagtatcttagtaagtatccaacttataggacaaactgtctgctccatcatcttcatcttatcatattattattattattattatttaatacttaaggtgtcgaatatcatattaatataatatatcattaattaataattttttatattatttattaaattaatttatgtggtattgatcaatactaaaatacatcaataatgatacgtaatctctcgtgtagttattttttctattattattattgtatacagaacatattgactaaagttgccacgaaagtactcaattacaatataaatgtcataattaattaatcaatacttcaaatataattacaaaaatttttttaattttttttt

SEQ ID NO: 340883 - DNA, 976 bp, Cannabis indica
taaatttataatttgagaatttataaaattgagaaatttgaaatttacagatttttaattagaggataattttagaaattagttgtatttcaaaatttattgtaaaagttatttaaaaaattatctaaaagagaaaaattattagacaatcatttttaattaaaatgtgattggagaatttaatttgggtcttcagttaaaaattgtggcattttatttttatataggatttgaaattttaaatttggggtctttaattatattaaatttttatttattaacatgaaataaataaaataaatttagcaaggaaaattgaatggtataaatagaaaatgataacaaaaaaagccctaagtgaaaacctaatccctaagtgaaacatacatggtagtaaatctagatcctggtaaaatattcccaacagtaaagacacaagaattttatagaagttcagccccgagcagttcggtaatagcctaatcctcgttatttgtattgacttaagaacaaggagaaaggttccttttcttagagctcttacaacagtatctctgaatatgaattcttagacaaaatccctctaccctttgcccagtgaatatgcatcactatttatagggctataagcttggagaggaagtatttcccttctcgttacaattgatataagcaaaaagattgcatagtaaatacagaatacactgatcgtggcatttccgtgatgactcacgatgcgaaagctgaatttggtaagtgttggtgttctgtgcgaattaccgactgctcggtttaaagacctttgtccgagcgaatgcacaaagtgtcctgttgggctcgtgccttggagcggatacctggagtcgattccacatgtcaccatcgagtgatgccacgtcagagtgtagaaattgggataacaagggtgttggtggataatggaagttcagtgaatatctgtgacagtcagtagtcc

SEQ ID NO: 340884 - DNA, 1083 bp, Cannabis indica
catagatttataaaatatgtggttgtggtcttttgatgacttaggtctagttacaaaataaagttcttagaatagtccaagtggatccttgtcacggaatactaaactcaaatccacacataaacatacagttagaatccattgacagaaaatggatattaagaaaaaacttgtgcaagtcatactgtaatgtgtaatgtgttctagaaaatgtaaatataaaatttatatttggaatctaaaatttaacgtcaaagacttaaatttaaccaaatatacatgagtaattattctctcttagaccaccactagtaatcaaactctaagtttaaatttcctatagtaaacatatatacaataggagattcaagatcaaggatttatatcattttaggatagactgtcgggaaaataattatatgtgccattcaatttcttaagagaaaatagaatgacatcataagcaaatgatttataaaccattaatccattgatatatattatttaagctaattcgaattgaataagctaagagaaaaaattaaaggataatttcgaatttaaaataagaatccaacgatgtcccgattggtgagagtcaaagttattcttatttttataaacgtcttcattgttccatgttgtaaatacttgtccaaggtgtcatcaattgatgaacagctagatgtttcatttacaaatatttatgtatcgagatctaacactattatgtatgtctaatggatgacaattcattaggatttgtcccattaaaaactacacgccaagttagaccaacaatgaagatgcaaaattaaactacagttaataacagaaaacaacatggttcattataaattcacacacaattcagaatttatgaagcatttaccaaataggaaggactagtgaaaatattaaaacttacaatcctaaataatttcaaaggtttctaacaaattgataccagtgtcccgtttaggcgagagtcaaagatatcatccattgaatagagtattcagttcatctaaactgacaaacattctagcaaccttttattcgatcaagatgagaatccagcgt

SEQ ID NO: 340885 - DNA, 1373 bp, Cannabis indica
tttgattgctgtacggggttggaaggtaatttcgtactgacccagctccatagcccacttgagtagccatccagaggcgtctgacttttgtaatatttagagtaatggtcggtcagtgtacacccgaacaggatgagcttgaaaatagggccttcacttccttatggctagaataaggtagtaagcaagtttctctatcaatgggtatcggccttcggcctcaatgagtcttttactgatgtaatagatcaggtgttgtatattgttctcttctctgatcagcatggcacttacttacagcgtgctccgtgatagctaagtatattccaagttcttctccgtccagaggtttcgagagtacgggaggttttgcgagttgcatttttagctcctgaaaagcttttttagattccttcctccactcgaattgcttctttcctcgtaagatgttgaagaatgggacacacttgtcggttgattttgaaacaaatttgctgagtggagtgatccgactagtcaaactttgcacttccttggttcttgttggcgacttcatatccaggatggcttgaatcttctctagattggctttgattcctcgggcattgacaatgaagcctagaaactttcctaagcttactccaaaggagcactttaagggatttagtttcatgttttacttcctaaggactttaaagcattcgtccaggtcatctatgtgccccccagccttcctggatttgacgagcatgtcatctacatacacttccatgttttgcccgatctggtctttaaacattttgtttaccaatatttggtatgtggctccagcattttttagatcaaacgacattaccatgtagcaatatagacccatatctgtttgtaaacttgtatgttcttggtttggtggatgcatttttatttgattgtgccccgagtaagcatcccttaagcttaatatttcatgccctgctgttccatccacgagctgatcgattcctagaagtggaaaacagtccatgaaatcaatacacactcgccattttttgtttggcttgggtacgagtacgggatttgcaacccaagctgagtagaaagcttcaattatgaaattattgttgcgtaggttttctacttcttcttttcgggctagtactcgctctttgtcaaatagccttcgcttttgttgaatttttcggaagttgggatcaatatttaggacgtgcgaaatgatagaaggatcaattccgaccatatcctcatgcgaccaagcaaaaacgtccaggtttgctctcacaaattttatcaatgatgattttacttcgagaagcaaacgttttctgatttttagctttctggtcaggatatct

SEQ ID NO: 340886 - DNA, 1139 bp, Cannabis indica
ccttaaagtatatttaagtttgcttaaggcagattataactgcaattcaagggcagaattgacaaccgctcgaaaatcataaagtttggtagattactaactacttaaacaagaagattacgagcaatggagaaacccaaaagtactgtatatatgatcaaaatatagttgtttacattatgaataaaaacgccagcaaatacaattgtattaagtttaaataaaaatagtacaaggcatttaagataagaaaaacctaagactggttacaaacttatctttacaaaattgctactaggggcaaaccattaagtcattctcataaatagaagatgagagagaaagacatacacatagcttggagaaaaattggctacacatagacgagaaagaccgtctgcacgtagagaaccttgatctctgcatagaccctattctcctcatcatcagatcccatttccagaagtcgagatctgtttcccagcctcaggaaatttctcaacactagagagaggttgacgtaaagatctcctgacataggttggggtcttgggttagttggattctctgatataaaccacgccaacttccttcccagatccacctgaaaccatgccaatcttccactggaattcttcatcagcctaaggaggatctttgagattgctcacaagatctataccctttgggatcacttgggaggatcggtcatggtaggctacagagttctcctggtttggattggtcagaagctcctcagccctagaatccatcgtttctagctccggttgaggcttgaagtctgtaggaacaaatggaaaatggttggtgcatctaggtattatgaatctggaaggataaacttctgaactcagaagagacattttggcaggaaggaagtaatccattctggaaatggatttcactaaagagccagaaggtttgtgataaatgacaagcttgggtcccccttttatacacgaagttcagtgacaagaaagccaaagattgagaaatctaatggctgggaattgtgcagaatatgaatagactattcttaatgatcttcgaaaccatagaacttccagaatcaaaggagacgtctttccaagaaaggattttggcaaaaataccctccg

SEQ ID NO: 340887 - DNA, 748 bp, Cannabis indica
gaaccaaatgacacactaaataagtgatgaaaatacttctgtttctttattgataattaaatgataaagattacattgaaatagagttttatttagggcagaaaacccaacaaactcccacttgcactaatataaatcaatcagtacatttcaattaatcctaaatttacacttaagtgtgccgcagtgactttggacagagggctcacccacctggcacctaaggcaccttgcctcctgtgaggaactacagcataagctcctcggtgacgtagtccactccctcaaccaaggcatcgccgtccgcatctactggctccccaacctcgttgtatcccccaaaatttggaggtgcagcctcctcctctccctccgcctcggaagggctgcaaggacagacatcgtccagttctttatctcctggactttggcatccccctcatgatccccctcctcctgaacgggcggaccgtgtttggcgctgggtaatgtggcgtgctgggccacgagagggtcagacgtgttgaccttacgcatcgtttgctttgttcgagccatcatcctatggctcgacagaaaacttgaagcggagagctcgtcacttgaagaggacggaccggcacgaagacaaggataatccttgtacaggagttgaagcaaatcctggtagattcggtgttcgcttccccaaaactcacaaggattcatctgttggaaattattttaccaggatcttagtgttgggttt

SEQ ID NO: 340888 - DNA, 578 bp, Cannabis indica
atgacatgccatcaccgataaaagcctaaagaagtacaacccccgacaggaagaatggttgcacttaacagattcatttcaaagtcaactgatgagtgtgtgccattcttcaatatattgcgaggcaataacaagtttgggtggacaaaagagtgcgaggaggcctttcagatcataaaaagacatatagcgacacctctagttttggcgaaaccaataactggagaaacgttgcttctctatttagccatctcggaagatgcgattagtgcagagctacagtgcgagaagagggaaagcaccatcaacctatttactatgtaagtaaaaggttactagggacagagtccagatatccctctctagaaaaactcgcgttgtgcctagtccatgcatctcataaactatggccatacttgcaggcgcaccccataaaagtgttaactgatcagcccttgagacaagttttatcaaaaccagatgattgataactctatgttataaagttaatttttatacttttaaactaaagtattgtgaggagagtagtgaaaatgtgtttattttgcttaatttta

SEQ ID NO: 340889 - DNA, 967 bp, Cannabis indica
ggcatctatctcgctataagaagacataatcgtggtaccttcactaatcagcatcagacatctttcaatgagatccactgctccgtcgagtcagctctctcagatagaagctaacattcaaatgatgttgactgctgaagtttaccttgtcaccaagaactgcgattgtcaaatggagcattatgtcttcaataacagaaacgacagtatttacattattagccttggaaagatacggaaaaagcttcagctcgctgtcagagttattgttgctatcctagcgaggtgactctgcgagataccctttgaagcgtatctaaatccacttcagcattgacccagtaacagcggataaatcacagctgtgtgattttcaaataataacaacatttattttacgtggggcgtaatcaaatcccataatttcaagaaaatattgttgtgggatattcatctgattataattaactaccttcctatgtaactataaataggggcagaatacattgaaaaaggacgaaaaatcctttagagaaagagccctagttttgtattagagaaatctaataagatagactcatggactatacagaattttaacagcaaaactacgtaaaaaactttgtgttacttcttcctcttttactactattatttctgtgtaaatcaatcacgaaataggctttaatatagttaacgaaaatctgcgctaacacaatgaatactatccacatgtatatatatagtagagattacactatatatggaaaattataagagtttacttttttatggcataaataaataatgctaaggggttatgagtttttttgtttttttacatttatatgagcttttttatgccatatttctataaaaaaaaggatagaaattctatatttgttaacaataataagttttcccaaaaaatttgtcagaaaactcaccggcgccggagaagtcgtcg

SEQ ID NO: 340890 - DNA, 596 bp, Cannabis indica
catacaaacttaaagtctaacattaatgtgttatattgatttatatcttattcaataagtttaatatataaaaataaataatttattgttttgataaataattatatatcttctatagtggacaccctaaaaagggtaacactgatgcagccccatttttactagttttcattggttgttaaatgaagatcattgtgttatgctgtacactcccacaaatgattgtatactatttgagatatttactaacaacaaggtgagagcctcaattgccgacccgaacgatccactcattccaactatattaccaacaatcttgtacctgtagaatctgaaccccagtagacatgaaacaaagtaatacttatagactttattaagggtaaataccattttggaccctctgttttgcaaaagttaccaattagaccctgtgttttgttaaatgacaaaatagaccctctattttctaaaatagtacaaataggaccctgaattgattttttgtcaaaataaaatttaattataatccgatctaaaagtgctattacaaaactgtttatattttttgtatctgttcgtattaagcattgtct

SEQ ID NO: 340891 - DNA, 1101 bp, Cannabis indica
aagattacacagccttactaaagaactactagtcttatcttcaacaaatagctaaggtcacatgccttaaaaatggagatgaaaacacggctttatttcatgcaagtattaaaggcagaaaaagacagaatagagtgctttcaatacagaatcaagatggggagagacttgcacaggaagcaaaaatttcaaaggcctttctgtcatactataaagggttattgggcactaaaatgcagaggagaagaactgtgataaaaatcttggtgcattcaggggctgttctgtcaaaccggcttgctagttggctttttcaggactactcttataaagaaataaaggctactgtctttgcaataccaggaatcaaagcaccaggtcctgatggctattttcaagctacttttttcgggataattgggagcttattcaaggagatgtatgtgcagtagttcagaatttcttgcactcgggacagatattaaaggagatcaatttcactgtgcttactctcattccaaaagttaaatgcccaaatactgtaagtgatttcagacctattgcttgttgtaatgtcatttacaaaattgcaactaagttgatctattcaaagttgaaacatgtgcttcctgaattagtggctcataatcagggggttttacatagggaagatttatagcacataatattatgatttcccaagatctaatcaggcactatgggaggagaaacacaaagcctagctgcatgatcaaactggatttacaaaaggcgtatgataccattgattgggatttcttaaaagagctgttgagggcttttaagtttcctatccaattcataaagcttattatgaattgtgttaggactcctaagttctctctgatgtttaatggaacaatgcatggattttttgagtctaagagagggctaaggcagggggatccactatcccctcttcttttgacttgaatggagtatctctcaaggatcatgaccaagattgggaaaaagtaggattttcaattccatgatagatgtgaaagcttacaactcaaccatttgagctttgcagataatgtgctcctcttttgtcatggt

SEQ ID NO: 340892 - DNA, 653 bp, Cannabis indica
atacttgtgagtagatctaagttcctggtaaaatatatttccaacaaattcctcccaagtgttgatagagtgggttggcaaagataccaactaacttttggctcgttcccttagagagaatgggaacagtcttagccggatggcgttatcgctaactctattgaccttgaatgtctgacagcgttctttgaagttagctagatgcatgtttgggtcttttgatggtagtcccccaaactgatttgaagattggaccatctgcagtatggttggcttgatcttaaaattgttggcatcaacgacaggtggccttatacaggatctggctcctgtcaagttgggcagcaaatagtccctcaggctacggtcattgttgttgtgaccattagcctagtcttctaaaactcctacattgttgtcattaatggcgttgtcagccatgaatacttcttgttcaatctctattgcagcgctttccaatttcttccttcttctattctttttacaagttttctctatttcaggatcaacaggtaatatgccagttgagccttgacttctcataaactagtaaacctgaaaaaaaaaataagatcttgaaacaaacagagttagtactaaaattgaaaaaaatcaaattagaacaaaattta

SEQ ID NO: 340893 - DNA, 1210 bp, Cannabis indica
tacaattataagataaatgatacgttaattataagagtatacttattaaatatcagaaaattctctattcatatggagaaggtataatcttgtaagaatttacaagagaattaagattgtatgacatgaataaaataagtcggtagtgtattaaagtattggaaatatttaatatggaactgctaagtacggtttactatacactatacttctagtgtgtgctattttaatttggatcacatatatagatgaaatgcgtagtaaaagtactgtgtatagttagattatgtatgaatggacctatatgaaataaaattctttcatccaacttttcatttaccatgaaaagagtttatcatatcacaatgatgatcatgagtagatcaacctgaatcctgagtatatatgaactcatgtttgtgttcattgagttctttgacttactcgttaaagtttctcagagaaaataattcttacaacttctattttgggagcttaataatataagtggctaagaatatgttatacaatagtagaattcaagctttcctaacgattcgaatattagttcccttatagtgttaattctgcgagagctaacagttagatccaaaactataataagttataaactaactattaacattgaattaatggtacataaggaatcaagagataattagaaggataaaatagtatttcgatcaactctaattatgaactaataattagagagcgagctacttatattgattatatcttacaagtaagaattctatattgtcaaatagtgcaattctatatttatagtgaattaataatagaattaataaaccagattaatttgttgatgagattgatggtaatcttcgatttattggagctttgaaatataggtccatggtccccaagtcacctctatacaacaatgtacatgagaatattttatttgatgaatggattttaagtgcgaattaattttcataggaattaaattcttaagggtaaaatagcagcttgtaaaattattattttgattaattatgacaattatgaattgtataataatagtattaattatttagttttattgaaaatattatataaattaattaaatataataatattattaaagaaagaaactaaagagagaaatatattatttttgagaaaataatatttattttaatccttgtgaaataagagatt

SEQ ID NO: 340894 - DNA, 626 bp, Cannabis indica
gcactaatataaaacaaaattgcatttcaaataatctctacaccttatatccagatcgagtgtagtatgtattattctctccgtaataggatctgacaagttgtattcaatacaacctttcctccaccattacatatcctcaatcacaaaatccttaaattgtgaaattcctctctatgtgtctactcctctagggaaactggattctttacttttttgcaactaattctgtgttagtcaggaagtaacactaatagttaataaatgttggtacaatgccaaaaattgtatagaactttccatagactgaataagtatctttcctgcaactttaacattcagtctcactggcagaattagagactccagatctgtttttacacttctccaaaatcactgctccaccctcatagtaatcaccatctcattagtagactttctagcactaatgcaagtctagaaacctaatttggtgtagtctaagagtattaaaattccacccttatcgactaacatatagttcatcttcttaatcttaagatttatgtgattgtcttccaatgttcctttttctggattaatttgataccaactcattacctcccactcaacagcaagtgtctagt

SEQ ID NO: 340895 - DNA, 702 bp, Cannabis indica
tgaaagcttggagcttgtttgtgcaaggaattgaggtagcttttacagattttaatcttgtttttcttgctgaattttattgaggatagaacatgaaattggttgatgatgaggttgtgttgcatgcttaatgaattggtgttattttgatgaatttgggtgtgaaattgttagttattgttgtgggtgagattgtaggtttggatgagatgcttggtgaattttctatgttgaatttgatgttttaattaatgatatgctgctggaaaaatatttgagattgaaggtttaaagctcaagtctttgaacttgaagagttgtgagtttaagcatgattttgtgtagaattgtgggatttgtttttggtaaattcagaggcgtttttagggcttcattgagtttaaaatctgattataagttctgattttggttgtgtaaagcaagcttgagttcatggaactcaagcttggagctttaatggcactttttgattcttggtgaaattattgggtttgagctgtaaaatatgtttaatatgtcatatgttgatgctctggaaagtttggtggtgattgtggaagtatttgagtaggttttggatgtttaaaagttatgatttttcgtgttgttgctgcccagacaaccagaattctggttggactgtatcggggaaaattcttaattttgttttggccataactt

SEQ ID NO: 340896 - DNA, 582 bp, Cannabis indica
tacacaaccaaacacagtttacacatttctctagaatcatattctccttcataatattccctataatcaaattattttgaacctttcgtaccaaacgcccccttaattcaacttagataactgcattaggaagtaaaataaaagatagttgtggatcataataatttttatttttctcattgtttatttctttgatttataattattattttgttttatttatttttctctaatatttttattaatcgaatagaaatgaaaaattaactaatatataattaataatcaattcttacaacaatgatattatattttattattatattatttgattcgattgtgtatacttacgtattatgaaaaagccaattgcaatatcgaaacacaatcagaccaaaccacacttttttctaggaaaaagctagagaaaaaaaaaacaacctcctatatctattttctataaagtgtggttatgtaacaaaattcttggaagcaatagctaattttgttttttcttgaagatcaaaatctcaaaccctatttaaatattaaaaaaatataaattacctaattaaaaaaaaa

SEQ ID NO: 340897 - DNA, 770 bp, Cannabis indica
ataaggcagtaagcgagtttctctattaatgggtatcggccctcggcctcaagaagccttttactgatgtaatagactgggtgttgtatgctgttctcttctctgattagcatggcacttacatcatgttccgtgacagctaagtatattccaagttcttctccgtccaaaggttttgagagtacgggaggttttgaaagttgtgcttttagctcttggaaagctttttcacattcctccgtccactcgaactgcctgtttccttgcaagatattaaagaatgggacacacttatctgttgattttgaaacaaatctgctgagtgcagctattcgaccagtcaaactttgcacttccttggttttagttggcgacttcatatccaggagggctcgaatcttctctggattggcttcgattcctcgggcattgacgatgaagcccagaaactttccctagttgactccaaaggaacattttgagggatttagtttcatattgtactttctgaggacattgaagcattcgtccaggttgtctatgtgccccccagccttcctggatttgacgagcatgtcatccacatacacttccatatttcacccgatttggtctttaaacattttgtttaccaatctttggtatgtcgctccagcgttttttagaccgaacgacattactttgtaacaatatagacccatatctgtccggaaacttgtatgttcttggtttgggggatgtattttaatttgattgtagcccgaataagc

SEQ ID NO: 340898 - DNA, 929 bp, Cannabis indica
agagagagggggtcggctatagaaggatagtgagtggctcaattttctgaaggcaatctcttgaatcacttgaaaactcttattttggtgtgagccatcactatctatttataggtaaccactaggtttaggttagtaattatttggcattaaaataatgaaaatattaattggaaaaagcttctccaagtggccggccatggtgttaatgggccccacttggaattttgcaattttaacaatttttatttctattttctcaaaaacgccaattttccaattctaaccatttaaatgccaaaactaattatttaataactaaaataaattattaaataatattgtcatttaacataattattaatttgacatatagggtctgttaattaataaatagaacctagaatctcttttcttcacaattttgtgcttgcatagtgaaaattcataaactagagatagtctaattatagaattataattgattaaccaaaatcaattatctgagtcttacaagcagtatggtctcaacttgaatggggaccatggacctacaatactgagcttccaataagccgaaccgaatttaccaagtaaattcccttacttattaattccttggtgaatccacttttagaacttagaattgcactctcagttatacaaagcactctatatgttccaccatatagataggctatcacatttaaccatcgttataatcttaatgtgatcaaagatcctctatatagatgatttacaccgagtagggataaatttaccgtttcacttcgtaatgtatttggctccttaaaacgcttagctacctgtaaatgatgttttagtgaactaaaatatattcactgaaacaagagctctttcatttacttctatttaactaagctcgaaggaaatcatcacttgacttc

SEQ ID NO: 340899 - DNA, 813 bp, Cannabis indica
aaaaaatagacttaaacttgttcttgtaaaatatagtttttttttctttacaaaaattgaatgtttaatatacttttttatatctaaatgtatcttttaataaaaataataatttttttaaaattacttaattagttttaaaattttaatttcgtttttaattttttaatcattgaaaatgatttttttaaagatctaataaattaatttttaaaatttactacaaaaaatattgtatctttttatttttattttgaggggtacgatttgatagttgtcaaaatttatgggcaaaataattaatttacaaagatacttcaacgtttaaactgaataataggacgaaacctaacagaatgactaaatttctataaatataaaagtttagagagaatttttaataattggtatattttaggggcaaaattaatagtatcaacaactcagcgataaaattactaattattctaaaataaaattctaagttaaaaaaaaaaatttcctgcacaaatattgcgagttttttaattatattttaaaggctaaaataacttttaaaaaaaagtttttacaaaaatactagattttggataaaattttttaattttactattacacggcagaaattacatttatgttgtcctcctttctttttatactgtaaacactaaaaaaaatataaggcctccaacttccacacccatggacagaaccactacatcaacactaggacagtcgaaaaacaaccattaattccgatgagattgagaaaaaatagtgaaatcgatgctaaataaataatcatgacaaaac

SEQ ID NO: 340900 - DNA, 591 bp, Cannabis indica
aacagtgaggtgtagccggatttaacgcaactccttgaccgaagaaaccatagacaagttggaggcatgtagtagatccttgagttggagtcccatcctctcataagcagtcttgaacaatacatttgaagaagctccattgtcgatcatggttctggccaccattttattggctatctggacttccacaaccagcgggtcgttgtgcggaaatttgactttgacagcgtcttcatcgttgaaggatatggttggccctcctgctcgtagaactttgggcctcatttcttcgacgaccaggatgacttcttctttttcgtgctgtgctgtccgggcatacctctcccgagctttgcttgaatctccagcaatgtgcgagcctccaatattgacttgtaagtgcctatctactagtggaggtaggaaatcttggttgttttgaccttggtttgtcttgacatacttcttcaggtgcgaattgtttttccttattaggaattcaatttcccgcttcgagttgtagcattcgttagtgtcgtggccgtagtctccgtggaaccgacaaaactttgtcatctcccttttgttggt

SEQ ID NO: 340901 - DNA, 533 bp, Cannabis indica
actcttattaataatcaaatgtctttataggcttttcagggcataaatcccaacatatcttaggtatcttaggtttcaccaagcattgctcaaattgttaagagtaataaaatgaatttgagccagtgtccaaataatgattttagaagaaaagaaatgaagaacattctttatgcttctgttgtcggaagcctaatgtatgctcaagtgtgcacaaggcctgccattgcttatttattggagtgttaggaagatttcaaagtaatatggggatagaccattggaaagctgcaaagaaggttataaggtaccattagggtactaagaattacaaacttatgtttaaacgaaccaacaatttagaagtagttggctgctcagattcaaatttcactggttgtactgattcacgtaaatcaacatctggttacgtatttatgcttgttggtgaagctgtatcatggaggagtaacaaagtagcctttgttgggttttatgccctaaataaaactcatttctatataatcagattt

SEQ ID NO: 340902 - DNA, 542 bp, Cannabis indica
attccagagattttattaaactctagggttattatttatgctatatgtgaattatgttatttttacaatttttgcttggcgacaacgaaaaacgcgatggatggctagtttgatcacatggataagtctagaaccttatttcttagtgggatgtatattggaggaaatagaataccatgtttgagcggggttatggagtttgaccattttacccctagtcatgaaaattcctaagttataacagaaagggcagtttagtaattagccatattttaaattaggaaaatagaaagtaaagccaaaagccaagaaaataagaacactctctctcttcgaaccagccgaaaaccaggggatttgttgttgattcttgcattttcaacaaggattggaggaggttttagtcaaggtaagccttaaaccctctttggttatgtttttctctaggtttgaattggtttcaactagtgattttagagaatatgggctattagggtttgattaggttatggttcagtttttatgttcattttgagttgatt

SEQ ID NO: 340903 - DNA, 930 bp, Cannabis indica
ttttgatcaaggtaagccctagagactctttggttatatttttctcaaggtttgaattggtttcaactagcgattttagagaataggggctgttagtgtttgattaggttatggtttagtttttatgtccattttgagttgattataagttttggtagttggttttagtgtattgtgttggaattgttcaactttgagctttgaaactcaaacttaggtctttaatggcatgttttgattcagtgagtttttctgagttgtattagttggaatatgttgtgtatgctctgtttaggtactctagaaggtttggtagtatttggttaagttttgagcaagttttgggtttttttggggaaactggtacaaatcagttaactggtttgccagtacatgtaaaaccagttaatcagttttggcaggttccccgaataacccattttctcaattcttgcccattttagtgccttagttgggtgtttccctgtttcctaggttaatgtaatcctagtgaatataacagagccttgagttgtagattcgggttttggacatgtgatttacccagttttaatatgtgattagggcatccattcagcacgagacttttcgttcaggtcggccaactcacttgaatctggaaagaaggtaagaattgtgtataatgtgtaatatgaatatgcgaatgtatgtatatgttaagtgtatatgcatgcttatatgtttgttacgctaccaatacttgtacggttatggtacaaagtgcattggtatagtgtatattgttaaggagtacattacagtgataccagcacaagtacgggaaagtacagggtgtgtgtggtatatcactcagtggtactcagggtatgaatcaaaccttaccaacactcgtacaatgaggtacgaagtgtatgtggtatagtggct

SEQ ID NO: 340904 - DNA, 677 bp, Cannabis indica
atccgacaatatcacatcggtacatccagagtacgactagtataggttgatattatggtcgatagtaccgtactacttgacagtatcacatcgatacgactagagtatgactagcgtaccaagtataggctgtactatgtcaatactactgtcgtacgaatcatatggatgtaaaaaaagcttctgattatacattctggactcagcaccgtgcgggtcatagggatagggttatgattggggatatgggcgttcgatcataatctaggttattactatgttattgtttattcttttcttactaagtttgtcgactcacagtgctatttccatgtgtaggtaagggtaaggccaaggctgagcagccgtgaggacgagcagatgaagattgtacatgttagggcggttaggcctggagcgtacgatctttgggacatcagggcttttgtcgtctggtctctaggcgacaaaacttttgtataagaatagtgaacttttgtaaatgtattttgtaaacgggatcccgaaattctataaatgtattactttatgtttttaattaattaagcaaattttagttaatcacgtttttgttaatctcgttgattaacaacgagctgcacagtacgtttaaaatcacgctaacacgcttaaattagttagggtattacaatttg

SEQ ID NO: 340905 - DNA, 741 bp, Cannabis indica
gcactaactctacaagtaacatcacttcatagccacaagctaaaccaaatggagtttgcccagtggtcgtcttctcggtgttcctgtgtgaccaaaggacctttgggagcaatttttgccaatttccttttgcctcttcaaggcgcttcttcaaagtgtccttgagggtcttgttcacaactagagatggaaatttataccgtgggaatgggtaactgtggggattcccagacttggtggttaatggggtagtggtgggggcaatttcaatagccgaagcggggattggtcggggcggggataatactatccgcaccatagctgacgctgatatagatgtatatatatttatagtttcctttttattcttaatgtatatgctatacccgaaattcgactactatttcaatggagaacacgtgtcaagtaaggggaatatggatcgatgcgtgtatcggtaatcacatttaatggaataactcattaaatgcgaaagtgatagagaatatttgcaacttgctgactataaggtcttatctgagataaagatatacaaattgttgcctcacgtattaacgagaaaccatacgtcattggatgtgcaaggctagacatcaacttcattgcgccagggaagacgtaagcgatgcataataactgtgaaagcacttagcgtataatatacaaaccaaataaaacagtcggtcgaacccaaacaactaatagtgaggcgcttatctc

SEQ ID NO: 340906 - DNA, 1193 bp, Cannabis indica
cacttcagagggtgacacgtgtcgaacaatggagaatcacctaatataataaaattatatcatttaatgcaaaggaaaggaataaattgtttaataaaagattaatagaaaatattcataactcgctgactaatgcagtcttaagcgagacaaggatagaggactattaaaacctatattgacgagacacatgcctacctcgaaatacacaagtccaagaagataattcatttattcaaaggagtgaattcagttgcctaaagtacctcgggttatatatagcgagacatccacctcgctattcttaagaaacttgacgaggtgaatcatctgccaacacttagtattttttctacattatagtattcaaggataataacttggaaatatgcaagatacaattgtccaaatcaacattaatcatcgacgagtcaagcgggatgatattgtccaaattagtattgaccatcgaatgataagaataataagcagttaagcggttatcaagtattatccaatatatgttttaaatgaaacgtgggaattaaccacgtttcattacacagttatattttgaattaaatgtgaataactgcaacctatatgcagatcccacagaaaaagggacagaagaatttgagagagaataatatatacgatcaattgtaaactgtatctgatactcagaaaacatcttgaataagatagactcgtggagtatgcagatttaactgcaaaactacgtaaaaatatctggtgttactcatatactatttattttatattttcttattatttatgtgttatatttattatttattgattaacaaaaatctgcgttaatcgtttgttgctttcatttagagcctacgtaataaaactaagaaaaatccctccttacaaataaaaatctatccatggctgataataatcaaaacgatggaagtcgttctgaggaaactactcatcgccctgggaaagaaccaatgggttctcaaagaccccatacttccagaacaacacgttcaagaagaaattattgttgggaatattttactaggatctagattcgctaacaagtatgttgattaacatcctaaatatgaatatctctaaaacaatgaaattaaacacacacgagtttagaaaaccttacattgattgcagtagaataaatagtgttggcatttata

SEQ ID NO: 340907 - DNA, 998 bp, Cannabis indica
ttcctcgcaggatgttgaaaaatagaacacatttgtctgttgattttgatacgaatctgctgagtgcggcaatccgtctagttaagctttgcacttttttggtttttcctggcaagttcatatccaggagggcttgaattttttttggattggcttcaattgcttgggaattgacgatgaagcttagaaactttcctgagctgactccaaaggaatactgtaagggatttagtttcatgttgtattttttgaggactctgaagcattcttccaggttatctatgtgccccccagcctttctggattttacgagcatgtcatccacgtacactttcatagttcgcccgatctggtctttaaacatctaatttaccaatctttagtatgtagctccaacatttttcagaccaaatggcatgactttgtagcaatagagacccaaatctgttcggaaacttgtatgttttttgtctggcggatgcattttgatttgattgtagcctgaataagcatccatgaagcttaaaatttcatgccctgctgttgtgtctacgagctgatcgattcttggaagtggaaaacagtctttagggcatgctttgttaaggtctgtgaaatcaatatagactcaccatttcttgttcggcttgggcacaagtatgggattcgcgacccaagcctggtaaaaagcttcaattatgaagttgttgttgcacagcttttaaacttcatctttcagggctactgctcattctttatccaacaaccttcgtttttgttgaactggctggatgttaggatattcagaatatgtgaaataatagaagggtcgattccgaccatatccgcatgtgaccaggcaaaaacatctaggtttgctgtaagaaattttatcaactctgattttacttcgacaaaaaaaccctttccaatttttagcttttggtcgggatagctggatcgatctcgatctcttctaattcttccacaggtccaac

SEQ ID NO: 340908 - DNA, 553 bp, Cannabis indica
atatatcaagtatatgtattaaaccataaacatgtaacatacatgtaatcatacttcacttctaaattgataactaatcagattgtaatgaattttatttagggcataaaacccaacactattccacatagcaacgagtggcctcctcaactcgaacacctacagcctcatgttttcatgtatctgatctactcatagaaatagaagcaaggagaagatatcgaggctagagatatttaagccatgaatcgcagtaagatagcgactatgaaatgaatattggtataggagacaaggctcatttcatccgaggtacaagcaaaagaggaaattttagtgtaacttaggatgtctggtacatcagactacctgagatactatgttatcagatgtgaaagtgacttgacatcctatgattttgggatatgataaggttataaagtgtgaagggctcactataaatagagcccttagactcattgtaaagggaactctcttgtagaaaaaaggttaataaaattgtagtttttctaaatagtgaagagagtaatat

SEQ ID NO: 340909 - DNA, 1085 bp, Cannabis indica
tcaagtttcttctttagggtgtccttgagtgtcttgttgactgctttaacttgaccattttcttggggatgtgctactgctgagaaactttatatgatcccatggttcgcacagaaatcagtgaaggaccgactgtcaaattgtttgccattgtccgacactatcttgtatggtaatccaaaccggcaaattatgtttttcacaatgaagtcttgcacttttttggacgtgatgttcgccaatggctcggcttccatccacttggtaaaataatcaactgcaatcactgcatactgcactccgcctttgcctttaggtaactgtctgatcaggttgattcccaaatggcgaaaggccaaggactttgcatctgagttagttcgttgggtggtgcacgaggtatctttgaaaatctctggcatttatcacatttcttaatgtaggctttagaatcttcaatcattgttggcgagaaataaccttgccttagaattttcttggataaactctgtctggctgcgtggttgctacaaaatccatcatgcacttttgacaaaagtctgcagcttcttcatgtgtgacacacctgagtaatggcatggagaaccctattctatgcatatctccctctacaatgatgtaccatgcaacctttctcctcattgtttgagcttcatttctattatctgggagttacccagtgttgaggtaggctgcaattggcgtcatacagtttggggatgtatcaatcatctcaatctcttccgtgccggtgatacaaggtttttcgagaaattggatgaagatcagatttcctttatcactcatgttactgctcgcaagtcgggctaatgcatcaacaattgtttttcttcccttaaaatttgcttgagggcatagcttttgaattgtgcgagaaaataatgtattttgttcagatatgctatcatcttctctccccgagcctcatacttcccagatacatgatttaccaccaactgtgagtcactgcagattttacctgttcagccttcatctcctgagcaagtcttagaccagcgataagagcttcatattcagcttca

SEQ ID NO: 340910 - DNA, 631 bp, Cannabis indica
aatggaatgaattttccctggttcccaactgcttctaaggttcggcaggaggagaataaaaggaaagcttgagtgatgtctttttttttttttttttaattttcttgccttggaagtaaacttccttaaatagggtttgctactttttttttattttcttatcagcccaaaaataaaagggacattaaaacctaaaagcaaaatgactaatttaccccaatgaaaaaaaatataaactttaaaataacctagggcactaatggtaattttactaatccattacaccgatactttaaaattttcctacctagtccggaatatactcaaaataattcttccattaacgccatgacattactaaccacatcactaaatttccacaattgccgggcccgaaaaatattttatttcaaagatggtatcctcagtacccacttatccaaatataatctccgtaattaataaattacgctatttatttcattgagtaaattctcaataattaccctaagcaagatcataatcttacttcgttaccaaaataattacatatttaataaaatatgtctatttaaattatatttattttccgggatattacaactatcccccccttatagaaatttcgtcc

SEQ ID NO: 340911 - DNA, 1305 bp, Cannabis indica
tgccaacactataaaccaatcaaaaaaattatttgctactgaatggccaacacctaacgcaaatcggagccaacatgaatgagcaaaagagcattgaaccaaaacatggaaaattgactcgtccccatagttgaacaacacacaatgtaaatccactagaacatgtttactataaagttgagtacgtgtaggcaaacaacccgaaagagctttccaaacaaaatgtaaaaccttaggaggggctgtaatcttccacaatatcttccaaacatcatcctccatagaggaatgccaactaccattgaccgactgtaagtaattataggaacttctgacagtgaaaaaaccagttggatccttgttccaaaaccaactatcacgcacaagattaacactcaaaggcacctgtttgatgagctcaacatcacgggtatcgaactagtcctcaataagctccaattcccattgtctactatctggcttcatgagttgagacaatttacaattggtcagagccggatgattagaaaccacacacgggttagcctcagacaaaagccaaggtgtgttaagcacctcagtagatgaaccagatcctattctcctacgggtaccatccatgagaggcgtttgtgactcaaagacactgcgccatataaaccttggattgtcatccaactcggcctccaagaatgatcagttaggaaagtaccgagccttatatatccggcccacaatggagtcttgatacagcagcaaccgccaaccttgcttacaaaacaaagatagattagactcacgcaaactccgaaaaatcatcccaccagagttcttatttttgcataatttcctccaactaaaccagctcacccctttcatactacctgaactccaccaatacttagacataaggcttttcaaatgtgaacaagttttcaaaggcaataagaacactgacatagaaaagtttggcaaagcttgtgctacagtttttattaggacttcacgcccagcggttgacaagaaacgaccctcccagccttgaatgcacttctgcattttgtccttcaaaaaccccaaaatggcattcttatttcttcccatgacacaagggaggccaagataagaactatgttcatccgcaagtctcattctaaggatcccacacaatcggtctcgagtagcattaggcacattagtactgaagaagacagaggacttactgaaattaacccaaaagcgatctcaaatagctgaagcagatgtaatatatttgaagtcctctctatcatttgcatgacaata

SEQ ID NO: 340912 - DNA, 638 bp, Cannabis indica
gtccattctgttgtggattcttcacaactgtcttgtgtctgtcaattccttcaagttgacagaacctagtgaacgcatctgagcagaactctaatccattatctgtcctaagcttctttattctcttccctgtctggttttcaatgagtcttttccaagtaacaaaagttctaaaagcctcattcttagttttgagcaagaaaacccagaccttcctagtatagtcatcaactatactcatgaagtagctttcaccccctagagtttttattctggaggccccccaaagatcagaatgtatgtaatctaattttccctttgttgtatgttttcctggtgagaattttagcttgcaacatttaccataaacacagtcatcacagaactctagattctctcctagtttgcccttgagaatgcctttattttcaagttcactcatgcctctttcacttagatgacctaatctaagatgccatagcctagtactctccatgtcaggtcctttgactaccataccattttcaccagtgatagtctttcctttaaggtaataaatcccattcctaagttcccctttcatgacaattaaagagcctttcatgacttttgaaagaactatcaatctttatggtatg

SEQ ID NO: 340913 - DNA, 959 bp, Cannabis indica
atttctttgctctagtttttcaagataatgactaaaatgattaattagggttttaaattttatttataggcagttcgaaaggaagacataatcatttcaaaatttaaatgtcttgaattccccccaaaagtgtacgttatgtactcattgcggatagaataaccgtcttcatgcgcgagcattaagatgcgatttgaggcaaaactgtcaattagcattaatgaactgaaattgaagatacccttggtcaggctcatgtcggttcgtctatcgacacctaggagatgcatcactcgtccagacaagactctaaatcgagtgaagtccacctgcgaccaggaaggtcctgcacaaacttgggagacaaatgttatccagttttttacacattgacgtggcaagaggactgagcgatacgtgtctcatatttttgatacctgggcggaggtaaatgtctgtagcagcctgcacataagtcgtcagcatctatgcttgttgattacccgagcatagttgtaaagaaggcatatgactaggtagaagtctgttatgccgagctacttaccagatataattacttcagaatgatcttgttatgtccagacacgaagacaatccctttaattgtgggattgagtcagagaaatatggaaacctgttccaatttcttattccgtgtattgtaattatgtaatcattgttatttcctattttatgcattgtaagcaaaaggaaaaccatccctcatgcattaagcccctataaatagtgacctagtctcactatgaaagggattgaaataattacttcagagagagattctagagagaaagtagtgatctaagaaagttactcagagatccattgtaagagcttttaaagaggaagaacactttttcccttctcttatgtcaaaataatacaaggggagtaggctattaatcaaaaccaattaaatg

SEQ ID NO: 340914 - DNA, 876 bp, Cannabis indica
gtgctttggatatcgtgttccctgatgcacaccacggtgcatgctaccaccacattattatgaacgtcaaccacaagttcaagactgacgtcttcacgaatcacatttacacgtgtgcctacacgtattcaagatcagagtttcacagagaatttgagaacattcgggccatgaatccagcggttgcacaatatcttgaggaaattggatttgaaaatgggtccggtcgtactttccaggggtacgttacaatgtaatgacgagcaactgggctgagagcttcaacaacacaactaaggatgcaagaggcttcccgatcactgctgctgtagcattcctgaggtccaaagtccagaagtggtttgcttcacgaaaagaaaaagctgacaagtggacgaaacccctagcaccagaaatggaggaggacttgacattgcattttgaaaaaggtcggtatttgaacgttgactcatgcgggccttacacgttgcaggttcaccctggaggaacagttatgaccggtggcgtagtggacttgcaggaacatacttgcacttgcggcttgttccagtgcatgaagtttccttgtcctcatgcatgtgctgcatctcaggagcgaagtattagcgcgtacacactatgctcgccatattacacaactgaatattggaggaggacatatgaaggaacaattatgccagttggtgacgaggatgattgggaattgcctgatgacatcaagaacatgacagttggagtgcctgttgagaagcaaccagtagggcgacccaagaagcaaaaggttggaagaattaagaacaaccgaactgcttgtaacggtgaaaggattatcaaatcacgaaattgtagcaagtg

SEQ ID NO: 340915 - DNA, 992 bp, Cannabis indica
aaattgtgaattgggggctgttagggttaggtgttgatgtaattcgaattctaggcttagtttgagttggttcaagcttcttgaagctggttttgatggctagattaggtgttatgcaagttgaagctttgagttcaaagctttgatctctaatggcataatttgtttcaatgagtttttttgtgaattgctggctgggatatgttgtgcataccctaattaggtactctggaaagtttggttgcatttggtggagaattgagcaagaaatgaaaaatttggggtgaactggtgcaaaccggctagccggttttggcagggtccccgaatgctttgttttctcaatttttgtccatttcagtgtcgtggttgggtgcttccctattttcagagtttgtgtaatccctaaaaagtataacagaacctagcgttatgggtttgggtttcccgggattagggttttggtcatgtaacttacccagtttcataatgtgattagggcatccatctagcatgagactttccatttaggtcggccagcacacttgaatctggaaagaaggtaagaactgaatataatgtgtgatatcaatatctgaatgtatgtatatgttatgtgtatatgcatgcttaatctgttagttgcaccaccagcacttatgcagttaaggtatagggtgcattggtatagtgaatgttatctgagagtacatttcagtgatacctgcacaagtacggagaagtacttagtgtgtgtggtatatcactcagtggtactcagggtatgaaataaatcctaccaacacgcgtatagtgaggtacgtagtgtatgtggtatagtggctatacccaagtattgaacgttcttactcatctgttgagccttataaataggtgtatgggtgcctaattacaagtcaaaaattatatgatatgttatattcttttcttactgagtctgtcgactcacagttctgcttccatgtgtaggt

SEQ ID NO: 340916 - DNA, 807 bp, Cannabis indica
ctctttcaagttgcatgaacctgaactcgttccgatttcgttctctttcgaaagctctattggcgtcaaaaactttctgcatttcaggagtaattatgccatcatcctcctacttcagctcttcaggagttaagatggagaattcgcccttgttctttcttggcgccatatttagaacttaagaatatgagaaattttgaagagtaagagagaagtagaagacaagagcaacatgcaaagcccgcatttgaggcgtagtgtacttattcgttgtaataacatgttttctatttcaggttcgaaactgctttaaaataatgtcgaggttgaatatttttttaatattttaattatttttaggtttaatagttatttttgttgaataatatcgatattttatatttgaaaccacgaataattatcaaaatttgaacgaagagaaagtctatatatacataactgtaatgttaattacacaaaatatacaatgtcccaataattacacatataatcagccgacattttggtaaaataaatcaacacaccaccgttcacgaaacaaattcatccggcctggcgtcacatcggtcaatccacgttgcatcatgagatgctccacatactcaatgcaatagacgccacaatcaccactaaatgcaaaataaaatgtaaagttagtctaacgtaaaacatattttaatactatagtacttttttatcgctatgtacctggttgttgccttcggaactaagtcgtgagtggctcgagtcgaatgcatttttggaagcaccgtgatgtccctgtta

SEQ ID NO: 340917 - DNA, 1667 bp, Cannabis indica
aattgaaaaaaaaatagtgttgaaatagtagttttttggtgttaatttaacaccaaatttaggttttaccattggagatggcctaatattagtgggacactatagacaatattatatataggataggttttagagtgtggttggaatgaatttagtgtaaaattttaacaaatttaacattttagtgctccattggagttggccttaatatacatgacttttgagtatacacattaagtatatacatttatgtgtacccaattaaaaaactttgtacaggatcactagcaccccataacaaaatgagcattgcaatggggtactaaggtacttagcacttctgtgtcatgacgatttataattagttagcggttctttataatatttattaaatcaaaataagtgagacccaatattgaattatactaatagggatattatacctcataagagtgctaagtcattaaaatttaaataaataataataagctaacaccatttatgtttaaataatattcaatatctttttcaaaattaaaaataaaaattatgtaataaaaaaatggataaataacctagaagccatctacaaattatttatttatttaataaaaaaaatcttgggttgtgcttgaaagtttgagatgagatcaggatccatattttggtagtttattattttttacaaatttattttgaagaactttatttattttagttatatttggatatatgaatcttttgatctaaagaaagtttttagtttataattttgattacaaatgtaggaagacattttcttttaattataatgaaggagtgggtggaggaggagcactgtattctaatttgtgttaagaatataattgtgagaaaattataactaatgtgcaaatgtaaatcaattaaaatttaatcaacaaacaattagcaatgacaaaattacccatttacacacaataattaaagattaaaatatggatgaataaagtattaaaggttggagggattcgggcgacacataccttccccagagcccgcgatgcaagatcactggtataaagactagatacgtggtgagggatacgagtgtttcatctgagagctgaggaaaggttggaggcgttatctgttggattatattttaccaggacctaaatttactaacaagtatgttttaacatcctaaatatgaatctctaaaatgataaaatttaaacacatataaagtatgagaaatcttacattggttgcagcagaattaaatgactcattcgactcagatctctaatccttgttcctttctgtcgcagagtataatcaagatctgagcccgattctccttcagttgttaggattcttcacagtcttacacattatgattgaggactaagttgctatgggtgggcctgcactcaatcactaaggctcaaaattttatgtgattaacactctaggatttcaaaattaggaagaagaagaacaagaagtctcaaaactctctagtgatctgacaagatgtgaactatgtttagagtcattagttgcattatgagactattcttttcttcttatactaattcacttagagttaggattgaattatatggaataaaaaatgataaaatattataaaaaataaggctatagtggccggccatatgtgg

SEQ ID NO: 340918 - DNA, 431 bp, Cannabis indica
ctttagctaagtttgtggtgaagaatgagcaagtctttagtgttgtagatggtgaaggctttaaggaacttattcaagagttgcaacctaagtttcaactcccgagtaaatttacggttactagagacatacacaaaatgttttgtgatgaaagaatgaaattaaagatggagctaactaaggatgtggagcgatatttgcttgaagaacctgtcaacccattaaaccattcatttgacatcctactttggtggaaggataactcttgtaggtataagattatgtcattaattgctaaagatatacttgttattcctgtgtctattgtggcatctgaatatgcatttattactagtggacacattttagacttttttaggagttctttgagccctaatatggtggaggcattgttgaaaattattttacca

SEQ ID NO: 340919 - DNA, 956 bp, Cannabis indica
tagtgggaaaaatattccgagatgggtctgggccacatttcacaaaggggaaccactatcagaaatgtgagattttcacaatttcgattaaaacgatcgttagtgctagaaaattactcttttttctcaacgtgtacaatggaaaagttatgcatgacgctcttggcttcgtccttgtgaaattttatgattttttgagatgtgtagggtgagattttaaaagaatactaacgagtgtaagagtaaggtaaaaacttgtttaaatttaccctgaacagaagaacattttaaatttttgaattacggggcaattttaaccaaatttaatggaaaccaatcttcatattcacaccttagtagtacgaattcattgtgattagtggtgaaaaatattgtaagaagggtacgagccacatttcagaaagggataccactattagaaatttgaggttttcactattttgattaaattgattgttagtgcttaaaaactacttattctctcaacgtgttcaatagaaaagtgatgaaaaacggtcttggcttggttcgtgtgaaatttcatgatttattgagatgtgtagggtgagatttaaagagaacactaacgagtgtaagagtaaagaaaacacttgttaaaatttaccctaaaaagaagaatatttttaatttttatttggggggtcattttaataaaatttaaagcgaaaccaatcttcatattcccatcttagtagtacgaattcattgtgactagtgaagaaaaatattttgagatgggcccgggccacatttcacaaagcggtaccgttatcagaaatgtgagatttttactatttcgattaaataattgttagtgctttaaaacttctttttctctcaaagtgtccagtaaaaaagtgtgcacaatggtcttggcttcatctcccgtgaaatttctcgattttttgagatgt

SEQ ID NO: 340920 - DNA, 673 bp, Cannabis indica
tttttttaaacattgtactaattttgtccctgtcacttcaagatactctccgtgtaactctcttatattagggtattttggctacaatacatataaaaagaggtatgtttcaattaaatataaaattagaaataaatttgattaattgattaataaaagtagtattttttaacttaccccgggttggcttgctttgagtttaaggaagaatgaggtttttaagtttaaggaagaataaggtattaaaggttgtgaatatgttatttataaaatggattatttcaaaaatacacaaaataacaaaaaaaaatacaaaaatacaaaaatacagttgtatattttaaatatttttttaatttttaagattttatttacaaaagatatggtcttttgatgttttcatgttatttttatgttatactcttattattttgttgttttagttttttattatttgtatattatttttatgttgttttgttattatttggatattattttttttttactttaatgtaattttcttattattttagtgttatttttataaaataccgtaaaaatacacatatatatatttaaatagaaaagtgtaattttttttttttaccaaaaatagtattttgtgtaaagaattttttttttttaaataagttgtaatatctttttaaga

SEQ ID NO: 340921 - DNA, 772 bp, Cannabis indica
ttacaacatgactgtagatctagatttagattcaccaaatgattttttactatcaaactctttggcccaactaaacaataacttcttagtttttacactaaatttttgtcatcaattgttaccttttggagacattactcaaagagtacgtaaaagaatatcaacttctcgtacttcatatttttatgatcctttcaacttcattagacgtattctacttgaacttggcgtgacagattcaacaattttattttcttttaccaacgaaatagaaactagtctcatcaatattctcaacgatcctccatttgcagcttctaaaatcgtttttattaatatttttattgttgccacaagtattccagaacaagaagaagaatcgaatatcattgatattacttttagggaagcacttaatgctattccaaatgttcctgcaacacatgaatccattaaaaaactcaaagaattgaatgaggacgatgatgatttattagtctctttgagtaacgacaataattgtaccatttgccaagaaaatttattgtttgaagattggaaaatcgtagagatgccatgttctcatctttttcacaagaattgtattgtttcttggctaaaaattaatcatctgtgccctttatgtcgctactcgatgcctacttccaacaacgttgctgccgctgaaaattaatattgttgtcaacacaccaacaggaccactaccttgtcttgattttatgaacactcatatcctatctatatatatata

SEQ ID NO: 340922 - DNA, 1048 bp, Cannabis indica
aatccccggttacgagttccactcgtgagccaagagtaggcggcagaccttgttcgggaattcatcaggaggagccatacctaacggatccaaccagaataatggtgtcattccacctgtcaaccaagcgaatcaatcgctaaggcaaccaggctcttctgtgttcgataggttgggaacaacccatgacctaaggaacgatctaaacagaagaaggggaacagacgagcagaatactacaacgatcgtgcagcccggagcccatactcaaatccccgctcagaaagacgctgacgtaatccaagtcgaccagaatgccgagcaagtcagcccagccatacaggcccagcttgacgagttgaaaaatatgtttcatggcatggccggacagcgtaacaatgatcttgagttagaccgtgctcgcggaactcccttctcaccagagatcaatctcctgccactgcctcacaagttcaaaatgccaacgtggaagatgtatactgggagagaagatcctctttcccatctcaagtattttgagatgcaaatggatttacaaggagtacgaggggacgtatgctgcagaatcttccccgccactctgtcggaggccgcacagtaatggtatttcaagttggctcctggaaagtttagttcatggaaaaccttttcttcagaattccatgcacaattctcttcctcacgtcagctcccattgcatctgggagatttgatcgaagaaaagcaacgaccaagcgagccactccgggcatacatcagcagattcatgacggaagcgaccaaagtctcgcgggtaaccgaggatggaaagttatccgcgatactggggggcattgaagtccttggtgaattatggaaggacataaggaagaacgggccggttgactcaatgagtgatttccttgaccgagccgaaggcttcatcaagctcgaagaagccattcaacgagcagaaggtgagcaaaagccgggcaaaacaaaggccccttccactggaacatctgccaacttccccactattccaaca

SEQ ID NO: 340923 - DNA, 803 bp, Cannabis indica
caagtgttgctcaaactttgttgtatttgtgatagtttaattgtttaatgatagtccaaaccgcaaaaccgcataaaccgcaccgcaccgcaccattttttgcggtgcggtttttgcggttttttagtttcgcggtgcgggtgcggtttgagaaattgaaaaaatcgcatgtgcgggttggtttgaaaaaatagtcaaaaaccgcaccacccgcaccgcgaacaccccgggatacaaatataaaatacagttcattttgttaaaagtctactctaatagtgtatcaaattataatgcaaatatatcacttaacaaaaagtgattcaaatttagatgacattatagtatgatgcaaaatttacatcacaataaatattatgtttttatatttaaaaaattatccaaaatgacttatttttgatctaattatcaaaaatcacttttctttctctccttctatatctctttcttatttctttctcttctctcaaattttaaaaataatatctgatcacgtcgttacttagatgagtctaaaaaaaatatcattgtgatctatttttcaatgtgaatatttcaagatgtgggaagcatatgctttttttcgatatttccagaaaaaaaaaatcatttagttactaatatagtgattaattactattttataatttttttaaatcatagtaaaaatttattttaaaattttattaattaaattattttacattatacgataactaattggttttcaaaataataaaaatgtgtataaaataatcagtatataaaataatcggtatata

SEQ ID NO: 340924 - DNA, 818 bp, Cannabis indica
catgaatctgctgatgtatgctcagagaggttcgcctggtctttgcttgacttcaaccaggtctcgcagatgcaacgggagttggcgagaggaggagaatcgtgcatggaattctgaagagaaggctttccatgaattaaacttccaaggggccaacttgaaataccattgctaggcggcgtccgatagggtagcaggaaaaattctgcaatccacatcccctcgtatcccttgcaaatctatttgcatttagaaatatttgaggtgggaaagaagatcttctcttccactatacattttccatgttggcattttaaacttgtagggcaatgccagaagattgatctcaggagatctcaggagagaatggagttccgcgtgctcggtccagctcgagatcattgtttctctgtctagccatgccttggaacatacttttcagttcgtctagctgtccgtgtacggctggcctaacttgctcggcattctggtcgatttgaatcacttcagtatctttctgagcgggaatttgagcacaggctccgagctgtatgatcgtcgtgacaatctgatcttctactcctctccttatgttcagatcattccttaggtcatgagtcattcccaaactttcgaatacggaagtgcctggctgtcttagcgattaatttgcttggttgacaggtggaatggcaccgttaacctggttggacctatcaggtatgacctctcctgatgaattactagataggatctgcccgcctaccgctaggcccacaagtggaactcgtgatgggggatttggcggctgaccattt

SEQ ID NO: 340925 - DNA, 689 bp, Cannabis indica
tatcccgagcttttcaggtaaatttcgaggacaaaattcctataaggaggggatagttgtaatatctcgaaaaataaataatatttaaatagacatattttactaaatatgtaattattttggtaacgaagtaagattatgatcttgcttagggtaattattgagaatttactcaatgaaataaatagcgtaatttattaattacaaagattatattgggatatgtgagtaccaaggatatcaatttcgaaataaaatatttttcgggcccagcaattgtggaaatttagcgatgtggttagtaatgtcacgacattaatggaagaattatttgagaatattccagattaggttagaatattattagaatgtcgggttgatggattagtaaaattaccaaaatgccttaggttactttagagattatttagctttgagggtaatttaattattctttaaataattaatcttttattctttattttattttatttaggggttgtgatattttttaataaaagaaatagaaaagaaagaaaaagaagagaaattttattatttaacttacttggaggctaagtaacttctccatcttcaacttctctccttctctctctcgtgcaagcttgagccagccattaggggacttcttttcttcagcaaacctaccatttcaaagctgaactcaa

SEQ ID NO: 340926 - DNA, 673 bp, Cannabis indica
agtaaatcaaagctctgatttgttgatgataccaactacaaaaaataaaataaaaatctgcataagaataacatgaaactttatgatattcatgtgtatataatagatattcagtgcctataataagaagagagtacaaaacaaaatcatttcaaccacaagacagagtaaaaaaatgatgcaagtaaacaatttgaaagaataagtaccaaaggattattaaagaattatataaagaaattatagtgaatagttaattgcctgggtaaactttaagatatacgaagagaaattgtagtaattatctgttaagtaatcaaaaagaaaaacatattatgatgcttattatgaagacatgagaaaagataagagagtatgaaacaattagagaactaaatgaaagaagttaagaaattagtggttagtttatattgagaacgtgttacatgaaatctttattaatattatcaaattaaaatttcaaaatttatcaagcgggcacttactactgaaaaaaaatattttataattaattatctatttaattttaaactaattggcaatgcatttgtagaaagcgttgctttctattgctatttcattcaatatacaataacacttaataaaaaagtgttgtcctataagcaatttgtaatttatttatttatttgta

SEQ ID NO: 340927 - DNA, 529 bp, Cannabis indica
cgagggtgcggtaaaattccttcgggagccccatgtgactctgagtgttggtgggactcccactcttcctactcctgtctatggtagggacggtggtgattcaaccactgatcagaagagaaaagttacctcggcatctggtggttcggggcagagcaagcggttccgtgggaaccaaggtgaggtggacgctagggttactcttaccttgagtgcccacgttgtaagaaacatcatccaggagagtgcaaccggaagacatgattttagtgcggcatggtggggcgtttcaagaaagattgccctcatgcaaagacagaagagcagaagtcagaggcaaaacccgtacctgctggggtctttgacatcacccaagctaatgctgcagccagtccttctgtggtgacaggtcatcttcttatcaacaactccttgtatactgcgttatttgattcgagagctacacgctcatatgtggctacacgggtaattgatattttgggtaggccttgtgattttcttgaaagag

SEQ ID NO: 340928 - DNA, 649 bp, Cannabis indica
atttgcagtggctaaaatataaccgtttaccaacgcatttacgcactgggaaaagtcatttttgccagcgctttttattttatgctggcaaaagttctaataccaacattgatttgccaacccccttttgctaacacatcacaagtaaattctattttaccagcataataccaacttttgccagcagaaaaatgtgctagcaaaagtgacatttcttatagtgggtattagagctccgttcgatcatatatcactaggagtaatcttttccacttatcaatatgagtttggagtccaatcgctcttctttacctcttccaattttccatggagaaaactatgatttttggtccatcaaaatgaggacctattttcaatcacaaaatctatggaaaattgttgaagaatgaaacactattccggaagatattacatctcttttggaagataaaaagaaggcaccgaaggataatcaacaaaaagattctcatgcattatactgcttgcagcaaagctatgacaaacaatctttttccacggattatgggtgcagcaacggcaaaagaagcatgggacacgttgcaggaggagttccaagcaacagtcaaggtacgcatagttagactacaaaagatttagaagagatttt

SEQ ID NO: 340929 - DNA, 563 bp, Cannabis indica
ttctggcccgttcaacaaaaaagaagactgttagataaagagtgggccctagccttaaaagaagaggtagaaaagctgcacaataacaatttcataattgaatctctctacccggcctgggttgctaaccctgtactagtgcccaaaccgaacaaaaaatggcgagtatgcattgacttcactgacctcaataaggtgtgcccaaaggactgcttctcacttccaagaatagatcaagtggatgcaacagctggacacaaaatattaagcttcatggacgcctatttggggtacaataaaatcaagatgcatccaccggaccaagaacatacaagtttccgaacagatatgggtctatactattataaagtcatgccttttggtctcaagaataccggagctacataccaaaaattggtaaataaaatgttcaaggactagatcagacgaaatatggaagtataaggccagagaatggttcctctcagttctagttaccgagtccaacctggttatgccttgatgagtaaagcatatagtaaaggatgtttcataaatgtatt

SEQ ID NO: 340930 - DNA, 1102 bp, Cannabis indica
atccatccgaattcttctctccataacaaccgctttcgattatgaaatttggaaaatggatgtcaagacagccttccttaatagaattattgaagaaaccatctatatggagcaacctcaaggctatgttcttccagataaggaaaagaaagtttgcaaactcaataggtccatttatggacttaagcaaacttctcgctcttggaacaaaaggtttgatgaaataatcaagacctacaggtttcaacaaaatgaagatgaaccttgtgtttaccaattcaaggataatcaagtggtagtattcctggtcctttatgttgacgacattttgattattcttaacaatatcaagaaaatgacttacatcaagaaatggcttgacactcaattcgaaatgaaagatttggatgaagttgcttatgttctcggtattcagatcatcaaaaaccagaagaacagatcccttgctctctgtcaaacaacttacattgataaggttttggatagattctcaatgactaatgccaaagaggcacaaatgccatatcgattttgtatccttctatctaaggaacagtatcccactgatcctcaagaggtagaggacatgagaagggttccttatgcttcaaaacttgggagtctaatgtatgcaatgttattgactagacctgacatatgctatgcagtagtaatcgtgagcatgtatcagacaaacccaggagaggaacattggactgtagttaaacatattctgaaatatttgaaaagtactaggcattatgtgttagtctataagggtggtgctttaaatcccgtaggctataccgactcagattttcaggcttgtcttgatcataaaaagtctacatctgggatggtttttactcttggcgtggagcagttgtttggagaagcgctaagcaaactgcaatatcaaactctaccatggaggccgagtacatagcttccgctgtggctgctaaggaacttgttagactagaaagttcttcttagtacttggtgttgttcctggaatggaaaaaccacttgttttactttgtgacaatactgatggtatagccaatagtaaaaagcctcg

SEQ ID NO: 340931 - DNA, 787 bp, Cannabis indica
gtagtagtacaaattcaatgtgactagtggcaaaaaattctacgatgggtccgggccacatttcacaaaggggtaccactattacaaatgtgtgatttcactatttggattaaaattattgttagtgcctgaaaactactttatctcacaacgtgtcacttagaaaattgatgcacaacactctgggcttcatcctcgtaaaatttcacaatttttgagatgtgtagggtgagactttaaccgaacactaacgagtgtaagagtaaagaaaaaacttgtaaaaatttaccctgtaaagaagaatattttaaatttttgaattaggaggccatgttaaaaaattttaacgcgaaatcaatcttcatattcaagtcttacagtacaaattaatatctgccattacattcgttgattcgtattctctaaggttgacacgcgtcatcctctaaagtgccagccagattttgggtataacagaaggaaagaccattccaatgtaacatgagaaattttttaatgatttttatcaattttttatgcattttaaattttatattattttcattcctattctcattcccctgaaccctgaaccctaaacccaaaacccctaaacccctaaaccctcaaaccgtcgaactgtaaaaccctaaaccctaaattctaaacgccaaaacgcaaacttcaaaccccaaaccctaaccccaacccaacaccctaaaccttgaaccctgaaccctaacccttaaacacagacccttaggtggcatttggttagaggtaatga

SEQ ID NO: 340932 - DNA, 819 bp, Cannabis indica
ttgaaggttttgcaaaacgaaaaatggactgagaaagtggacaaagtaaagctattagcgtatgaggtgttcttaatcagatttcattctattgagcaaagagatgaagtgttgaatgggggctatatttttttcaataggaaaccggttattatgaagccatgggacccgaattcaagtgttaagaaagaagatgtgaaattagtgcctatttggatacaattagaggacttagagctcaagtattggggagagaagtctttgtttaaaattgttgggcaattgggaaagcctatcatggtagatgcgattacaagagaaagagaaaggcttatgttcccaagggttttgattgaggttagcattgagcaagacttaccaggaatgattgaatttgaaaatgaatatggcagcaacaccacagtaacagtccagtatgaatggaagccaagtgtgtgccaacattactatggaatgggccatgtggctgctaaatgtaaaaagaaaactcaggccaagaaagaatgggttgtgaaggcatataatagagtagaaaacaggaagaacacacaggatgaagacagttttcaaccggtttcaaaaggaaaaaagaccaggccgcaagaagaccctgtagaaaccgaaatacagaatgtttttagcattctaactggtactggggaagagcagcaagaggaacaaggaattgagattggggcaatacagattaatacaagagggggggggggagatccctctcttggaaatggataagttcctttgttggaatgtctgaggggccaacaacactcaaaaaca

SEQ ID NO: 340933 - DNA, 846 bp, Cannabis indica
tgtagagagccttgatctctgcatagacctcattctcctcatcatcagaggatcccatttcctaaagtcgagatctctttcccaaccttaggaaattcctcaatactagaaagaggatggtgcaaaaatcttctggcgcaggtttgggtcctgggttggttggattctttgatagaaaccacgccaactttctttccaggttcatctgcaaccatgtcaaccttcttctggaattctttatcagcctgaggaggacctttaagatcgctcacaagatatataccctcagggatcatttctgaggatcgaccatggtaggctacgggattttcctggtttggattggtcggaagctcctcaaccttggaatccattatttccgactccagttgaggctttaagtctttgggaacaaatggaaaatggttggtgcatttgaatattataattttggaaggatgaacttctgaactcaaaagggacattctagctggaaagaaatgatccattctgaaaagggatctcactaaaaagccaaaggtttgtgaaaaataataagcttgagctgcccttttatatacaaaatctattgacaagaaagctaaagattgggaaatctaacggttggacgatagtcaaaatatgaagagatgattcataatgatccttgaaactgtacaactgccagaattaaaggatgtgttttttccaagaaaggattttggcaaaaatgccctctataattattaaaacgctctttttactaaaaaaactttttaagggacaattgttatacccaaaattcggctgccatctcaatgaaggacacgtgttaggatgaaggga

SEQ ID NO: 340934 - DNA, 980 bp, Cannabis indica
gaagtgtctgcagtccagtataaatgatccccacctgaagtgagatgaagaggaatcgacttgattagagcttgatctcgtgtgttgaacaggtcagctagaatttcatcatcccactgtaaactatcattaaccatcaaattagatacctttgcattcaaaagcgcaggatggcaagaagttacaatcggctccgcatcatttggtaaccaaggctcccccaacacatcaatagttgagccatcaccaatatgccaccgaactccttgtttaacaatagcttgggcctcccaaatacttctccaaacatagctggggttattgcccaacttagccgaaaggaatgaatcattcttgaaatatcttgctttaaaaacacgagaaacaagagaatgtggttgagtcataaatctccacccttgttttcccaggagtgacaaattgtgatcccgcagactcctaaaacccaatccacccacgctcttgtgcttgcttaacttatcccaagacatccaatgaatccctttgtccttggaatttgatgtcttccaccaaaatctagccatatgttgttccatgtccctactaatgtccaaagggagaagaaatacactcatggcatagcttggtaaagcctgagccacagtctttataagaatctccttccctgcttttgaaaggaactttgtatcccaattgtggactctctttctcaccctctctttcagataccccaaaactgcatttttgttccttcccatggtgcttgggagaccaaggtaagtgctgttagcatcagctgttatcatttggagaaagctgccaatttgagacctcacatgatgatcagtattaacgctatagaaaatagatgatttccttaagttaacctgctgacctgaagcattttcgaacatatgaagcatttgttgtacataagaagcttcgttcattgttgctttacaatacaaatagctatc

SEQ ID NO: 340935 - DNA, 750 bp, Cannabis indica
tttatttattttttatacttttacttctttttcaataatagatgaagaaatcatgaatgaattaaaaaatgaagaaaaataagaatagagataacataacaaaaaagattgtggaatagttcctccaaataaaaaggtctccaaaagttattcctggaaagttatatgtttcccgaatgttgttctttgacagctaacctatccatttggatcagaagtcttgtggaatggtagttgtcatccagatccaaaagggagtttctggatgactatcatgtccactctgggtgtagacttcaggaaagctagtcctcttcaggaagggagttttggatggttagttgttcctcttggaatggagtcctgaatagtcgactctagttggctttatcctatttgtatgcttcttcagcgagtacctttggtctgtgtttctggaaactctcatgcatgttcccggaagcacatttacttatgctgatgcagagaccttgctcaaaggagagtttgttaagttagttattgcctaactaacttaacaacctcgcttgttgcagccgccgaatttagaatcttgatcctaagcctataaataccactaacacttattatttcaggcagaatgatcagattgagttaagataaagagagaaaatattaagcggtagagtgagaaaggtaaagagaaaagggagagagattggatttgggttttgtatgaagaatcttctgtagataaagaagattctt

SEQ ID NO: 340936 - DNA, 1052 bp, Cannabis indica
ggatgttaattcaacatacttgttagtaaatctagatcttggtgaaatattcccaacaggaggaactaccagagtactatggtcataccgtacaactaaaaaaacagcaactggacagactccattcgctatggcctatggctatgaagctatgctacccgtagaattgaaacctccatcccacagaagattggcctatgatcaagaggctaaccatgccctcctaacagaatcacttggcgaaatcgaagaaaaacgagcttcaacaaacctaaagttagtggcccatcaacaaaaggtagttcggtactttaacaagcaagtgaagccacaaaaaatttttgtgggagatatggtcctcagaagagtatttctaaaagacaacacggctggtgtgctcggagcaaactgggaagggccatatcaagtggtggaagttctagaatcaggagcatataaacttgggcagtatgacgaaattatggaactcattctagtaccaaggtatttgaatggggaacatttaagaaagtaatatcagtaaaagtaccaggtcggatgaccactctaagtacaaaattaaagaacatttactctaagtaaatggccttctgggcggacccctcccaaaggttcggatgaaatgattaagtactcaggttggagggccacctttgaaagtacaatttcttttaagtgaaatttgttttgtttaaatttagctaaatatcggattagatcaatataatagcttttatgtaagttactacggtaacaaaaatattccgaccaatgaatgaataaagatgtctatttaaattctgattatgtcaattatattagcaagttataaatttaccattaaatgcgtacaaaggtctgctcgaatccaaagaaccaaacaaacaaaaaaaccacacttgtgaaatacaagtgaccaagagtcaaaagtttgctcggtcacttggggccacctatactcgtacaaagcattggtaaaagtaacaagctcaaaaaaaaaaaagcacagttgctgttggattttatgccct

SEQ ID NO: 340937 - DNA, 525 bp, Cannabis indica
taatatctaaactaattttaaaattaaaaaaattataaaattttttattctgacaattagatttttgattgaaaattcagattctacacaaaattctaccaaaaattggcttttgtttcaatgaaaaacgatttttgaatcaaaagttatgacgaaaacaagtttgaggcacaggggtatgcattgcatacccctgcgcgcgcggattggggtgtctgaccgagcatcaaggctgcatgcagcctatctgaccgagggacacgggcgggacaagggtatgcttcggacaaggctttgtctgaagggattttgtcccatgcgcgcgcgcgagtgtgctttcaaaccctgatattttcgttcaacttcaaaaaatcataactaattcataaaaaatccaaattaggttctgtaaaagcctaaatttattatttttttgtctactttccagaaaaaataattccagatcgaaataaaaaatatttcagtaacatatattacgatttctaaactatcatcaaataagca

SEQ ID NO: 340938 - DNA, 609 bp, Cannabis indica
attaagatacttagttttaaaattaaatgcattgaattttactatgtttataataatactcatatattaaattttaaaaagttattaaattaaaaatctaattattaaataattttttaaaaaaataaaatttaacctttttagctaaggtacttagttttaaaataaatacactaatttttaatttctttgtaataatacttagatattaaattttaaaaaatattaaattaaaaatctaattatttaatatattttttttttcaaaatataaaattacacttttttttttttaattaaattacttagttttaaattatttaataatcaaattgtttaaatttaaaattaaatttcatgcaagttttaaaataataaattatctaaataataatccattttaaaattttatttttcaataattttttattaatttactaatttattataaattataaatcaaagatcttaatcttgagatggttaagttctggcttaactgtattgcatgtgttctttaacttgttcgttatagcttattggtaggcataatacttacatctttgcaacacaatagtacaattgagtgagagcgttaatcatagaaat

SEQ ID NO: 340939 - DNA, 1023 bp, Cannabis indica
atcttggtgatgctctgctacagaaaggaatcgagggctaaagatctgaacggaaggagtcattatattccactgcacccaatgtaaggtttcttaaactcttatgtgtttatttcattgttttagaattcatattagggtgttaatgaaatatacttgttagtaaatctagatcctggtaaaatatatccaacatttgtcccctgtgccgccttggctgaggacacctcacgttctaacttagcattcctacgctgcgcctcttccagacggtgtctcaggcgacgacttttcgtttcataagttctttctctcacagattggacaccaccacgattgagctcttcatccctcgttccgggtttctgaccattcccacactgagtttgccttgaccatgttgtctgcatactaggaccaacgtcgggttgagttctctcggaacgtgtggtccgcgcactggggccaccctcaggttgagccctcctagaacgggtggtccagctctgagagccgagggtgcagttaaatccttcaggagccccaagtgactcaaaaggtggtggaacccccacttttcctactcttgtatatgatagggatggtggtgatcccaccactgatcagaagaggaaagttactcctgcatctggtggctcagggcagagtaagtgattccatgggaaccagggcagaggcagacgccagggttactcttaccctgaatgcccacgttgtaaggaacatcatccgggagagtgcaatcggaagacttattttcagtgcgacatggtggggaacttcaagaaagattgccctcatgcaaagaaagaagagcccagtcagaggcaaaacctgtacctggtctgatgtttgctattacccaagctgatgctgcagccagtccttctgtggtaacaggtcagcttcttgtcaacaatttctatattgtattatttgattcgggagctacacgctcatatgtagctacgaggttaattgatcttttgggtaggccttgtg

SEQ ID NO: 340940 - DNA, 704 bp, Cannabis indica
ggcgaccggtggtaggtcccggaagtcgcaggcttgatacctgccaccaccacgatgtgttccagctggtgggggcaagtcagggtggagtgaagctcggccgcttcccaacccttagcacgggacttgtacccttcctgggccacttggcccttcataacttcctctagtgtagccagacgcttcccttctttctgtgaagatttggaaccggatgcagacatcttagttttgaaaaagactgaaaattccagcagtcaggcaccagaccaaaccctaagtcaaaaaagggaatgggggtcccctaaccgctggaaagaggccccctccggacatttgtcaaaaagaaagccttagaaggtttttccttgacgaaagtcgggtgcaagaatcccacagatggtgacattgtgaataaacaaagaaaaggaaaaaaaaaagggtaaaaatcgagaagacaaagtcctctctgaacccttgaaggtcatcacttgaagaaaagatgggtccttaaaaaaaatatacgtagaatagaaacaactcgaacaccagaaaagaggaatctaacgtgttacacagaaactcgagacagaaattcctagaaaactcaaacatcaaacccaaaaaaacagatgaacagtaaagcatgcgatgtacactaacaataaactgaagtacgagatgcaaagaacttacataaagct

SEQ ID NO: 340941 - DNA, 560 bp, Cannabis indica
taaatctgaatatcttttggatttaaaatttcaaaattaagttgaggaattttaggaattggttattaagattctttagatattttttaagttgatattttttcaaatattaacttaaaatggaatattttcaaattaagtggttacaacttaattttaatttaattaaatctaatagcatggcttaggtaatacgggtagataagaagtcatttaggctacattataccataagcaaaattttacccaacaagcaccctcaattacccattatttcatcccaaaaaactagtaagagattacacttttctttttttcctacgtgcctacctcattgttcacatttgtttctcaagaagaaattgtcacatttattttcttttgtttttttttcttcttttcttctttcttttttttttttttacaatagaggcacaacacataacaatttttttctcaatctcttactttcaaacttattcccccactttcaacaattcattccccccccccccccccaaacttgcgtaaaagcttatggcataataaggtatgttgag

SEQ ID NO: 340942 - DNA, 994 bp, Cannabis indica
ccttgtatgactcatgctttctcaatcatcactacgtcgaggtctatcccctcctcacgtagatcgactgtgatctcaagatgtagtatgtcccgagctagaacttgcctcgtcatgtacgggccttctcctttgtgagaggtttgatacatgtcccctgttggggttggtatatacgcctcctccttatcagtgcgagaaagacgttgatgatctctcggtggcaatctacttatcctaggttgagtcctaagatttctctagttaccacgagggatttcttgttccctagttctgggttatcttctgcttgcatttttacgagaagactctagaaaatcattgttttaattcccctaggttgtgaatccctggggtcttcgaggcacttcttgacgaggtgcctggtcatttggttgttcatctttaggaacatccccaatttccccaggttgctcctcctaagtgttttgggaggtttccttgagctgtatctgtctcctggttcttgagccccgaggtctaactcacgatcttctcactctaggatcaggttggttctctgtgttattttcttgtgtcaccctggctgcggctgcctccctttccaatttagaatttcgttggtttgccttagccagatgttgccaaagttggcgattttccaactcgaccaaccggtatgtatctagtggggtcataggcaccctcactcataggcatagaaccactagcattggtgttgggtacctcatttcaagtttctgggttttaatcatcatcacattagcttcttcttgaacatgttgatcatgttgaatgccttgttcgtgaattgggtggcctttatgagcccattggctcttttccaggacgacgattagtctcttaaagatgagtgatgtcactttccccattatcagccatggagaagaaattccttctttggttaggagggatttttctgagcttttatcacgtaggctctcaatga

SEQ ID NO: 340943 - DNA, 501 bp, Cannabis indica
tctctctctccctaaccctctctaatttttcaaagctaaattggtgagaattgcttgatgttggtgttagtttaagctttgtaattgggaattaagcttggttctggcttgaatttgaggtatttcttttcctcactctttaattttgagtttgtaactgagtttagaattgagaagcatgctattttaagctttgaatgttctttgttgcatgttaagtgaattggtgttaatcttgttgaaattgagcttgatgtggttgtatgttccattgttcagtttgggcagagattttatgatgttttctaggaagcaattttatgtgttagcatgtaacaccctaactaccttagcgtattacgtgattttttaaacgtactgtgcagctcgttgctaatcaacgaggttcatggaaaaacgtgattaattaaaattttgctttttgattaaacttgtaaaacatattacaaaagactcgggatcccgattataaaaatattt

SEQ ID NO: 340944 - DNA, 700 bp, Cannabis indica
aaaaattataatttattgtaactaatgtatttttagtcataatacttgttgttactaaaactaaattagtgacaacttgtatcttaatattatgttttagtcacaagtaaatttttattgtgactaaaaattacatttagtaacaaaaatttatgttgtcaacgaagttcaacaagaatttgtaacactacaatacaattactaaaatattaaacattcatttttaaccttggtaggtgcaagactttctgttgtgccccttggcaccacacttgcttacaaacagttcagtttgacttaattcttccaaccttttccttcttgggttgccctattagtttcttctcaacagacactccaactgttatgttctatatgtcatcaggcaattcccaatcatcctcattacaaattggcataattgtgtcttcatatgtattcctccaatattctattgtgtaatatggtgaacacagtgcgtacatactaatactttgttgctgatcgctgcaacacatgcatgaggataaggaaacttcataatctgaaaaaagccggaagtgtcagtctgttcctgcaagtccactacaacatcggtctcaactaatcctccagggtggacattcaacgggtaagatccacgcgtgtcaacgttcaaataccgagatttctcaaacagcaatgccaagtcctccttcat

SEQ ID NO: 340945 - DNA, 953 bp, Cannabis indica
gcaaatttcgcaacaccaaatgtatatgatattattaataacaagaagaaaactatatgaagaacaactgcgagtactcaacctagagtggcgagtactcaaactgggaatgagaaatgcttaaaagaaaactggaaataacaataagacagaggattatagtagttcagtcagatcacggtctgcttagtccactgtagcaagagtttcgtaggtgccatttcacaatggatcacccctttatatacaaagcaggtgtccaattagtatacaaggattgcattcattatcaatccgtttttacacattgaattacaataattaaattaaacaacgttaacatcaataaatgaacggcagttactaagttcatcaacgtatgcgtcctccgaatatgcgagttgtctgttcatattccgatgttaaactcgcaggcctatcatttaattacgtttaagatgtctgcgttcttagatagtcgcctttgtggacatcgcatgacgagctgacagaagctagacatgcgagtctatattggcttgtcaaggctgcggggttcttgggaccaactcgcatttatagaaagttgatctccacgtttatacaagaacatggaaaggatactcgcacatagttcgatatatgcgagttattctcttgtcccacataatacgagtcataatcatgccatcagactttggtcatgctcgctgtatctccctaattctatcttgagcgaggtttaaaacttcgaggaatctcccatggacgagtcaatttttattggaaatctgagtacacgtttcctctacacaggagtctggtctcgagtttctaggtgagagaaatctcactataacacatgcccctagtttcacgatgtgacaggtgcggtcacaagggaaactatactcgagagacaggtgaaaggttgtcacgaggaggtgaccttt

SEQ ID NO: 340946 - DNA, 577 bp, Cannabis indica
taaaaaaggaatgtctactatttaattaattattttaagaaaataattaattattttaagaaaatagttaattaattattttaagaaaatagttaattataattaattaattctagaaaaagaaagtctacctattagtaacctgctattacaggtaaaaaaaaatgtaaccatatgcttacaataaaaatgtaaccattgaatagtcaccctataatatattattattattattgtaattatttgtctgggattgaatgaaggagagtaaacgtattacaatatatctgaatatactccctttacgtaatttccttttatattcttgactattgagaagtgtacaatttgaaaaatcaataatatttactgtaaaatttagagcagatatctaagaaaataatttgtgtacatttaggtataatcaatgccaaacaattaataaaggtaattagtggatgaaaagatcgatgagagattattacaatatataaaactgttataaaataatataaaataatataaaatagatgagaagaaagaagaagaagatgaagagagaaagagaaagtgaatg

SEQ ID NO: 340947 - DNA, 681 bp, Cannabis indica
atgccaaatcgaaaaattatggagttgtagacaaactcgcgcaacttagtcgctgtaatggttgcgagtgctttggcttcggcccattttgtaaaatagtctactgcgactactgcatatttgaccccgccttttcctttaggtagttcgcctattaagtcgatcccccatactgcgaaaggccaaggacttgtgatggaatgtaggttgcttggaggttgatggacatatgcggctattcgctgacatttgtcgcatttctttgcaaaagcgaaagcatcttgtcgcaaggttggccagtagtacccctgtcgcatgatttttagagcaagggagttacctcctgtatgattgccacaaatacccccatgtacctcacgtagtatatagtgcagtcttccccgtcgatacacttgagtaacagctgactaaaacttctgcgatataaccttccatcgtatatgacatatcgtgcagctcgctgtcgcagttttcttgcttccatcttgccatcaggtaagatgcccttttctagatatgcgactattggagtcatccaggtgacttcttgagtggtatctatttccatgattgcttcttgatttatcattgggtgagccaatacatctaccggaattacatcgagcaattcggcttctctggttgaggccaaacaggcca

SEQ ID NO: 340948 - DNA, 657 bp, Cannabis indica
ataagaacaaatcacacaatcagggaggaaaaataataataacattaactgaattagagaaacgtcatctaacaatcatcatatccctgacttgggaatttagttcatgttcaaatccatatcaatactaaagcagaatttaacataaaataaataaaaggagaagaagaaagaaactgttggtggaatgaatctgggccgccactctgctccttctgccgttcttgaatgctttttaggtcaaaaattcgcttcgccccttctctttctcgcagtttcctttatatttttcatcttagatttcaaaagacaaaattggcctccaactgtacggaacctcgtcgcggtgagtgttgctttggccgcggcagtggagtagctcgccgcgactactgggccagtctcgaaagcttctttctgcaaaatctcggtcgcgactgttaataaattcgtcgcggctagaagtaaaccaaatcatgattttccaatttttcttggcttgactttgccttttatcatacttatgaaaccttgacatccacagctatgggaaacatgaaaacatagaaaacaagcgtaattctgtcttaaaacatcgaaaaaacgactctatttgtgaaccgaaacataggctaaaaatagcctaacaaactcccc

SEQ ID NO: 340949 - DNA, 1075 bp, Cannabis indica
aaacaataagattaaggaatagcggaagcgtaccggagtccatagaatcgatctttgattggtatgatcttccaattttgcatcaaaacctttgaaaccttattttcttgatgatggggattcaagaactctggaaaaatactgatacgatgcaaaatggggaccattacccgttatattaccaacagacaaacctgttggcaatatttttgactatttctatttggcccctcatcaatatagaaattgtctaattagtatccacatattaaaatcataacaattatgcccttaagtcataaattttattccaaaatagaccacataaatttgacttatttatttgatgacccaacacacattttatatatacaattgtgatcccaataaattctaacataaagaacttactaaaagcgctgccgtgtcggaggtgtgaggaagctgaaatattggcggtgatagccgcatttcacgttatagattttcttacgtttttttttttttcgtagaaagtagattttctacattaattacttaataattagttattattattattattattttggaagaaattaattttatttttattataagtcaactttttagcaattactttatcgattaattcttttgatcttttcatactattcaaaattgaggagctgatgagctgtttattgtacaatatattattttttttccaattttttagtctatatttattctcatatttaacttatactagttagaagttacgtgccgaggcacgtaaatattagttttatttaaagcttttgtgtttttgttttttagatgttgataactaaatgtataattatatgaacgatgtgttttataaaagtaaattgtatatcattgtatttggtaagtaaaacataattgtatatataaaattataatatgtacattgttatctaaagtattatttaaccagtaaaattaaaatattaatacaggcataattataacacattgttacaccaaaaattaaacaacattttgcattgattggttatttttttctatagcattaaaataagcatattgc

SEQ ID NO: 340950 - DNA, 1047 bp, Cannabis indica
agcaaaaaaaaattgtgtaattttaaaaaaagaaattatttttgggcccctggactaggtgggccctaagcacaggcctagcccacctatgcccaggaccggccctcactataactatgaattcataaaattaaacaaatgcaatctatataatatatagggtttttatatatatatactaaaaatagcaaaaaatattatacaaatatattagacaagcactataaacttcatacaacccaacaacaaaattttacataaatacttcttgctctaactatttagtctcattaaccaccttcttcaacgacaactttcagcaactctaaactagtaggccaagcggaaagaaaccaagccagacagagaatcaccataaagtttggcgacttcacctgagaagaagtccgtaagaaatccaaacatatacaatttcatttatgcaaaatcgtgcagaaaaattggttcgaaactaaaattcaaccctaaattacgattaattagatcgcagaaaactaatcctcttaatatcaattttcagattcataaaaagtaaatctttctgaaatagatttggagttcctgatcaattcaaatcaagtataaactgaagaaaaatgtatcaatacactagctaatatttactctgttgcattaattaacgttatttttagattttcaatggtggatttattcatatcaaattgcgaataacaaagaaaatttgaattcatctagatccatgtacatagaaacattgttctagtttttaagtttctgcgtagttgcattgcagttgcattaacattttactaatgctctaaaactagacatatcaatgatttcaaactgtcaacgataaatagtttttatgatatttgcaggtgtttcatatccgcaatccaacacaaagctctttaaaaaaagattacaacatggttagttttattaatatattcatttggttgttacaaagttggtttacagaattctaacagttgtttctccacataatattattaaggtacaattggctgttgatcagtg

SEQ ID NO: 340951 - DNA, 788 bp, Cannabis indica
aattaaccaaggtagaatttaatctaattttcgtaatatcaatttttaagcaattctccggcaacgacaccaaaaacttattacaaaaaaatatgaacagctacacaagtgcacgtaatcaagtagtactcatacaggtgaggtcgatcccacatcaaattgaactgaataccactaaattagacttatatttcttctatttggtaaacaataattttgatgacaataaaaataaggaatacagtaaaataaaattaaccgataaaagtgtttaatcaaggataaaaaattatgaaaaaggatcctgttgatttaattacccaattgttaatgctaattactatttctttcttaaagtgaatgacagattataaaaattaacctaactctttttcagatcttttgggtcctaaatcacatcttatctaatcatctctgaaaaagactaacatataatcaacattaaacaataatctcaatgtcactaaggtatgcaaatattttaatttcacatcaaaaccttgttccaattttagcattcccaacacttactttttagattttgaattgggatcattaagcatgcctaaagtgatcaatctcaaacatagaattaagcacaaatatagataaattcacaatcaagaaatgagaaataacaattatcattagcttaagaaataatgtcaatcaacattcatcatctccccaaataggagtttagttcataatcttcttaatcaaattcaaaatagaaattaacatagaaatcaagagttaagaaagaa

SEQ ID NO: 340952 - DNA, 677 bp, Cannabis indica
ggtccattttctctagtatatatcttctttgtcatagtttcatgcaattttacagtccataatgcttgttttttgaactgcgtaacgtctgtctttcatcttgcttattctaagcttcatgaaattttttgccctaactcgagaacatttcaaacttctcaagtttgacttttcttcgaacattcttgttttttaatctgttgagtactcctggtcggcatatttgcttgtttatcgttcgatattccggccaaacactcatcttgtgtgttatcttttgtagatgaatccaggtgagttttgggagagcgaacatcggatcgaccacgacctgcttcaacttttgcacgaggatcatcctggtcttcgttctagcccaccttcttctagtgaaggacattgtccaattcttatacccagccatagaatgatggctcgtacaaagaaaacaacgtatctggctgaggcatctgatcctcaagtggctcggcacgccactctgcccagcgtcgaacaggatccagtcgtccaggtggaggtggatcatgaaggggacgctgaagtccagcaaatcgaggagcaggacgatgttcgtcctagcagttccttcgaggcggaggaagaggcagaggttgaacccccaaactacggggagtacaatgaggctggggagccag

SEQ ID NO: 340953 - DNA, 423 bp, Cannabis indica
ttttttaagttatataggatctagtatttaattacactaataacagtataacaccgagaatagtacgaaacactaataatatcttatagcaatactctatattaaatgaagttttataatatggtaagaaagaggaaaaacaaaaatgttcaactgtacttgtaatcattaaattaattcaaataaaatttcatgccgagactaattaatattcaaacatatattaattattgtttgatttcattaattgatatttataatgaatatttatacatcaaaatttaaatttaaaaaacatcacaatttttttccaaccctagtggttgagctggccccattggatcagattgggtacacaatataatatgaatggtatgtacatgggccatgccataggcatgttaagatatcgaataccataca

SEQ ID NO: 340954 - DNA, 752 bp, Cannabis indica
attactattttattagtcacattagataaaacttattagaaatcttatatttcaccactgtcacatagttcaaagggaatagtaaatgaatatttcaaaagacgatttgataatcgtattaatttgagggacaattcttatacatagcctttaaattaatataagaaatagaatacacctatagtatcctatacaacccgtatataataatatacatctatttatgtacattgaagtaaactaaactaactatatttcattaataattaaatttaatttttataaattatatatattaaaaataattccccaaaatattaggaggggccatggccaccccataccataacatagttccgccactaagaccggccctggtgttatgtgactttatcggaagtcaagatatgctttttaacatacttttataagtgtttttttttttttttcttagataacttttttttttattgtctgttgtacttttttattttatttttattttattgtttgtattgtaatcagtatattttttcttcccatgcaggaaaaatagtctttactgctccatctcggccacttgtcacacagcagatagaagcatgccataatattgtgggaattccacaggtagcgcttttttaactacacgaacagtgattcattcaaatctggtgttcactttcattcttgttataatttagatgttaaaagattgggataaaatgattgtaggagtggacaattgatat

SEQ ID NO: 340955 - DNA, 518 bp, Cannabis indica
tcctcatagaaggcaaggtgcctggggcgccaggtgggtaaaacctccgtccagggttactgaggcacgccttcggactctcgaccagggcggatacctgggcgaattggattgctacattcccgcccacaacaatcaggccataaaccctgaaagggggatgtgcgcctggtcgggtgcccattcccagcaaggggcgttgatgcctttgcatcaatacttcaagattgtggcgataacccgatcggcttgcatcaatacacaccccagaccctgtctggatgcatcgcaacaaaccacaaacttctctttgtcagaaggtaaagctagcactggggctgtaatcaacctttgtttcagctcctgaaagctagcctcacatttatctgaccacacaaaccgctgattcttcttcgtgagttcgatcaagggtgttgatattttagaaaacccttccacaaaccgacggtaatacccggctaaacccaaaaagcttttaatttctgtcactgtcttcg

SEQ ID NO: 340956 - DNA, 923 bp, Cannabis indica
gaggtattggccgttccaatatcggggtactggtgtaaggttcatgttagagtcatatcggccgagcctatacgtgtcgggggtacaacttctgtaattttgtatggaccttcccaatttggccccaatactcctactgttaggtctttagtgttggccaagactctgcgtagttctaaatctcctaccttgaagcttctttccttaacgttggaattaaagtatctggctactttttgttggtatgctgctaaccgtatttgtgaggcctccctacgactctccaataggtccaacgattcacccatcagttggtgattactgacttggttgtatgtcgttcgtcggtgggagggtgggtctagctcaaccagtatcatcgtaccatacccataagcaagggcgaagggggtatcaccagtcgctattctttctatcatcctatacgaccacaaaacttcaggtaattgttcaagccagtttccttttccctctttgactcttttcttcaaggtgtccttcaaggtcttattcaccgcctctacttgtccatttgattgggggtgcgagactgccgagaagctctttcctatgccatgtttaatgcagaaatttgtgaacatgacactgtcaaattgggtaccgttgtcagataccaatttatggggtaatctaaacctacatataatgttcttgaccacaaagtcaagcaccttcttggatgttatagttgctagtggttcaacttctgtccactttgtgaaatagtcgaccgctactaccgcatagtgcactcctcctttgcccttaggcaactgaccgatcaagtctataccccatatagcgaaagaccatagactctgcatttgtgttagctcgttgggtggagcccttggtatttttgcaaacttttgacatttttc

SEQ ID NO: 340957 - DNA, 1028 bp, Cannabis indica
tatttccttgtagctcctgagattgatatctcttattctcattatcaataaagattggtggcaatacttttaaattggagtatgaccaagttcacattaaacttaggatcggaaccagtataaatctcttgtgttattgtatctgacaaccatttaaattcatctgtgttatatttttctagtttaatgtgtttgctagttttttgttcttgatttaatttttgtttgttttaaaagtgaacttgaagttagaattacagaggtttttccatgtattagagctaaatttcctacattttgtttttgttttaactctcaaatcaatttaattaattatatttttaaatatttttagtttttaatttattttagttattagttttagtttttgcaataattttttttttaaaaaaaacatgagaataaatttggggcgtacatgtgtatcgttacttacctaaatggagtgggaataaacgaactcacaagtttggcgagcttgggtactttcacaacaatttttcgagattgaaaacttatctgcaacaaagtaaatttttttgggacttatgcttcaattttccttaacttattttatatttttattaaatttttaattatttttctttattttttgagtaaatacttatttgatacgctatgtttaattaaaatacaaacttagtactttatgttttcaaaaatgatgtttgagtaccttataattttaaattatacccatttagtactcctaaacttagatttggtcaacaatttttttttttttgaatagacttaagtgtccttatttacatataattattataattaagttattataattaatttagataaaatatcctaccaattattaaatatatgaaaattaattaaaaaataacaaaaaaaaaaaagaaagaaaagaaaatccttctatctttcgtttggatcttaagagagatccaaggtttgttttaccgtctttcaacttgttaactaaggtgccgtttggtaatatttttgttttt

SEQ ID NO: 340958 - DNA, 1213 bp, Cannabis indica
acttttttttgttgttttcatgttgattatatagaaactagtaaaaatataaaaaaaaatatttaaaccgaaaatatactttttttttatatagaaaatagtgtttcatgtaattatcccaaaaaaatatttgattatattaatggtcattttaatattttattacaaatgtataaaaattattattttttattcctttattatttaattaatggtaatatagttaataaagaatgtaaagtttagtaaatattatagtaaatagaaaaataatatttattgtggactaaatttagcacaaagctatattttgtgctaaattttatacaacttttagcatgtgctaaatttaacacactttttaaaacaccattaaaataataatttttctttaagtgtggtaaaatataacaatataccatattttcaacactccattagagatgctcttagcactcctcttaatttatacctcaaaatgataagcaaatgttttatgacagaaatgctgaacaaatagaagagcatcctccttcatccaccctgatattttcttcagaagctccttataattcttcatatgctgtaataatcatattactatcatatatagcacaaatcatagtataataaaacctcgataaataaatacactataaaaaataattctattttttttttcagttggctagtttaaatagagattcacctttaaattaggaaaattgtatgtattggcatgtctcatgtgtgagattaattacacataaagatgttgtggtataattcttctaaatgaaaaggtttttgcattcgtcagttttatcgtagtcccaaaaggagtcttgtggaatgatagttgggtccagaagggagttcccggatgactatcatgtccactccgggtttagtcttcaggatagctagcccttccttggaaaggagttctagctggctagttatccctcctagattggtagttctgaatagtcgacttcagtgaacttacatcctatccggaagcgtcttcagtaagtgcctttcgtccgtgagtccggaaactcattcatgatcccaaaggccccagtacttgtgttgacatggagacttcgctaaatgaggagttgattaagttagttatttctagctaacttaacaatctcatttcgtgcagccaccgactttaggatcttgatcctaaggctataaatac

SEQ ID NO: 340959 - DNA, 907 bp, Cannabis indica
aagctgcttgtgagagagcaagttactttatttaacatgtcttgacaattgctcaatcattgtttccaatgactaggataccatctatgtaaattaccatgtatactgcaagtcataggctttgatgttctcatcaaacccttggtactaggaatggaaagtttgtttaagtccattgaatagactaagcatggttttctatcttatccttgtattctaaaaactctaggttgctcaatgtgaatggttaaaccatagttctcttagctttgattctttgttccttattttgactatccgttgcttgtttgaacaagtaatgaatcgtcaacactagtgtcatccaagtcataataaggtgagttcttagaaaccctcccactacgacaaggtaccatgattatgcgtctaggaacttcagtagtataggcctcttcggtagtatcaatacaacagaggttgtgggactatcttatacagtataagatgatggaacacttttggatatgaatcaaatagtatctccacttgtttgctactttagttttgagattacatctacatagtcatagtatttttgaaaacaaacactaactagtcttgatgaccatagtgtagtccacccctagtcagtttagaatagctatcaaacatgcaaaccttagttagcagttctagtttttcttaaggacataatcaagggatccctagaattaattagaggtgttcgcgatgcgggttgtaaccttttttttcaaaccaaaccgcatatgcaatttttgtaatttctcaaaccgcaaccgcaccacaagatcttaaaactgcaaaaactacaccgcaaaaatacagtgtggtgtggtgcggtttgagcagtttgcactataatcattatcaaatattataatga

SEQ ID NO: 340960 - DNA, 665 bp, Cannabis indica
ttttctttctcgattgttttagaatatttaattgagggcagaggtgattcaattgttttaggatatttaattgaggtgattgttaatatcagttcaaatattagtaggatttgttttattattattttattatagataaataatattttattattttattaaataaaaattaaaagttacccataaaattctcaaaaaccaagaatttcagttatataggtatactttatatagaatagatatatagatatatagatatatagatagatatatagatatatagatatttataaatttattttttataatattagaaaaaaaaatcacacaaaaaattgtatatatagatttgttattttatttttaatctatttatccctcatttatataaatcttaaccttataatatgtaactaaaactcttttttatttaccaatactatggatctctatcgatctccattattgctctttctatttgtcaatattatcattatagccatatatgcataatatattatttttcttttgtattactctattttttttttcatgcatactatattgtttttcttttgtattactccattgttttttatttctttttcttttttcttctcctttagttataactgcattgtagttatgggcaaacatagttttaa

SEQ ID NO: 340961 - DNA, 482 bp, Cannabis indica
atagcgaggcaccagagaagagtgttgcataccttagcttccaataagcaaacgaagggtaaaagttggatcggctcgaagatcaagtatgcgagatgaccatctcactatgagaagacttccttcatccaactaacaagaccgaggctcatacacctggcaagttagaagatttatttataccagtgatcgacatacattgtcgacctcggaaagaagaatggtcccagctcaccattgggatcactataatcaagtttctgtcgagacatctttagattcaacaattaaagacgtgtttaatacacgatatttttgaccctataaaagcgggtaaataatagttgtgcgattttcaaaatcatacaccgcatttacatttcgtgatatgtaatcagatcccacgattttagggataatggctgtaaacatactttggtcagctttgtaattaactgccactatgcaattataaatagtgg

SEQ ID NO: 340962 - DNA, 830 bp, Cannabis indica
taatatttttaattattaaataattagtttggcatttaaatggttaaattaggaaaaatgatattttgagaaaatagatgaataattggaaaaatggcaaaatcgcaaagtggggcccaatattcatggccgaccacttaaggaacaatttgccattttattttttcattattttaaatgcctaaataaatttaacctaaactctaggtggttccctataaataggtagtcatggcctcaaaggaaaagatgatgaaaacactttccttcagtcatttgagcctccttcactatacctatttcgaaaccctctctctctcttcctctcttcaaaccgaaccctagagtgattagagtaagtgcccacacacatcaagtggtactcaatcatagtgtgtaaggctgtgaagaatccaaattcaagagaaggagaatcaggctcagatcttggtgattccctgctacagaaaggatacaagggttagagatctgagcggaaggagccattaaattctgctgcaaccactgtaaggtttctcataccttttatgtgcttatttcatatcgttttagaagttcatgtttaggatgttaaaaaaaatataattgttagtaaatctagatccttgtaaaatatattccaacatatttagcattaaataaatcccgaaattcttcccaagtcattctggtgacatctttgagagggacaccatctcccaccacaccagagcatctttctgaaattgaaacgtggcacatgccaccctatcgttcccggtgactcccataaaattcaatatcctctcaatcacagtcaaccactgctc

SEQ ID NO: 340963 - DNA, 833 bp, Cannabis indica
gcctcaatttcaccataaaccacttgggaagcgcagaactcaagatacatatctttggcttcacccaagtaatcaaagttggcctgagggttagccttccagaagtcataaaagagctcaagaccggctgtctctaaggcatggactttctctcccagcctagtcacctcagccgtaagctcctcctccttagacttcttctcctcttccagccaacaaagaacctctcgaagggatattctttcatcttaaaggctgttcacttctgcagataaggtctcgatggtctcttcaagtcggtcaaaagccttgagatccttagtcagcacagttattttttttctgggcggtaaaaagcttcttgttgacttcacccagctccatctgaaaagctccaagttccaccctagcgtcctcagcgtccttcttggccaagtccacctccgccctcgtggtgttggatagagccgcgttactggaagcagcagacttagctcgggagtatgtgtaagccaacttcagaccagcctacgacgagaaaaaactttagaatccgagccaagtaaagaggattaaaggaaactttgaagaaaaacttacccttgttaattccttcaagaatcctcccatcagcagctccaaagaagagtcgttgtcagcaccggccagttgctcactaaccttaggaaccaaccggttcatgtagtgggcgagcatctccttgcctttcttggcctctggaagcacgggcaaaggaggagtaggagcccgcatctgctaggatccacccttgatcagcttgaatccacccttgatcagctcggatccccctt

SEQ ID NO: 340964 - DNA, 456 bp, Cannabis indica
tgtcatcatccgattggtccacgtattttgggcaaaatcaaggacaacagcatgtaatccagaatttcagttcaattacacccttgacagctctcaatttatcttcatttggctcacaaaaccatagaatgcaattaactataattgaacccctttatgaatgctaattaccaccatcaatccactgacccaaaattccatatgcttgcaatacttactattctccactaatataaattaatgcacaaccaagaatcagaaggtcttcctaggattgtaatgctaatgctaggcttagggtaaaggtagttgaaatggtcatttaggctgtctataccataagcttctccaatcatgtgacccaaaatacttttcacacaatcccaatacctatttttctaattgtatgagagatatatattttttttttcagtaagattgcaacaactttatatt

SEQ ID NO: 340965 - DNA, 474 bp, Cannabis indica
tggatgagactttgtctgagtttatgtccaaagcacaaaatattatcaatataaagatgcttatcagcaatcctttggactccttctggctatggcaccttccccatcttccccaagcttcatctcacaagtctcagtccctagataccagtactctctagctatttatggaccttctgcatccgaacaagcacctacccaaacttattttccaggtatagagtggcataaactagatgtatttttgctcccaaacaatcaaagcaacaagtagaagttccaaaatagaatgtaagccattcccagaataagagtggaaagaaccaatgaagcgagactttgaaaaaacaaaggaaggagtatgaatccaaattctctaagtaccctagcttaattgacaatggagagaatgtgtacaaaacaacctgtaactgatgtaaattattttaccctgatcttagatctactcacaag

SEQ ID NO: 340966 - DNA, 899 bp, Cannabis indica
atgctaaataccataccgcggcacctgggttcaaaatccagaaaaacagcagcaagaacacgaaaatcagctccaaaacacaattaaatcaccccaattcacaaccaaaactcccaaaccataaaataggtttttaatcatcataaagggagtttaaaacacatacttcatgcataaaattcacaatttcagattgcataaaacacataattcatgcctcaaactaacaatacccaagctcaagaatttgagctgaaaatccaacaaccacaattattttctagcagccacatatcaaaataacatgaatttcaagctagaaaataacctaaaatcgcaatccaagctcacaaacatgaatcccaaccaaatcatgaaatttctcactcaatttaccaatattaaactcaaaatcataaacatgcaactcaaagcttcataacccttttttcctcatgctcaataaacatcaaaatcagcaacaaaactaagattaaagcttttaaagaaactacctcagctccttgcaagtccaagaacaacaacaaccaagttctaagctccaaatcaaagcaaactccaagcaaaacacaccaattaaactagaattttcaagagagggttagggtgagagagaggtgcacaaccagaaattgatttcttttactctcaaaaatcaattttattaaacttagtaaataaaggtcaaaagaccaaaatgcccctagggcccaaagcatacatattcaccctcacaagagtatttttgtcatttcatgcataaataaatcccaattaatttcgattatcacttatcaaataaaataccaattaaatcaatccaatttgcatttcgggcccgaacccggttcggcccgaaatacccagttgtgactata

SEQ ID NO: 340967 - DNA, 722 bp, Cannabis indica
gtgtatttcatttgattttttttcctacatattttttggggaaacaattagattggtttgagtgatcatagtgatgatatttggatggagcgatgttaatgttgaattgttcctactaccctcaagaagctggccaagcccgctgaaaggcatttgggtggtggcgaccgtccacggtaaataacccttgcctcctttagtttttagttttgctttgttaaaatttttagatgcatttatattttgatatctttagattctctttttgaaactagaagaaactttattaacattaattagaacctgaatacaaaagcgcctgcatatttttgatatcattagatttaagttttagatttgcatactttcttaataaggatgttagttttttagttggtttatgtagtgggtgaatttctcttaattaacaacaattaataattatcaactaaagattcaaaagttattccaagtagagaaagaattagtttcctcattgatcctaatttggtctattattaactacaggagtttccaccaactagctaaggaaggtgttgaaggtaccatttagcaattgtcagcattgatttataaggactgagttttcattgatcaagctctccctgcaaatcttattacaagacaagtctatttggtataaatgatagataaatcatgtttttaagaattattataaatatctaaagtaaatagtagaa

SEQ ID NO: 340968 - DNA, 748 bp, Cannabis indica
ttccttgcttgtggttgttgcttaacgcttgccacttgaatttttggaatagttgggaagttaggcggatattctagtggaaggagccttcgctttgcccaaattttgatcaccttctgctcgttgaatggcttcttcgagcttgatgaagccttcgcctcggtcaaggaaatcactcattgagtctactggcccgttcttccttatatccttccaaagttcaccaagaactttaatgccccccactatcgcggaaaactttccatcctcggttacccgtaaaactttggtcgcttccgtcatgactctgctgatgtatgcccagagtggctcgcctggtcgttgctttacttcgaccgaatctcacaaatgtaatgggagctaacgcgaggaagagaattgtgcatggaattttgaagaaaaggtttcccatgaactaaactttctaggagccaacttgaaataccattgctgtgcagcttccgacagagtggcggggaagattctgcagcatacatccccccgtactccttgtaaatccatttgcatctcaaagtacttgagatgggaaagaggatcttctctcccagtatacatcttccacgttggaattttgaacttgtgaggcagtggcaggagattgatctctggtgagaagggagtttcgcgagcttggtgtaactcaagatcattgttacgctgtccagccatgctgtgaaacatattttcaattcgtcaagctcggcct

SEQ ID NO: 340969 - DNA, 1510 bp, Cannabis indica
ttgatccttacatagagtaattccatatatcttgacagtaactatcctttcttggaattcttcattgagaatctttctagcaccttatcaatataagttgcttgagaaagtgctaatgttctatgctttgtatctttatagattttgaccttgagaacatagcttgcctctcccaaactcttcatttggaatttatcgactaactacttctttacgtctgataatatttctacattatttctaataagtagaatgtcatcaacataaagaactatgaatacgactttattacctttaatgtatttgtatacacaggcttcatcttcgttttgttcgaagccatactctttaatagtattattaaaggtgatattccaagatctagaggctttcttcactccataaatagatttaagcaacttgcacaccttttaatcttcccctggtaacacatacccttctggttgttccatataaatgattttatcaagatcgccattaagaaaagcagtcttgatgtccattttccatatctcacagtcataagttgcagctatggaaagaagaatgtgaatggatttaagcattgcaacaagaaagaaggtttcatcatagtcacgccttctcctcattgtgtatagtctttggctacaagcctagctttaaaggtctctactttcccttcagcatttctcttcttcttaaaaatccacttacaccctttgggtgcatgtaatatcttcaggtagagtttcatattcccagactttgttggtgtgcatagaatccatttcttgatccatggcattgttccacttgtctgagttagggtcttccattgcttctttgtaagtcaatggatcgtccttgtctgtgtcagagacaataacatatgcttcatgttcatagcgaacaagttgtctcacaatcctcccactacgacaatgaacctatgtttcctttctggaaccttggtaaccactatcgatcgttcaactaatggtgctgaaattgttggttcaaaaatttgctcatttttaatttccttgatgaccacttgactgcatatggtttttgacttttcatgtagtcatcttcaagaaaagtagcatttgtcgatataaatactttgctgtcttgatgactatagaaataagcacctcgagttttatctgaatatcctacaaatatacacacttcaattctaggagaaattttcccagtctttagtttaagaacacgagcaggacaaccctgaatacagaagtattttaaactgggtttcgtcccattgtataattctattggagtgttgcttatgctcttcgagggtactacattcaaaatataagtagcttctagaagtgcgtatctcgaaaaaagttcagtggcagtgatgagtagcacatcattgatctgaccatgtctaacaagatctggtttgttctctctacaacactgttctactgaggtgtttgttaggttatttttagtattaattttagattaa

SEQ ID NO: 340970 - DNA, 1541 bp, Cannabis indica
catcaagaatctcctttctaacctcagtactacttggaacacaattttgagttttataaagtaacattctgttacccgacactgtaaaatctttagccatgcaagctaagacttcttctcagatcttcaccaattctacatctaccaactgagcacttttaatcctctccaacaagtctaattgcagtgttaaattaccaagtttgccaactccaaactcaatacctgatttgaccatgtcatcttcgaattgaggtgagatcataatcgtgcagaaaacctgcttaggaccttttttgcttagagcatctacaactacattggccttcctaggatgatagaaaatttcacagtcatattcattaactaaatctgttgacctcgcttttagtcaacgacagtgagtcaattatgaagcgattaagaatataataaaaatagagcaaaaactaatatgtgataaagaacaccagattttaaagatgttcgacccatttagtacggtaaaagcctactccccttagattgtattaactcgagaacaaagaacatagtgttttctctctaagctcttataatgaaatctctgagtatttctcttagatctctctctatagcaattctttcgatccatttttctagtgaagctagatcactatttatagggccttcatgcatgagggaagattttctttttgcttacaatgtctataataggaaggaacatttattacataaatagaatacacaaaataggggattgagaaagcctgctgtatccctttaattcaatcccatgattgtaaggattgtcttcgtgcttggactccacgatatcattagtctagtcttggtaaggagttcggaaagccaaacatgcccctactcgggtagtctgccatttaccttgctcgagcaaatagacgttatatgtgcagatgtgctacttgaagtcggttcaagatattcatctccacccagatgcaaggaatgtaggacacatgtcacttatatattttgccacgtcacagtgcaaaaaatgggataacattttccccccaagtatacgtgggacctttagggtcgcacatagacttcacttagtctgaatccttatctaaacgggtagcatgtgttcgaagtgtctgctgacaatccgatgtgactctgaccaagggtctcttcaatttttggctcattaatgctgactgacttatgcatcgaagcatgcctaaaaattagcacgttttgatggttaccattcaggtaattgagtgctcaacgtacacttttagggggaaatcgaggtattcaaattttgaaatgattattttgcctcactaattagcttataaatagggctgaaatccctaatcaaccacttttagacattttcattcttaaagaattagagcaagaaaccattttctctcaaatcctttaaagaatcaccaagaaacatcgaataacgtcatctgaataactctaaagctttgaacagtgagtaagttcttcatctttttcctcttttatgcttgaat

SEQ ID NO: 340971 - DNA, 520 bp, Cannabis indica
aaaaaaaaaaaaaaactacttaactttatggtacacaataattttcaatagacatcaaaaggtaaaaaaaaatcaatattttatattgaatagtgataagtacacacaaatttaaaatacatttaaatagtaagtaatttaattaattatatttaaaatgtatctcacttataagattctttttgttagggattcttgatctttgaagttgtatgacatttttttcttttttaataaaattattcattgctacaaaagtaaaagaaaaaaaaaagtcttaaagtgacttgttacataagtgtatgttaagtttgtacatttgtatgtgaatatattattactatttattgaatcgaatcaatttaactgcaaaaaaaattaaattagattggatgttaaaagttgaattctaattcaattggatcggttatttaatgtcaatctcaaaatccaattaaaatccaatcaaatctaactacatttaatatatactaaaaaattatctatatttatttatata

SEQ ID NO: 340972 - DNA, 514 bp, Cannabis indica
tttctttcgctctgggggtagaggaggtagggttttttgtttggttcccttcagcagggtaccttatagggctaggctccctagatttctgctgttgggaactaggcgaggacgtcgctggttccttgccaagtccagcggtcattgccttggggtgcacgtgaatgccagccgcctccatggctttttgcatggccagcatcacttcttgcattttctggttttgcgctttctgagcttcgatctcggcttcgtgattgatagctttttgtctgagaagcaccaactccgagtaactaccttcgtcgtaggcatactcatcgaggtttccctcgtagtcatcatctggaattccttcttcttcctcggaaccctctgctgctcttgaggctacatcttcctcattcgggtcttgagcatcttctagagggcgaggctgacgagtacttctagtctccaccatgtttgtgaagtcaagtgttcgtttacagtagctttcttcagctctcaatga

SEQ ID NO: 340973 - DNA, 761 bp, Cannabis indica
attggaccgaattctaccctttcacaagagcttttacgctgcaaaaacactatctataattcttgcaaaaagagtatcaataaactcgcttgaccaggttcttgtgatcttgatatatctcaaagaaataccaagtaagaggagtagatcattactaaatttgggaccgaacctctataaatattgtgttgtttattgcttttgttaattattatttatcaagcatttttcattactattttattgagtcagcgtcgttgactaaaaacgagatcaacataaattatcatataaaaacgatattttattctattattcattaacgtaaaaaaaaagtgaaaggtattcaatttgcatcaatttatcaattattatctaccacttcactcattttacgataaaattaaatgaaatgtaatgaaaagactgtgctactgtaaacgttatatttcgaagggtattatatattaataagtcgtatactataggaacacgacttgataatataaataatttaagggcaaagatgttttttttaagataaaattattgtataagtggtatgagaatttgctccaaaaagctttccaaggcagattgtgagttgcttgttgacaaaatgactagtagaattcgaatgtggagcagcaaaaacttgtcttatgcgggtaagattattctcatcaactcagttctcctcactatcaatgtttattggtcgcaaatagtgattcttcctaaagcaattatccacaaaatta

SEQ ID NO: 340974 - DNA, 660 bp, Cannabis indica
gtaaataaaatttagtaaaagttaatgaatcataatgattaatcgcattatagtaaataaaaaagtagcatttatcgtaggctaaatttggcacaatgctatatcttatatcaaatttggcacaacttttagcatgtgttaaatttagtatactttttagaacactattggagtataattttttttgtaagtatgttaaaaattaaaatataacaatacactacttttttggtattctattgaagatgctctaaccttacgaagaaggcccaattactatgaatatactcttctcaaggcaacactgcggacaatcaagctcgttgatgaactttagttgggtgatgattttaataatgaaatcaaagttagatctcacagatgtcttcacgccctaggtctaatccagtaaagcaaatcgatagaatgaacacgagaggcaagagctaatctatagtagtttcatctttcctatcttgcaatttgcaatttgcattaaggcaaaaggaaaattaagattttgctctttaactttgacggactttaaattatgttttttctctttaagatttttgtctaattttgttggtaagaaaagtttaatataaatgaatgttttgggaacataatttagtacatggatgtaacgtccccgcttca

SEQ ID NO: 340975 - DNA, 709 bp, Cannabis indica
tccaagagatcagattgccccaaaatacacaatatcctgaagtggatcgtctatctaccttggagcatgcccaatctgtatcagagaaacactcaatatgggtatgtccatgatccttgtaagtaacataaaattttctctagtgctacacaattatgaattgttggagaagacataaactggctaatgacactaattgaaaatgtaatatctggacgagtcaaagttagataattcaactttccaaccaacctgcgatatttctcatagtcttcaaatggttccccatcacgtgtaagatgcacaactagattcattggagcattacaaggctttgctctcaattttttgtctcagttaacacatcaagtacatacttcctttgagatagaaaaataccttgtttactctgagtaactttaatacccaagaaatacttgagctcccttaaatcttttgtgtgaaactaataacgatgtcatcaatatacaccactaacaaaatgataccagcaattgatcttttataaaacacagaatgatctgacttacttttcaacaaattaaatttcttaacggcctgactaaacttatcaaaccaagcacgagggctttgtttcaatccatataaagatttgcaaagacgacaaacttgccgtaactccccctgagcaacaaacctaggaggttgctccatatatacttcttcc

SEQ ID NO: 340976 - DNA, 722 bp, Cannabis indica
aaccaataaaatttaatgtaagcccaaataaaagtctaacactccagactcgttgttgttcagcttttgccttacctttacctacaaatagaaaatatatctatgagtcgatagactccgtaagaaaaacataaaatataagcatataaccaacctgtaattaggcgcccatacacctaattaccatgactctataacccgcatccaacgcgtataactgagtctcaaacgttcttgactaagtttgatgaccataataaatgttaattttatggtactaaatcaagtacgcaacgaaataaatttttttattatcatcgtaccatatccccaagatcaccatatgtacgtatattaaatctgaaagtaaaatagatgaaaagatattttacctctcaaagcctattagggtatccttgagtctttttcgtatgttgtatcatttgaacgatgacatcaaactcagaccttgatcttccgaatctttaactacacacaaggactagtgtgggctagtaggataaaatatatatgaagttcttgttgaattctcaacacatgtgcaagaacaattctataatattttaagagaaaagattaaattagattaatcctttttaggctttccaaaggttaggttaaaatttttgttatttgaattctggtttatactgttggaaattattttaccaggatcttagacctactcacaagtatgttta

SEQ ID NO: 340977 - DNA, 806 bp, Cannabis indica
agatgctctacatactcaatgcaataaacgccacaaccaccactaaatgcaacataaaatataaagttagtacaatgtaaagaatattttaatactatagtacttttctatcgctacgtaccttattgttgccttcagaactaagtcgtgagtggctcgactcgcatgcatatttggaagcacgttgatctccttcgtagttaatgtcaagatctggttattatgtggaaaatcccaagttgcatggattagtgagggcaacagttcctcccaagtcttcaagatgggtgccatggtgttccaatgacaaatgttggaatcacagttgtacacgttaattttccacagctctatgtcaacttcaatagtcacccagtgcctatggtcggtaagatgcaaaatgaagtaaatgaactcatttctcggaaagaattgggcctgtaattatgcagaaaagctaaacaatcaacaaaccataatatacttataatcatagttcaacatttaaaatcttactaaaacaatacctaatgaacacctctgcagtactccaggatataatcctcccacaaaaagtttcacctaggacccttgtgattcgtccatgcactgctgatcatgctggtaacgaatgtagagagaatgatacccttatgcggaaatgttagtggatagtcgaagcgtcgcctcctcagcatatggactgttgcatataaaggttagagaaagtagttagacaataaaatatattaattgtagattagttgacttataaagtaaagtaaaattataaattagtttactta

SEQ ID NO: 340978 - DNA, 812 bp, Cannabis indica
aaataatttccaacagttatcagttttgaccaatcaggatacattttttttttgcatgtattcatgttagaaactagtttgaggttggctatattaaaaaaaatgataaaaattgagctcaggtaactattttgtattattttaaaaaatatagggtctgatttgtcattcaataaaatagagaatctgatcgatcattttgcaaaacacaaagtctaaaatggtatttacctttattttttatgaatattatattagatcctgtattttgtaaaaattattaattaaattctctattttgttaaataataatctgtaccttatattttaaaataatagaaaataataccttcaactcaatttttgtcctttttttatatgacaaacttgaagccagtattcatcgccaattgatgtgaacaatgtattcaacttgtttataacacttctagattagtttttttttcttgtttagtcaaaccaggttattattatattttattttaacaataattgagctcaagtattattttgtactattttaaaagggaaatttgattttttatgcttacatttggttaaaaaaatttttctaaacaaataataactaatatttgtaaaatatgacaatttttatgatatccctaaaatacccctagttacatcaccccatttacaccatcggaccacccatcgggctacccatcggaccatctatcgggccaccccatcgggccaccatcggaccacccatcgggccacctatcggacccatcggactaccatcggaccaaatctgctaccaatttttt

SEQ ID NO: 340979 - DNA, 867 bp, Cannabis indica
tataactaaatatatatatatatataaataattaatatgttatatgtattaagggtacgtgaggagaggaccacaagagttatatagaggaagagaagtgaaggcagctttggcagagctgggaaataacgtactttgctttgcttctcaaaactttaatgcaatctcatgaaactactcatcacaaaagtacgtattttaagataagatgactgagcgttttttctaggaggatgagcacgaacttatatatatacaatatacaaatacatatataactagggcagacttacatagaagcatagaagccagatgtgctaattgctctttttaaaacaaaaaaataaaataaaataataagaaaaaaatttatatatattttaattagttgcaatatatatttaataatatttatgaacataataaactaattaaattattttattttatatttttttgaatatactagtattaagtattatattatgagttcggaaagaaataaatgaatcaaaaataaataatatttaatttaaagagatttgaataataaatttaaattaaacttttatgaccagtaaaaacatattggaaataataataataaggttataatatatgttgtatttgttcccgttcttaaaataatagcagcaagaacatctttgacctggaaaaacaaatattacaaaattaagaataagcaaatattatttaattttttgggtttaattattgggtttatttttttgacatttgaatttagtcgtgtaaaaaaatttcaaaaatggtaggatttgttagagaaatatgtgggtaagatatttttttaatttaaaaaaagattatttaattttttggtttaat

SEQ ID NO: 340980 - DNA, 351 bp, Cannabis indica
aaaaatatatatatatagtggtaatttattttttcgtgttaaatttgtaacacttaattgttttgtgtatttattttcaagttgtcttgctctatattgtattacttcgcagtgatatcttcatgaattattaaacttataagaatgatatatctatagagtattaaacttaaataaacaatgatatttagtttttatattaggctaattaggatttttatcctccgaactttggcatgtaccaaattatgtcctctgaacttttaaggtcgttaaaaatgcctcatgaattattgaaattgttggatttaaggacttttgtccaattttagtaaaaaaaaaaaatctaac

SEQ ID NO: 340981 - DNA, 776 bp, Cannabis indica
atgaaataaattggagaaaagttcgccatttttgtgccaaggtaacaataataaacaaattgtagattttacatgaggctaattaacatattaatttaaaataaaaataaattataatttaatttaaaaagtcattttgttaaattggtgtatatttcaggaggatctatattactcacatcatttactacaagatttactttgggatagtctttacatatttagtgagccttttcttactcgttggccctttaataaattgattagacaaaaagctcttcaagtaacaatgaatcacattcattacgaagatgagaatagtcgatatattacacttgggtgtatagagaaggtgatcgtttatatatataatattttttaaattaagaaatttaaaaaaattattttcttaattaatattaggcatatattgactcttcaaaatataggtgttatgtatgcttgcttgttgggttgaaaatccaaatggagactacttcaaaaaacaccttgctaggatcccagatttcatgtgggttgctgaagatgggatgaaaatgcaggtaactttattataaattattgcttaatatttaatataaattgtaataattgtgtgtgtatatatatatatatataatttgcatgggtatgtacctaataatattactacaaataaattttctattaattaataattaccatggatttttcagacatttggtagtcaatcgtgggacactagttttgccattcaggcattgctggatagtgat

SEQ ID NO: 340982 - DNA, 1137 bp, Cannabis indica
actggcaagtcagacattacccatgacccaacattgtgctcacaatgatccgacccatatatgagactgagtcttatcgctcatctaacgatttctaaagtgattagtcaaattgaccacgtaaataacgatctccctaattatatgggagaggagcacttcacaaggggggtgcgcggtcatgagtaacgtctttctatggatgcctataagagctactatcagtcacgaagagaggaacatcaatttcagtgatctcaatacttcttacttatcgttcactctctcattctctctaaaactacatacttatttctgcagtcaagataggtggtaacttagttcgatcatttattctcatctttttattacattgttaacaatattgctgacttaactgtcggagtcccttcggccagcaccatcccggtatcctaaggtttcccggttactctcttctttgttctacaggttgtcggtgcccgcatacaatcatcttcgattgattgtggatcttagcatctacaatttggcgcccaccgtggggccctaacaagctgcaatcgagcaaagcatttcgacctttatcattcagtccacccacaccagagcaatggtggaacacatggaagaaagagagattaatgaggaacaaaccagctaccgtgaacaacttgccactctcacgtctcaaatgaaagaaaacttggagtgcactcaagcagtggaaagagaaaatacgtcgttcaagaaggagaatgccgcactaaaggtccagctcaagtcattgactgattcgatggcaacaccggacaatagtcgaagaagattctaagttccaattgatccaatgcaatcacttgacgataccccaataggaggatcaagccaaatgaccatcaacaacaggggtaactaatgtcacggttggacaacaaacaaccacagtcaatcataatattaggaatgtcagtcgggtcgggcccggcccggcccgacatcactttggcctaccgtggcccggctcgactccttcttttggcctagcaggtcaagcccgacctgagataatcgggccgggttaggcccgacccgttttttttttagttagaatacttactacttagttgtgttttt

SEQ ID NO: 340983 - DNA, 586 bp, Cannabis indica
gtcccgttgcaatagcaaacatcctaagcaactgaagaacccgattcatctcgccattggtcgccttacaatacagaaagctgtcatctgcaaagagcatatgagagacactaggcactccattagccactttacaaccatgcagccacttcctctcttcaaacttgcgagtaagagcagaaaaagcttcggcacataccaaaaaaagataaggtgatatagggtctccatatcgaaggcctctactaggcacaataggacccatagttcggccactactcacaatccggtactgtaccgaggacaagcatccaaaaataagccgaatccacttatcagcgaatcccaaccgagcaagcatagcacacaagaaatgccaatccactctatcataagctttacttaaatccaatttcaacgccataaaaccatccttgcccacctgcttccgctgaagataatgtagaatttcgaaagagaccataagattatccgtaattaacctgccagggataaaagcactctgatgtttggagataacctcagacagtaatcccttcattctgttagcaagaaccttagtaat

SEQ ID NO: 340984 - DNA, 632 bp, Cannabis indica
tttatagattagtgataataattttttttttaaaaagcacacacgtggcgtccctgagagttagggcgttacatattgtgtccacgtgcacaatccaacctggcaattcacagctaaatttagacggaagtgttaaattgctaacagaacacgagtattgggggttttactacctaaatttaggttttgggggttaagtgaaatcaaaataaaagttttgggggttttgctgccatttacccttacttttattgttattgttctagtttagtgatcattttactttctgttatctgatctacatgatattcttaaaggttttgccagtgttttgtttttgtgtgattttatatttttatgttatttttatttattattgttttttttagcattatagtaacacttatatatttactaataatctaggggcccgtttggtacacaggacaagatttgattagacaggctaatttatccaatctagtgtttgagcatgttagaagtctagataactaatccagctaatctcatctctatgggattatttatcccatccagcagggtgggataaataatcccaggtgagattttttttttattcatttttttttaattttaatttttattaatta

SEQ ID NO: 340985 - DNA, 569 bp, Cannabis indica
tttgacccgcactcgggaccaaatcttggacctggacccgaacctacacccagacacggactccgagtcgaactcaaacacccacacctcgaattagacccaaagctagacccggacctttacccaaactcgaacccagaccaggatcagaaccaaggacttagacctagaactgaatccagactaaaaatgggcttggaacttgggactaggaccccacctagaccaagacccaggacgtgaacccacacccgaagcgtaatctggacatagactgaaattcggaccagaacccaaactcagaccaggaatcgaactctgacccgaactaaacccaaactcgaactcagactcgcaaatggaacttgaaccaaactaggactaggactccaacccgaacccgaacccaaatcaaaacccaaatcaaaacccaaacccgatcaaaacccagacagagtcctaaacccaaactgagactaggactccaacccgaacctagaccagtaccaaagcccacacaataaccgggacctggaccaagaatgaggatagggacctgggaaacagaa

SEQ ID NO: 340986 - DNA, 580 bp, Cannabis indica
ccggtagaccgtttccccaatcggaattgcggttctaggaaaaattcctcgaagccaaccgaaattccgattcctacaagcctctctgaaccgaaattccggttcagtgcagcaatcacaaaaattttcataactcgaccaattaaaccccaatccaatccaaaccttccagacctgttaattagaaccccaatgaacatttctaaagcaataaaacaaccacccaaagacagaaacacaattcaccattaaagctccaagttttgagttcaaaactcaaacttggctaaatctaactaatcaactaacaaaacctgcttgaatccacataacaaaacatatttaagcttcaaataacaacactaaacaataacaacagctacaacaagcaaatcctcaaaacatgcaaaaattacttttccttacaactcaagaaatcaagaacaagttacaaaaagcttaccaagaacttgagcttactaaaaccttgagataacagcttgaatttcaaaggaaaacaccaaacccttgctgctcaaaggggggggggtcgaaagagagagtgagattgagagaaaaa

SEQ ID NO: 340987 - DNA, 568 bp, Cannabis indica
tgtgggctcatatgtatttgtattgctatttaaagtttgacccaaataaagtgatcatttaagtaattgtaggtcattaggtatcaaagtgtcatgggctaaatgtgtagataccctaagtgatatttctaatttattgaggggctagttagaaatacctaaaattaataacctagctatgaggttataaataggtagtggtctccaaaaaaaataagagctaagtctattctcatcttcccccatcaagagagaaaattcgaaaccctaagtcttgttttcttggaagatcattacccaaaatcatcacaaaaattatctttacaatggattaagatcatcactatctatggattaaggtacacttccgctatttgaattattctctttgaatctacaaagttattctataaatttatgtttttgtgcttgtaataatatgtaaggaatacttcttaatgggtattacccattaatgggtaataaacaaatttaactataaatattaattttaaaaatattaaactattagatgttggtttgatagcgaatagtaaaagagaaattt

SEQ ID NO: 340988 - DNA, 1070 bp, Cannabis indica
ggggacacgatttagtacatgtacaaagttcagagagaaaaattactaattagcctttacaattatatattagctttaatagcttaaaggtcctgggttcgacctctcctcctctccttttttccatctctcccttccttcaccactaagctagccttagtggctttcactttgaaacagtgatcaggttcagaatatatttactaataataagttatcattttggattttgtgaaatttacactacaaaaaatcttacttttagtcacaacaaaatttgtgactaaaagtgaaaaaaatgtgacttattataaatcatgatttatatgttgtgactaaaaagtctgtggataaaagtattggtcacaaaaattataatttgttgtgactaaatgtatttttaatcacaatacttgttgtgactaaaactaattttgtgacaaattataactaaatactatgttttagtcacaagtaacattttgttgtgactaaaagtcacatttagtcataaaaaaaattatgttgtgactaaaaagttgtcactaaaagtaacagtttttttgtattgttaatatgataattttttattaagatttttttataccctttgaaaaatcaattaaatatatttatgaatttctaaattaatcataattagttaatcattttaattaatttttaaaataaatttaatatttaaatttaggtaatcgtttataattaaatattaaggtgtttttattttatgatttttttaaacgagaatgattaaggagaagaaaaaaaaaactagaggaaaaatactcattgttctttttttctttatttattttattttttaagactaaatgaaactagatatattataagggttttattttatttattgggcaacaactaatttttttttataaataccgtaagtaattttttatagcattaataataatatggatatacgtttttatttttcaaactagggctgaagccagtgacgaagcaagaaatttagttgagtgagggcttgaataaatattaagtcaaaactaataaaaataatgataaat

SEQ ID NO: 340989 - DNA, 508 bp, Cannabis indica
gattcaaaaactaaagcattaccttcgttcttagggtttagaagtttgagatatttagatttaaaatctcctttctgtccacagtgagaacattgaatagtatgtctgcttagctgttctttgattttctctatagttggttcaatttgaagtctagcctttatcattgagccagcaattgcagtattgtcgaaggaatcattctcattatattttgcttttcttttacccttttctgcagtactggagagggacctccttgcaagtgacaatgtcctttcataagcatgtaattcagcgtccagcttgtatatgtcgaacgagttcaaattattgatcatataagatacaacaaatttattatactcatgtgataagttgttgagaacaaactgaactcattgctctttcgataatacaattctcaacatagttgttttctgaaatttcatgttcatcaatagcaagtgtgaagtgatactttgaatgtcaagtggtaattacatgt

SEQ ID NO: 340990 - DNA, 654 bp, Cannabis indica
ttagagttatctaaattagtaattttaattaaataaatatatattaaaaattgattaaaataagtatcaactgaaaatccaactctttaaagtaatgagctttagttataaggatattcgatctccattgttggtcctacatggttaatttattttcaatataacctggagacgctagacttcgtccccctaatggatggttatttgttaaagcatttaacatcgtaacgatctcttatgataagtattttgtaagttttcgtctccattagactctcccctatggtgactacttagagataaatttatgaagtatgaaactgttatcccaaattttgcactctgacgtggcattacaagaatggtgacacgtggagtccgcttagagcgtctgctcgggaagatagaccgagcaggatgcctcgctggcacaacctgagtaagatattcagcgacccgtgcagagcaatcaacacttagcgaattcagctttcgcatcatgagtcatcagctcaatccctataactcagggatcaactcacgtggatacgacatacatacgatcccactatcagtgtattcagcctcaatccaacgatccttgcattcaacattgatcacacgatctttctgtttatgcgcattgtaacgaga

SEQ ID NO: 340991 - DNA, 570 bp, Cannabis indica
ttaaaacatattgtccggtcgtccagcactgatcagactaggggcagttagttcgatcaagcatatatccttgaatttccaaacaccagaaagtgttggggtggtgcggggcgaccagatgctggctcgcgatttctatcgcatagatttgcagcataggaaaaccgctcatcagttgatggcaatcttggtagtagaaagttaaaagaaggacaaggatcttgatcgggttcaagatgaaagaaacttgttaaaaccagttgaagaattggaagaagttattctcgacccgggaaatcccacaaagtgtgtatacattaggaagaacctagacgagcagctcaaatagcagctaataagtttcataagggcgaaccaggatcaattcgcctggagccatggagatatgatagggatcgaccctaacattatctgtcatcatttaaatgttgatccaaactacccagcaaagaggcaaaaaaggagacccttggattccgagagactaggggcactaaaacaggaagtggacaagttgttagtcaatgactttatacgcgaggtatttta

SEQ ID NO: 340992 - DNA, 526 bp, Cannabis indica
acaaaaggttacgaaagttgtccgattcgttgcactaacacatgggcttgtcgcttggaaaatggacacaatatatgttacgtacatgggtcacagacggtacttgcccacaaattatcttgatagacggaagaataaagtattcgaaggtactaaaaaaggagatatggttcctttgccactgtcaggagaataaattctccaataaatataacttgtagattttaagtattcgcaatatgttttcaattatgtagtaaatatatatatatttatttgggttgttattttttatgtattatttgtgaagtttgtaagttattttgttatttatattatttttttttagttattagttattgaagttattaaaattgtttttttgttattactatttataaaagggtaaatatcattttggaccctctgttttacaaaagttaccaattggaccctctgttttgttaaatgacaaatggaccttgtattttctaaaatggtacaaataggaccctgaacttaattt

SEQ ID NO: 340993 - DNA, 565 bp, Cannabis indica
aaaacaagcctttagaggcacttttttttagcttagtaataaataattgttggcatagggtggaaatctactgaagggaattttacgcctcttatggcgtcggttatttggaaataactggcggcatagggtgtgccccctatgttattggttatttccaaataaacgataccaaaaggggtttataaccctagccagccctttgtcttcctcattcgatcagccaacctagaacccccaaaccagagaaaccacaaaccctctccgccaaccaccacgaaaaatcacccctattttactatttttttcaccattttagctttttttttcctaaatcttctattttccatacctaaaactatatacctgaaaagactacatttttcctcattttttagggtaaactaaaggtagaggtagtggttgtgggtgttatacttctgaccaccagttttagtggagaaaacattgtacatcaacgtccattaaggtataaatctaatttctactaattttagtaatgtacattgctttattttttcttttataaatttttttaggattt

SEQ ID NO: 340994 - DNA, 564 bp, Cannabis indica
acccacccccacgactaaacccagacaccgacgacgacgacccacccacagacgcgaccccacgatgacgactaaacccgccccacgactaaaccgacagacgcaaccgaggacgaagactcacccccacgacgcgaccgaaccacccacgacgacccacacagttccacattgatccacgacgatccacggccacccacaaccagcaaaaccacgaccacgaaccaccgagggaacccaaattataaccgtaagttcttttctcattaaaaatttgaattttcatagatttggatgcgaatttgtgtatgttcttcagattagattgttttagattgtgtattcgaatttgaatggttttcttcatgttcatcagttgtgtctatttattaaaacaatgttatcgatgagatatcgataggatatcgataggatatcgacaaaatgacctttagaaatttctgtgtgttaaagtgtatcgataggatgtcgatagtgtatcgatagaatgtcgacagatgttgagtgaaatttttttgaactggatttagtgtttaaattcat

SEQ ID NO: 340995 - DNA, 768 bp, Cannabis indica
aaatttaattctatttttattctattcattttttattttcatcctcctacctattttttatattttaattccttctaatcaaatgccacttcaaaatttcctttaaaaaacaaaaaaagactcttgagttcaattactactcacatactgagtacgagggaggatatataatagaacattgttattgggtactagtagtgtctatcacttttagatatgtcgtcttgtgattggctagcgatgcttcctaaaaattattatattaaaatatacaggatctgatacttaattaaaccaatagcgatattaacacataaaaaaaatactagacaccattagtatctttttgcatttctctatataataaggatatgaattaatttatttaaattattttattaggtagttaattgtattaaagtaacttgtttctatgggttactagtccccataaaaatacccagttgtcttgtaattcgaggctcattaataataatttaggtgacgtttgattgagagaaatgaaaacatagaaataagaatgggaatgggaatatgaatggaataaaatttaaaatgcataaaaaaattgataagaaaattattaattttttttctcatcttgcattggaatggtctttccttcacttttaaaattgaattttcatccattctattggaatgacattctaacactttaatatgcaaccaaacaaaagaataaaatagagattgtttcctttcatttttattccattttattacctc

SEQ ID NO: 340996 - DNA, 1164 bp, Cannabis indica
actatgatgtggcatcacatgatggtgacacgtggaattgacttcgagtatctgtttgcaagatgtaatctgaacaggatacctcatatgcatgctcgatgcaaagcaattagcaatccgcgcagaacgaccaacccttagcgaattcagctttcgcatcgtgagtcatcaaggaaatccctataacttggggatcagattgcagagatagggcaagctgtccaaatcccacaattggtgtattctgtatttactatggaatatttcttcttatatccattgtaacgagaagggaaatacttcctctccaagctcatagccctataaatagtgatgcatattcactaggcaaagggttgaaggattttaacttgagagataatgtctaagaattcatattcagagatattattgtaagagctataagaaaaggaacctttctccttgttcttgagttaatacaaataacgaggattaggctactaccgaactgcttggggctgaacctctataaaattcatgtgtctttatattgcttttttatatttcaatcattataaactacttatcgcttacaaaattagactcactgtcgttggctaaaagagaggttaacattttggtgcttccattgagagcagaatcaagaatcactcttcattctaaatctaaccacaagtacgatggtggtacagacttgtaggggcttggttgatccggcaaatccacaagcggtggatcctacattacagaacccaggaaacacaacgattttgccagctgttagtcccgagaaaccgtcaaatgcgggtcatggtgtaatgacttttgtggatgaaatcgcgcctggtgtgcaagagactgggaataccagttcagcacccaaccagggcattcataacacagtcgttccgcctactaccaacgttcgaacgaccattggagatgatagtgagatctgaaaacctccgtgttgctcttggactcatgcaaggtcataccaacaccctacatcatgatcaggaggaactccgcgctgcggtaaatctcttgttcgaggaacagagatgcatgtttgctgaatggatggacaaggagatggaagcgttaagggctcatcatgcagagattgacaatcatggttggcaagctactgtgctgata

SEQ ID NO: 340997 - DNA, 457 bp, Cannabis indica
cagtaccaagatcacagtacattatactttgagatatatcagtagagacagagtttaccaaccaggacatcaccatattgttacaacaaagccaagaagggagaagagggttaccagattcaggtcgtggaagagacccgtcaatgaaggcgagtttgttcttggcagccaacgccatagttatcccgtgcttccaagattggtaattgataccattaagaacagtcgagacgagaacaaggcctgggtgatcgccggaactgaggaagaaggggctggaggcatcgttattggcatgttgatcaagaacggagtgggtccgcctatcaggagcaggggtatcctctgttcttggagatttttcttcgtgggtttcgttgtgaatttgggatcgaaatctggaggttgtgcgtgttggaaattattttaccaggatgttagatctactcacaagtat

SEQ ID NO: 340998 - DNA, 721 bp, Cannabis indica
agttcattttctccactattacatgattttttattagtttggagagctattttggcactataaataggacccatttgaagagtaaaacaatcagattttagagtagagaaatacattttctcatcttgttctctcttatttctattttattttacttattttagtgacaaaaatgagtgaactattttagaaatattggtgaggttagagtgtagcttttgtattctttatttctattattgatattgattcttttgtgcttcatctccatatctcatttattaaattgttcttcatcttctaatttttcttccaaatttaatagtatcttttatataagttcagtcatgcttttcttatgtaagttaggctattaattattttggtatatttattatattgtatgtcgtttactgcattctgccaacagtggtattttgtcgatttatgatatataatatgatatgctgttaagttagaggtgagattcaatttattcaagattatttaatttgtgctcataacatatatatcttccggttgtaattaatggtgtagaattgcaactgcgttctgaattaatatcggtattagaataggatttacataactacatctctaccttactaagctctttatctgatcatccccttttcactcatcattttattatttttaattcattcacatttctatcattttctatttatactaatcttta

SEQ ID NO: 340999 - DNA, 585 bp, Cannabis indica
aaagtggttttgcaaaaaggaaaagaaaagagaaaagccttcctatgccctaagcaattgctaaacgaagaacacatggccttcttcaaacaaagctgtatgcctacaacagaggcatgacaatggcgactctacaactaacacagtaaacataaagcagaactcgaagaacttaaacactcacacacccagaagcctctaagtgcgaacccagaaaacaaacgaagtaaatgtaagcatgttattatctaaggatgcaagaaacttacagtcgattgttgaactgggggtactgaatgtggatgagtgaaagttgagaagaactggcgaagtcaaacgctggaaggctgaaagaagtgtttaagtattaaagcagtttgtgctactttgaggaattttctctctaggaaattcgagcagaaatggcaaggaatggaaagtaaccgaaatgaaggaaaggtggtggcttttataggcaaaaacgcatgaggaacaggcgtcatcacctaccaatcgcacggtgggggagacgcacgattcgaattcctgaaaaatcaacggatcagatcgatctaccattaaggc

SEQ ID NO: 341000 - DNA, 525 bp, Cannabis indica
  modified_base (492)..(492): a, c, t, g, unknown or other
aatattttaaaatatttaaacatattatgtaaaaaaaatagaactttaaaatttatgaatatgtaaaataatataataagtaagtatataatgaaacataataagtagttctgattatatttaataaaagttcattgtcaaaaaaaaatgaaacataataagtaagtatataatgaaacacaacgtgctttgcacgtagttgccgcctagtatataaatatatatttacaaaattactatacatatatcatatttttttggtgtaataaaatatctatctatatatatatagatgagaatactaatagtttaaaagaatactaatagattatttataaaaaattaagaatggggaagttacattatttttttcttattattcaatagaaaaaattagaaaacataacaaaatagaaaaatagagaaatggaaggaaagatgccacatcaatcctcttatgctttcctttatttatatatatagatatgaatnttaatacataattttataaatacatcatcatta

SEQ ID NO: 341001 - DNA, 597 bp, Cannabis indica
agagattctgccccctgagttagcgggtaatgagctactccccttttggttaatactaaagataattccacttagataccaatagtagtgggatctgtagtggctctcttaagattacgaagtgagaaccaaagtttgccaatctcaagtgagaataatagatgggcgtgtgagagagagagaggagaagagagaagtgagttttagacttagagttttagagctaggactgagagacttcagacttaaggcttgagacttagtccattagggtgagactaatgctctttatatagtagagcttacatgaagattaaccactaacactactagaaaaataagttttagtgacccacattgagtaactctaaaactatttagtgacacttcaccgcgcgtcactaatgaaggtgactggaaagacaatttttagtgacacttcatatgtgtcactgaacacttttacagtcactctctgtgcgtcactatagacgtttagagtcaaaatttgtcagaatcagctactctttaggagtgtcactatatctatttttttaaaaaaaataaatattaattttttaaattcagattatatat

SEQ ID NO: 341002 - DNA, 433 bp, Cannabis indica
cttttcagtccaatccagtcaaatcctgcgtaccaaacgggcccagaaggtataataaggatgaggttagtgggtcaattaatcattcccaagctaaccaagtaaatgttcagtctttctgggcgctgccattaatatggataactctaaaataggaattggtgtaccaattttccacagggacaaatggctgcttgtatccgcttctatgctaaaaaaaaaaaacttatgctttttttttagggtaaataccattttagatattgtgttttgcaaaagttaccaattagattttctgttttgttaaatgataatatggattttgtattttttaaaattatacaaataggaccctgaaccgttttttgtcgaaataaaacttaataataatctgacctagagatgtaacaacaaaactagttacatttctgta

SEQ ID NO: 341003 - DNA, 652 bp, Cannabis indica
gtaatgtcttttggactcactaatgccccggcgacattcatggatttgatgaatcgggtgttcaaagactatctggataggtgcgtcactgtgtttattgacgacattttggtgtactcagagtcagaagaagagcatgagttgcatcttagagcagttttacaaagattacgggatcataagctttatgctaagtttaagaagtgtgagttctggttatctcgtgtctcatttttggggcaaatagtggataaagatgggatcatggtggatccggccaaaattgaagccgttcgggattggccagcaccgaaatcagctactgaggtcagaagttctctgggtttagctggttattatcgtcaatttgttgatggtttttcaaagatagctgtacccttagcggagttgactcgaaagaacctgaagtttgtttggactgatcggtgtgagaaaagttttctggagttaaagcaacgcttgattaccgctcctgtactaactcttccttcagataaggaaaagtttgtggtttattgtgatgcctcgagacagggtctcggctgtgtgcttatgcaggctggaaaggtaatagcttatgcttctcggtagttaaaggagtatgagcagaggtaccctactcacgatttag

SEQ ID NO: 341004 - DNA, 544 bp, Cannabis indica
cttctagtattaagaatgatttcttactacttttttttaggtgaattcttttttccactggaatttgtttgctataaaaatgaccagtctaaaatccatcgaaaccccttcgttattatgtctatttgtgcaacttatttgctctaattggttgcattaatcaagaacgcctcctctcttctcgccctcactctctgtcatcttctcatctatgtaagttagttgtgagggttaagatttttatgttttttccaagttaaggttatctctataggatataactctgtggtttatatcttgcttgatttctagttcacatctggtgaatattgtatgaaaattcatttgttttcacataatttaatatttcaaaatgcctaatgcatacaaagcgtttgagaaaatgtctcagagtctttgttaatcttttcctctgtttgtaattattatttcaaatctagatattcatctatttaaaatttgttctctttctatagtaataatatggtcacttcgtattgttcaggtaagaaatgattcattg

SEQ ID NO: 341005 - DNA, 886 bp, Cannabis indica
tgcatgtgccgcggtgcttactcagaatgtcagtctctacgctctgtcatccccctattacacaaaggagacgtggaagaatacttacgatgcaacaattaatcttgtgcgcgaggaggatgaatgggtgcttccagaacacatgcagaacatgagaatcgatgtaccagtggagaagaaacctgtaggttgtccaagaaagagcaatgcaggaagattatggactaaccgatttccatcgaacggtcaaaaagtcaaggaaccacacaaatgttcaaactgtggcgcattgggacacaacaaagctacttgcaaggccagggtttgagcatcattttcgtttttaaattgcatgcattattattattatggtttatggcatgttacttgtagttttttatgtatgccaatatttatcgacattattttctgtgtatgtggttgtttaacgaagtatctcatatttttgtatataattgtgtatgtcacgacactttgcgatatgtagcgacattttcacgatatgtttagaaatttaatttattctggacaaagtcgtaaaattgcgacgtttcacgattatactggcgacatgttgcgatataggaagaacttttataaattctggaaaaattaaaaaattgcgacttttcacgactacactagtgacatgttgcgatataggaagaacttttattaaatctggaaaaaaatttaaaaatcacgacgtttcacgattactttgcgacattttgcgacattaatggaactttaattcatttactgaaaagtcgatatcttgcgacgttttacggttacattagcgacatgtagcgacatttagcaattacataaattacaacaattaaaattctttgccatgtcg

SEQ ID NO: 341006 - DNA, 899 bp, Cannabis indica
aagaaagaaaaaaaagaaaagaatttagatatatattatataattagtttaaataattgtcatggtgaaattgagaaagtatttcttttctttgtgcaaagaatcaagtgaagaaggctgtggaagtgaaggaattttaaattgggcacaagaattaagtttggggtggcagaatgctatccagttgctatagaaagtgcagcagcaaatgtgtgactgattgcacgcaatgtgggactatgagcaaaagcgcgacgcagtcatggagcgtgcgtttaggaggacaacgccacaatttgagcccaagttcccgccgttccctcagcaagttctcgacccgtgggctgggccatcaacttcgaatacggaggagccccacgaggactccgagtagagggagttttctaatacctaaactaatttctatttttctgttatgtgtcgtttttagtttgtattgtgctaattgtgtgttgtcttttgtgtttggaacttttattttatgttgtttatgtggttgttagtttgacattgagagatttatgagtttttctgtggcctagtgttctgctcgatgatgatattttccgctcattccattattgttgctgcctaattttatttgttgccttgtcatgctgaattgttggatattatggatgtttctctttagtctctcctcactagtttatacttttatttttccaccatgctttgcatttctcatacgattacttcacatatatacttttagcatctagaattggttagtgcatctccttgaagcgaaatcctagttagacttgtcccttagaaatgatttaggccatccttggacgtttgagcctttctaaccttccctataaaatcaatttttccctagtcacccaagtttgagc

SEQ ID NO: 341007 - DNA, 551 bp, Cannabis indica
tcgtaaattcatgagtgattttaatcactttgtcaaaaaaaaaatatgttttgtttatttacttttaataattaaataattattatttaatttttttaattttgaatttatagaataaaagttttattgaaagcggacaattgatcaattggaacatgttaatttaatcaaatttgataagatttaataaaattaggatcaaaagctgcacaaaacgtaacatatatatagtaattcatcgaaataatataacatatggtatttaatctataaaaaaatatgatatataagtattgttattccaatttttgcactctgacatggcatcgcatgatggtgacacgtggaatcaactctgaatatttgctcgcagaatatagtccaaacaggatgccacgtatgcatgctcgaagcaaagcgatcagcaatccgcacagagcgaccaacacttagcgaattcagctttcgcattgcgaatcatcaaagaaatccctataacttggggatcagattgaagaggtatggaaagctgtccaaatcccacgatcaat

SEQ ID NO: 341008 - DNA, 1239 bp, Cannabis indica
agagagagagagaactctggagagagagcttccttcttttctctaaattttcttattttgcaaaaatgaataaaatggttccactcaggttggctggcacacctgaatttggaatcaaggtaagattagtataatgccatgcatatgtttatacatgtttagcgtacatgttagttgccgttagaataacatatcagatatatgttaggtaaatctatagccatcatattagcatatcagggcaacagtgaggtgtacatagagttgcatcgagatggcatcaaatatctgctaggctatcagatagtatggattaactgcaatcacatcagtgcgattagagtactgagtataggctggattcgcggttagtcatactttgtcaagatcgatcctgattcagttagggttatgattaggtgtatgggcacctgattataacccaggattttagtatgtttattatgttatgcttttcttactgagtctgtcgactcacaatgctattgctatgtgcaggtaagggcaaaactaaagaagaggagtcgtgagagcgagcggatgaaaattgtacatgtcgaggcagttaggcctggagcgtacgatcctcgggactggcaacaaatcttttgtaaatgattcgcatacttttgtaattgtattttgtaaacgggtcccagaattttataagtataatatgttatgttttaattagaaagcaaaattttaattattcacgtttttccaataacctcgttgattagcaacgagctacacagtgcgataaaaatcacgttaacacgcctaggctagttaggatgttacaagtttcgtaatgcattagatttttttttgcttatatgagctgccttttgaaggtgatccgttcacttgggttaaaggtatacatagagtggattcaattaaagagcgtttcgattggtgtttcactaatgatctttggaacaataccttccaacctttgacaacataacatttggactattactcgcctaatcatcgtgctatagatgttcaagtgcagtatcaagcttctaatttggaaaaactagcaaggaaaataaaatttagatttgaaaaaatctggttaaatgagccagaagttgttgcaattattcgacagaattggtttgctaacatgaatggagggattgtgtaaagaccgcttggtttaatttgaaaattagcagttaatcatgtttaattatgaaaattatt

SEQ ID NO: 341009 - DNA, 1523 bp, Cannabis indica
gactcaagacctaataagtgaggtgactatctcgctataggaaggtgtgctcctattactttcaccaatcaacttcagacatctttcagtgagacttatagtcttgacgagtcagaagctgacattcaaattatgatgactgatgaagtactctttgttagtaagaactgcgattgtcaaaatgaagtgttatgccttcaagaaaagaagcaatgaggcgtacatcatcaacctcggaaagataggggaaaagctctagctcgctatcaaggtcattggtactgagttcctgtcgagacatcccagaacattatgatttaaaatgtgtttaatacaagaccattttggcccagtaaaagtggactaatcatagttgtgtgatattcaaataataaccgcattaatactacgtgatatgtaatcaaaccccatgatttcaggggagaattgttgtaaagattacagtcaactctgtaattaactgcctactatgtgattataaatagaggcaagttatactaaaaaacagacgaaaaaaatcataagaaaaaaggtcctaaaaagccatcagaaatccaataagattgactcgtggactatgcagaattttaactgtaaaagcacgtaaaaaatcctttgcgttcatattattttctttactgtttttatttttctgtacaagtttatctgtacaagtttatcattcaggctcaaattttgttgttaacaaaaatctgcgttaacaactagtgttcccagtgtcttgcacgcctggtgtgatcccagccataggggaagtcgcaccatggcccatagtgtattggcctatttggggtttgtccctggtggtcctctcgtgttcccaggggtctgcacgttaggatctgtcaccaccaggtcgccctgatcagccaggcctacacgagtttgcaccaccatcttgtacgcctatgaaaacttaagacaaaaagaagacttggacttgggttttttctctcaatgaaagcaccaaaatatcaacctcgtttttagccaacgacagtgagtcaattaataagcgattaaggatgtaattaaaatagagcaaaaacaataaaataataaagaacaccagattttaaagaggttctgcaccaccatccccttcaattgtattaactcgagagaaagaacgaagtgcttttctctcttaaagctcttacaatgaatctctaagtaattctcttagatctctctctcttaagcaattcttttgttccatttcacagtgaggctaactcactatttatagggtcttaatgcatgaaggaaggtttctcttacatcctaaacatgaattcttaagacaatgaaaataaatacatataaagttaagaaaacattacattggcggcaacagaatactatggttccttccactcagatctctaacccttattcccttctgtcgcagagtaataacaagatctaagcttggatctctttcaggtgttggattcttcacaatcttccacactatgatt

SEQ ID NO: 341010 - DNA, 1717 bp, Cannabis indica
gtttggtaccctgctaccttcggcagactttatagtatccactaggtggattcggtccttgtccttctggattgacggttggaattaaccgccaatctaatagaattgaaactgtcttattttgatatgatcctaggaatagatttttgatctaagtatggggcaacgatcgactgtaagcggaagatggtggtgtttgagcccaatagtgctaacccagcagtgtttgtgggtaaagttcagggagcgcgtataccaagaataacactgttgaaagctagggacttgatgagcagaggttgtctgggattcatagtcactggagtggataccagccaacctgtgacatctagacctgaaaaatacaagattggtgttcgagttccttgacgtctttctagaagatttgtcaggattgccacctacctgggagattgaatttgtaattgagttggttccgggagcggaaccagtatcaaaggcaccgtatcgaatggcttcagtagaattgaaagaattaaagatacaactgcaagagttattgaatctgggattcattagatcgagctactcacgttggggagctccggtattgtttgtgaagaagaaagattggtctcttcgaatgtgtatagattaccgatagttgaacaagcttaccatcaagaacaagtatcctttacctcgaattgatgatctttttgattaactaaaagggaagacaatcttctccaagatcgatcttcgctcaggctatcatcagttgagaatttgagaggaagatattacaaagactacggtccgtactaggtatggacattatgaatttcttgtgataacttttggactcaccaatgccctggcagcattcatggatcttatgaatcgggtattcaaggattacctggatagatgtgtgatcgtgtttatcgatgagatcttggtgtattctaaatcagaagaggaacatgagttgcatctcaaatcagttttgcaacgattaggagatcacaagttgtatgctaaattcaaaaagtgttaattctggttatctcgtgtctctttcttggggcacatagtagataaagatgggatcatggtggatccggccaagattgaagctgttcgggattggtcaacaccaaaattagccaatgaagttaggagcttttcgggcttagctgggtattatcgtcaatttgttgacggtttctcaaagattgatgtacccttaacggagctgacccgaaagaatttgaagtttgtttggactgatcggtgtgagaaaagttttctggagttaaagcagcacttaattaccactccaattaggaatgtcaatggggcgggtcggatctgatccgactctcatccgacctgatccagatcatgtacggatctgccccgccccgccccgctggatcagatactcggatcgaatctgatctgacctgccttatacggatcggatctgatgtgacccaattttttttaaaaaaaaaaaaatatttaaaatctaaatttataattttttttttccaaaatttatttgcttaagaactaataatgcatcatttttttcttatatattttattttatttgtcaaaatcgattaaaaaatatattcttcacataaaaatgtaattttactattcaaaaataaaaaaaatttaaccaaattttagaaattacactaatataatcatcaataataat

SEQ ID NO: 341011 - DNA, 2021 bp, Cannabis indica
ttgcattactaaactttgatggcatattatggttttcatgaagctttaattcttttgaagagtgttaaatgtatgaattttcttataaaaatattattattgttattatgttttttcatcattgttggaaatctaaataataaaaatacaagaggagaattgaattaatatttctattttatactttacttcatattgtctgacggtttataaccgtcattttaagtagtgtattttgttagttatagtctgaataaagtcttttccaacatttcttaactgtcatttaaagtaactttttgccacagttataaaccgtcatttaaagagatgttttccatcacggaagtctttccccacggttataaaccgtcatttaaagtgactttttccaacatttcttaaccgtcatttaaagtaactttttgccacagttataaactgtcatttaaaattccgcatttttatgacacccacatagccaacggttttaggaaccgttgggaaatcatataaaagacagttataaaccgttgggaatagccctttttgtagtagtgattgtactacaatgttcccaagatgtaagtattagaaagatcaattggttaacttcaacgaacaagtcaaagaacataaataatacagttaagcttagaacttaaccatctcaggattaagatctattgacctaagatcaactaagtgatattgatttaaaaaagatataacagtaagtttatgatatcttatccattattaatattgttccagtccgatatttgtaatattccaataagcctaatggtaaataattaaggtttatatattatgggctaatcaggtaataagtgggattatgatcctactaatctatttcagcgtaaattttaattttattataaatggataaataagcgtaatttattaattatagagatttatatagcatgtgttaatataatatgagttgtttgtgaaataaaaatatttcaggtttggcgaccttagagattcgaacaggggccaaaatatcataataggttcaattaatagaattgatcggaatattacagtaagttgataatataagtattggggtaattagaagtatgtgggatttgacctagtgtcctagaagtagagatttcttagtgactaaaaagtagtaaaataattattattaataaaattttattaatattattaatggtattattaatatatacatattaatattattattatttgttatacctaattttcgcaaaaaaaaaatggctactcttgcacaaggatccacatgccaagagtaccttgaagacactaaagtcaaccttgcgactttggccaagacttgtaaatgtcaaatgagttaaggcatccttcttgagggccccatgacacttctagaggactcacacaccttgtgcccaaactaaggttcatgggcccacgtaagcgttttcaccctagaaatctcaatccgccaaaaaaaccaacaaggacttgacttatttgagcaagaaaatgacttaggtttgtgcatcaagtcaagatggcatcaaattctcaagacaaaaaggcatatgtgcccactgccatatggaaatggcagtgcccatcaaaattggcgggcactgccacaaggaaatggcagtgctcatcaatcttgatgggcactgccacaagggaatgtcattggtctctccttacaaaccatgaagggaaaattattcaattgggtttcctaaacaccaaggagtgaaaaacaagtgagagaaactatttcccacctaggattttgttggaattaattttactaggatcttagatcttctgtcgcagagtattatcaatatctgagcccgaatgtccttctctttgaatgtgatccttcacagtcttccaatctatgattaaggtaccacttgctgtgtgtggacactaatctatcactagagggttcgaaattatgaagaagaaaagagagagaggtagggttgttgggttttatgccc

SEQ ID NO: 341012 - DNA, 686 bp, Cannabis indica
tattggtgatatggtcttaaaaagagtcttcccagccactcaagaacccggagtgggggtactttggccaaattgggaaggtccatttgacattgaggatgagatccgttccgggacctataagctaaagagattggatggaaccatcgtgccaagggcctggagcgctgatcatctccggaagtattaccaatagtccaaaaatgtaaacttaggctttgttaagagaatttgtaccgtaaagtgtatgcaacctctaaattttgaataaagctgagtgccttaaaaataatgttttcatgccactcagggtgtactaaggcataccacacagacaaatgtaaaacaagccaaaagtaaaaacaaaataaagcagaatatatatcaaagtgaaaatatatatttaaatatcctgacccaaaagcaggtccaaaaaaaaatatattaagggcctggggacgggccatagtaactgtctcccctcagaagatgataatttaaattgtctgaaaggaaagaaaagagactgtaaaggtaaagaaattatagtagttgaactggttgaaataggttgaactggttgaactggtcgaactaatcaatgcgaggaggaagacgagggccccgacgctcttcaagcatagcgtaaagccttttcttcttctcccgaaacttagcgagggctt

SEQ ID NO: 341013 - DNA, 939 bp, Cannabis indica
caaatacctgcgtactcaaatttttttaaaagatctgtgtactgcaaaaagaaacaccaatgttccgaaaaagttagcagatcgatctgtgaaaattcctagagaatcacaatcactccctagaccacaaaagttatttcgacctcctgattgggacattccttttgatcccggtaagttacgttctaaatggactggtccattttctgttcgtactgttttacggagctgttgaaattgaaaattctaaatctggtaatgtattcaaagtcaatggtcaacggttgaaaccatttttagaattaacaccacctgaagtggaggaaacgctctttcacgacccgatttaccaaggttagtgaattctttcactactggtcctatctttaattgctttctttaattttcagtattttagtttattttctgtcatttgttttttttagaaaatcaacatctatcactgtgcatattctctgttttttcggttctcatctcatgttcttatcatatacatatttagacattgaggacactgtctcattttagttgggggtactgagtatattcttgcgttaagttcgataaatttcttacctttttgaaaattttgagtcaaattctgctgctaattatgtgaataaataaatattgtgttagactagtttatactatatttagttacttagatagtaattccagtaaaaattgcacaaaccaaacatatgatttgattgtttttaacacatttaattgagaaaaatcttaagttaaaagctttcattttttgtgagaagtgagaattgagaaaacgactttttgaacatatattgatcttctgaattggtaaaatcaaaaattttttgaaaaatcttgaaaatatgacaattactatagggtattactttttttgttttttttttttttagttaattgtag

SEQ ID NO: 341014 - DNA, 692 bp, Cannabis indica
cctgccttcccataaacatcaacaagcatcccataggtgttgttcgtagggaagacgccatttttcgccatatcaatccaacaaagccttaattcatcccatttctgagctctacccagtactcggagcacaatattgtagtgaattacatttggttcatactctctttgcgacttaaaccactcgaaaacccgaataactctttcccaactcctctgttctttaagaaccacagtctgctcctttggactaagattatcacaatattcactgagagttttttcgatatcattattggattccaaagagcgtaaaatgaaaggcaatacacctccatacctcttctttttcttcttcccattaactgaagatagtttagtaggaaaagtcagtgttttcgaatgacagtggagtttaaaccccacaataacacttggccctctcgatttccccttctgggtatgcgaagtcacaatgaactcaacattttggtggtcaacacttaaagcattaggaatagcacagtgttgtctctttgctacattctggtaacggagactaaatcctagaaaaaccccagctctgaaaggggactgggtattttgaagcttacttggagagaagacgtgagtttgcattgagctttggaaagcggcgagtttcccttgccggaaaagtagggtttaaattaa

SEQ ID NO: 341015 - DNA, 1006 bp, Cannabis indica
tctaattttattcaattttactattcagtgattatttatgtactaaaccatgctctccagacttcgatacctaccaaaaagttcaggggcaaaaatcttaattagtcttttattataataaatgatgatgttattggtatttaaatttatttattaattcaaaaatgttattcaaattaatataatgaaatgtaattattcaatcctacttttttttaagggatcaacattaccctcttcaagggcaaagggtagttatattactttgagaataacatttcaaggttaaaccataatgtttcacattctcattctcttactagcattaatccagtcaaacaactcctaaatgtattttcatgagaaacaatttttttattcaaaatttttcccttatctcaatttcaattttaaaataatatcttcatttatattgaagatagatatattttttttaactcttaaagatagatatttatcaataacttttttttttttgaaagaaagggagcccactagagagaaagaaactcaataagatcacaggggtcatctccaatccagatagctacttcatctaaccctagagcccggtgcgccagcttatcagccagggagttggcttcgtgattgacatgagagagccgagcagcagggaacagagataaagtattcttgatttgacgaataagatctccaaaaaccgagatgtcttctttatggcgagacaaagcatcagtaatgctttgcaatccgtttccacctcatggaccagaaagtgttcattgatgcaccattgtagtaaagtgaggagagattttgcttccagagtggcgacagatcctcctccagtgtgtggctgggccagagctgcaactaccagtccttcactgttcctaatgataccaccgaaacccgctttcccgttgaccttggagatcactgcatccacatttagcttgagaagacctgcagctgggggcgaccaagaaggggaaaccaaatt

SEQ ID NO: 341016 - DNA, 624 bp, Cannabis indica
aaaaaaaaaagaataaaaaaagcaagaaagagggctgctttatatatgtgatgtacatgtatccattaagggacttggttttttttttagctttaagttaatgaataatgagctttgttatttcaatttttttattgaaaaaaataaatatgatttaaaaaaacacacataattttaaaaataaaaaaatatatatttagaatgtgtcagaaaaattatattatgttcataagaatgtgttagcaggtacaatttgtggcatttagctaaactaaaatttgtgtataaataagaaaagatgtatgaatctgagttgtatagatagtagcattaaagaaagcttcaaaagtagacttaatcttgtacgggaaagaaagttgtctaccatagattaaattttttcaaaaaatgtaaaagagttgtgagtttctcttttgaaggggaatccccttgtggatgtaattggctccatttaatcaatcaaaaattatttttttgataaaaaaattaataaagtaaattaatttaaaagatgattatagtataactatgtatctaaacatattggtagtgaaagtatttaagtaatcaattttattatagttaactattagtataaaaaaa

SEQ ID NO: 341017 - DNA, 888 bp, Cannabis indica
caacaaaataagcacagttaattggaaaaacacacccaacaatatcaatatttacaaaacttaaaggttagattactaaatagaaaataacactaaaactaattaaaattaagcaaaataaacacattttcactactctcctcacaatactttagtttaaaagcataaaaattaactctataacatagagttatcaacccaaaactcaaaaaaccactcacacaaacgggtgggttcaggttactaattctatacacccgaacccaaaaactcgaaatccaataaaatccacccaatgtcacccctaatgaaaccatttagcagcctttattacaagtactagaaacatcaagcatggtttcaagagtacttgaaaattagagagataacaaactagcaatatctcttaaacatagataacatctattaaatatgaagtatggatacttaacaaaattctttgtttagttgggattttttttaactttctacgtttaactttaacagaatatctcaattacttaacagaatattctttattaattttataatattattatatgtatttaaaaataaaaattatagatattttatataagaaaataataatttaattgtatatatttaaaaaataaaaatacatttatatataatcacatctatatataaaagatatatatttaaattttaattgtacgaaaaaattttattttaaaaataattaatgatatatgtatacatctaataatttgtacactttattgtaaccacactctcctaattacaaattaagaatattgtatctatcactattatttttttaaaaaaaaaaaaatatgtttatattttatatatataatatattttgaaagtaattaattctttaat

SEQ ID NO: 341018 - DNA, 850 bp, Cannabis indica
taaataccaagctattgtggattgttcatgcaaaagagtgactcttttaacccctagtggtaatttcattgtttatcaagccaacatgagcgcagtgagacaaaatcctatcttaagggcatgcttaggtggaacgagaaacttagagtgttatgggaatctgtttgtgatccatgatgagtctagggatttagaccagttcccttagatatcagtggttagtggttttccggatgtgttccagaggatttaccagggttaccacctaatagggagatgaagttttgcattgatttgattcccaaggctcaaccagtttctattgcgccttaccgcatggcacctacagagttggctaaattgaaaaaacaattaggagagttaatggataagggttacatcagacatagacttctccatggggagccccagtcttgtttgccaagaaagctaatgggactttgcgactttgtgtcgactatagaaagttgaatcagatgacagttaaaaacaaatatcctctaccaaggattgatgaattatttgatcaacttggtggttcaaagttcttttcaaaaattgatttgaggtcaggctaccatcaattgaggattagggaagaagatatctctaagactactttcaagacacggtatggacactttgagtttttggtaatgccatttgggttaacaaatgcacctattggatttatggatcttatgaatagagtctttagacctttcttcgataagtttgtggtggtattcattgatgatatcttagtgtattctaagacatgtgaggatcatgttgaacacttgacaatagtattacagacgttgagaga

SEQ ID NO: 341019 - DNA, 442 bp, Cannabis indica
agtggtaaaagattttctcgacgtgtttcccgaggagtcgccgagattgccgtcgcaacgagaaattgattttgtaattgaatttgtacctggagacgaacctgtttctaaagctccatctaggatggctccagcgagactcaaggagtttaagttgcaactttaggggatgcatgacattgggtttatccgacccagtgtatcgctctgaggagctctgattctgtttgtgaaaagaaggatggttccctcaaaatgtgtgttgattatcgggaactaaacaagctgacgattaagaacaagtatccgttacccagaatcgatgatttgttcgatcaatttcaaagaaagacagtgtcttcgaagattgatttgtgatctggataccatcaacttagaattttagaggaggatataccaaagactgcttttcgaaccagat

SEQ ID NO: 341020 - DNA, 704 bp, Cannabis indica
actttcaccaaaccagtttatgacacactcatcatcaagtcttccaataccaagttaagttggatgtctggaacatgcctaacatctttgagaatcaatttgctactaacactggtttccaagcaaatatcttcaatacccacaatttttgatgcaccactatttcccattctaacattgccaaaatcaccagtgtaagaagtgaagaaatcactacgagcagtaacatggaataaagcaccagaattaatcaccgaactacaatcttgggtagcaagactaacacacccatcatcacatacaatgacaacatcaccttcagtggaaactgtattagtttatttctcaatttctttccttgattccgttctcttttcaatattctgcaatcccttattaagtgacttggcttgttacaatgataacacttaatatcttttcgagacttggatcttcttctagaaccatgctaatttttagtctgactttgtccccgcctgtcatgctttttagtaacaagaaccccagaagaagaagaagattcaccttgtgctttccttttggcctcttcattaagcaaactatctttgaccaaatccatattcaaagtcccttctggcgtggaattagaaactgttatcaccaacgtttcccaactgtcaggttaagaactgaggagtaatgctgcttgcatctcatcatcc

SEQ ID NO: 341021 - DNA, 611 bp, Cannabis indica
ggtacatgttaaagtttagggagaaaaaatcttaattagccaaaaattaatgacctgaaccaattaaagattgtcacgtgacaatttatttgatatttagcagccatgtcactataagaaatgtcacttttaccagtacagttcgttactgtgttggtaaaagtaacttttacaagcacatttcgcaaactgcactggcaaagaggttaaagttttaccagcgtacatttgcagttgctaaagtctaacttttaccagcgcttttcattttatgctggtaaaagttctaatactaacattgatttgccaacccccttttgccaacacatgacaagtaaattctattttatcagcgcaataccaacttttgccagcaaaagtgacatttcttagtgtgtaccaatagaagttttagaattataacttacacattaccgtaaaaaattaaattttatttagaattagaagttaaacttaagcatttataccgtatatttctcttgtttatttaatcaaaatgtgtgattaaaatgcctcttagggtttaatgtatatgtattattttgttccaatcatacactgtacatgggtagatatatatatatatatat

SEQ ID NO: 341022 - DNA, 547 bp, Cannabis indica
aattaaatgggctccctatatgcatctaagcccaaagcaaacatataggctcacacaagcacactaattttgatggatcctatcatgttacaaggtttatacacatatagaagaagattacaaaatttacgttttacaaattatttatttcacctattcacaattgaactattggttaaaatcatatgattggatttgtcaataagttaaccatagcaattttgatcaaacaataataggttttataataaatgttttgataataaaaaatatataaaacacatacacatgtaacaaactggatagatgaatatagaataatttaatttaaataaattaaataattaaattaattttcgaaaatcaaataaataaatacataatttcaaaaataataaataaaattgaataattaattttaataattaaacctataaatttgaaaaattaggttttcaacaaacctaaatatctattcaaaaataatgccaacaaacttttcaaatttaatgttatttcaaaagaaaattaaattaaatatctaata

SEQ ID NO: 341023 - DNA, 812 bp, Cannabis indica
aagcagcatctcgcaagaaacgatgtttgtcttctgttatttattgcaagaagcgcttgtggcgactagcaatatcatcttggtgggtttttactaggtggtccctaatttttgcataatttatttctaatttggattggggttttgaaattctgggtttaaacgggatggcaagttcactggggcactctgtttctaaaacttatggaggataaacttctgaaccagattgggacattgttacaaaaagaaagcaatcccaattcttggatgaaatttaccaaaccagaagcttataaatttgagaaacccaaaagtctacgctctgcccaaaccctaaaaattacccagaaaaattcaacctaaaattgctaaaaccaaataagatgacaaaggtgcaaatcataaagtaatgatcaaacccaaaattgtaaaataacatagaagataagaaaacaaagagggatgaatcgcttactatttaaagtcgggtttcgacacgatgaacgattctccaatcgacaatgcagcgaacgacttggtaatctctttgaatgcttgaggttgaaaaacaaatccgatgaaacttgcaagaagtatgacgtcaaagacaaagatggcatgcaaagcttcgaaaaacctggctggagttttttgtagagaatctcaagaaaaattttgaaatggtaaagatggtgaaaatgtggtttctttttttccttttataccatagggttgatctccgttggattaagagataattggtccaatgggtagaaataagaaagaagtggaaaagatggttatttaat

SEQ ID NO: 341024 - DNA, 698 bp, Cannabis indica
ttttaccattctcaattctcacttttcagattttgaattgagatcatagagcatgtaaaaggtgatcaatcttaaacatgtaaataaacacaaatatggataaaattcacaatcaagaaaggaggaatagaaattatcattaactaaagataatgtcaatcaacaatcatcatctccctaaataggagtttagttcataacatccataattaacattgaaacagaaaataacatagaaaaattaaagagaagagaaagaactagctgaagcaattgatagcctcctcctttgtttctagggatccaaatctaaatgaatcccaattttcacgaactccctctatttaaaccaagtctcatcttcaaaattcgtgaaattacgaaattatccaaaaaaacccgtcaccagagcttcgtcacgacgaaggtttttccccgttgcgatgaaggcttaaataaaattttccaaaactttctgccaatccccgttgcgacgggggtattgtcccgtcgcgacgagattaggcagcaaaatgtcttgtttatttttcttctcaattctttcaccacttgtcctcaattcttgtaaatactttctttaaacacccgaggacatgaaacaaaagaatcaagcataaaatagccctaaaactagaaacaaagagtgaaaatgaaccgaaaatatgacccgaaactta

SEQ ID NO: 341025 - DNA, 750 bp, Cannabis indica
ccgaaaatatgacccgaaacttagactaattttagcctaacaacctccatccatttagtgaagaaattgaccgctactaccgcatacttagctctcccttgcccagtgggtaatgctccaattaggtcaattccccatatagaaaatgggtagggcgaggtcatcattctaagttctgttggcggtacgcgaggtatatgtgaaaatcttggacatttatcccatttcctgacaaaactcgtgtgtgtccttattgatcattggccaataatatccttgtctactgatttttttagacaaacatggccaaccagcatgatccccacagaagccttcatgaatctctctgatgatttcatttacttctgtagggagaacacaccaaagtaggggcattgagtaccctcttctatacagtttgccttcaatcattgtgtagtgaagcactgaatacaatagtttttatgcctcatttttgtctatcatctcgacgttttcagtttcacatatacttggctcgctcaacatatctaccggaactaagttcaattcatccaagtcattctacgaggctagttttgctaaggcatcagcgttggagttttgttctcttggaatttgtttgattttaaaataatcgaatctttccaagttcttctgaactttctctagatacctcgccatttttaagcctttagcctagtattccccgaggacctggttcacaatcagttgcgaatcactacgaca

SEQ ID NO: 341026 - DNA, 598 bp, Cannabis indica
aaaatttaggattcataccatccagtgtcgcgcgatttgtcaggatgcatctgaaacacagcttcttttatctcttgatcttcaaccgcccgaaaaaggagttcattgtgctcagcacgaaccgtaggggtcacacaatccaaaacttcatcccaggtagacgtaacagcagtgaacaagttggtgtagaattcaagcagtacattatccaaaccattgccccaatgccgagagttcccattgacatctttaagacaaaaaatctggttattccttcttcttgaagacgactttgaatgaaaaaacttgctattctgatctccctctttaaccacaattgttttgatctttgtttccaaaagatttctctttgattcaacacagcaaacaactcctttttagcatcatagaaaagcttttttccttcttcgtcccttctactttttaatcttttaagctcctgattgcattgcttgatgcgagttgagaagttcccaaatacatctttccccactgttgcaacaatcggccacactctgaaattttttcttcaatatcgaaacccctcatcctatcccagctgtaacgtccccgcttc

SEQ ID NO: 341027 - DNA, 811 bp, Cannabis indica
tttaattagaaaaatttctttatttttacattatatgggctgagattagtccatcagctaaaaaaataataaaaaaagtttttcgacaaaaagtgataaaaaaagttgaatttgacttaaatatttttttcatactgttgccctctattttgcccaaactacgtggaccaatatgacaacgacacgtggatctgagaggcccaactcttagataaatcaactaagtctttttgcatcaggagtgtcaacgagaagatacctctcggaggagatgtgaaggctccacatactcccggagaccaggggaacgctaaggcatctccgggaggtactggaccctatttgaacagtcacctctcatttaatgccgcatgggagaaaacatattggaactgccataagcaatatgtttgacggcgtgacccctcttttgcagctattacgctatgattaataaggttagtgacgactactttatgagggatcacatcaatcaagaaggaataaaggattatatccacctaacccctaagatacctacggtataggtcatgtattttctattttgcatcgactaggaatatgtgcccctatcgaacctacaccaaaagacaagtgattcagttatagggatccccccagaaaaacactgtaaatactccccaaatacactgagaaggggatcgagaattttgggttcacaagaattaaagagagcaactaagaggaatatctaccaagaacattctttgtaataaatactctcataaataaaaaagactcgtggactaaggctcgttaatgccccaac

SEQ ID NO: 341028 - DNA, 623 bp, Cannabis indica
cctcttgatccttttattggcgagtggtatggtaatcacaaatggatcgacatgaggatatctcaggtttttcttgtcttcctccgtgaattcaatgggaggttcttcggttttcaccttcttggaaggttctggggcaaaggtcgactgctcattctttatctctttcacatatcttttctgggcgttattgctttcccctgcaatatgtggccctcctgaaataaccaggatgtcctctcctgcaacaggaagaggttgtaacccctagttttttgggttattgggcagactgggctggttgtatccatggccctgtcttttcacgtattgcttaaaatggcctcgagcgatgagactttctatctcatctttcaattggcgaaattcaacggtcgtatgcccaatataaatacttgttaggatttctattgctcctcaaattcctcatgggttcaggcttcctgaaggaaaccttttgctcatgtgcgaggtaaatattctcgcgagtttcattaagctcggtataaatagtatacactggcacgtacttatcatgcttcttctgtttctttttatcctttgacggttctttagtttcgtcctttctcttcaaactagaa

SEQ ID NO: 341029 - DNA, 1275 bp, Cannabis indica
ttgcagtggtaggggttgattactttactaagtggactgaagccgaaccactcgcaaccattacatcaaagaaagttcaagactttatgtaaagaacataatcttccgatttggactgccgcacaagatagtttcttataatgacaagcagttcgacagccaatccttcactgatttttgtgcaaaccatagtatcatcaaaagtttctccgctgtggcgcatcctcaagcgaatggtcaagttgaagccgtcaacagaacttgaaggatacactgaagaaaaaacttgaagatgccaaaggaaactggctagaagagcttcctgaagttctatggtcatatcgtaaaactgagaaaacagcaaccggacagacaccattcgtaatggcgtacagatatgaagctatggtgcctgtagaactctagccacctacccacagaagattgatgtacaatcaagataccagtcacatactcctagcataatcatttgatgaaatcaaagagaaacgagcgactgcaaacttgaagttgatggccgatcaacaaaaagtagcttgatatttaaataaacaagtgaaggctcagaaattctttgtgggagatatggtcctgagaagggtattcctaaacaccaaagatagtacggcatgtgtacttggacccagctgggaagaacaatatcaagtggtcgaagttctcgactccgaagcatacaaattaggtaagtatgacgaaaaaatgcaactcgttctagtaccacggtattggaatggggaacatttaagaaagtactaccaataaagtactaggtcggatgaccacattaagtattgaatgaacatttacttttaagtagatggcttgctgggcggactacgctcaaaggtttcgataaaagaaacaaagtactcaggtcaggtgaccaccatttaaagttcagtttcttattactgcaatttgttttatctcatgttaagctaaaaggtcaaattggaccaaatagctctgatgtaagttactacgatattaaatacaattttcgatcaataaatgaataaagataattatttcaaaattcaaattgagtcgaaattatcagcatgtctctaattaaccatcccgtgcgtacaaaaggtttggtcaaaccaaaaatattgaatagattaacaatatatttgtaaaagacaagtgaccaagagtcatacgtctgctcggtcacttggagggcacctatacctgtacaaagcatttggtaaaaataaaacaatcaca

SEQ ID NO: 341030 - DNA, 946 bp, Cannabis indica
ctttctcttcaaactagaagcccccgagttatcaattcttatggaaatagtaccgcttgaaatattactgggtttccttcctaagcttgttttcaatagattcatttcctttccggcttcttccttctgaatgaacacttcgccctttcgttgaactcagcgatgcttctcactggatgtccttgtaagtcatcccacaactcgccccctgcggttaatggatcggtagagatccccgcctgaagggctataagttacatgctatcatccaaattcttaaccctagccgcagtcgtgctaaaactacttaagtatgccttaagtgtctcgctgggctgcttctttatattggttagcgaggccgcttcgggtcgtctatccatagcagcctggaatggtttcttgaaatccctggacagctgctcccaagaagttattgaatgacgagtaaacttgttaaaccagatactggctactccaacaagtaaggtggggaacaaaatacagcgtaaattgtttgtcacattacttgctcgcattattgtgtgaaagttattcaaatgcgagactggatcagtggttccatcatatgacgagacattcgggtttttgaatctcgaaggaaaaggggtattcattatatctggatgatacggttcaagctcatcatcagagtcgtatctagattgtttccctaattcccccacttcatatctcctgaacttgtcctccagctcatttatccgcaattagattggatcctcttacttaagaacactactgagaaagtaaatctaaccattcatgtggatagaaataacttatcagaattatgagaataagatagaagaattcttgcatagtctagtcgaatgacatgagcaaagatttctaatcctcataaaattttatggtatctcaatttgattgctatgttgatgactta

SEQ ID NO: 341031 - DNA, 483 bp, Cannabis indica
caatacgacctaatacggcgttctaaacgagcccataattaattatcaaatagaattgacattcatattatttattaattagaccatacaaagtctcttaattaacaaatagagcctaaaatgtcttttcttcacaattaagcccttgcttagtgaaaattcataaataagtcattgtaaagaccacgtagctttaatttggaaattagcagataattaggacttaattatgaaagttattgattagtattgaattatttatttatgatgatttatttgaattcagaatgcatttttatatcatatatagaaattttataattttgcatatcttgtgcccgacaatattggaacgcggtatttggctattagaatcacatcctagtattttgagtatagcaagacaataaaattagaaattaggaatgttgagaatagtcgggattttagaatttcccaaaatacccctaagtgccattttat

SEQ ID NO: 341032 - DNA, 928 bp, Cannabis indica
agattgatcttgtcaaatccactatgaacaagatacaaatgccataattaatatattattgtagttatggtcttttgatgacttaggtctagttataacaaagagttcttagaatagttcaagtagatttggtcacagaatacaaaactcatatttcatacattaacatacaatttggattcattattagaaaaatggatattaaacttgtgaaagttgtacaataatgttcaatgtattttaaatttaaatttttatttggattcttaaatttaaagtcaaagacttaaatttataccaaatatttttgagtaattattctttcttggaccaccactactattgaaaaattgtatttttacaaataccaaaatatcagtaaaaatacaactgtcacaatctgcagcagcagaatgtaattctgtcactgcagaacacagttttgcgaaaacaaaccagttttagaaataaaaattcagcaaaaaataaatcacttgacacaagagaactatatgtggtatcagtgttatttcaaacattcctagtccaatgggccacgcccagagaatgaaatcaattagtaaagtatcaaagattagaaaagcaattatcttaaataaatttagactccttctagtgatttgcggcaaccctttataatccaccttgctaatctgatctttgaaacacaccaagtagtaaactcccttcagctattgatgtgtgcttactgcctcctgaagtaaggcttaaataaatcttctcctgaagatatatggtcactttctcccaaaatgagacttggaaaagtcttctcccgaagatccacgcttgttcaaagcttctctataacctattctatgaatagtatgagatcataataagaaaacaaaaacctagttgaacactctaggtttttacaaatgaa

SEQ ID NO: 341033 - DNA, 798 bp, Cannabis indica
tctgaaatcactaaaacaaaaaaaaatgactaaaagtggtttagttattagcactttttgccctatttataagcaaattagtgaagggatataatcattttaaaatttaaacgcctagattttcccccaaaagtaaacgttaagaaatcaagtaatcaagtacctggagaagggcaaccgtcaaaagcatgcaatttcctgaaagggctcgaggtactaattaatcagcattaatgggttgaatattgaagagacctttggtcagaaccacaccggatcaccaacaggcgcatcaacacgtgccacccgttcagacacgaattcaaactaagtgaagtctacgtgcgactttggaagtcccgtgcagacttggggggcaaatgttatcccatttttcgcaccatgacgtggcaatgtgtactagtgacgcgtgtctacaattctctacatttggctggagagatatttcgaacaaacctcaaccatacatctgtacgaatcaaagtttggctgaccgagcagggcaagggcaaatgatccggacaataaacgaagtcatttctccaagcagtgtatcaagacttaactacttcaattttgatatcgtgaagctcaagcacacaagcaatccctacaatcatgagatcatatcaaacggatatggcaagctgtctgaatccctcatttcatgtattctaaatatgtaatgtatgttcttaccaattatagatattgcaaacaaaaggtaaaacctacctttccatgcatttagccctataaatattgatccatcctaac

SEQ ID NO: 341034 - DNA, 896 bp, Cannabis indica
aagtggatatataagcttaagcttaatttattaattacggagatttattttcatacatgaatacaatatgatatatttgtgaaataaaaatatttccaggttcagcgaccctcgacacccgattggagcccaaaactgtcacaacagttttagttagaaatattgatgggactattgggataagttgatgttatacccaaaattcggtgagcacgtcagagcaaggcacgtgtcgagctaggaagaactcaaacacgcaatcgtaagtacccttggcatggaacaactcgttagaaacatgattagcagagtatgtttataacttggctggttgaaaagtcttccgcgagataggaacgtgcaaactactaactcatgtatcgacgagaaaccatgtgagtacaagtgtgcatgacaagggttcaacctcactgcgtgaaagagaaacaaaacttagcgtatattgcatgatatacaactaagtaaaaacagtttggtgaatcaagataatagacagcgaggcgtctatctccctggaagatggcatgcatgcgaggaacgtcatctcgacaccagagaatatagatatcagagttaaaacaatattaatctcgggaagtcagatgacaagcaactgctcgccatcaaagttaactcggctccattaccagagaggcatccccatgagataaggcttaccgtatatccttaattatgcgttcatctcggcccaataaaagcgggatactcacagctgtgtgaattctaaatgaaaaccgcgtttacttagtgtgatttgtaatccaattccatgatttgagggaataattactgtatagattatagtcaacttttataatttactgccactatgtaattataaatagtggtagaaa

SEQ ID NO: 341035 - DNA, 840 bp, Cannabis indica
gaacactctaggtttttacaaatgaacactcccctcacaaataaaaatatgcaaaactaaaaaaactagaagaggtgaatcgattggctgctctctaggttctatctatagaacatagcaagcctaaagacagtcacaaaattaattacacagttgtacaaactttcctaaaaaaatcttgttttacagcagcagaatcgggtttttgcagtaacaaattagaccagaaaggaaccttgccaaataggtgcccgatcatgaacatggacttcatacctgccaaaaacagtgtgcttgatctgatcttatcaagacacaatcgaaagcattaaagagaaagagcaaggtcaaagtttccaaataaaaccaactttccataagagaatttcttctcatacaagaagtttccaaaagaagaaatggacagctgaaaaagaattctttcctttgaaagaagagagcgataaaaatacaaaatcaaagtgaattaaatagtttaatagcacacgaaaaatacatattaaataaaaaatattttgacacctaaattgtcaaaaaaatgactttgcaatctctctcgttggtacttaagataatcaaaatatttttaactaatatgcacatgcaaaacaaagttggcaaaaacaaacaattaaactacccttgagaaatacatcattaaactaaaatagtatgctaactttaaactaaagttcaacataaacaccaacctcaaccccctggaaaaaggattccagagttgagtatacaaactaagattaaaactattactcccctatttgtttatctagaagggccaaaggaaaaaaaaaaaaaaaa

SEQ ID NO: 341036 - DNA, 608 bp, Cannabis indica
actagagcggtcattacatctatagtcttgtatttttgaagcttttactttggttgagtttgtgattttgtgatatgagggttgttagggtttagtggtgttaaaaatggttttcagagttaattttgggttgattctaagttctggatattggttttgttgagttatgattgaattgcacaagtttggactttgaaacccaaactttgatctttaatgacatatatgaattcagtgagttttttttgagaattactggttggattatgttgtgtataccttttttaggtactctggaaagtttggaggcaattggacaagtgttgagcgaattggaggttttttggggtggagtggtataaaccggttaaccggtttaccagtacctgtaaaaccggttactgtaaaaccggttaactggttttggcagggtccccaaaaaacttgttttctcaattctcgtccatttcagtgccttagttgggtgtttccctatttcttaggttaatgtaatccctatagagtataacagagcattgagtgtagactcgggtttcccagattagggtttcaaacatgtaatttacccggttttaatatgtgattag

SEQ ID NO: 341037 - DNA, 508 bp, Cannabis indica
tgttgtgctcatgtggtcttcacgtcgggtcttctaacaaagactcattccttatgtacctatcaatggaatctaatacatttccaacttcttactcgtagtgagtaagaagggtctcccaaatagagttgatgtaggattgggatcaccctcatcttccatctcaattatgtaaggagtgacaagtctattagcatgtacaaaaacatcttcaactattcttaagtgataagcattagtctgattagtcaattgaatcaaaacctgagtttctcttaacgaaccaatatttaaagaagcaaaattagaataagacataatattactaattgctcctaaatttatcatgcaatgatcaaacctagttttaccaattgtgcattgaattgtacttatcttaggcaacaactttcttttgagaacaacagaaacattctccccacacttattttctcaccaccattcaatttgtttttcatttggacacaactccttaaaaatgttagca

SEQ ID NO: 341038 - DNA, 709 bp, Cannabis indica
tacaaatattagttattatttttttagaaattttttccaaatgtcataaaaattcaaatttcccattagaaacaacaactaatcaagttcaacatcttccacaaagaccttcgtgtgagtcatagactccaaaacaaagcaagacaaattccgtcttagcactcattcagtcaaattatgagcattgaagttccccctccagtcaatctttatgattccccaaaggaagggtgactcctttgactctcatcaatgagtgaatttgattgaggcactagctcaatgaacaaatacaagtgaacaaatatttatgtcacgttacaataagtactagttgaatctttaagcacacgttagtgtccagaccccagatctggactcaatgcctggggtcgggtttgggtcccgaggcttcggatctcaaatcttagtcctcgaatcagaacttaaaaccgaaccctgaacctcaaacccaaactagggatgcacatttttccattagaataggagtctgcggggacccgcccctaatggggtgtggatttggattattttttgtccccaaatattaaacggtgcgagtacgaggatgacactctctgccccgacgggaacttattgaatttattaattatatttttattaatataaaatatgtaaaatgtatttgtatttttttttagtatattagtgtcatttttataatttt

SEQ ID NO: 341039 - DNA, 793 bp, Cannabis indica
tattataattatattttaatagttgccgaaaacctcggtcaacaaaagctaagacttatttggaaccaaatctaggatggcgagcaactagatgggtggacaattaatagtgaagggtatctataccatatgggaagactagttgttgcagatatccctgatcttagggagaccattttgattgaggcccatagattcaaatttgctgtacatcctggaagtacaaagatgtaccaagatttaaagagacaacattggtgggaaggtatgaaaagagatgtggccatctttgtagctaagtgtatagtatgtcagcaagtaaaggctgagcatcagagaccctcaagtttacttcaacctttgcctataccagaatggaagtgggacaagattacaatggactttgttactgggttgccattgacacctttgaagcatgacgctgtttgggtgattgttgatcgtttaactaagtctgctcattttattccaatcaggaaggattacaagcttaccaaactagctcgactttatgtagacaatatagttcgactacatggagtgccttcaagcattgtttttgatagagatcctcgatttacatcaaggttttgaaggccttgcaacaagccttagggactgaacttcacttgagtactgcccatcatccacagacagatggacagtctgagaggaccatacagactttggaagacatgcttcgctcttgtgttttggattttggaggtagttggggagaacacttgtcactagtggaattcacatacaacaa

SEQ ID NO: 341040 - DNA, 2427 bp, Cannabis indica
attggtgataaccatttacctcgcaaataaaagaaataaaaggatcaagagagtgttaatagacaatggcagctcggtaaatatcctttgcaaggagaccctaaagaaaatggggctcaaaaaggcaaaattaaggtcttgtatggtgaacctttgtggattcactggagacagtatcgcgagcattggcataattgagctcgccttaactttaggcgaggcacctttatcttctactgttatgcaagactttttagcgttgacttgccttcagcttacaacatattgttgggtcgtccagcactgatcaaattaaggccagtcaattcaatcaagcacctatccttgaaattccaaacgccagatggcgtgggagtggtgcgtggtgaccaaatgttggctcgtgattgctatcgcatagaaaggtcggtcatcagttgatgacgatcttggcaggagaaaacgagaagaaagatgaagatcttgatccctaagttcaagatgaaagaaacctgctaaaactaatcgaagaatttgaagagcttattcttgacccaggaagtcccacaaaatatgtatacattgggaagaacctagacgggaagctcaaatagtaactaatatgctttttgaaggcgaactaggatcaatttgcctggagtcatggggatatgatagggatgaaccctaagattatcttccaacacttaaaggaggcccctggattccaaaaggcaaggggcacaaaaacaggtagttgactagttgttagtcaacaattttatacacaaggtgttttatccctcgtggatagccaatcctgctctcatcccaaaagttaacgaaacttggagaacttgtattgacttctctgatatgaataaggcgtgtccaaaggattgtttgccagttccccacatcaaccagttagtggatgcaactactgggcacgagcttatgtcatttatagatgcatattctagatataaccagataaaaatgtatgtccctgatcaagaacatacaatcttcataaccaacatgggattctattgttataaagtcatgcagttcggactaaagaatgtaggggtaacgtatcagtggttggtaaacgaaatgtttgccaaccaaatagggcgaaacatggaggtttacgtcgatgatatgtttgtaaaactgataaaaagtaaggatcattcctcagacctcgcggaatgctttagaatattaaaaaaaatataacatgaagctaaactcaaaaaaatattcatttggagtctcatcgagaaagtttttgggattcatagttaacacgaggggtattgaggaaaatcctgaaaaaatcaaggcattaatagacatgccatcaccgacaaagcctaagcaaatacaggccctgacaggaagaatggcagcacttaacaggttcatttcgaagtcaactaataagcgtgtgtcgttcttcaacatattgcgaggcaacaaaaagttcgagtggacaaaaaagtgcgaggaggcctttcataacataaaaaggcgtcattgaacgactctagttttggcgaaaccaataactagagagacattgtttctctattagccatctcgaaagatgcgattagtgcagctatagtgcgagaagagggcaagcaccagcaacctgtttactatgtaagtaaaaagttactaggagtagaatctaaatatccccctctagaaaaactcgcgttgtgcccagtccatgtgtctcgtaaactacggccatacttcaaagctcaccccaaaaaagtgttaaccgatcaacccttaacacaagatttatcaaaaccagatgcttctggaagattgataaaatggtcgattgaactggggtagtttgacataacataccatcctcaaacatcaatcaacggccaagctttggctgacttcttgatagaaggtatacctcctaaagaaattccaccttatcggtgagacgcggaaacgtggaagttatatgtggatggcgcatccaacgaacagggttcgggtggggtaatattaatatcttcagaaggctttaagtttcactatgctatgagattccaatttaacgcatcaaataatgaggctgaatatgaagccttgatcgctggcttaaagatagcagaggcgctgaaagtcaaaaatctcatttgtcatagtgattcgcagctgatcgtgaactaggtcctcgaggactaccaggcgaaaggcttaaaaatggaaaagtacttagagaaagtttggaagaacttgaaaaggtttgattactttataaataaattttgagagaactaaactccaacgtcgatgccttagcaaaaatggcctcgtagaatgacctggatgaattgaatctagtcccggttgttgggtttagtgccctaaataaaacccatt

SEQ ID NO: 341041 - DNA, 658 bp, Cannabis indica
aaagttccttaatatgttcaaaaccaagtaatttagcatcaagagtagagattaaggcatacctgcgagaaagggcatcagcaaccacattctccttaccttgtttataccgaatgacatatggaaatgtttcaatgtactcaacccatcgtgcatgtctcctgttgagcttgtgttgccccttcaaatgtttaagggattcatgatctgtgtgaatcacaaattctttgggccacaaatagtgttgccatgtttctaaagctcgcaccagggcatacaactctttatcataggtggggtaattaagtgcagccccacctagcttttcactaaagtatgcaaggggtctcccttcctgcataagaacagcgccaatacctataccagaagcatcacattcaatttcaaatgtgttagaaaaattaggtaaagcgagtactggggcgtgagtaagcttgtgtttaagcagttgaaatgcctcctcttgtgcttcaccccattcaaaagcaacattctttttgataacttctgtaagcggtgctgcgatggtgctgaaatccttcacaaacctcctgtaaaaactagcaaggccatgaaaacttcgaacatgacctatagttgagggggttggccactcttggatggctttgatcttttc

SEQ ID NO: 341042 - DNA, 674 bp, Cannabis indica
cgatcattaccaaccacccccatgaaattcaaaattcgctcaatcacagtgagccactgctcagccttcatcacatgtggacctcccagaaacactggaggtgcttgcttacgaaacctttcgtataacggttccatattgttgccagcaacaggttgttctgctggcaccactggagctacaacgacctgagcttgttgtggaggcacggcaggaagaccctgctgccttaatctcagaatttcttcatcttgctagcggattcgatcttgcatctccttaaacctttgctcccaattcggaggagcttgtggtggatttacaggatgaccaccctgaactctgccacggccacgaccgcgaccacggggattctggggatttgatttccctgaccgcctgcggcctcaaccatattaccctgacttcttgtatttcgctgggtgtccattttataggacttagcctgcgaacccataatccaggctagttagacaacgattataaaacttaataccgctcttatgcatttaaaggcaacacacttaaaataaataatcataatctaatatgattcctaacatactttaatattcaaataaatactaaacaagtacgggcttactgaaccgtgaaccgggctttctctgatgaagattgtacatgtcttagca

SEQ ID NO: 341043 - DNA, 800 bp, Cannabis indica
ataaatggatagagaactaaaaacttggatttacaggataggaagagattctaaaacaagttgatgagttcctgaacaccaaggttgcacctcaagagcttgtggatgagcttaaggtacttttactatgatataacattctttctcataatttaatagaagagtttgaatatcctatatattcatccatagagaagtaggttttgagattttgtgtgttgcggtgataattgaaggttgataacttgcctattttagtgaagtaggatctgtgaaatttatgtgctgcggtgatataaggatgaaaacttctgtattatctgattgtttgtgattgaaattgacagatggttaggttaataaaataggggaaatgctgtccgatttttttaaaaatatatttatcatattttttaagtagttgtgtgcattgatagacatgagaatatgatgttattgtaggttgattaaagaataatgtctggtcaaatcggttctaattcggaggatgatgttgattttgtgccatcaactaatgttgaagaaatacaatctgttagtaatacattagatgaaaatcagaatacagggagaaaaagaacttctcgtgcatgggatcattttactcgacaagaaattgatggtaaaattaaagcggtttgtaatcactgcgggcgtaagttggtgggaggaagtactgcggggactacgcatttaaatactcacgtgaagaggtgtccagttagaaaggcacaacttgctgctaatccaactacaagtccttcagttcctttcaattt

SEQ ID NO: 341044 - DNA, 703 bp, Cannabis indica
attttaaaatacgctcaattactgtgagccactgttgcgccttcatcacatcaggacctcccaaaaacattggaggtgcttgctttcggaatctttcatacaatggctctatacggttgccagcaacaggttgttctactggcatcgctaaagctacaacagcctgagcaacttgctgaggaggcacgacaggaggaccctgctgcctcaacctctgaatctcttcatcctgctggcggattcgatcttgcatttttgcaaacctcccctcccaatccggaggagcttgtggtggatttacaaggtgaccaccctgagctctaccacggccacggccgcgaccacagggattcttaggattttgatttccctgaccgcctccagtctcaaccatattaccctgacttcttgtatttcgcttggcgtccattttataggacttagcgtgcgaacccataagtcaggcaggttagacagcgatcataaaacttaataccacactttaggacttaaaggcaacacacttaaaatgaataattaaaatctattatgcttcctatcatgctttaataattatttaaaatactaaacaaatacgagcatactaatttgtgaatcgagctttccctgatgaagattgtacatgtcttggtaagcttcagtagacaaacctggcagctctgataccaaaattgtaacgccc

SEQ ID NO: 341045 - DNA, 601 bp, Cannabis indica
gcatttgaatgggtgacacgtattaggcacgtctgctcgcgatttgatgtgaggctgacctggcgtcccttgagtttttggctaattaatgctctgactcaattaatgcctcaaaaacctcgtttttctcaccatgttttgacggttacacttgattatatttgattcccaatatttgcttttagggggaaccgatgcatctaaggcatttgaaatgattacccttttttcacttttttcctataaatagggttgagcatcattcacaaattcacttttaccaatttctccattaagcaaactaagagcaaaaaaggttttcacttcaagtctgtcatcagatttctaccaaaggcatccgagcagcttcatttggactgaaaccagacaacaaatagtgagtaagttttcaatttcttcctctttttactttgcatgtttaatttctgggtttcatacatgcgttcttgactttgttgtagaagataggtagaaaatctaggtttaaaacttcgcgattttctttgtaataatctgtaaaacttcacggttcatgacattggcctttgtgttgggttttatgccctaaataaaactcttt

SEQ ID NO: 341046 - DNA, 675 bp, Cannabis indica
ggtaaaataatttctaacactaccaacggagaccatgaaaaatttcatgaaaaggttcaaagaggacgcttcaaaaaccaaaaaggtcgacgacaaacagtagttagctctgctgcaaactagaatccggacaggaactcctttttggaatgaactgctagcctccaagactttcaaaagagggtccagaagtacattaacctgaaagaagcacaaatagtggcttacggagggtattacctgacaggagtgtcagggtatgcagcaggagcacaacttcctacagctgcactccctgtcgcccctcaaataagtggaatacagttctctacaactctaggatacaattaaaatcttactctgcctcttgcactgtcacatttgggggccctcgtaagcaatcccctagggtgagcacgccacttccaaatcaatccaccccagcgacaagcaggggaggagcacctcaaagttcccagagtaagaggtcttttaaaggtagtacgcaatctgaggacaaaagacaaaggacagggtctttttgggctttgtgccctaaataaaactctatttcaatgtaatctttgtcattcaattatcaataaggatacagaaatattttcatcacttatttagtatgtcatttggttcatgtgatcatttatatgtttattt

SEQ ID NO: 341047 - DNA, 876 bp, Cannabis indica
ctctctctctctctctctctctctctctctctctctctctctctctctcccccccacgtcgcaccatggtagtcgcaccaccatatttgcctagccgaagtgcctatcggagactgccgagatgcccactcgtcaaccgcttagacgagagccaccacacacccaccccactaagtcacagtactctctctctctctctctctctctcgatctctctcaatctctttccctctttcgatctctaattttgaatctgatattgcctgttttttaggtttgtggtggtagggtggtggtgatgttgtggtgtacggtggtgtgctttctcgtctctaaatttttttgaaattgttgtaaatttgagatattagatttgtttatgtggaactaaaaaaattatgtgaaactaaaaaaaaattgtgtggcattgatttggttataatttataattaccagatttttttatttttttttttaaattttgcttcagtttataaccgaagcaaaaaacaattagcgttggtgcactaattttttgtttttgcttcggttcataatcgaaacaaataatcaattagcatcgattcataactgaagcaaaaaatatcattatttgtgtttacgactatagcgtcaggtacactaaccgaaacaaattctttatatgtcacttaaaaatcgaagtaaaagcctctttttgtagtagtgagaatttcttattaggagcttggttacataggcccatggttcctacattgtctgggataatatcatctagtagaatcaactgatcggtttaataagtcaatcagaattcaaaaatagactgtcttatttgagaatttttacaaaattttggcaattttaagaagaaaa

SEQ ID NO: 341048 - DNA, 587 bp, Cannabis indica
tggtagagccctaactgtactcccggaaattactaagtgttataccacgaacacgacgtacactaggtactcgtgttggtaacaccgtaaccacctcaatttgcaacactatactaacacaagcatataccttcatatataaattcttacgctatcttaccttgttccgtgctcaagtgtgccggtcagcctgagtggaaacgcagctcgacgctttacagggccctaaaccataattttcaaaattcgatgagagacacgctaaaatacttatcggggttttaaaatagaaactaagcttaaccctatcgacaaataggatgccaataccctaaattacacaaaaacgggaaaaactaaggctcgggaaaaagccccaaccggcaaaccggttcccaaccggaaccccagttcctgggtaccaaccggtcgaccgattgcactaggcttctcagaaccggtcgaccggttctgagcaggggacaaaaattcgacccctttaattcaaaacgagcccaaacttttcaatactttccagaacacctgtatgcactaaaataaaccagttccaagccagaaaactcaac

SEQ ID NO: 341049 - DNA, 712 bp, Cannabis indica
aataaaattggtatttaaataattagatgagataagtgataaaatagaacaagacacttaagttttattagttgaaataaaatgacaaaaatctaactctaaagcccataatatattgagccctatgagttagatatcagcccaaatctttatttaagcccatctcatttaaacctaactctatgtgaatgcttataaaaagaagaagaagaagaagattgaaaaatctaatgtctgatcttgatgttctcttccattcacatatttcgaattgcatacactatgtaattcaaattctcactctcaatatctgtttcaaaggtgatttgagtattagctcacactattcaaggtgatactcaggcctttgtgaaagactgtgatgaacataaacgaaggaggagaagatctaagttcagatcttgataatactctgccatagacaggaatcaaggggttagagatctgaatggaaggagacaatttatttcgctgcaaccaatgtaaggatttctatatccctttatgtgtgtaatttattattttaggaatttccatattaagatgttagattagtcataattaacatacatgaatagtaaataagatactgataaaagattttccaacactaactgcctcaatatgtacaatcatcatctagcccgaacttactattgttcagcatttgcctttgttggaaattatttta

SEQ ID NO: 341050 - DNA, 1122 bp, Cannabis indica
tgtgtagatttagaagtattttctggccattctataggttcactaagaaccctaagtaatttgttatgagcaagaagagctctaatcttcttcctccaaatcctatagtcccccgatccatcaaacttgtcaacatctactctaatattactcatgtttaattgttataacaagataataaaagtaagaatgtaacaagacaaagtttaggttagagttttcctttttatcaacttcttgataatttcagattttgcttcttcaatgttttgatgatcttgcttgtttcttgacgttgtttccaggtgttgttcaatcttcttgcttccccgagctctgataccactgtaggaaatagctggcagccttgaaatgccgagactacccccactccaacaccccatcaaaaaacaagggcagtttcgtctttttgctttggtgcggatctcaaaggaatatgctttcccaagaaaccgaatatgccatttttaaatctgattttatcctttcaaaccctattgcatttatttttcatataaatgctttcttttctttttcctagaaaaccctagcacacaaaacacttctctcttctcttcaaacacagcagccggcctccttcttctcttctccttcttctattttctttgagcagcaagaacaaaccctagcaaagcttcttctcctccttcttctacagcccagccgaaacaccttcctcctatctttctccttgctgcaacattactacagccatgaaaactcctctttgctgcaccaaaaaaattcccagccgaaaccttagtgttccttcctcttctccttcaagctcttcaagagctttcttacaaaaccctacacagaaaaatagacaaccaaaaaaggtaataacaaagataaaataatctttgtttgttgatgagagtagacccgaaaaacaaagtgcagaaaaataaaatgcaaaagacaaagagattgatttcggagttcctcttgaaatcaagagtacatctccgtcaagcttccctcaaagacgcttgattcttcactatccaaatcagtttcgggttacaaggattttggagattacaagctacaaagtcagctggtaatctctttgct

SEQ ID NO: 341051 - DNA, 762 bp, Cannabis indica
agtttgtctttttgtgagaatggggtttagtagtaaatctgattttttttagtaatgtttaaggctgatattagttggaattaatcaaaaaggaaattatctcattttcaagaaaaaataaaagtaaagcaaaatctcattttctctcaattgtctctctctttcatgtcttcaagaaccagctagggttgagggttttctttgtgtaattcaagtcattctcagctatttgttagtgatctcaagccaaggtatagtcttttaacttctacctttattttcttgaattttaaggatggatttttgcataaaatggtgatttggctactgttgttgctgtagttattagatgttgtttttagaagttaaattatgcttgattgtgttggtttaagcttgaattgatggatgttagttagatttaaccaagttttgagttttgaactcaaacttggagctcaaatggtggattgtgtttctgagcatgttagttggttttgttgcttgggttatgttcattggggtctaaatagtaggtctggaaggtttcatgaagtttggagttgatttgaatgatttatgaatttttgactcattcctgcactgaatcagaattccggttcagaggggcctgtaggaaccaaaattccagttggctcccaagaaaccccacagagccggaatttcagttggggaaccggtctaccggttgggataattttgggaacccttgttttttctatttttgtgttgtttagggta

SEQ ID NO: 341052 - DNA, 690 bp, Cannabis indica
tcaaccatcttgcccttccgcttacgctcaagggtggctgcaacctcgacctcatcttcctgggcttccccctcctcgtctatcaaaacaatcgttcccgaaggggcactggacgaagacctcccgtgggtcaccaactgggatggagccggaggcagagaggcgtcagggctatatgcctcgagaagtgtagccagaagatcttccataggcctggcctgctacaacaaagaaataaacgaagtgttagaataatcattagaaaaggcgtgcgcccaataagaaagcaataaaactagtcctaccctgactctctaattcagctatagcaaagtcttggactacaaggctaccttcatcatccccaagaaagctgtccgaagggagaaaccagttggaggataaatgggttgaatggtctaggggaataggcaccggaggtccagagcccatccgggaccgacccaagaaatggcccaagtgggaaaaataatactccttggcgtgactcccccaccgggtggcaggcattctaaacctgcagaggcgctcatcgaaccctataggtctaagttgggtatactctcggacaggagggacataatgaattactaaaggagacttaccagaacctgaagtactggtgtcgggagcaccaatgttgggaaccggggccgcaggcttgggcct

SEQ ID NO: 341053 - DNA, 897 bp, Cannabis indica
gggttccacctgctgttaatccttgacagagaggaagcgtggggaatggtgaaacagttcctattactggaattttgcctggtgtgcaagagactgggaataactgttccgcacccaacgagggcattcataatacgaccgttccacctggaaccaacacctagacgaccatcggagatgccaccaaattacaaaatgttggtgacgcgctcggactcatgcagggtcataacaacactctgcatcatgataggacgaactgcgtgctgcagtaaatctcgtgtttgacgaacaaaggcgtatgttcgctgaatggagagataaaaagatggaggcattaagggctcaccatacagagatcgaagattttagtcggcaagccaccatgctgataggaacagcctaccaaactgtaggtcagcaatcgctgaacgtcattcccctgggagaaacgaaagaggacccaacgatgaatacttcgtagactactaatggtcagccgcccaatccccggttatgagttccgctcatcggcctagcagtaggcgagcagaccttgtccggaaattcattaggaggagtcatacctgacggctccaaccagactaatggtgccattccacccatcaatcaagcgaatcaatcgctaaggcaaccaggctcttttgtgttccaaaggttgggagcaacccatgacctaaggaacgatctaaacagaagaaggggaacagacgaatagagtactacaacgatcgtgcagcctggagcccatactcaattccccgctgagaaagacgctgacgtaatccaaatcgaccagaatgccgagcaggtcagcccagccgtaaaggcccagcttgacgaattaaaaaatatgtttcatgacatggctggaca

SEQ ID NO: 341054 - DNA, 663 bp, Cannabis indica
gcacttgaaccttcctcccaaggtaaaaaaattttcttggaaattttcttctaactagattcctattaaggtcaatcttcacagacatggttttcataacgatgatttatgtccaatttgtaattgtgaattgaaaactatcatgcgatgtggggatgtagtaagcaattgcctcaactcgaaaattatgtgcttttaaacttgataacccaaatatgattgtaaatagtatatgtgatttcatctgcaattatcttctacaacttcctcgcacaaaaattgaattggttcttgttacttggtggcgtatttggttccgtgtaataaacaagttcataaaaatttaaccattttgcctgaatttattggtccttgggcggctaactttctaggttcttatcatttaaaaaaggaatttcatttcccttgatcgtactacagcaagtgatccacctcattggaaatgccctccttcaggtactctcaaggccaacacagacgtaatttttggctctagttcgcgctcgagcagccttggtatggtgatcagagaccatgatggcaaggtcactgcttctgtagtgtggaaagctcatggcagttgtgacagtcagtagtcccgtgatccgtaaggaaaaatactgggtaagccgtgcaatccca

SEQ ID NO: 341055 - DNA, 653 bp, Cannabis indica
acaaacacctgagccctctcgttgaactcagtgatgcttcttacgggacgtccttgtaaatcatcccacaattcgccctcgacggttaatggattagtggagatccccgcctgatgggctgtaagttgcatgctgtcatccaaatttctaaccttagcggcagccaagctaaaaatacttaagtacgccttaagcattttgccaggctgctgctttatattagttagcaaggtcgcttcgggttgcctatccctagcggcctataattgcttcttaaattccctggacaactgctcccacgaagttattgaatgacgagtgaacttgttaaaccagctactcgctgctccaacaagcgaggtggggaacaaaatacagcgtaaattgttcgtcacgttactcgctcacattaacgtgttaaagttattcagatacgagaccatttgaatcccgaagcaaaaagggtattcataatatctgggtgatacggctcaagctcctcgttaaagtcgtatccagataatttccccaattcccccacttgatatctcctgaacttgtcctccagcttgtttatctacaattggattagattccttgctttggaccaagctgttggcaaaggtcaggtttcttccgattcaagtgctctc

SEQ ID NO: 341056 - DNA, 890 bp, Cannabis indica
ccattgttggtcttacaatggttaaatattttcaatataaacttgagacgctggacttcatgccccttatggatggttatttgttaaaagcatttaacaccgtaagatctcatatgataagtgttttgtaagttttcgtctatattagactctcctctatggttactacttagagataaatttacagaacatgaaacaatggtaatagctcataaaataagaatgaccttgactctcgcctactgggacagcgttggattctcattttgatcgaataaaaggttgctaaaatggtgtacattttagatgagctgactagtccaagaacagattgaaccagcaataacaatagtccaagaacagttaagcaatgatgctttagtttttgaatcatgtgttttagagaatgataaatccatctggattcttgattctggatctacaatccatgtctgttgttcattacaattgcttgaaaactggaattatttgaaattcggagagttgaaacttaaagttggtaatggcaaagtggtatctgttagagctacaggaaaagccaaactcaagtttcagaacaaaattttggatttagacaatgtcttattcattccaaatttcagtagaaacttgatttctatttcatgcttacagttgcaacaatataaattagattttttgagttctggttctaccatttctcgaaatgacattcaaatttgtgtagcatctatggaacaggggctttatgttctaagacaagaagcaccatttgcgctaaataacgaactgtttaaggtagctaaacctaaaaaccacaaaaagcaaaagatcaattatgaagatgaaacatatcttggcctttacgtcttggtcatataggctatgat

SEQ ID NO: 341057 - DNA, 988 bp, Cannabis indica
ttttttttaaaaaaaagattacaatatgtatggttgtttgacttagattttttttgagttataaaagagcaatttattattttttgtagattaatatttaataaaggttaattaagtaaacattcttttttttttataaaggttatagatagaaaaaagaaggacaatattgtaatttactttgggaagcccaaagccacattctcccttttatatagtaatagatgtgtagttaaataaatttctactaatgcatgaaagtgcacattgtgtttaatgtttggtagaaagatattgatcgatcgatattccagcctttctagtgagtactataaagaattactaagttggacctaattggtgttaagtcttttttttatagaacctcccacgtttaagcttcatattatcgatatataagtcttagacacaaaccaagaccgatcgacttttgtacctaataatttatctgtttatctatataaatataagatttttttttaggtaacagctccatttctactctcactcacaagagcatttttttcttttgtttcacttagtttaaaataagggtgtatagaattaaaatgaaccgtgaaacatgttattaattattttatttttacttttagattatttttaaaacagttattcacaattaagatgggatcattttactaagtttataggacaaataattattattattttcttttctttttcatttcatcatttctttaaatttagatatagtatatatatgaaatacttttctaggtttcctctaaaaaaagcttattggcatgactacaaaaaaaaaaaaaaattaaccaaatcaaagaagtgtgcatacactacaaaaaactaattacttttagttgataatttttaaattataatataaatttttagttgactaaatagtgatttttagttcacaataaaaaattatttgcgattaaaacatagtatttaattacaagtt

SEQ ID NO: 341058 - DNA, 653 bp, Cannabis indica
gagggatcatgggtaaagtaccttcccctgatcgagttctcttataataacagctatcaggcaacaatcgggatggccccttatgagattttatatggaagaaaatgtagatcgcccattcactgggatgaagtgggtgaaagaaagttcttgggtcccgaggctgttcagagaacaagtgaggcgattgacaagattagagcgcaaatgcttgcgactcagagtagacaaaagagttatgttgatccaaagcgccgggatattgatttctaggtcggggacatggtatttctctaaatatctccgatgaaaggcattaaactctttgggatgaaatgaaatcttagccagaggttcattggaccttttgaaatccttgagaggataggacaagtagcatataggttggctatgcccccaacgctagcagctgtacatgatttgtttcatgtttcaatgcttcagaagtatgtctcagactcatcccatgttctgagctatgaaacattggaactccagccagacttgtcatatgaggaacaaccggtgcagatactcgatagaagagagaaagtcttgagaagcaagacagtggcactgacaaaagtactgtggaaaaatagtaaagtggaagaggcaacctgggaactcga

SEQ ID NO: 341059 - DNA, 869 bp, Cannabis indica
gtgatcactcggtcacgcgcgcctcagacatggggttgtccgagttttctcggtctgaagccccgttttttgtctgaatctgggcctccgtgcacggacgaggctgctggcagcctctctggccgaggtttctcggccatgctcccatccctacgcgcgcggatggtatgcactgcataccatccgcatcaaatccaatttttccaattttcttcatttttcatgctttttcatgaaattaatttcgaaatttttgtatatttagatttttatttttcatattgcgaatataattatcaaaattcaattaattagtatttttaaattaatttaagatattagtaaaatttgaagcttgaaaataggtaaaaatctatctttttgcttaattaatcatcttattttttaaaatttgattattttatcttatttttaaatttaaggtcaaatatttaatattttaaattatttatttttttttaaaaaaattgaccttatttgaaatttaaaataagattattttaatcataaaattttaaattgaagtaagacattttgctaacttttaagttttgttattttctatttaaattaaattgtaaaattagaaaaatgatattaaattatcattttattttattgaatatttaattttattttaaataacatgaaatttgaaaagttgttagtattctttttgaaaaggatatttaggttagttgaaacctaatttttcaaatttataggtttaattttaaattttttaatttatttatttgttttatattctgattttttttttcgaaattattaaattaattaattaatttaaaattaagtaaatcctatatccaactatccaacttgtt

SEQ ID NO: 341060 - DNA, 880 bp, Cannabis indica
caaggcttggactttgattatgtcgggttggaaagtgatttcgattggcccaactctaccgcccacttcagtagccatccagaagcatctggtatttgcagtatttggcgtagtggtttgtcggtatacaaccgaacatgatgagcttggaaataaggcctcaatttccttgttgctagaatgaggcagtaggcgagtttttctattaacggatatcgaccctcggcctcaatgagtcttttactgatgtaatagactgggtgttgtatattattctcttctctgattagtacgacactcacggcatgtttcgtgacagctaagtatattcccagttcctcgccatccaaaggttttgagtgtacgggaggttttgcaagtttttcctttaggccttggaaagatttttcacactcctctgtccactcaaactgcttgtttccttgcaggatgttgaagaatgggacacacttgtctgttgattttgaaacgaatctgctgagcgcggcgatccgaccagttaagcttcgcacttctttggtttttgttggcgagttcatatccaggagggcttgaatcttttcgggattaacttcaattcctcgggcattaacgatgaagcctagaaaatttcccgagccgacttcgaaggaacactttaagggatttagtttcatgttgtattttttgaggactttgaagcattcgtccaggtcgtctatgtgccccccagcctttcttgattttacgagcatatcatccacatatacttccatatttcacctgatctgatctttaaacattttgtttaccaatctttggtacgtagccctagcattttttagaccaaacgacatgtctttgtagcaatagagaccca

SEQ ID NO: 341061 - DNA, 717 bp, Cannabis indica
tccaaggtgtaagtatacttttatcgctgactatcacatcaatatatatctagtgtactgattaatcaagggacattatcttttgaagcatataatcacaattacgtttcattgtattgacaccactgtaattgtgaataactatatgttctggacttgacagattttgtacacatttaaaccataaatatgaaaactacatgtaaacataaatgacttataatcttctattgataacaaatcagattacattgaaatgagttttatttagggcataaaatcccaacagttttcatccccttaatctttcaaatacactggtttgatttggttattaaacattgatccttgaggattagagaaatattcaacaatggtgattggaaattagattgatttcttttttgtttatgccttggatttttttgttttcgagatgattatgactctgtttactactcagttgttgttatttttgtgatttttggggactaatttctaggtttttggtaacaaaataaaataaaatatttaacggtaaaaatgacagtagcagatattttcagtgatatttgaagatattattaatggttcagaatctacttaagtgtaaaaaaatatttatgtttatattaattctcataatttaatcagtaattaaactaattattgtaacaccctaactagcctaggggtgttaacgtgattttaaacttg

SEQ ID NO: 341062 - DNA, 929 bp, Cannabis indica
tgagtagccaccagagtttgctttgttgatcgccaggatatagcagtgtcaccgcaagtgaacaaatagccagtttgagatctggctttatgtggatcagataaatatcctgcatctgcgtagccaataagttgtgacccacaattattagaatagaataatcctttatcaatagtaccctggagatagcggagtatgtgcttaatccctttccaatgtctatatgttggagcagaactaaatcttgctaataaattgacagagaaagctatatcaggtcttgtacaattagcaagatacatcaatgctcctattgcactaagatatggtacttctggaccaaggagctcttcatgttcttctctaggtcgaaaaggatctttttctacatcaagtgacctaactaccattgggctactcaatgggtgtgatttatccatataaaaccgtctcaaaatcttttcagtataagttgactgatgaatgaaaattccacattttaaatgctcaatttgtagaccaagacaaaattttgtttttcctaaatctttcatttcgaactctttctttagatattccacagcttctgaaagtttttcaggagttccaataatattcaaatcatcaacatatacagcaatgataacaaactcaggacttgaactttttataaaaacacatgggcaaataggatcatttttatatccttcttttaataaatattcactaagtcgattgtaccacatgcgtcctgattgttttaatccatacaatgatctttgtaatttaattgagcacatttctcgattgcttgaattatatgcatcaggcatcttaaatccttcagggatcttcatgtaaatatcactatctagtgatccatataaataaagctgtgactacatccattaatcgcatatcgagttttt

SEQ ID NO: 341063 - DNA, 593 bp, Cannabis indica
tctaatcttattaaagagagaacaagataaaagaatgccagaatgaaccttacctccggtactgagaagaagatatctgtcctagtattttatatattttgatagaattgagaattaaaacatcttagtatttataattaatatacacattattgataactcatacgcggtctaaataataccacaattcacttaggaacttttctaaaattattcttcaatcagcccagaaattttgtgttctatacttacagaatcttgagcagtaagtgaaacttttcttttataaaaaagaaaagtcttgcttcggttttcttcacaaaaaatctaataaaatattttaggaaactcacaaagaatgaaacatacacaactggatagattgaaattggttgagtcatcaaacttaacctttatgccttcctttccataactagaaaagttaatcatatttcctaccttatataattcaacaaaattaagaaaacaaactaaattacttagccaaaagtaaataattaaattataaaatatttttttcaattgatagatgccaaaaataaaattaacagaagtattctagttgacacata

SEQ ID NO: 341064 - DNA, 590 bp, Cannabis indica
agcaggatgtgaggaatcttaggatgtcgatgagaatggttcgacagagggactaaacctaattgcagacttggttaaaaaccatgatattctgtcttctgaagatgttggtcaaagcgagattcagagatccactagctaggcgatggaggttgaggaggaacagagcaggcattcaaaccctgcaccatttgccgatgtctgcgaagaagacctgggaaacattcacaaatggaaaagcaatgaatcgggatcaaaagcttcttttcatagagcctatgataaggaatggaaatcaagatagcacaagttgatttggaggaggttagagaacagggaacttgttggaaatcagctgtaatctgcaaagttcttggagcaaatcctcctgttcccattttcaaaggcttcatcaaacgagcctgggacatttggggataccagtaggtgtctaagatggcaatggggctaataatggtaagatttcgagatgaaggaacccgtgatcaagtgttggaaagtaggagtaatctaattcgacaaaaaaccggtataattcgaccttgaacaatggatttaaatgctttgaa

SEQ ID NO: 341065 - DNA, 483 bp, Cannabis indica
ttttaaaatttaaacctcaacgtataaaaattaataataatctattaaaataaatattattaatttaaaaaattatatttaagtttaaatatatttaaaaataatattttatttagatattagggtttgaaaattggaaaaatagaattttagggaaaaatcccacaaaattcagaaattgtgggttggctcgcagcagggctgcacgtgcagcccaggaggctacaaattgcccaagacgagcgagcaggagggagtgacgccgagaaaactcagcgtgtgcagggtcccttgagcggacgtgcagggtgggacggatgctatctgaacaaggggctaaccgtgtctgaagacacggttgtctgagtgagcgcgcgcgtgttcccgtgttgtccaagtgcctggtgcacttcgatgcacccactcgacagccatgtcacccaatttttaaaaaatcataactttttcaatttttatgggaat

SEQ ID NO: 341066 - DNA, 1666 bp, Cannabis indica
agactcaaaactcttcatctccgagtgagtgtcccatgttaaaaatagagaaatagcaaagttgtgaatttaacttctctgacttcatggatcttagttattgtgaaaaactagatagacagtcaaaatggaatcagaaccggataagtataactcaacctgggcattgggtactcattcgtaagcacttgggttctcgttttgatacttccatggttcttgaacttgaggacaagtttcttacattgtttttaccattctaggttcattggttgaattagatttgtcatttgagtaatcgaaagcagcgcactaggttcattgtcaacttgggcgttgggcccaacaccaagtcaacttaggcgctaggccttgttgggctcgagtttgtagttttctccctgagtttgcttgaatcttcattatttttatgaaagaaaaagatgctcgaaacactttttcgtgaacttgtttggaaacaacccaggttaacaatatgtcaacctgggcgctgggcccagtgacaggtatcaactaagggtgttgggcccagtgctaagtgtcaacctgggtgctgggtcccagttatggcccttcggaagttccgtttggtccctggaaatagttgaaacataatctttctgaaacggagaagattctcagaatagttctgggaaaaaatcatcagaattggcccaagttgacatccctaggtgtcaacctaggtgttgggcctagtttttggcacccaggaagtgttatttcttcattgaaaatgtctatttccctttttttgatgaagaagaagaagataaaaaagtctgatcattgatctaatacttggaaggtgcctgaattgataaattatcaacctgggcgctaggtgctcgggcactgggtgatcgggcaccgagtgcttcgggtgctacaaaatgagcttgctcttaatctgattctgatgtctcaaatatgtttgtggtatgtctagttgatgtcccaaaagctaaaaccctagttggaaatgtcaaccttggcactgggtgaaaccctaggtaagggtgttatagtttattttaaccaatagaaaagtacaaattctaactctgttgaaggcccttctgctactgttgaggggaatgaaatgcattggttgtcaccttgtgataatatggtaaaaattaatgttgacgccttagttttcagcaaagagaaagtgtttggaattggttggcttgttcgagatcataatgggactttgttaacggctactgctatagctcgtcaaggagttgtggatccttctttagccaaggccataggccttaaggaggttctcagttggctcaaagatcaagcttttgtgggtgtgattattgaatcagataaccaagttctagttaatgttgtttgtgaaaagaaatatatgtaatctttatttggctttttattgttgattgcattatacttttaaacagtttgagaaatgtgtcattaattttgttaaacggtttgtaaataaggctgcgaattattaattatttagctggagttgcttgtttatacccagattgtaattattgtgggaggtttgttcccactaatttgaaagctattcttatagttgatttacagtagaaatactcttatttttttaaacaaaaaaaaa

SEQ ID NO: 341067 - DNA, 1162 bp, Cannabis indica
taactatattttggtaattcaatggcatgaagcaaaataccaagtattatagattcaaaacaaccaatcaaacgacaattgattttgtacgaaccaaatatgtttgagattttcaaagtctatttgatatattatatagcttgattggtgtacgtagagctcgaacataaatggtcgagattataattaaaatgttagtataaatttcgactacttttagtagagctcgaccaatgtagtcttaaaagtcttgaaatgttagtatagagcttgactatacggagtagagctcgaccattcatggtcgagatgtagtctccaaattcttgtaatgttagtataaagctcaattgtcttgagttgagctcaactgcttgtgggtaaagcttaactattatgtttgtactcgattgatttaatattacctatttttatttaaatcggtcaatggaaagtttcgaagaacaatcagaatcaaatggagaaaaaaaatcaaactcaagtggactagaagaaacagaattggatggagaagaacatgttgaatctaatggagatgaacaagtagaatccgatggagaatagcaagaagaatctgatagagaagaacaattagaggcttcatcaatgttacgagacaaaacacatccagtattttttgaatttgttcactttattttattattatttttcttatgttattcagataatagacagattatgtttaatttattgcaggtggaaaagatttctcgattggtgcctatattaaaggaaaatgaacattttgagtgcaaaataagtataaaaagtcagatggacgagatcacaaggcacattaatgatgtactaaagaatgaaccgactcacttaaaattgttcaaagaatctccgttcggtcactttctcgatatttttgactactatagacattttagccaagtgatgtggctattactcgttcgagaagcaagttgttacagagactcaaagattcagagatgtggtttgttgtgaatgggataccaatctgattctcattgatggagtatgcattaatatgtggactaaaatacttaaagtaccctaaaggttgggaatctcaagctaagtcaaaatcattcaaagatagatactttcgtgaaagaccttcatgcatcac

SEQ ID NO: 341068 - DNA, 1110 bp, Cannabis indica
gtgcaggaaagggtaaggcattagctgatcagccatgagtttcaggagcagggtgaagaatgtacatgttcgagccatatcagaccaagtgggttaagggtctaccagtgtcgaacttttgaaattctgttttgccgcttaggtcagctagaaagaaaagacttgtaataaagtttgtaaatatttttgggatcccaactgtttaaaagtttaaatgtattgcaagttaattttcatttggtttaatataaaagtttaaattctgcgctaatttgattagtaatcccaactaggggattagggtttcataagtattttgggtaacgtgcctaattatttagggcgttacaaaaatgaactcaccacctagccttatacagagtttccaagagaaaccacgcataaggccacaattgtatatgcctctaaggccgtcatgagcccctagtcgaggtcaaaagagggagaaaaattggctgcccacttggagccttggccttggccggttagggtttcaggtcctagtggatgacgagaccccaaggcccaatccagtggctggccaggaaccctagttccaggcataggctggccagcctagggacacagtccccatggccggccaaaccccatgaaggccacctatgcaggctaggcttcaaacaaagcctccttggttggccagcatttgcatggattacggattagaacacatgtcttatcaagaactcaagcatgttcttcgtgactcaaagagccaataatcacaacgaaggtcagattcagttcttttttgtctagaaatcacacaatttctatcctaaggctatcatgcagatcaaaatagcgaatggactacaatctaacgtaagaatcaaaacatattcaaaacaagaaataatgttcatgcattcatggcaaaatcaatcaaaccaaatgaatatcgggaatagaaagcttacccactataagatttcgatgaagaagaaggtgggaagcttggatcgttgaaatagcgcagaaatctcgagaagaatagtgcttgtaggcagggccgaccctgagttaaaatgggccttaggcgaaaaaaaatttgggcccttactataa

SEQ ID NO: 341069 - DNA, 895 bp, Cannabis indica
acatctataggatatcaaaagtttactttgaaaattatcgcaataataaagtaagcaacgaataatgtacttcaataaccttgattatcaatgattagtgtaattcaatacaatgaaacaaaataaccttgattattaaccattaatgacccatttattccttaatccttcccaaaatagacaaaatcaactattttaattcattattaatgtccccatttctaaaatattacaaattcctttattgtacttattccaaaaaaacaatttttatacataaggtaaaacttgattataatcaatttatattgaattgaaattacttaaaataatccaattcagttattatgacataattattcctattttaatttccaaaagacaggttgtaaaacttccaaaaattgtatccttttaagttaccataaaaacatttataatgatactttcctatacgacatagattacaaaccaaattccataaagtttgacttcccaaatatatctgaacacaataaattagcatttgacaattaatgttcccacctccttttattacaatattttcgtatttattttcttcaaattacttgattaattttaaataataatattagaatctgaatactaaattccactactttccctttttgctaataattcctaaaaatatgaaccaaccatagctaaaagctattatcgtttaaacttaatcctctttaaaccttatttcacttgaaaatatttttaaaatatcactttaaaattttctttacatcataccttaacttaaataacccttatattccaactagtaaaatttgtctagtgcataacttgtttatttttgaaaataagcgtagatatagtgcataacttgtttattttgcaattt

SEQ ID NO: 341070 - DNA, 2196 bp, Cannabis indica
tgcgaccgacgagggtctcaatggtctggctcgaagaagcagtagccggggttgcctcgggacgaggagcattggcgtcggggacaactggaggaggaacttgctcttgaatatcaacgtccaaaacctcgagattgataggctcggccagtgatttcttattatgggcagtggttttcctttgcctcttgggagaagccacttcgacagcagaagggactccagggttggatgtccttttcttccccttatggtccatgatctcttcataacccatgtctgcaaaacaagacaaggcattacaataattataaaggtcaattaaaaaggggaggactataattttctacctaaggcatttaccagaatcactagaaggcgagctatcactaaatgaaggtgtagaaagattgtaatatttgctaaaatccctacagcttgtaattttgaatatatcaaaaggctcgattggttctaaatctcagctcatatctatgtgacctgccctatcttccatagtactgtattgctcggctataccataaaatgactcgtgacagttaacctggacgtggaatctaggataccatccgtcaaacttatgagcaatgcgatccacaagaagagaattccaaatataaaattaaggcgggagtcttcaaaggtgactaaggtactacgctcagctctaagtaaagtaggagaccaacaatattgattacctcaggatggtcattcactggattcccgaggggcagtactttgaaggtattgtgcttgagccaagcgatcccaaacctgatcctcttgcagaacaataattttttgccaagaagaatacttgggaatcttgaaatcacaagtatattctttatcagcaagaaggcccaccgatcgcaagttaacctcgctcaaaaggaagttgcatgaccgaaaaccgtatggaagggttattaggcgcctatgcctactaaccatctcgggggtaggagtaggtctcgttagaacattagtcataaacttgaaaaaggaagactgatgtaaataagtaataagcaaacgatcacttacgaggcttgcatgccgatgggggaaagaccagacgtccagaggaagttgttattaaaggacactttatttggcaggtcaataataattttaggctcactggggtgagtaccgagatagaaaaagccactacaatgttcttcctctcgatggaacgaccttaactgagtaaagatactcaatctctactggagtgggacacccacagttcataattttgtacaagactttccaacaagcaagaatcctgtaggaattgcgagtgagctggactggggcaactccaacatggtttatatagcctttaaagaagtcttgaagaggaagggtggctcctgcactgatatgctcaaggctccaggcacccatgctagttgaaccactggtactggtctcaccactgctcccagggttactgctagcaaagtgtgcagggggtgacaactgaactcaccctttcgtactgatctaacttggcatgattgcccaagttcaattccacaggtttttcagcatcttgcgcgtgtagcctgaaatagatcgcacctttgattctatcaactcagcctcgaaagtgatgctgggatcctagggagttttagacgtacgtggcttgggagacataattttaaaatccaagtaacctcgttcaaaagcaattgtgacgttggataaaaaaaaaggttttgccacaagactaaaggacacgctgggagcatccggccaggctgcttctcgcacgaatcggcgtctgcctttggatatttcttgcaagaagtgcttgtagcgactagaaatgccttcctgttgggttctcactatgtgttccctaaccctagcatggtttagctcaaatttggaggtgggttttgatgggttgggtttatatgggatggctgattctgtagggaactcaaactctaaaacttctggaggctaaattcctgaaccagagtgggacattgctaccagcaaaaaagcagtcccaatccttggagagaaatttatcaaaccaaaaagtaatgagttggagatcttaaaacaacctacatattgcctgaaccctagtatgaacggtttaaatcctaaaaaactaccaaaaccagatgagatgataacgatacaaac

SEQ ID NO: 341071 - DNA, 747 bp, Cannabis indica
aaattgaagtgcccaccactcacaccgctgaatcctaagattgaaagaactctaaagcagttgaaaacgaagaaaaagttaaatttcaccatggaaaccattaacaataataacaacaatggccttaataacaaccaaccagctccagctgatgcacaaccacgagttgttcgtgattatttcttacctgtggtgaatgaaaatctgaatggtattactaatctagtcattgctgctaataattttgaatcgaggcatgctttaatcaatatgatgcaacacaattttttttgtgggttggctaatgaagatcccaatatccatctagctatatttatggaggtatgtgctattgtgaagatgaatggtgttactgatgatgccataagactacgactctttcatttctctttaaaggatagagcaagaagttggttgcaatctctgcaatctggttctattaccacatgagatgaaatggccagaaagttcatggtaaaattctttcttccatcaaagtctgcacagttaaggagtgagattgggcagtttagacagtttgattcagagcaactttatgaagcatgggagcaattcaaagacttattatgtcgctgcccacaacatgactatgagagttggatgcaagtatcaattttctacaatgggttgaatggtccaactaagacttctattgatgttgctgcgtagaggagcgttatgtctaaaacctgcaactgaagccat

SEQ ID NO: 341072 - DNA, 1731 bp, Cannabis indica
caagtttttcaagagggggatacttcgattccgcccccagtaaccttttactgacataataaacaggttgctggtgctttccctcttctcgcactatcgctgcactaatcgtgtcttccaagacagctaaatagaggagtaatgtttctccagttactggttttgccaaaaccggaggtgtcgccaaatgccttttaatgctttaaaaggcttcctcgcattcctctgtccattcaaatttcttgttgcctcgcaatatattgaaaaatggtaggcacttatcagcatgaatttgttaagtgtagccatccttcctgttaaggcctggacttccttaggcttggttggtgatggcatatctatcaaagccttgattttctcaggattttcttcaatgcccctcgcgtcaactatgaatcctagaaactcacctgaggaaactccaaagcaacactttttcaggttaagcttcatattttacttctttaatatttcgaagcactccccgaggtccgtggtatgactttcacatatcatcaacataaacctccatgttccacccaatctgatttgtgaacatttcattcactagtcgttgatatgttgccccagtattcttcaacccaaatggcatgaccttattgcaataaagtcccatgctggttacgaagctcgtatgttcctgatctaggacatgcatttttatctgattagtggaaaacaatcctttggacatgccttattcagatcagagaaatcaatacaatttctctaagttctgttgggttttaagaaaagaataggattggttatccacgagggataaaacacctcgcgtataaaatcgttcaccaacaacttatccacttcctgtttgagtgcctgttgtctctcaaaatccaagggtctcctcttctgtctctttgctgggtagtttagatcgacatttaaatgatggcagataatattaaggtcaatccctatcagatctccatggctccaagaaaactgatcctggttcgtccttataaaatttattagctactatttcaattgttcatccaggttgttcacgatgtaaacacactttgtaggatttcttgggtctagaataacttcttccaattcttcaattggtttcaataagtttctttcatcttgaattcgagtattaagatctttatccttcttctttccttcctctatcaagactaccattagttggtgaccggctcttctgtgttgcagctttatgcgatagcattttcgagccaacatttgatcacctcgcactactcctgcaaccactggtgtctaaaacttcagggataaatgcttaatcgaactaacttcccctagttcgattaatgttggacgacccagcagtatattgtaagccgatggcaagtcgacaaccaaaaagtcttgcactattatggtggataaaggtgcttcgcccaaaattaattcgagctcgattattccttggctggcgacactgtcgccaataaatccataaagatttaccatggaagatcttaatttggctttttcaagccccatcttctttagtgtttccctataaaggatattcactaaactccggttgtctaccagcacctttttatcctcttgttggcaagctggatggtgattactaatgggtcgacgtgagggtactgtttggaatattttacctaggatctaaatttactgacaagtatgttgatt

SEQ ID NO: 341073 - DNA, 931 bp, Cannabis indica
gttcctacgccacataaggcgtcagtttttagctaggaactgacgccatatgtaacttatggcgtcggttccaagctaaaaaccgacgccatagggtatatacggtgtcggttttttaaaaccctttagcttcaccctgatcagcgtcggtagcgaatttcgccaaaatcgacgctgaaagggctaaaaaactgcctgtaaagggtgtttttgtagtagtgagtacaaataagacccttaactgattttttgtcaaaatcaaatttaataataattcgatctaaatgtgatctgacaaaactgtttactttttctgtatctgttcgtattaagaattgtcttcaagttggttttattaaaaaaaagttgtcgaaaattaaacttagagtcctattttgactatttttgaaaatacaagattaattttatcatttaacaaaacagatagtatatatatatatatgaaagattttgggtacaatgacaatattattaaaatattttctcggatatctgatttagtaccacaaaactaacatttgtcagtgaaagctttagctgattgtctgttgccaaattcccaaattaaaacttgcctaaggtctctactctctaatatactgttccatgttaaagatcagtagttgtgtccttgttaactttaaaaatgttagcgaaaaaggttgttgaaaattttcaaaacttgtttaaactttgtgaataagtgaaagccaaactctccaacaaaatttcaaatgacacaataatagcatcaacaatcgaagtaatctttagcatttcttattaagaggatccactgtaattttttggctaatcattccttgcaagttggaaaaaatatttcctccggctttctttgatataatggtccatttggctttgcatttgccacgggaggcaattcttggtg

SEQ ID NO: 341074 - DNA, 1724 bp, Cannabis indica
gacaatgggagttagtaaacctcctatttaaagatgcttttatttccattggactcactgatcaagacctctccccaagtggttcacaactcacaggattcagtcggactactctagtccccatgggaaaggtgagacaattggaagttattttaccaggatctagatttactaacatgtatgttggattatattctataatctaatatcctaaacataaatttcataaaacaatgagttaaacacatataaagttctagaaaatcttacattggtggcagcgaaatcttatggttccttccgttcagatctctaacctttgttcctttctgtcatagagtaataataagatccgaacctagatctcctttaggtgttggaattcttcacaatcttacactatgattgagtactgacttgaaatgagtgggcaaggtactctatcgctataggaacttcaaaatttcaagagagaagagagagacaattaaaaaatatagaggagcctctctattttcaattttattacagaatagactaatgaaggattgtgaggttatgagccactcatattctatttaaaggattccttctagggtcagggtttaaattatatggaattaaaaaagataaaataatggctaaatattcccttaagtggccagccatgcaataggccccactagtttcaattttaccatttatttaacaacatatcttttctatcataaataccatatttttaatttcaaacctttaaatgtattagatatttatttaagaattataattaattatcaaataaaattatcatttaacttatttattaattagaccttacaaagtctcttaattaacaaataaaccctaaaatcttctttcttctcaattaagcccttctttagtgaaaactcataaataatacatagtctaatctagaattctaattggttaattaaaatcaattgacagattctacaagccaatattatctcaactagtgtggggaccatgaacctatataatcaagcttccaataagtagttctagaatttacggtgtaaatttcctaacttattaattcctcctgactccactatatattcagaattgcactcttaattatatagaacactctatatattccaaatatagatacactattaattatccattgttatattacaaataatcaaagatcctctataaataatttacattgagtagggacaaatttactgttctacccctcaatgtattttatccttaaaacacttagcttcctataattgatatttcattaaactaatataattactgacataagagctcttccatttatctctattaagccaagctcgaagaaaatcatcatttcacttctatgtcaatatagaacctattgactatgtatctatgattagcgctctcactcaattgtactaccatattcccaagatgtaagtattggactaatctatttggttagctttagcgaacaagtcaaagaacacaaataatacagttaagctagaacctaataaccatctaaggattaagatctattgatctaagatcaactaagtaatattgacttagaaggatataacagtaagtttataatatcttatcaaagttcaatatcgacccagtctgatgtatactatatacatcttatactagcttactttataaatgccttggaaaggacataccacttatcc

SEQ ID NO: 341075 - DNA, 1619 bp, Cannabis indica
aggtgccttggcgccaggtgggtaagtcctctgtccaagattacggaggcgcgccttcaaactcttgaccaggacgggtactagggcgagctagactgctacagtcccgcccacactaattgtgccacaaaccctgacaaggggatgtgcgcctggtcaggggcccatggccagcaaggggcgctgatgccacccccaaacaaggtaggtcggggtacttttatttctctcagccaggcttcaggtggttgactggcacggatgccaaggccatcaataagataaggcattttgctaatgagtacttcatggtgaaggatccgagcattacttggacccggtttcagtagattctgacatatcaccgtcctcccctcactcttgctcttagggatagagctcagaaacttgcccggttgccgggggaagacaggaatattatccagttgacctctgatgataatcttgtgaagtacgcgctctatcccgaggaattttctcttaagtccgtggcggggaagaagagaaagtctgatgctggctggcctgaacgacctcataaggagcataagcttattcaacttaaacgcgaggctaagttgaaaggagttgctaaggcaaagcagtatgcttaggagtcctcaaatcctgaagatgaggccgacgacgagcaggtgaccccactgaagagaaagaagaaactcttagcctcgcctaggcccgttgaacatgcaatccgcataagggagctcatttcacctgttcgtacatctcccccctttgccagaaaagggaaagctgtcatgtctgagataagatccatgtcaggtgatgatggacttgtgagtcttgtgcgggcggtcaccttgcattttactttctcttgttcttgagcttcttgattttcatgccttgtgcgttctgatgaccgttttctaaccatactatttttcttctatgcagacatgtctcagcagatgatcgatgctctgaggaaaagaatgggcagaagctctagcgcctctcctccggccaagaagtccaagggcggtgaggggtccttttcaaaggaaaagagaccttctggagaggtcattgatctttccgaggagctgactgctgcaaacccctctacttccaagtctgccatgtccaaggagtctagaccaccaacagctgggtctgaactggtcaggagtgatcctgagcgggtgcaggcaccaactccacctttgtttgtgcttctaaaggctgaaaagggcaaggagatgctggccaactatatgaactcgctggttcctgagatcagtgagcaactggctagtgctgacaatgactcgtgtctggatgtgttggtgggtggagtcctgaaggagttcaccaaggtaagtcttttttgatacttccctttaactttccacacttagctccatatgctaaagtttttcttctgtgcaggccggtctgaagttgtcctacacttactcccgggctaagtctgttgctttcaagagcgcggctctatctgacaccttgaaggcggaggtggacttggcgaagaaggaagctgaggaagccagggcgaagctggagctgttcagttggagttgggtgaggcc

SEQ ID NO: 341076 - DNA, 1944 bp, Cannabis indica
aaagattaatgtatagtttttgttgtctgtgtttggtttcaaagacttgttttgttatgtttacatatttttttatgtatttggtaagaagagttgttcaaccgtaaatagtttatgtctctcattttttctatttataattagttgtttttttagtgttaatttagttattatacggttattattatagggttcttaaaaaaactgtattattagttaggtcttacatttattagttgtatttgagttttataattgaagttgttttagtttcatgtttattaagttttacaatacttacaattttgtttaactattaatcgtatttttatcggttcattgctttattaattttgtcatcttaatatttttaggtgcgtgataagacctctaatggtgttgacaagttgagccttccaaagaaaaatattaccgaggtttataacttgttttttgatttgtcttgtttgaaatgttatctgcttgtagttcattcattttaagaaaaaaatcatagtagaaagttattttatagtttgtttaatgttgtgttgatgctgttttaactgatggaggacttgatttctagtgatgatgaacttcaaagctgatgagaataggcttgttgttcatttctatttctttagtagagtgaagtgagtagcatacattaaaagtgtaaaagaaaatattcaaaagctttccaaggaggttaaagctactgagcatggattaatgatttagaaatatatttggttttggttgtatgcgctaaagagcaacatatttttaagaaacgttacttttatctttttgtaaaaaaaattaattaatttcacatgtattttgtatggaatattgaacattataatttctttttaatttgtttatatattttagtacagtgagagacaactcttattatattttaaatttctacatcaagtattggtatatttatatttttttttaaaaaaaaggacaatagttgttaataggtttttttaactgttaacaactatttaacaacgatataaaaatataaaaacaattgatgaataaataattatagattcttcaatattcaactttttcgtttgtttgcttttggtttttttcttgttgttttgcagttgattctattttcaaagtgtcagtatcaaccaaaataacatatattgaaactgatctcttccttggagcagataaaacttgtttagttattgttgttgtgttgttgtcaagttgctgcacagttgagtgtcatgagttatgttcacttctagccactgtcatattgttgcacaccattgtttgggtagctattatcaggattgttatttttatgttactatgtagttgaatgtgttcacacacaatagatatcatgtgaaatcggttttctttgttaataactttatgtaaaataacaaacttttgtcatccttattttagagtagttgacaaccttcattcagttggtatttcagatgtatttgagttgttttagggttgtagtctagttcctgcaacattatctgcactaatttagcataagtgcaacattctccacttgattcataatcaatatagtgtttattgtcatcccaatgaccattgctctgtaccaatacttgcagatgttccatatatatcctgaaatttttatagttgttatgagtattagtatttctaaacaactattgtaatccataaaaacaatgtataaataacttttcctgacaacaaacaacaaatgaccttaaatgcagcagtagttgttcaattgtaaattaattgcatcaatttcttcaaatcaactaatttgccctatgaattgtgcttgatctgattgacaaacactaaataacaacctaattatgaagaaaaacactaaaaatattagtaccttgtatttttttgtctgattctttcaagttattt

SEQ ID NO: 341077 - DNA, 487 bp, Cannabis indica
tattttagttataactagtttgagtttttcgtgttatttatttttattcattataacaatattatagaaccggttctattttattataactggtttgcgttattttatgttatttatatttatttattatgttacagaaccggttataattcaattctaaccggtttgagttattagtttttattcatataaccggttatattttcagttatctatgagacatttactttggtgacttttccagcaacgttaactttttcgttgactttttcagtgacgttgacttttccattgactttccagttacgttgactttctggaaaaattttcgacaacttttccagcggccgtgatttttccgatgacttttctggttccggtgacttttccgtcgacttttcctgtgccggtgacttttccggcaaaacttattgttgttttacaaatatgggatttctatttttttttacaaaaatgtggcataaaa

SEQ ID NO: 341078 - DNA, 556 bp, Cannabis indica
cattcgggctcagatcttgattatactctgctactagaaaggatacaagggttagagatctgagtggaaggagacattaattccgctgcatcaatgtaaggttttcttaactttatatgtgtttaatttatcgttttagaaagttcatatttagggtgtttaaacaacatacttgtgagtagatctaagatcctggtaaaataaattccaacatttaatccaatcttttctttactttcttttttcctcccttggtagtttttttctttaacaaggctaaagtcaaaaatcaatcaaaccaggttctccaacaatctatgatttttcccctatatagatgatttagcaaaaattttctacactacactctgatagtgatttatctcacctatgatcataaagtggcttatgctttaaagctaaccaagtacccatgaaataacccactacacctcaacagtgttctatctcactcataatagatagcttcaacataaaaaactttaaagttttttacctcagttactaggaaatcaacgcttggggcaagaatatg

SEQ ID NO: 341079 - DNA, 848 bp, Cannabis indica
gtcttatcagtcaccatgtctcgactcctaatgcgtagcaaggttgatgtctcgccttgtacatctgaagtcgtatggtttctcgttaatgttcgatgtaatagttggtgtatctttatcttgcataagaccttccagtcgacaagttgtaaatatactctgtcaattacgcattaatgagttattctattttcaaatataattaccgttacatttattgattcgtattcttcccaatttgacacgtgtcctcctttgaaataatagtcaaatttcgggtataacactatgcaagactaaatgaataccaaagagttctaagactaacaagaaagaatccaaagttctgtgggtaccaaaagctaacaaattaacttgttttttgaagaaatcaacaagaaagggccaatgcttatagttcttggatagtggatgttcaaagcatatgactggtgacccatcatgattttcaagctttaagaacaaggaaagtggctttgtcactttttgagacaatttaaaaggaaaatcttgggattggtgatattggtaatgtatactctccatgtatcaaaaatgtgcttctcgttgataatcttaaacatagcttgcttagtattagtcaattatgtgacataggttttcatgttatttttgaatcctcaaaatgctttattgaaaatgcttcaactaatgaagttatttttcttagataaaggaaggataatgtgtatgttgttgatgttgactcctttgatggcaaaaataaatatttaaccactatgaataatagctcttggttgtggcataggagattaggacatgctagtatggattctattttaaaa

SEQ ID NO: 341080 - DNA, 686 bp, Cannabis indica
aatttattaattatttaatttgtcatataaggtgattttaatataatatttcaaaataaaaagataatgctatctttaatttaaaatatatataatattaaaatgttaaccttaaaaataaataatacataaatattaaagaaattaagaaatttttaaatctgaccataatttaaaattaaaataattaatttttaaatttaaacctcaaaatatcaaaaattaataataatctattaaaaataaatattattaatttgaaatataatatttaagtttaaatatttcaaaattaatattttattttaattttagggtttgaaaattgcaaaaaattcaaaattgggaaaaaatcccacaaaattcggatttttgggtgtgctgccagcatggctgcaagtgcaacccacgagaggctgctagcaggcctttccgcgcgtggggagaaggagcagcagggtgtctcgccgagaaatctcggcacctgctagtggagtgttttgtctgaaggcagcgtgcgtgcgaggaaaccgagcttcagacaggatttgtctgaagtacgagcgcggaatgctaccttgtctgaggcatctggtgcacgcgagcacaatgctcgacaccatatgcatctgatttttcaaaccttcataacttcttcgttttcatcgaaattgagttccgtaaaa

SEQ ID NO: 341081 - DNA, 769 bp, Cannabis indica
gatgttaatgaaacatacttgttagtaaatctaaatcctggtaaaacaaattccaacaacctcaaggattcatggcgcgaggacaagaagataaagttcttagattgaaaatggctttatatggcctaaagcaagctccgcgagcctgatatagcaaaattggcagctactttaccgagcaaggatttagaggagcaagagtcaaccaactctttacattaaaactcaaggtacgaatgatacactaattgtctctttatacattgatgatctcatctacatagaataatgagaagatgataaagaagtttaaagaagacatgatgaaaaattttgagatgaccgacctgggattaatgcactactttctctggagtgaaataactcaaaaagaagatggaaccttcatctcacaaaagaagtatacagagacaatattgaagaaattcaaaatagagggatgcaagactgtatcaactccattagactataacagagctctcaagaaggaagatgactcaccgaaagctgatgaatcaaaatttcaaagtctaattggcagcctactatatctaactgctacaagaccagacataatgtacgcaattagtttcctatcaagattcatgcatgatccaagtcaagttcactatggagcagccaagagaatcctcagatacttgcaaggaataaaattctacgaaatatgttatggaattacaagtgactcaaaacttgttggctacacagatagtgactgggcaggatc

SEQ ID NO: 341082 - DNA, 672 bp, Cannabis indica
gatgctttaatatgataatcttgaattgcattgcctaatcaggcaagcccgtgtcatagcctaacaccatatattgcataactgcatcacctaatcaggtgagcccatgccaaaaacctacacccatatatcatataattgcatcacctaatcaggtgagcctgtaccataacttagcaccaatatatcgcatcgcctaatcagacgagcctgtacctacactcggtacttatcatatctcactgacgcccgtatctacacgtcgccacgaggaaaccctacaacgttttcattctatgccacaagttggcaattttcatatcattgacaccatatctacatgtcgccaagagtaatcgcctaattagacaagtcgtacatacgcttggtacctatcatatgtcattgacgcccgtatctacacgttgtcaggaggaatccctataacggtttcattctatgccataacttggcaatatttgtatcactgacaccgtatctacatgttgccaggagtaatcgcctaatcagaagatctcgtacctacgcctagtacttatcatatgtcactgacgcccgtatctacacatcaccaggagaatcgcataacctaatcaggtgagctcgtacctacgctcggtacttatcatatatcactaacactcgtaccta

SEQ ID NO: 341083 - DNA, 2477 bp, Cannabis indica
attttgaagcattctacgaggtcagtggtatgactcccactttttacagattttactaacatatcatcgacgtaaacctccatgtttcgtctgatttgattcgcgaacatctcattcaccaatcgttgatatgttgccccaacattcttcagcccaaacggcatgactttgtagaagtaaagtcccatgttggttacgaagctcgcatgttcctgatctgggacatgcatttttatctggttatatccagaatatgcatccaggaatgacataagctggtgcccaacagctgcatccaccaactggtcaatcttgggtagtggaaaacaatcctttgagcatgccttatttagatcagagaaatcaatacaagttctccaagttccgttaggttttgggatgagaacaggattggctatccatgagggggaaaacacctcacgtataaagttattgactaataacttatccacttcttgtttgagtgctccttgtctctcagaatccagggtctccttttttgcctctttgctgggtagtttggatcgacatttaaatgatggcagataatattagggtcaatccctatcatatctccatggttccaggcaaactgatcctggttcgcccttaagaaacttattagctgctatttcaactactcgtccaggctcttcccaatgtaaacacattttgtgggatttcctgggtctagaacaacttcttccaattcttcaattggtttcaataagtttctttcatcttgaatctgaggatcaagatcttcatccttcttttcgctttcctctaccaagactgccattaacttgtgaccggattttctgtgttgtagctctatgcgataacaatcgcgagctagcatcagatttcctcacaccactcccacaccctctgatgtttgaaacttcaaggatagatgcttgatcgaactaactgcccctagtccgatcaatgttggacgacccaataatatattgtaagctgatggcaggttgacaaccagaatgtcttgcataattgtggcggataggggtgcctcacccaaggttaaggcgagctcaattataccttgacatggcgatactgtcgccagtgaattcgcatagatttaccatgcaaggccttaatttggcctttttgagccccatcttcttcagtgtttccctgtaaaggatgttcactgaactccccttatctatcaacaccctctttatccttttattggcgagttggatagtaatgaccaacggattggcgtgagggtacctcacgttcttctcatcttcctccgaaaatatgtggaggttcttcagtttttaccttcttggaaggttttggagcaaatactgactgctcattttttatttccttcacatagctcttttgggcattgttgctctctcttacaatatgcggccctcccgagataaccaggatgtcccctccttcaatagaaggaggttgtaatccctggttgcttgggttgttgggcagattgggctggttatgttcattgccctgtctcttcacatattgcttgaagtggccccgcgcgatgagactttctatctcatctttcaattgacggccctcgtctgttgtgtgcccaatgtctttatggtacttgcagtacctggttggatctcttttatgcctcacgtgcctcatgggctcgggtttactgaaggcaaccttgtgctcatgcacaaggtaaatattttctcgggtttcattaagctcggtataaatagtataaactggcatgtacttttcgtgcttcttatttttcttcttgtctttggacgacgccttagagtcgtctttcctctttgagccaaaggcccatgaattatcaactctagttgagacagtgcttgttgaaacattgttgggtttgcttctcgaaccattttttaacaagttcctctatttccgagcttcctcctttcgaacaaacacctgggccctcttgttgaactcagtgatattcttcactggaggaccatgtaagtcgtcccataattttcccccagtggtggttagattagtagtgatccccgcctgaagggcagtaagctgtatactatcatcgagatttcttactcttgcagcagccgtgctaaaacaacttaaatacgccttaagtatctctccaagttgttgctttatgttggtgagtgaggacacttcgggtcgtctatcccttgcagactgaaactgctttttaaaatccttggacagttgttcccaagaagtaatggaaggatgagtaaatttattgaactagctgcttgctgctccaactagtgaggtgggaaacaaaatacaacgtaaattgttcgtaacattgctagcttgcattattgtgttgaagttattcaaatgcaagaccggataggtggttgtaacatacgaggagacgtgagggtttttaaatccctggggaaaaggagtat

SEQ ID NO: 341084 - DNA, 377 bp, Cannabis indica
agtgcagccgacgtttaaagcaccccttatgtctcctatagttgccttattatagaataagaagtttgagaaaatattgtcaacacaattgaggactaactctgtctcagccaaacaaggtccattacagaacaactcaactgcttgaggaggcacattaagctttccaccttcattcaatctatatgtcttatcacaaccaccatagatctgatttcataatttaaatataagtgtaacaaacaagttctttagacaaaatttaacaacatataatacatatcataagatcgatgcaccctttgtgtttttgatatctgaatagttgtaatttcaatttttttataataatgatataaattataggaaaattctac

SEQ ID NO: 341085 - DNA, 595 bp, Cannabis indica
ttatcagaaaaatacagttttcataaaattaaaaattccatatgcggtatcaaattttctgggtcgtccgttcgatccgcgccgggttggtgtggtgtggtgtgcttaatttaattaagaaacgtgtttaattaaactgattacttagtcgtatcagtttaatgggacacgttcaaaaccaactcaccccacgtttcagaaaacgttattcttcccgttatttttattcaatccattcgcctatataatgcgattgaactgatgggaagaaaacatctctttcgtatcagaaaaatacagttttcataaaattaaaaattccatctgcggtatgaaattttctgggtgtattcgacggtgctctacagtgcagtggggttccgatacagtgcaacgactgggctgttttatcctggggacgacaggcaatttccgactgcttgcacactcctggacagtgccgcgaacgtcttaaagagagcgacatagtccgcgactcaacccagaattcttcattcggtaatatcgttgctcttttatttactagcagtttattcaataattttaagacgttctttctgctatgaatactacc

SEQ ID NO: 341086 - DNA, 850 bp, Cannabis indica
ccttttagtaccctttatgtgatgttagtgtggaggggaaaatgtcattttgccccatttgtattcttgtcctttagtggactttgagtgagaaattaaatgttatttgatttatgatggctgaaataaagagtttattttgaatttattctcatttggttcaaagtaagaaaattagaaaatttggaaaattgcttctctctttcggccacttcttgagcacttggaattggagtttttcttctgcatttccagcaagaatcatcttgattttgaggtgcttaaactttaggtaatttccttgtagcctttcttggtgttttcttgtgttttaagaaaaagttagtgaattgcatgcttgattttagagtgttcttgttgctgtttgttgttgttaatttctgaagtttattcatgagtatttgtgtagattagagctacttgtgttgcatgttggtggtgttgtttaaagttatggaatttctattcaaaagctatggttttcaaagagagaatgtgaaaatagttgatgtaaagtttggttgtgcttgagttcagtttctgcagtttttatatgcatgaatatgtagttttattcaggttttgatgcttgtaggtgagctttagccaagtttgagtttgaaactcaaagcttggagctcacatggcatttttagtatctgtgtgttctgggctgttttgatgctttggttttgttctatggggtatttagaacaggtctggaaggttttgtttgaattggattagagttgagcaaagtatgaatttttgaaagtatcctacgaggaaccggaattccggttgtgcaactggaattccagatgagggt

SEQ ID NO: 341087 - DNA, 926 bp, Cannabis indica
tttattttcagtctgtttaatataaaagtttaaattctgcgctgtttttaattagtaatcccggttaggggattagggtttcataatcattttgggtagtgtgcctaattatttagggcgttacactcctaatcatagtgcatggtgttagtattaccttgcatgagtccaagggcgtcatggaggttttgaatctcagtgtcatcccctatcatcctctgagcattggttgtggatgggattccaatgttgggagtgctttgattggctgcagactggtgttcccagtctcttgcacacccggtgtgatcccagccagaggggaagtcataccttggcccacagtaagtggttgtgtgttaggctgctcgggattggttcctggtgggaccaccattctatgtgtctgttgaaacttaagacaaagagcaaacttggatttttgctctcaacgaaagcaccaaaatgttgacctcgcttttagccaacgacagtgagtgaattaataagcgattagaaatataaaaacagagcaaaaatcaataagcaataaagaacaccatgttttaaagaggttcggcccctttagttcaataatagcctactctccttagattatattgacttgagaacaaagaacacaatgtttcctctctcaaagctctcacaatgaaatctttgggtgttttctcttagatctctctctaaagcaattttttctatcacttttacagtgaagctagatcactatttataggggctaaatgcaagaggaaaggtttctcgtttgcttacaatatctataattggtaagaacattcattacatatttagaatacatgaaatgggggattgagatagcctgccgtatctctctgatacaatcccatgattgtagggattgccttcgtacttgggcttcacga

SEQ ID NO: 341088 - DNA, 724 bp, Cannabis indica
gagtctttgccctcaggatcgagaggaccgaaaaagcgtttccgtgcaccaagagcagcccgggagaagaggaagaaagggccagaaatgacctcccattgatctgcgaaatcggattaatgggaaccatggtgatctctgggatcacctggaccaaaataagtacggaccagcggtctccacggggacgttaaacgaaggaatcatggcagaatttgccatactccgaaaagacatcacctgagtctcccggagacagaaaggcgacgactctgactccgactgtgaggatcgggagccatgtgccaagcacatcctggaagtagagctccccaaaaattttaagatgcccgaaatggtagcttacaccgggaactcggatccaagcgatcacctataacggttcaaccgagtcgtgacagtcatgagggtcagtaatgacgccaagtgtttatgcttcccgcttactctaagcggatccgcggaagagtggttcaagaaactggaaccagggtccgtggattgctggaataagttgcaaaccagctttcagagacaatttgtcactgcaaggaaagtcaatctggaggtcagcgccttgactaacatcaagcagctgcctacggagacattgaagaatttcataaagaggttcagggaagaagcctcaaaaaccaagaaagtagatgacggacaacaggttgctctcctccaagcaggcatc

SEQ ID NO: 341089 - DNA, 902 bp, Cannabis indica
tctgttattgagctctaaaaattagttgtttgaagcatgaattcttgacttgattgtgtaagaatttaagaaaggattatgtggaattttgctctttgtcggagctcaatctttatgttaattaatctgagttttgagagtttgattgatggatttgatgcatgaaatttaactctctaatatttattggcaactcttctatgtgattctagagtttgattaagctttgagttgaattggttgggttttgggggctgaatttcgaaatttgcttactggttttctgggtttgaaacccaggtaccgcggcatgacttttgcatgccgtggcccgcccctatgaaggaaacctgtgagttggccacaggtgtcgcggcatagcttttgcatgccgcggctcgccctcgtgtttttgggcagattcgaatgcaaactttgatgaaagtacatattcgaactctgttttgggagttctatataccgttggaaagctcatttcgagctctatgtgattatatgtattttaaatgccatgtatatactttataaatgtaaaatcaggggttaaccctatgtgtataaatctcggaattgtgactaggattaccgacacttggttaggagcacctggagatttggaatctctactattgcgggacatcaggtaatatagtagttagcacgtagagttatgcgcggcagcacttatactgaaaatgatatatgtgagtaattagtaaccaggattaggtttattaccctaacatgagcggtttaatagcctagggttattaccctagtgatgtatgttgtgtaaatgctatgccatgttaaatagatgagtatattgagattcagggttatgtgttcaaggtataaccgggttggactcgataactaga

SEQ ID NO: 341090 - DNA, 805 bp, Cannabis indica
tccagatatcccctctagaaaaaacttgccttgtgcctaatccacgcatctcgtaagctacgattgtacttccaggcacatcccataaaagtgttaactgatcagcccttgagacaagttttatcaacactagatgcttctgcaaggttgataaaatggtcaatcaaactggggcagttcgacataacataccaccctcgaacatctaacaagggccaagccttggccaatttcttgatagatgctataactctagaagaaattccgcttgtactgtgagaagcagaaacttggaagttatacgtagatggcgcatccaatgagtaaggttcaagtgtaggggtaatattaatatcaccagaagactttaagtttcactatgctttgagatttcagtttggtgcattaaataattaggctgagtatgaagccttgattgctggcttaaaggtagtcgaatccttgaaagtcaaacacctcattttccttagtgattcagagctgattgtaaaccaggtccttgggaaataccaggccagaggcttaaaaatggtgaagtatttagagaaggttcagaagaacttggaaagattcgattactttaatatcgaacaaattttgagagaactgaactccaacatcgatgccttagcaaaactgtcctcgtagaatgacttggatgaattgaacttagttcccgtggaggtgttaagcgagtcaagcatatgtgaaacgtaatacatcgagatgatagacaactctcctacatggatgactcttaatatcaattacttactcgacggac

SEQ ID NO: 341091 - DNA, 522 bp, Cannabis indica
ttatattttgtttttagatttttattgtacattgtacgttattttaattatatttgcgagtttttaattttattgtaggaaattttaagtcttttccaactttaccctacaccaacaaataaacaaatcagttttaccaaggtcaatttcgacctttccctgttcctgacttttcaaagtcagctgagtcaaaacgactccgttttgcctttgaacaaaacccaatactccagaagcttctcaatcacttcctttctcccttaggtttttcctcgaaaccctagaagagagtttctctctgagaaactcgaaccctagccctcgataacccagaaatcccaatacaaacacaaagccaagatcagatctaacaagatctgatctatcctcaaacacacacacaaacagaaagaaattaggtttagaaaacaccagaatttttcccgaagttcaccaataaattggctacgtctatgtttgagctgctcctcaagtttgagagctcgattccactatttcttg

SEQ ID NO: 341092 - DNA, 450 bp, Cannabis indica
gtctgcttccgctcagatctctaacccttgtatcctatctgtcgcagagtatctcttcacagccttacacactataattgacataccacttgatgtgtatggccactcactctatcactcaaggtatgaaaaatatgaagaaggaagagagaatggtgtttcgaaaatagaagtaaggatggctcacgaaaattttaactgaaggtgaattttcatcatctttttaagtgtgagccatcactatctatttataggctaccacctaggtttaggttaggatttattaggcatttaaataatagaaaaattaagtgaaaattaccatagaagtggccgaccatagtaatgggccccactttggaatttttaccattttacaacaatcttttcttattttctcaaaaataccatttttccaattctaaaaacttaaatgctaaaattatttat

SEQ ID NO: 341093 - DNA, 987 bp, Cannabis indica
ctcgtggggagaaggagcgccccatccctgggaagcgtagaggacgaagagagcggataaatacttaatgcccttgggagtaatctgggccgggcagaggccgaagaagtccgccacatcccggaagtacttgtgcaagggcatcagcgccccttgctggccgtgagcccccgaccaggcgcacatccccttatcagggtttgaggcgcgattgtcgtgggcgagaatgtagcagtccagctcgcccaggtatccgtcctggtcgagagtgcggaggcgtgcctccaaaatcttggacggaggactcacccatctggcgcccaaggcaccctgcctcctatgaggaactgcctcagcaagctcctcagtgacgtaatcaacgcctgtaacaaggacgtctctattagcatcaactggttgcccagcctcattgtactccccataattagggggttcaatctcttcttctccctcagcagcgggagggctgcccgaacgcacctcgtccagctcctcaacttcctagacttcagcgtccccctcacggtcctcctccattgggaccgccaaatcctgttcggcatcgagcagggtggcaagccgagccacctggggatcagaagcgtcagccagtcgcgtagttttctttgtacgagccatcattctatggctgggtacagaatcagaaggactagcacgaagacgaggatgaactttgtgcagaatttgaagcatctccttgtctatttgatgcagagtacctaacagattaaagaacgatcgtgttctagaaaagtctaagctcaagaagctagaaagtttttcttgagttagggcaaaaaagttcatgaagcttgaaaaaagcagaatagaaaacagacgcaatgcagttctaaaataagccttacggctgaaagctaacgcaaggacatggaaaagaagagtcgcaaaagtttcaaaccctagggtttgttggaaattatttta

SEQ ID NO: 341094 - DNA, 496 bp, Cannabis indica
tctaaaacaatgtaaataaatacatataaagtttcagaaaccttaacattgggtgcagtggaatattaatggctcattccactcagatctctaacccttgtatcctgtcagtagcagagtatcaccaagatctgagcccgaatgtccttctcttgattcttgattcttcacagccttacacattatgattgagataccacttgatgtgtgtgggcactcactctatcactcaaggtatgaaaattatgaagaagaaggaagagagaggtggttcgaatatagaaggaatagatggctcaggaaatttttctgaaggcaagaaatttcatctcatttaagtgtgaaccatcactatccatttataggcaaccacctaggtttaggttaggatttattaggaattaaaataatagaaaaattaagtggaaaataccacttacgtggctgaccatagtgatgggccccacttgggaatttttccacttttgacaaattt

SEQ ID NO: 341095 - DNA, 535 bp, Cannabis indica
gtttgggtttgagttcagatcggagttcgagtccctgtctgagtttgggttcgggtccagatttcagtctaggtccagattaggctccgggtgtgggttcgcgtcctgggccttggactagcttatgtttgagtcccaagttccaaccgcgatctgagtctggattaagttctgggtctaagtctgtggttctgatcctcgtccggtttgagtttgggtccacgtcctggtcttgcattgggtatgattctaggtgtgggtttgagttcgaatccgagtctgtgtccgcatttgtgtctacgtcttgacttcgatctttgtctaagttcaggtccaggtccaagttggggtcccgagtgcgggtccaactttgggtctgggtcccgaatctcgagtcaagatctggataactgtcacgggtctcagttttgttcaggttcaggtcccaggtcccatttctaagtttgggttccggattgagactgtggtgcggttctaggtccgactctagttctgtgtccctagtctggttcca

SEQ ID NO: 341096 - DNA, 908 bp, Cannabis indica
gttttgttatgcatgtacattttttatggtgtatatttttaatttatccctaacaatttttttttattgcatgtgtattgttttgtagatataaatacatatatttaatttattttttgatacatttttttttaaaatacaatgataagtttcttcattttttttttaatttacacaatgtgcattagtagatattgacatattaatattatattgttatctatttaattttgttgttgttttaattatatattaccattatctccgaaaaaaaaattatattacccattatatcatataccccattttgaaatcataagatatattagttctattaataatataactatttatttaacttctaaaaattaatttgtcattttaactgtcgctaactcaaaaagaaagagagaaaaaaagagttgaaagtatgaatttgtaacaacaaatttcatgggaaaaaataatgtagttgtggtatagttccttcaaataaaaagatttttggaagaagtctcgtggaaagctagatgtcgtgcgaaaaggagtttcgaaagtctagcttgtccactctgaaagttatttgtttatggaaagttagatgtcatccgaaagggagttcccgaaagtctaacttgtccatctagaaggagtttcttgggaaagctagtcttccttcgaaaaggagtgctaaattgctagttgttccctcttggaagagagtcccagattgtccactccagttgtcgatattcctatccaggaagttccttcagggtacgcttcggtttatcttccaagaagtgtatgtctcatctggcagcactttaacttgagctgatgtggagattctattacgggagttttgttaagttcgttaggtcgtaactgttggatatttattttac

SEQ ID NO: 341097 - DNA, 436 bp, Cannabis indica
acacatacacataaaaacataataaatataataattggtaattgatttataagacaaagtaatgaagctcaactcatagattgcaatttatttgtaaaagaaactttattgtaaattaaaaattgtttgcaatattatgagatcagggaataaaatcccaaacttaaagtccacattgttttaaaatttaaacaattaattcaaaaataaataaataaataaatgagcttcttctttatctttgacgaactccatccataatctagcttttagatcccactcgctataagaagaaaaataaacaaggttagtagtccagaattaataatccaaatggataataattcactaaaacacatcagtttatataaagaaataccttgtttctttgcaagaagctcaggacattggggtttccaatggcctttctcattgc

SEQ ID NO: 341098 - DNA, 637 bp, Cannabis indica
atttcaaagatgtatgcttgcaatattttctgatgtggttaaaagaaatctggaagtgtttatggatgatttttctgtgtttggaaattcttttgatgattgtttgtaccatctttctcttgttttaattcgttgcgaagaaatgaatttagttcttaattgagaaaaatgtcatttcatggttaaaaaggcacttgtcttaggtcatgtgatttcctctcaaggaatagaagttgataaagcaaaagtagatcttatttcaaaacttcctccacctaagacagtaaaagaaattagatcattcttaggccatgccggtttttatagaagattcataaaagactttagcaaaatttcacgccctttatgtcatttacttggaaaagaaaatgcttttgtctttgataatgaatgccatgttgcctttgaaaaattaaaatcccttttgactagtgcacccattattctccctcctgattggaatgttccttttgaaataatatgtgatgcttctgattatgcaattggtgctgttttaagacaaagaattaacaagttacctcatgtaatatactatgctagcaaaactttaaatgaagctcaattgaattacactacaactgaaaaagaattgctt

SEQ ID NO: 341099 - DNA, 1376 bp, Cannabis indica
atggtgtaaaagatgaatttatctacctttggatagaataaaaatagcttttgatatcggctggcgaattcatacttattcgtggtggaaatttatgttgaactgtcattttgaatttccatccaacggtagttggagtaattttatcagctaaaaggtgtagtgtcggcatctgatatgcacacttaatattgatattttgaaaattaaatagaagaaaaaaacttttagtgataagaaacaaggcctcaaatcaaatgtaataaaatcacattgcaaaataatatttatatggaaaaaatataaacatagataatgaaaatattaagagcggtatcagaaacggttagaattttatgaatgctaattacatagtcacctagcatgttttttgaagggtttaatttaaacataataatgataataatttcgtgtacacaatatttttagtagaaatcttatcttgttgaaaagttgagacaggtcggatcaagaatctaattgtcgaagatatctttgctcttaatattgctacatataactgaccgtgtgaaaaaacaggttgcggtaaatagatcccaacgtaatgtaatgtttgtccctgtgacttatttatagtcattgaaaaactcaatctgattggaaattgtgttcttttgaaaggaaacccactattttcatcaacatttggcaagaatggtatcattggaatgaacactctttttccaatatggtgtcccacagtaatttcagcatctatgacatttttgtcaaatgcctgcatattaaacaggttctattacagaaacctttggaaggattaatgtttcgaaggagtatgatgggacaattctttttgagttgtaattcgtgaggagaaagtccatttggagttaaggtatttaaaaagccttccattaccgattactcagtattatctattgtctcatccctgctgtaatggatgtgtacttctcctgggaaccttcctattaacaatgaattgatctcattgacaaagttgttctttggtgtgaggatagtgttaactcaaacttttagatctccttgttttgatgattaacaaatatttgattattattttttactaatgatttgttgattttgttgcaaaattaaaagagaaaataaatctttcatgataaattggtatttttaccaaacttttgaaagcaactcaaaatggattcaacaagcatatcaagagcaaaagattcatcaagggatcaacaattcaagaccctattcaaaagaggtcttcaaaacccaatgtcaaaagtcaacctaaaagtcaaagtcaaaagtcaactctcgggaaaagtcaacatgggatcaaaaacatgcaaatcaagcta

SEQ ID NO: 341100 - DNA, 889 bp, Cannabis indica
tagagattatatatgacatggactaatataaataaatttatcttcattaaacttaacgtttactataaagacctaattcatataataatgatgatcaatagtagatcgacctaaattatgagtaatcataaactcctgttcatattattagattttttcatttactcgttaaaattgctcaaagaagatgattcttacaacttatgttcttagaatttaataatgtggggctgggaacatgatctacaattatggaatactgactttcttaacgaatcgaatgttggttccttttaagtgttaattctggaactaaaaaattgtgcacaaatttagatttgatctaaattatatttttactagtgaatcaacggtactaaaggataagaaaataattagaaaggtaaaacaacacttttaacaaaaactaattatgaactcacacaaggagggctaattaatggaatcgattatatcaatagacacgtaaaactcaataaatataattatataattactaagagtttaattccatatttatagtggagtaatcatagaactaataaacaagattatttgatcgatgagattcaataaataaatctagtttattagagcttagaattataggatcgatcatggtcccccgccactatgaaacaatttccaaggggtgggataaatattgtatatggaagttgagaacaatctattttgaattatcaaaataataatgggtaaataccattttagaccctgtgttttaaaaaagttaccaattggactatctgttttgttaaatgataatattgaccctatattttctaaaattgtatagataggactcggtatgtaacaccctaactaccttaggcgtattacgtgattt

SEQ ID NO: 341101 - DNA, 620 bp, Cannabis indica
agaggctaggtcaatgcttcagtttgatcacttttacactcaattggctttgacccttggcaggattgccgaacagcctttgtgcacttctatcaatagctattcagcttctttcttggtagcgcttcttagaggtggcattgggatatcacgtatgtgcattatgttcataaggcttctttctgacaaggtttttgtttggaggtattgtttgaaattatttaaccaggatcttagatctactcacaagtacgttgattaacaccctaaatatgaactttctaaaacgatgaaataaacacatagcagaattaaatgtccccttccattcagatatctagctcttaattcctttctgtagcagagcattatcaatatctgaacctggatctctttctctaattctttagtgctgaaactccttcttgctgaaagtctttcttcacgatcttcctcactatgattaaggtatcacttgctgtgtgtgggcactactctaacactaagtatttcgaaatctcaaggaggaagagagagagaggatgtggtcggccaaagatagggagagatagaggctcagttttttctaaatgaaaaagtagaaaatttaagtgtaaatt

SEQ ID NO: 341102 - DNA, 659 bp, Cannabis indica
caactgctattttgatttttccttttaaagaaaaggtttttcaatttcttgactttatattgtcaaaagaaaatttaatcaattatcctttcctttgtggaaaaaaaaattaatttttaggtatgcaaatacattatatatttctaggtggattctagttattatacacatatacatgcccccaagtaattttaaaggaaaagaactttgtaattacttgaacaaacttttattttattcataacaatcattaatcattacagagataaatacaacatttacacattaaattcatttgtaataaggtcgtaaatgttcactatgatgggaatattttaccaggatcaaaatttactaacaagtatgttgattaacatcctaaatatgaattatctaaaacaatgaaaataaacgcataagggtttaaggaaaccttacattgattgcagcagaatataatgactacttccgttcgagatctctagcccttgattcctttctgtagcagagcattatcaagatctgaacctggatctctttctgtcctcgggtttggttaccactgttttactcactatgattgagtacttgacttgctatgtgtgggcgatggcactctatcactcaagggttcgaatgatgaagaacaatgaaggagg

SEQ ID NO: 341103 - DNA, 730 bp, Cannabis indica
aaaaaaatactacaacaacaccaaaaaattaaagaataacaaaaacaagcatgaaaaaaatagaacaaaaataatgaaatcacacacctctacaaccctttttccaattattttctcaaccacatctgttgattgcacaatctttaatggggatttaccctttccataaaatttaacaaaacaaaaccaaaacaacaacaatacacaccatcaaacaaaacagaaaaacataaaataaatgaaacaacaaaaggaacatgcaaaatgaaaaaaaaaatatagagaaattaacaatacgataaaactgaagaaaaaaaatcctaaaacaacacaaaatcaatacgatatcagatttgggagactttacaaactctggctctaactcaaaatcagagtcggagttctccaccacgagtcaagggcgttttgctcgagtattcttcgaaggtctagtacctagtttccttttagcagcaacgggagaagtagggctaggaggattatttttcaaattcttacccattgttgctcgaaatttatttttttggggttgttttgggggatttttagcaaaaggagatgatgatgattgggtaatagtcattgtgaataaggggaagtaatatttatagaagaataagaatgaaaattgggggggggggggaatgaatagggaaatgatatgaagatggaataattgaaaaaaattgaaataaaaataaaataaccc

SEQ ID NO: 341104 - DNA, 837 bp, Cannabis indica
ataaccagccgctcctctcaaaaccatctcttcacaggttaaaaaaaaaccattgcagtaataatagatcggacaagagcagagcggagccgccccaaacaaaaccacgatctcgtcgtcagcctcaaaaaatccctttctcctccattcgtgttggtttctcttccgacggtggtgagctacgccgttcgtggacccaaacggaggctgcgagcttcgttgctggctcccttttctcattctccatgctatgaagccctctcacgctctctccgttgttctctcaaccaactctgatgcatctccgccttccattgctttatccccatcggcttcatcttgcaaggagtatcttgacaatgatgatggaggcgaatcaaagcacgataaggaagccaccatcagccgcccagaccgagaccaacaagatcgttcgttgccaccgtccgcagcccactgtaaaaaatatgttcttttgacatttgattcacttgctttatttatattatcattattttaggagtttttattatgtaattgatttgtatatgtttttggtatatttcagtatttaatctcttttttttttaacttaaaattttgtagtgttctatatctattttttttgtaagtgttattgtgttttgatattctaagtttaccttgctctaatttcatatttattcctagaaattataatttttgtgcttataatgccccaaaatagacctccttaatcactttgagttacaattcatctccatcaaataataataataataataataataataataataataataataaaataaaaataattttgtaaattaatat

SEQ ID NO: 341105 - DNA, 632 bp, Cannabis indica
tttttacaaatattaaagataagcaaaaaaaaaaatcaattttctctcaagtctctctttttttgaatccccctagagacagctagggtttggattgtttttctgtatttcaaacttgttccagcaggcgttaggagatcttaagctctaggtaatttcttgtatccttctctttagtttcttgggttttaaggaaatgaaattttgcatgaattgagttattagctactgtggttgctatagttggttgttgttgttttctgaggtttaattatgcttagatatattgttttaggtttgttttgatggctggtttaatgattgagcaagctttgagtttttaaactcaagcttggctctttaatggcatctcttgtttctgagtttgggtactggttttgttgcttggaaaatgatctttaggatgtttagaacaggtccggaaggtttcatgtgaattgaggttgatttggttgagttatggaatttgtgatattcctgcactgaaccagaattccagtttagagggaccagtaggaaacgaaattctggttgggaaccggtctaccggttggggcaattttgggaattctagtttttcccatttttgtgatgtttagggtattgccatg

SEQ ID NO: 341106 - DNA, 613 bp, Cannabis indica
gagagagtggggctgggtcggggtgggtgcggtggctgggtgcggtggttcaccgtgggtggtgtcgagttttgggtggtgcgatctagcctcacgggttgggttttcggtgtgcaatggctcacggttgggaggctttctttgacagagaaaagaggaagaaagagagggttgaaaataatgagaggggtattttagggtatagggaaaagtgatcctactttttcaatagatataagtattagtttaaaaaattaatttaagtagaaaacatgaatataaattcaaatttgcaatctaaaattttctttttattggcattgtaacttgtaagtacataaatattgtgtgtttgtttgtttgttttcttttttcaaaattaatagaatgtatatttgcaaaagatttttgtagatgggagaagaagattttctaaaactctacaaggtggaaaaaaatcctatgaaaaaaaccttggccgtctttctctctcacaaactctcccaaaaaccattcgtacctctttccggccttgctaccattacggcgcctccgccatcgtctgttcacgatttcaggcttctttttctcttctctcttctcttctctcttc

SEQ ID NO: 341107 - DNA, 519 bp, Cannabis indica
gcacaaaatcaacatcatcctcaaaattagaattgatttgaccaaacattctattttaatctacattaacaccatattctcacatctattaattaatccatgcaattgcttaaaaaatatgataaacatatctataaaaaatcagacaatatttttctattttattaacctaatcatctgtcaatttctactttaaacaatcagattacacacaagttttcatccttatatcatcgtagcacacaaatttcgcagatcatacttcactaaaatacgcaagttatcaaccttccattatcaccgcacacaaagtctcaaaacctacttcaccatggatgaatatataagatattcaaactcttctataaattatagagcaatttgcggcaaaatccccattatgttttaatttttatacacttaacccccttattttttttttggtggcaaaaccccctatgttttaatttttatacacttaacccccttatctttttttttggtggcgaaaccccctta

SEQ ID NO: 341108 - DNA, 504 bp, Cannabis indica
acatctccttcatcatatcgacatcagtatcaccactatttttacattcaagttttagtgctcaactagatctcattggaagctaattaaggtatagcattatatgatttagattgtagattcaagattaagattttgtatatatactattataatatgttctaattaataagtatgaaatttaggtttttcataagacaattgttgattctcaaggatcactctcgcaatcaaggctagaactccacattcgaggtaaggaaattaagtagaaaaatataagttttcagtatgtatgtaataacattcataggaagagtgagaatagtaaaagagaagttaactaaggtcttctgcttgactttttattgtttgttatttaatgtactgtataatatatattaaaataatatgtttataagattcatgttatttatgtatgtttacagtattagagcatggtcattgctaaaggtatatatttaaataatatgtttataagat

SEQ ID NO: 341109 - DNA, 531 bp, Cannabis indica
gtatgggcttgggtttgttgctaaaaagagagggtttgtgaagagttatagatttttccctaagatttatgggcttgggttgggctcatatgtatggcttaattaaataaatataaaaattaaaattttaaaacatgcggcgcggtgtggtttgaatcgcggtttaataattcaaaattgcaaactgcaccgcagcgcgcggtttgggaaaaattcaaaccgcaactgcaccgcgaagaatttcaaacgacattttttttgcggtgcgggcggtttgagcggtttgatgtacacccctacttttaagttgtatttgcctattgactttgtgtatatcattgtcaactaatttttttctttttaaaataaaatttaagtaacaattacagtttattcagattttgttagctttggtgacaactagcaacaatggaaagatgtatgtcaaatgagtttggaacattatttgaagatgttataactttattgtctaaatttttgggggcaattttgtcccatgtggctcgctct

SEQ ID NO: 341110 - DNA, 1006 bp, Cannabis indica
cggcacacctgaattcggtaacgaggtaagattagtataatagttgcatatgtttatacatgtttagcgtacatgttagttgccgtcagaataggcaaatctatagccatcagattagcatatcagggcatcgatgaggtgtacatagagttgtaccaagatgccaacagatatatgctaggctatcagatagtatgcgttatctgctaccacatcagtacgactagagtactgagtataggctggattcgcagtaagtcatactttgtcaagaacgttcctgactcagttagggttatggttaggtgtatgagcgcatgattataattcgggttattgctatgttattgtttatgcttttcttactgagtctgtcaactcacagttattgtttgcatgtgtaggtaagggcaagactaaggttgagcagccatgagagcgagcagatggagattgtacatgtcgggcctaggcctggagcgtacagtctttgggacatcatgacttattttgtatagtcgctaggcgacaaactttagtatatgcacagtaaaatttttgtatatacttttgtaaacgggatcctgatttatataagtatattattttagtgtttataattaattaagtaaaaatttaattaatcacgattttcaataaatttgttgattagcaacgagatgcacatttagttaaacatcacgttaacatgcctaaactggtagggtgttacaatccagaataagaaaagacaaactatgcccctaaaacaatcatcaatatatatataaaggaaagcacaagaagagtttatgtgtcattttataaaattttcttcctatttttcttaatttctaacacattctcttattttgtttgaaaactaaaccacacaaacaaactaaaagtctcacattgtttaaaaaccgtttaggttttatctatgtaggttataaataatattcttattacattactttcctatgtctaaaaaatattatttttt

SEQ ID NO: 341111 - DNA, 547 bp, Cannabis indica
tttgttatttgtatattattttcttatgatgttttgatattgttttgttgttcttttcttgctgctttcatgtgtattttttttttttttttgtgattttatagaatatcgtaaaaatatatatataaaaatttgaatgtaaatttttaccaaaaatatcagtttatataatttttatgagcatactttgctaacttatgagaactagtatatttacatatctaaaaacatgagggatctatactcctggaaaattgaccacaagattcctaatatcagcatatacacaataaaagccaaaaactatgtctaatggcccggggtcgcaattcttttgctaccataagagaatcaatctcaatgaaatgtattaaaaattacaactcgattagctgtgaaaaataaacacaacctcaagaatttttggtttgaaacatccatacaatatttttgacaaagcataggactatgttagtaaatattctcgttttaaaatttgtagagaaatgacaattttagactatttattatttatattgtctttttt

SEQ ID NO: 341112 - DNA, 969 bp, Cannabis indica
cccttagctcgcagtgctttttcaccatctcagcataggtggtcttgtcatctgtaatgatcattaggtcatgcttgatcttcacattaagtccatcaagatatttttccttcttactgaaatcggttggcacaattcccgaggccaacctcgccaaccgatcaaactgagttgtgtattctgtcatgatcatattttccttctgggtcaggtgggtgaactctttcctcttagcacttctaacggcctcattgtagtatttcgcattgaagagttcctgaaacctttcccatgtaatagttgtgacatcatgcatctgggacaccatgtcccaccagactaaagcgtcctcttgaaactgaaaggtggcacacaccaccctgtcattcctagtgacacccataaagttcaatatcctcgtaatcaccgttagccactgttcggctttcatgatgtccggacctcccagaaaaatcggaggtgcctgcttccggaacatttcatacaggggctccattctattccctgctactactaattcggcctcagcaataggggtaggtgccactggaacttatggcacaggcactgcaggagcaccctgctgtcaaaatctctgaatctcattatcttgctcctctattctggcttgcatttcagcaaacctaacttcccaattctgggcttcttgattggcttgggcagcctgggcagcgtgtggcgggttaacatcaccccgaccacgagccctggccctgggacctctaccacggcccctaacattcgggggaaactaagctccttgaccttgatttgacctgattgagttgccctaactcctagtatttcgtctggcgtccatctagtctgaacaacctcgaagcccagagttggcacatcaagtcatgatcaacgagagcttactaatgccgcttaatttggaaattaaaaacatgcgcctattctact

SEQ ID NO: 341113 - DNA, 662 bp, Cannabis indica
gtctttgagtggctcgcggatttactggttcccatgctttctcgatcattatctcgttgagttctttctcctctttgagttaatcgactatgggttcttggccgcctcgaagtcacacttgctttttcatgttctgttctttcctcctgagagcggtttgtcgtatttctcccattagggtctgtacgagtcctcgctctatgggtttgggaaggatgttggtgatttctaacatgtgacctccattctcccagttgagtcccaagatcctcctcattccggttgtctcccatctggctgctcattcctattttcagggcgtgtctcattttccctaaattgttcttctcgagcattttcctgtctgctggttcgtgaaccacgaggtatgcctcgtggtcttctcactctaggttcaggttgattttgagcattggtcccctgtgccgccctagccgaggctacatcacgttctaactcagcattcgacgatgcgcctctttcagacggcgtctcaggcggtggtattctgtttcataagtaccttctcccatagactgggcacctccatgattgtaactcttcaatccctcgtcccaagattctgaccaattcacgttgatttctcctcgatcgtgttgtccgcgtactaggccaacgtc

SEQ ID NO: 341114 - DNA, 598 bp, Cannabis indica
aaaattgagtcttctctttctctctctaattttcgaatccttctctcttgaaaaaaattcgaacccttatagtgatagagtacatgcgcacatatagcaagttggtactcaatcatagtgtgtaatactgtgaagaatccaatcaactcaactacacgagaatcgggctcagatcttgataagactctgctatagaaaggatacaagggttagagatctgagtggaatgagacatttacttccgatgcgaccaatgtaaggttcttgaactttatatgtgtttgaatttcattattttataaatttatatttaggatgttaaatattatatatggtagtaaatctagaccctggtaaaataattcccaacaactggtattagagccatggtaatgatttactttcatgaaatatggatttaaaacgatgtttgtattgatttggatatatggatttaaaacgatatttgtgttgatttggatgtgttcatattggtttatgtgcatatttgatgattgtatggaaatcgcaattttacaatgataaatattttttagtttcattctaaaagtatttttccttggaaagtagatgaaaa

SEQ ID NO: 341115 - DNA, 378 bp, Cannabis indica
ctgaaacagaacgagtttttaaaaaaatttgggttcagtgggttaggtccgagcgggttggtcgaatccgagtcaaatctggtcaaaatgttcagtcctaattttttccctaaggcacacacacaagcatatataacacataagggaaattttgtcatttccactcacatacaaatatcacataattcatattttctcatttaacacataaaagccataactaaattccataaatgtattttggaccccgaacccaattcggcccaaaatacccgtgtgtgactatattgtgctgacttgtcagaaatcacctgcagaatgatagaacatacatactatataataatatagtccataaacacaatataccgtaaaatt

SEQ ID NO: 341116 - DNA, 584 bp, Cannabis indica
gtaattatttgtaagacatattttaaagaacaaattatcattatatatttaatattaaaaaataaaataaaaataataaaaatctattacctttaatggcatttcttataaaattagtggaaaagttctccctttattttctctcttatttaatcaatttttttcttttcttaattttaataatacaagtgaacaaatgtaaaagaatgattattttactaatgatttccattacttattagtaaacataccatagatgctactatggtttagtggcttgaaatttcttattatttgagctattgctcttcttttcgacaattaccgtttaataagaattctttcttttaaaaataataatgaataaataaacatttgacaaaataattaaataaatatagaaaaagcgagcaaaacaataatagcatctttcattcataacaaattaaaatatagtacaaaaaatttgtaacggcctacaataatttaaagagaaagatagtattagattactacaatatagtaataatatttaacgaaaaaaaattgttgaagcattccaattaagtaataataaaaaatta

SEQ ID NO: 341117 - DNA, 481 bp, Cannabis indica
tccttcaataggaggaggttgtaatccctagttgcttaggtgttgggcagatcgggctggttatgtcccctgtctcttcacatattgcttgaagtggcctcgcgcgatgagacattctatctcatctttcaactgacggcactcgtctgttgtgtgcccaatatctttatggtacttgcagtacttggtcagatctcttttatgcctcgcgtgcctcatgggctcaagtttactgaaggcaaccttgtgatcatgcgcgaggtaaatattttcctgagtttcataaagctcggtataaatagtataaactggcatgtatttgtcatgcttcttttgtttcttcttgtctttggacgaccccttagagtcgtctttcctctttcagccagaggcccctaagttataaactttagtcgagacagtactgttggaaattattttacaatatcgcctagttaatcctagatcaaatgatcttaat

SEQ ID NO: 341118 - DNA, 977 bp, Cannabis indica
ccctctctcatcaaaaaagtttggttagggagttataacagttcaattccacttttgtcaaagaggtttagtcgagaacctttgaatttcaaaaaaacaattagaaatggcgggtttgcattataccatgtatttcctgatgaattccggttaatcatacataaattccccttaagtaatttttaaagaataaaactttgtaattacttaagataaatgattctcttcattcataacttaaatttaaattttacatcaataatgtgagttagatcatttatttattggtagtagggtcgtaaatgttctacgctcaagtagttttttattagcgagtcgatgagtcgagctaatttataaactccaactccaactactgcttcgatgacatatggaccctcccatttcgagttgaacactcctgtagatgcatctctagtattggaaaatactcgccttagcacaaagtctccaacattgaatagtcttttcttgacttttttgttgaagtatcttgtaactcggtgttggtatgctgcattggtgatctgcgactaagttcgtttttcttcaagtagatccaaggacaatttcaaaaatttctggctttcttcttgattataaaactctcttttgtgattcgatatgttcacttcaacaggcagcaatgcttccgagccaaatgctactgagaaaggagtgtgtcccgttgttgttttctcggtagttatgtgggcccagagtacctgaggtagctcgtcaacccatctgcctttggcagcgtctagcttcttcttgatagtatcctttaaggttttattaacaacttccacttgtccattttcctaaggcctggatactgacgaaaagctttgatagttttgttcctctcacagaattcagtgaacaagtcaccatcaaattgggttccattattggatactatcttcatgggaattccagacctacagatagtg

SEQ ID NO: 341119 - DNA, 590 bp, Cannabis indica
atctattcaactcgtattcatacactcttttttttatttatacacaaattttagtttagtcaaatgccataaattgtacttgctaacagattcttatgaacatgatacattttttataacacattctaatatttttttattacttttaaagtatatatgtgttttttctttaaacatatttttttttcaataacaaaaaataaattaaaataacaaagctcagtaacttaaagtcgaaaaaaataagcccattaatgtatacatacatacaacatatataaaacagtcatctttcttgcttttttttttaacaatttttttataaagcagtcgtttttttaaccaaaaaaatcacaagtgtacgtacacactaccataccatgtaaaagtgtgcataaatcaatccaatgcaatgacaaccgaccgccaaacattaaatatccaattgtgattggatcggatcagatgttatttttgaatatccaattggattagatcggatgttgaatgagtgtccataacaatatatccaacattcaatagaactaattagtattttcatttagtttgaatgaataattaaattttat

SEQ ID NO: 341120 - DNA, 656 bp, Cannabis indica
cattattaaaaacatacatttcaatatgaaaacaaaaagtataatttaattactgaaattaatttaaaaatactagaaaataacaatacaatatatatatatcatggtatagaatatatataaattttatacacattaatatatactatatattttatatatactatatattttatatctacatatatataaataaaaaaaaatataaatcttatatatatatttagaacatctatacattaaaatttctatatgcacaaataaaaaaaaataaatacctaaacatataaatcctaaaattatctatataaatatatacatttatacacagatatatatataaatttgtatccaaatatatatatttaaataaacacagatatatactaattattttatatttatattactatgttattacatacacaaattaatatatatatacacagatatttaaaaaaaatacccaaattaatttataaactctaatattatctatttatttaataattcatgcagaatatataatttatagatctctaaaaatatttgaaacctgaaatatatagatttgtatataaaatatatattatatatatatatatatcaatttaaaatacttaaaactatataatctacaaaagtaaaataaaaaa

SEQ ID NO: 341121 - DNA, 598 bp, Cannabis indica
ttgcagttccagcggtgccagcagaacaacctgttgttggcaaccatatggagccattgtacgaaaggttccggaagcaggcacctccagtgtttctgggaggaccggatgtaatgaaggctgagcagtggctctcagtgattgagcgtatcctcaattttatgggagtggttggtaatgaccgggtgacttgcggcactttccagtttcaggaagatgctctcgtgtggtgggagttgataaccctcactcgggacgtcacagtgatgacctaggaagaattcaaggagttgtctaactccaagtataacaacaaagcagtccacagtgcaaagcggaaagagttcactgaattggttcaaattgaaggaatgtctgttactgagtatacgacaaagtttgaccgtttggccaagctcgtagcgggaattgtgccaactgatttcaacaagaaagaaaaatatctggctggtttgagtgcgaagattcggcacgattcggtgattactaccactgaggcaaccacatatgcagagatggttgaaaaggctttaagagccgagggtgcagtgaaatttctttaggagccccgggtgac

SEQ ID NO: 341122 - DNA, 684 bp, Cannabis indica
gaagaagattaaaaatatcaaaggaaaagatggaaaaaagataaaaagatctcacaaaaagatgaactataaaatagagaaaattgtgcaaaaaagtaaagctgaaacttaaagcctaaattcgactatgatctgatcagattttggaaaaggtagaaacataaaagttctatatctcacttttatctttcctgagcatcttgaagtgtccaattctgaacaatatcaagagagttatggcaaaaatactatcagttaacgtagcagaaaactcactgcttaaataaaggggggaccgcgcctaggcatggaaatcccatactgcagcccgccccttctaatcccaagcaaaataggttttttttcagtgttttgcatcttttttttatcattttttggctatatcagaaggggacttcaattgtatataacattgcagcatgagatttgtctaacgtccactacactcttagggcattttgtttttggaattagagtaatagtggtagtattaatctcttttaaaatctttccagaatttaaaaaagataatactgcctctactatctcatcccctacaagtttccaattgtcttggaagaaagcacttccatacccatctggtccaggggctttatccctatcaatagcaaaaatagcatcttctacttccttccttgtgta

SEQ ID NO: 341123 - DNA, 1362 bp, Cannabis indica
atcaaaaaccaaatctaaccattctaacaccatctataatttgtagtaagccacaaataatttacttttaattttttaagctacctaggtatttttcatgattaagtttagaaataacataaataattcatgaaaaatataaaattaactaaaagtcaaatctattaattttgtaacagtttataatccataaacaatcatagaaaataaacttagatttttctgagcaacctaagtatttttcttaattaatttaacaaaaaaactaaataattcctaataaatcaaataattgcaagaaaattatgaaacttcaccaaacgccctaaaagaatatgtagaatctgaatctactaaaaagatgggaaaaacacctcagaactacccagaacacggtcgccggcgttcacgtcggttctgtcgacgacaaagtgtaactttgtccccgattgctcttgacgcgtccttttgattggggaagctttccacagtgcttaggacctcaaaacgatcaagaactacccaagataacaaccccaaagtgttagatcagagtcaccttctccaactccagtgtaccgtcaataatgaagccaaaaatggcaattttcgtatggggccttaaagcttcgattcttcacgtcaaaacgtcttttaggagtcccttaagcttaaacacaatattattttaacccagaaatgactctaacacgtttgaatccaagattgttcaagaacgtggatgaatgtgcatgaaaatggtgaatttcgttctgggcgttcaagggctatttcaatgcgtttaaacccctaactataacctaggaaacccaatgaaaactctccagacagcccagctccaaaaactcaaatctctctttctctctctaagtttcacatgaaactctattggtctctctctctctgcgcacagcctcctcccttcaacttctttatgctttctaaaccctaaaagtatctcataagcatcctatatatactcccaaactctaatcctaaccctagatcaataacttaatttttttaaaaaaaaataataaaaacatatataaaatagtgtaccgtatatacataccattgttgaccgaggttttcggcaaccaatataataataataataattaagaaagctataaggaattaatgagagagatttttacgtggttggggcattaatgagccttagtccacgagtctgtatatttatgagagtatttattacagagaatgttcttggtggtttttcctctctagttcttatgaaacccagaattctcgacccctgccttaatgagtttggggtatttatagtgttttgtgggtgatccctagaattgaggt

SEQ ID NO: 341124 - DNA, 820 bp, Cannabis indica
tagtatagatagagcttctagaacaacttaataaaaagtataggttaaggaacttatatataaatatatatataacatagtttgaatgaatatttctcctttatttcaaaattattattcttttttatttccaccattcatatacactaataatttgaatgactatagtgactaaacatgcacttattattcttacgtaatttgtaatagacttctacatttcaaataataataataataataataataataataataataataataatatataataacaaaatgttgatatatgtatacatgttaaagttgtttaatattaaaaaattatattatttaaacatcattttatgtgaaaacataagcaaacattgtggataacaagtctagggagcacagcatatatagaaccactaatgatgaaaaggaaacatgtgatgagagaatataaaaaggtaaatatcattttgaattttataatttgtaaaagttataaattagattttttattttattgaatagcaaaatagattttttattttctaaaatagtataaataagatcttaaactgatttttgtcaaaataaaacttataataatttgatttaaaggtgtcatgacaaaactagttaaattttctgcatgttcgtgttgagaattgtcttaaagttagttatattacaaaaaaatatcaaaaaaattaagcccaagatactatttgtactattttaaaaaatataacttatttttgttagattaaaaatcttttgtgggcacatatgtataatgtatatgctattataaagtgtgatacaaaat

SEQ ID NO: 341125 - DNA, 723 bp, Cannabis indica
aagaccacttagctatgaataaaatagttagtaatatatgaaagttatgaaatctttaatcaatagttgctagtacggttcactgatgcccattctttggtgcaagtaatctcggtttggattacagatgtagtatgacatcgaagtgaaggtgctatatataatagagattatatatgacaagaaccgatatgaatgaagttgtctttatctaacatgtcgtttattataaacacttaatttatatcataatgatgatcaatagtagatcggcctaaatcttgagtaatcatgaactcttgttcatgttattagtttacttgtttcactcgttatagtatatcaaagatgatgattcttacaacatctattttgagaagttaataatgtggatagcaaagaagatgacttaaaaatatggaaccttgactttcctaatggatcgatcgctggttctcttttaagtgttaattctagaactggattattgtgcaaaaatttagatgggatctaaatttagaatgagagatgtctttcttgtatattccagtggagagttaaatctaactaggtatactgattctgattttcaatcaaacaaagatagtcgaaagtcgacatctgggtcagtatttactcttggtggaggagctgtaggttggagaagtattgagcaaactagtgttgtggattcaaccatggaagccgaatatatagcagctt

SEQ ID NO: 341126 - DNA, 1019 bp, Cannabis indica
cagggcattcataacacaactgtttcgcctggaaccaatgctaagacgaccatcaaagatgccactgaattaaaaaatctccgtgacgcgctcagactcatgcaaaatcataacaacaccctacatcataatcaagacgaactacgtgctgcagtaaatctcgcattcgacgaacaaaggcgcatgttcgccaaatggagagatagaaagatggaggcattaagggctaaccatgaagagatcgaaaatcgtagtcagcaggctaccgtgctgatatgaaaagcctatcaaactgcaggtcaacagccaccaaacgtcattcccctaggtggaatagacgaagatccaacgatgaatacttcccagactacaaatggtcagccacccaatccccggtcacgagttccactcgtgggcccagtggtaggcgagcagaccttatctggtaattcatcaggagaagtcatacctgatggttccaaccagattaatggtgccattccacccgtcaaccaagcgaatcaatcgctaaggcaaccaggcacttttgtgttcgaaagtttgggagcaacccatgacctaaggaatgctctgaatagaaggaagggagtagacgaacagaatattacgaggatcgtgcagcctggagcccgtactcaaattctcgctcagaaagatgctgaccagaatgccgagccggtcaaccaagctgtacaggctcagctggacgaactgaaaaatatgttcaacagtatggctggacaaagaaacaatgatcttgagctggaccgagcacgcggaactcctttctcaccacagatcaatctcctaccactgcccgagaagttcaaaataatgacgtggaagatgtaaactgggagagaagatcctcttttccatctcaagtatttcgaaatgcaaatggatttgcaaggggttacggggagatgtatgctgtagaatcttccctgccactttgtcggaagccgctcaacaatggtatttcaagttggctccta

SEQ ID NO: 341127 - DNA, 973 bp, Cannabis indica
aattggttttacaccttctagtaatgagacaacttcccaaaccttattgtcttgcatggacttattctcttcattcatggtatcattccagtttagagagttagaactttcatggcctgattaaagttgattggatcatcttccatcattctattttcatcctcatattcttgaagaaatataaaataatcatctgaagtagcatttcttctctctcttgtggacctctttaatggcgcttgttcttaagggtgttgaatttgttcttctagaacaataacctcatcttgatttgggagttgttcaacattgtcttgttgaggttctagattcatttctttatcaatgacaagtgtagaagcttgaacattgtcaaaaatgatagtagaaattgaatttgaattcaattcctcctcaaaagtaatgtctctaaccaaattcaacatcctcaaaaaatgttgcagttcctatctcaaaaatatttttgactttgggatcataaaacttatagcccttagatcgctcgaaataaccaataaagtaactgctaactgttttggaagccaatttattttcatttggcctataaggccttgcctcaggtggacatcctcaaatgtggaaatgctttagactagacttttgacctatccaaagctcataaggtgtctttacaactactttagctggaactctattcagaatgtaagttgttgtttttaatgcttctccccaaatggactaagctaaggtagaatgagcgatcatgctccttaccatatccttaagagtcctatttgtcttccagcaacaccatagctaggtgatcctggcatggtgtactatttgacaataccacattcctctaggaatttagcaaatggtcttggatgttattcacttgagccatcatatctaccgtagtactcaccaccacgatcatatttgacgttattaatgttgggttttatgc

SEQ ID NO: 341128 - DNA, 454 bp, Cannabis indica
tgtgcttgtctttctcatggtatacaggattctgcaacaagtgaatagatgacagactatccgaatagactgtccctttgtctttgagtcagtagcagctcttgcagtattccttgttaaccattatagcttccttgaatgcttcagtggtggccatgaattctgattcagtagttgacagtgccaccactggttgttgttgtgatttctaacatatgcagcttttgttaaccaggaacatataagcaatggtagatcttcgattgtacctgtttgatgcataatctgcatcaacatagccttctaacctcacatcagatgtgtctttctgatagatcagaccatacttgattgtccctttcaagtatctaatcaaccactttacagcattccaatgctctaacccagggtttgccataaacctactcaaaacacttagagcatgtgctatatc

SEQ ID NO: 341129 - DNA, 522 bp, Cannabis indica
tattttttttaattttttttttcaattattctggtttaaattgaataggtgtctgttaaagataacttttttgtggtatattctgttaaatttttggtatattctgttaagtgcacaacaaaaactgttagataggcattttatatattaggtaagatatattcttgtattctttgaggacaataaaaagtaatctaatatcgatataaattttggcaaacatttcctaaagtaaatattttatatttgttaaaaaaagaatattgtatttatgtgaatacaactaaagaatcacaaaatgattatttaaaaagtttattgaagtagttaaatatatttatatgtatctagatgcaggggcggacccacattgtagcgagggggggcagtcgccccccctgaaaaaaaaaatcgagaaaaaaatgtatgtgtattttactaagttacaacatatatttgtattaaaagatgatatttatagacataatagtaaccttggtgtaatggttaaggtagttggta

SEQ ID NO: 341130 - DNA, 599 bp, Cannabis indica
actcctgaaaacttgtttcacacttgcatgaccacacaaatctctaatttttcttagtcaactcagttagaggcaaagagattttagaaaatccctcaacaaaacgtcggtaataccctactaatctgagaaaacttcgaacttcagtcactgattttggcctcggccaattcttaactgactcaattttacttggatcaaccataattccattctttccgacaatatgtcctagaaaagatacctcagacaactagaattcacactttttgaactttgcatacaacttgtgatccctaagtcgctgcaatacaattcgaagatgatgctcgtgctcctcttctgactgagagtatacaatgatgtctttgataaacagtataacgcagttatcgaggaaatccttgaataccctattcatgagatccataaaggtcggaggagcattagtcaatctgaatgacattaccagaaattcatagtgcccatatctggttcgaaaagcagtctttggtatgtcttcttcctgaattctgagttgacgataaccagatcgtagatcaatcttcaaaaatactgtcttccctgaagctgatcga

SEQ ID NO: 341131 - DNA, 581 bp, Cannabis indica
tttcaagctcccaatatgcctgttgtatgcttcaccgcctattctctctcggtagaggtggtcgggcgtctctgacacactactaagcccctcgtccccagacgagttgtgtgggggcgacgctggacaatcttcaaacaaaagttgaagaaggtcttcgtctactcggtgttcacccccccaatagtcgctataacgcatctgcaaaaaggaaaaggcgaggaggtgaatacaccgagtaatgctagtaagctatccatgatggactcacctactagtacaaaaataaaaggagaagagaagatatgcacaataaaaatttacagcgagataatcatctaagcaactaaatgaaaggagcaataatggtcattacaacgcttagtattcttactaagtgtaaaaagtaaaaataacgattggctccaaatcgcaaaattacaccacggtcgtcccaaggcatcaccccctataaatggtctcggggtatattaccccaacccccgcctatagcagggtgtcatcccggccttcaaggggtaattaaggggtaacactccggcttcggggtgtaagggggg

SEQ ID NO: 341132 - DNA, 613 bp, Cannabis indica
taagtgggatgagaattttttttgagaattatgtttagaaatgatgtatgtgtgtatagagagttatgatccaagtatattatgttgaaaagttctcttgttataaaaaacatcatattgagaaaaaaaattcaataatagccacaaataaatttgatagaattataactttaattgtgtgaacaaggaggcatcaaatgaaaaaatactgttgggagaaaagaaaatttacaatgaaggttttcaatttttgattagatttgtaagtgttatacttgaaattcggctaccatctcagtgggggacacatgtcaagataaaaggaatatggattgatgcaattactttttatgaaataactcattaattacgtaagtgtcagagtatatttacaacctgccgactgtaaggtcttatgcgaggaaaaatatacaaattgttgcttagtatattaacgagaaaccatatgtcgttgaatgtgaatagcgaggcatcaagtacgttacatctaggaagacaaaagcgacacatattgactgcggaagcacttagtgtataatgtacaaaataaggataacagtcgggttggctcgaaacctaataagcgaggtgc

SEQ ID NO: 341133 - DNA, 1049 bp, Cannabis indica
tcaaggaaaaccttctagggcttccttgttgacaactgtccggagggggcctctttccagcggttaggggacccccattccctttttttgacttagggtatggtttggggcccgactgctggaattttcaatcttttttagagccaagatgtctgcatccagttccaaatcttcacagaaaggcgggaaacgtttggccaccttggaggaagtaatgaagggcctagtggcccaggaaggttataagccccgtgctaaggggtgggaagcggccgagcttcactctacccttacttgcccccaccagctggagcacattgtggtggtggccggcatcaagcctgcgacttccgggacttaccaccggccgcctcgggacgtggagacgcttaatcacaactacgggggcttcacaacttagagccaaatgcactttatggtcggggccatgcttccctttcaggattattttattaattttctagtatttgtcggccttgcgccataccaactcattcctcaagcttaccgcttgctttcaggcttatttagtttttactctgcccggggctggggctctcctaatctggcagagattctatatttttatgaacttgtttccgtccccaaaaagggagacaaatttaaggacggcttttacggttttcgggcccatcctttgaatgagggcccgatcccctttaaccaccagaaacatgtgaagaagtaccgtcaccgcttcttcttctcctccgggatttaggttgtggagcatccggagcttctcacggagttggttaggatccctccttatgcgcgaactgaacccactcaacttttccttcaacgggccaagaccttcgccacatatgacaagaaggcccttgacgtcggggagtttgtcacgacagagaactgccggaaggccaagcttgtaacgtccccgcttcaagcctccattgggcccttacacccacggactaatggctcttatacacaagtacgccactctggctgcttcctggactgatgactgaccctacagacca

SEQ ID NO: 341134 - DNA, 502 bp, Cannabis indica
agttgagataatactgcttgtagactaagttaattggtttcaattaattaattataattttaaatttagactatgtcttatttatgaattttcactaagcaaggacttaattgtgaaaaaaaaaattagaatttatttgttaattgaaagactttgtaaggtctaattaataaagaaggtagatgaaaattttatttgataattaattataattatcaagtaaatagttttgacatttataggattgaaaatgaaaaatatggtattattgaaagaaaatatgaattatgaaataaagtggaaaaattataactagtgagacccactatgtatggtcggccactagagttatttttacctattattatcttttttaatccataaaataaaatccgaaacccttgttgaaatactataaaataaataagatgctctctttctcatccaactctattaacctagttttcattctcttcaaacaactagtaaatgagagcctcct

SEQ ID NO: 341135 - DNA, 1173 bp, Cannabis indica
caataaaggatcaagagagtgttaatagacttagggagttcgataaatatcatataaaaggagactctacggaagatggggctacaaaaaagccaaatgaaggccttgtatggcgaatcattgtggattcactggagacagcattgccactcttggcataatcgagctctcattaacactgttatgcaagacttcttagttgtcgacctgccattagcttataccgtattgttgggttgaccagcactgatcggactaggggcagtcagtttgatcaagcacctatccttgaaattccaaacaccaaaaggcgtgggaatggtgcgtggcgacgagatgctagctcgcgattgctatccattgagctacaacataggaaagttggtcatcagttgatgacgatcttggcagaagaaaatgtaaagaaggacgaagatcttgacccccgagttcaagatgagagaaacctattgaaaccaattgaggaatcgaaagaggttattctcgacccaggaaatcccacaatgtgtgtatacattgggaagaacctggatgagaaactcaaatagtacctaataagttttttgaaggcgaaccaggatcaattcgccaagagccatggagatatgataggcatcgaccccaatattacgtgccatcatttaaatgttgatccaagctacccagggaagagacagaaaaggagacctttggattccaagagacaaggggcaccaaaacaagaagtggataagttgttagttaacaacttcatacgcgaggtgttttatccctcgtggatagctaatcctgttctcgtccggaagcctaacgaaacttggagaactataattgatttttctgatctaaataaggcgtgcccaaaagattgctttccactacctaggatcgaccaattagtgaatgtaactgctgggcacgaacttatgtcatttatgaatgcatattctagatataaacagataaaaatgtatgtcccatatcaaaaacatacaagctttgtaacaaacatggcactctattgttataagccatgccgattggactgaacaacggtcgagcaatgtatcagcgattggtaaaaaaaatgttcacaaaccaaatagggcagaacatggaactttacgtcagggatcataccttagacctcgc

SEQ ID NO: 341136 - DNA, 619 bp, Cannabis indica
gtttacaaggttcaatcacaagtgagaaacacttggatctaatcgtgggaggaaccgccttgaggctttgccttgatgttattagattcagctcagagaacaagtattacagatatgaacttcatggagtcatgctcctacaacaccctcatgtgttactcgagagccactgagtttcaagatctcaggctctattacaagaccaattactctctctgttttcactctcttaatgctaactgaaataacagaaaaatgacctttatatataggtcgaacaagagtacaagattgggcacaaaacataacagaaaactgttaacaaccaactgtaataactgcctgaatacttaaaccagtaaatttacagttgaaactgcctgaatacttacactagtaaatttttggtaagtggttggaaatatgtgctgaaaatcgctcccttgttcagaccgaatgtaagttgtcaataagatgtatattcattataaatacatcttatagcagctaggtttagtatctctttcattcactttcaaatcttaaggaaagagtgtctttgttatgtagagaagagttgttcgactcttactctgtttatttgttgtttgtattgtct

SEQ ID NO: 341137 - DNA, 769 bp, Cannabis indica
gtcctatgtcacgacaattgagaaacacaataaataccttaacataatattccggattaaaaccctaattctaaaccgattagacttagccttcaccatcaatataataattcaaataactcaaaattattcaaaggcaggtactaggttcaaccccgagctaaacacggatcagagaaaaacccgagaattgttcccctgctgtaaccggtcgaccggttctgatacagcagaaccaaccggtcgaccggttgctgccagaccagaacaattctggtttttctcctccagctcgaaccaaaaccaaatcatacctaatttgcacttccagaacagttcaacatactaaatacaatgcattcaacatatcatttaatcacaattcatcatgtaactcaaaatcaacatctcacttgtcaattttcattaaaaacatcactttccacacctatttgttgcacagcccttaatctccctcaatcttcattcacacaagttccaaatcaccctaagaacctaccctaacttcagtttataccccagctctgaattaaatgaaaaccctcaccaaaacctaatctaaactcatgaaaaccaaccaagaaaagagtagaaaccttacctccacttagctagctcctagggttaggattagctcaagaatttgaagaaaaagaagtgagtttttccctggttccagctgctacagtgatcggcagaagggagaaggagaaaagcttggagttttgtttttttttgaaaagaaaag

SEQ ID NO: 341138 - DNA, 413 bp, Cannabis indica
atatatgtacactttatatagaatagatataaagcacataaagcggtgacatggtacgattagtttccttttagcatttcttataattaaaatatcacatttttaatatttttttaattaagatatttaaaaaataataattaatttttttaaagcatattaattaataataacatatcaaactaataaattttctctaatgtcttaaaaatgttaaaaaatatttaaaatttgaaatgaaatttaagattaagatataaatttaaaaaatacaatagtaacaatatttgtaatattattatataatataaaattatatttttaaataactatttatgataatactaatgtgctgtttggtaacacttttgttttctaattttttaatcccaaaatgaaagtaaaatttttgt

SEQ ID NO: 341139 - DNA, 749 bp, Cannabis indica
agaaaatgctaggcaccgctagtacctaattacaatgactcatatctataatattaaatatataaaaaaatgaagaatatttaaaataacaactttactaaaatagctttggaaatagtagctacaagctagcatgcatgaatttcgcaatgccagcatcctccacacttgtaattttaaatttatttcggtcaaagccatgtgttatatacaaatggttgagtactataccacttcctttagtgctcatttgataagtagttatattgtattaaataataaagagtaatttgcggcaaaaatacctaagttttatgccgagtagcagattaatacctaagtcctatgtttggcggtataaataccttccgtcactactctggaacttccgtaggtacctctccattttttgcattgtaatgtgccaggtgtcgtgccatgtcattaaaatttatgccacatcactcacaccatacattaaataccctctttaaataaaaccctaagattaaatttgttacacaaataatggcaatttaaattattaaaaaaaagaacttttaattaaaactgatttataatctaaatgaggaaagaataaataaaataattaaaattaaattttacatttaaattaaaaacaaaacaaaatattgctgctcagtttctgaaaagagagcagttaccattttttgcaaaaaaatcccaaagtttgttgagagagtggagagaaagttagggttcgagtt

SEQ ID NO: 341140 - DNA, 628 bp, Cannabis indica
ggatgttaattcaacatacttgttagtaaatctagatcttggtaaaatattcccaacaactgacctcagagccatggtaatgatttactttcatgaaatatgaatttaaaacgataaatattgtttgtgtgttgatttcgatgtgttcatgttggtttatgtgttatttgatgaatgtatgtgatttacgaaatttttccataaaaataattttattttcgttgtgaaaatattttatttggattccttgtgaaaaattaagcaatttttgtttttatggaactcgattcctgtaaaaattgacaaagttataaaagtttgaattttctggttgaatgggtgtcgagatgctcaatcgcacgcacaccaggccttaggacaaggtgatgtgtgcacgcatccctcagacacacccctgtttgaagcctgtctgtcccatgctcagacaccaccccgcgtgcggatatgctgcatctgaccgagaaacatcggtcaaggaggctgcagctccttctcgtgcgcgtgcgtaggggttgcatgcagcctcctactgggcagccacaccaaaatacgttttttgtgggatttttccccaaatttcaaagttttgctattttcaaaccctaaa

SEQ ID NO: 341141 - DNA, 716 bp, Cannabis indica
aatgagagtttaaaagtagtgatgtggcatttcataattttttttatagtacttttattattttatgagagcttcaagtttttctaatgaaaaaaatctattgactttgtaaaaaattccacattgtttagaaagtattgttgttttctatatctaaactaaaaataagcttttctttgccactttcattagtccaatcattattatttgctatagtgtaaaaaatattatagcaaatagaggagtgctaccgtcaacctcctgttacaacctcttagtcaacctccacgcccgaaaatacatatcggaatattttttttcaaattttttttcacgcgggtgttcgttatgcttacaacatcatccctgtaaatctttaaaaaatttcgaatagtttacagtgccgaaaatacgtttgaagttttttgaatgcgcgtggtaaactggaatatcaagaactctgtttttagtactataaattattcggaatttttcaaaaattgacatggatgatattgtaactataacgaatactgctatgaaaaagaaattgaaaaaaatatttctgcatgtgatttcggacgtggaggttgactgagaggttgtaataggaggttgtaattagcattcctctagcaaataaatatcttcttagtatgttgttttttttttactaattaataaaattagtcttatccaattagctatatattttt

SEQ ID NO: 341142 - DNA, 513 bp, Cannabis indica
agttcagagatgaagaaaccacatactttgaatcaaaagcagagatgtcagggtacccgtcgctcgatatttgtgcccttcgactagtcatgtaaaaaagatccatttagttggagcgggttggagctccgagccgacggatcacctctaatccgaaacattcggatacttattggatcttggatcagatctgctccgccccgcctaattttttttggatcggatctgatccaacccaatttcaatttattttaaaaaaaacttaattcaagactcatatcccttgggacctggacccggacctagacccgagacccggacccaggacccaaaaacgagacccggaccgtgacctggacccaggacccgggaaccggacccggtcccgagacccgggacccaggaccgggaaaccggacccgaatccgagacccagacccgaacctggattgggactcggacccggatcgagaattggacccgagacccagacctgggacctagacccaggac

SEQ ID NO: 341143 - DNA, 709 bp, Cannabis indica
agatcctggtaaaataatatccaacagttttggctttgccatttgagcaagaaaagtttgtaatgtattgtgatgcttctagacagggtttgggttgtgtgttgatgcaagcaaataaagttatagcgtatgcttcgcggcaatgaaaagattatgagcagcgctatccaactcatgatctggaacttgcagcagtggtgtttgccttgaaaatttggcgacactacttatacggagagcgatgtgaaatctacaccgaccacaagagtctcaagtactttttcactcagaaagatctgaacatgagactaaggaggtggttggagttggtgaaagattatgattgtggaatcttgtatctccccgggaaggcgaatgttgtggcagatgccctgagtcagaaaggacctgatcaggctttcaatatggtagtgatttctcctaagttagccttggaaatgaccagaggaaatattgagttcgtgatcgggaaattgcataatctgacattgcagtcatacttgttggaatggattaaaatggcacaactagaagatcctgaactacttaaagttcaagaagatgtcttagcaggcaaagctagggacttttcaatttctaacagtgggatgttgttgtttaaggctcgggtgtgtgttcttaatagcattgagcttaagaaagaaatttttgatgaagctcatactac

SEQ ID NO: 341144 - DNA, 1163 bp, Cannabis indica
aatgtgggaacaaagagcacattattgagagtgatgtgcttgtttatcttaacagtaccaatactcttaactggaatttgtgccattaggtaaactcacatattgtggaaaagcatcagtaggaaatgaagaaaagcaagacttggtggaacacatatggtgtgtggctccactgtcaatgatccaagaaaaagtttaaaaaaaagatttgttaccatccatgttggatgttgcagtggcagtgtttggatcatcacgaggatgtgcttgactaaattgttggctgagaagtgaaatgagttgctggcattaggtagagagatttacatgggagtttacaacaacattgtctgtgttgatataatcatgagcttaataccataaacacaattattaactatgtgcctaatatttattcactaccataatgggatggttaataattaataaatgtattagaggcacatgagagcaccctaaaactataattggcccattaaattatagtccaccactaattatactcattaacccaataagcctaataaaaccccttagggttaggtgttggatatatataaagggttaatatgtgttagtatgatgatgagaaagtgtgtgtggtgataagaaaagggcttgcttttataagctcctcttctacttcctcttctaccatcttggagacacattcacattgaaggttttggtgtcatagctcaaatgaaaaatgccaacatgggaggtatgtgttttcataagtttgtgatgctctaaataaagtattaattttgcatttaatgattatgagcaataatgtttaatgtgtgtttggatagttcataatctatgtgattgattaacaattggtatcaagagctataatacttgattttagagctccaaaatatttgaactaacccatttatttattttttcaaatatgaatttttttttatattttctgataaaatgagtttaaatgttttagaatggggttatcttgttctttggatgattattgcatggtttattgtaagattgaaggtttttcattgagtttatcaatggtggaaacccattttcggatttgtatttatgggtagtgttttatattttttttttgtgaaaaatggatgaaatggatgatagaaattgataga

SEQ ID NO: 341145 - DNA, 687 bp, Cannabis indica
tatttcatatacaaattaaacttttaattaggatagcgacaactataaatgaaagcagtaactataagtagatacgattatgaaaataatttcaaatttagtgatgactacaaataagatacaataatgtcaacagctttgaatgtagtagtgattatacaattgagatttgatgatgacaatagttgtaaaatcatatgatgagtttcttttacaaaattataatatcttttctttatttagatttttattttgtatgatgattcttcaatctttaattttctattccaataacgtgtgaagatattaatttattagtcttcagtttataaaataaaaaatttaataaaatactaataatttttttttatcaaaaatataattttttttaaaatttagtataattttttgacttaattattttaaaataaaatacaaccgcacgcaaagcgcgatttatttcctagtttatataatatatgaaacacattttaaatggttattaatagttaataaataaatttaattataaatattaattttaaaaatattaaattattagattttaaatttaattcattaatgaataataaaagaaaaatttacatttatatgcttatttaattacttaattaaaaaaaaattaaaaaatatctcttttttacattatatcaaaaataagtttat

SEQ ID NO: 341146 - DNA, 604 bp, Cannabis indica
aagcacgttattccgtagaaattggtatttcaaaattgtattataaagccatataaaatagatacaattgaagttaataaccctaaactctaatcattgttaattttcatcctaaattagttgtttttattttcactagattataatattcgtcctttacttttttttacaaatagaatttggaatttaatttattagtacttaactacaattttgagggaatgatactctacttaatattatattacttgaaatcgattgcatacacttgcatagaaaaatccataaaaagtttgtagtgctgttgtcgttagttaatatcaatatagttgaattctattctaatttggtttcttttattttattttactaatgttttactgaatgtgtttgacttgcaaggtaaatccaaatgctatatcaagatcagtaccttgtgaattttctccaacaatacaatgagccattctattctgcttggggagatttaaagtactcggagagagatgttatcccaatttctcaagtggatgttttactctattcttttataacagacttgatgatgaaacaaaggttaagtagattatggagcagaggtaac

SEQ ID NO: 341147 - DNA, 611 bp, Cannabis indica
ttagttatattaaaaaataaaaatgttaaaaattgagtttaggatcctatttttatactattttggaaaatatagggtccattttgtcatttaacaaaacagagggtctaattgataacttttacaaagtagagggtccaaaatagtatttatcctataatttatagttaataagaaaatattttttaaaattttaaattaaatatgtggccctgacaataacacattaactacattgacatgttttagcagaacaaatttcaaggggtacgatacgatcattgtaatagttcaaggttataaaatttttaaatagcctaattttattaatattttttaaaaagaaataggtaaaaatacaattcgcttgaccttcctatttggcccctcctcgggtttttgtctggttccgccactgcccgaacgtgtttagtgtttgacttttacagtgtaaaatcaagtgaaatatactaaaactatttgttaggttagtaggacatgtttgtcgattttattagtacaatttaatttttggcacgtgaagaaattatatgtaacgccctaatgctaaggcgcgctacagtactttttcaattattgtgcaatctttg

SEQ ID NO: 341148 - DNA, 925 bp, Cannabis indica
tatcatgttctggccaccatctgttctatttggacctccacgaccaacgggtcgttgtgcagaaatttaattttgacaacatcttcgtcattgaatgttatggtgggctctcctgcctgtgggattttgggcttccactcttctacagccaaagttacttcttcttgctcgtgctgtactgttggggcatacctctcccgagctttgcatgaatctccagctatgtgcggtcctccaatgataacttgcagatgtccatctaccggtggtggtagtatgtcttggttgttattgcccctctgattctgatcggccttgacatacttctgtacgtgtgggttatttttcattatcagaaattcaatttcccactccagattgttacattcattggtgtcatggccgtagtctccatgaaattgataaaacgtagtcatgtctctcttgttgacatcttttttcatgggtgcgggctttttgtacggggtcagtgattgagtggccatataaacactttctatgtcctccgtcaggatggtaaatgtagtatacttggcaggattctctcgggaggcttgtttggtcttgccggtgaacttcccattttttccattcccttgtctgttattattgctggaccatttaccattcgagcttgaatggcttgggtaatgggggagctcgacggatgtcccagttgaaggagcttttgacttaccaggtttttgctcaccttctgttcgttgaatagcttcttcaagtttgataaagccttctgcacagtcaagaaaattactcatcgagtctactggtctattcttcgttatgtctttctagagctcaccaaggacttcaatgccccctactatcgcggacaactttccgtcctcgagtacccatgaaaccttagttgcctccgtcatga

SEQ ID NO: 341149 - DNA, 887 bp, Cannabis indica
gatatgagtggacatgtactcttaactagggattcaaaaataatgaagaataagaagaggatgaatttgaaattctatagaaggaggttctcaatttctagttgtttgaaaaagaatgaaaactaggttataagagttgttctgagaatgagggtcatcttattctttttttagtatttcaactagggtttacaatttaaattatatggaataaaaagataaaataaaagcaaaataacgggttaagtggccgaccatagttagtggacccgactagttacaattttaccattttattcaacaatttatcttttctttcactaatgtaatattttctaattttaatcctataaatagtaaaaatatttatttattaattataattaattatcaaataaaatttccatttaatttatttatttattataccttacaaaatctcttaattaacaaataaatcctaaaacctcttttttttcacaattaagctcttgcttagtgaaaattcataaacaagatatagtctaatttagaatttttattaattaattaaaactaattaactaagtctccaagccagtattatcttaactagtgcgaggaccatgggcctatataatcaagcttccaataagtggttctagaatttaccaagtaaaccctctaacttattaattcctcgtgattctactatagatttagaatttcactattaattatatagaatgctctatatgttcctagatatagatacgctattaattatcctttgttataatataaataatcaatggtcctctatagatgatctacatcgagtagtgttaacgcagatttttattaactaaaaataataagcctttacgtaataaatatatcatagaaat

SEQ ID NO: 341150 - DNA, 1316 bp, Cannabis indica
tttatttcattgtttcagaattcatattaggatgttaataaaacatacttggtagtaaatctagatcctggtaaaatatttccaacagaatggtcattgggtgattgtttgaaaccaatatcaaggagagtggagctgagtttggcaaaccattgcctggatgattgttttaaaccatataggcttttgtttagtttgcaaacagcatttggagggagatcaccatcatggacatagcctttgggaatggacataaacatcttcagtaagatcaccatgtaaaaaggcattattgatgtcaatttgatgtaattcccaattatttttggcagtgagagcaaagagaagttttatagtgttaaagtttgcaactggtgcaaaagtttctacataatcaatgccatgttgttggttgtatccttttgcaactgagcgtgctttatgtctttcaacctctcctttggagttatatttgattttgtacacccatttatttccaattacatggcatccagggggaagggatactattttccatgtattgtttttctttagagcaaaaaactcattgcccatagcttttagccattgagaatattgtttggcttggctataggaagtaggttcaagctcgatatatgcttgaagtatagcatttcgaaaatttttgtggagtctattataggataggtatttgtcaagggggtgtgcagtggagttttgacacacaaagtccttgagatggcctggtttatttatttttctgcctgttttggtttttgtggcagcaaggatttgaggggagcgttgttgtgcttgaggttctgcagattttggtcctggaagtgttgatgttgtagtttgctggtgtgaaataccaggttcaatgtctataggtactggtgttgcagcaggtgcagcaggacaaggcttggatttattttttgcagtgtgctgagagaaaaacaggttgagatcatgagtagtagatcctttgaggggaaaaacattctatagaaaatcacatctctagaatagaaaatggtgttggtggctatatcaagtagagtgtaggctttcattccattgggatagccaataaaaattgaagcatgtgctctcggagagaatttatgtctcttacttggtaaggaagatgcataagccaagcacccaaaggttcggagatggtcataagcaggaggtttgttgtatagcaattcatgaggtgttttgtgttgtaggtgaggtgtaggtgtcctgtttatcaagtattgtaacgccctgtccaacagggacgccacgtgtgtgcactt

SEQ ID NO: 341151 - DNA, 509 bp, Cannabis indica
tatattaatataaataaatttatggatcaagattacataggaaaactttataaaagtagagaatattgacaaaaataatacaatttataataaatactacaccatatagagataatttagtattgaaattcacgattatagtaacaaaaaacgactacttttagtgactaactttttactcataacataatttttttgtgattaaatatgacttttagtcacagcaaaatgttacttatgactaaaatataggatttagttacaagttgtcactaatttagttttagtcacaacaagtgtaacaacctaactagcataggcgtgttagcgtgattttaaacatactgtgtagctcgttgctagtcaacgaggttattgaaaatcgtgaataattaaaatttatgcttatttaattaaaaacttaaagcattacatatataaaattacgggatctcatttacaaaatactttttaaaagtttgctatacacataaacaaaagtttgtcgc

SEQ ID NO: 341152 - DNA, 1176 bp, Cannabis indica
gagcgagactcagacccagaccaaaaaactggggctggacccaggacctaagaacaagactcggacttgggatctgaaactcggacccacactaggagtggggacccaaacgcaaaacgtaggacctcaaactcaaaaccaggactcaagaccataactcgaaccgaaacacaaacttggactcggatcggggacctaggacctgggacatagactgggggacccaaaccctgaaattgggaccccaaactgggaccaaagcttgggcctcataacttggatcaggatcaaggacccgacccaggcccaaatcatgacctagtacccacctcgggacttgggatctgggactcaatgcttggacctgacccgtagtcagtgttttgatctgggaattagaacagaacccgaacccaaactctaactcaaaccaagacccggacaaatacccaaacccagacccacacttgggaaccaaaattgaaacttgaattggaaccggactgggatctttgaaaggaaccggggcttcgacctagatcagaaccgaaaaccttacccaacctcagactctaaccgagaccgaaatacagaccttagcctcccccgaacccaaatcaagacttgaacccagactcaaacccaaactcgacccgaactcgtaccctgtgacttgaaactggaaccgaaaccagaagcaggacccacacccagaccctgaccgaaattcggtacccgaaactagaaactgaaaaagaactgcaagacgaggacccggacccaaactcagacctagccttagacccaaaccgagactgaaatcgggcccaaacacattcgtgtacccaaaacgggaccgagacctagacccaaaccaacagaaggacctaaacctgggacccgatcccaaaccaagactcggacttagatagggatctggacacaaacctggactcaaacccaaacaagccctagaccgagattgaaactcgagaccttgattcagaccgagaccctgacctagaccaagacctagacccgcacccaggacccgaacttggacctaacctgaacccagacccagaccgagatctagaactagacccaaacccagacctagacttggcccaggattcataccccaacccagacccagaccgaaacccgaacctagac

SEQ ID NO: 341153 - DNA, 605 bp, Cannabis indica
agaaaagtgaaaatatttttcaaaatcatgttctataaaattgtttttacttttaaatttgttaattgagaattaaaatttgaaaaattttgaaaacaaaaaaattctctttcaaaattttcttaaatagattttctttttgatccatattttggactccgacctcaacctagaccttagaactcgaaccccaaccaggaccacgaccttgatcctaactaggactcgcacccaaaccccgagcccccgacctagacctggacccaaaccccagactcggactcccaaccccgatctcggacctgacctagacatggacctcaaacctagacttagactcagacactgaccacgaacccctattgcggaccctacttaaataaaatcaacaaataaaaattaaatttacagaacatacttttattttctgtttttaaattaaaaaataaaagtggttatggaacatattttttttttaaaactaattttttttttaaaaaaaatttaaattttatttttagttcattaaaaatttaaaaacctaacctaagcttaaaataattttactaaatacactcataatattttttaagttaattttttac

SEQ ID NO: 341154 - DNA, 857 bp, Cannabis indica
catgcatatgatttgttcactaataaaaatgcaatcaagaaatcctaataatttatcactcatgcatcctttttatcatctatatataaaagagaaaaagtaacatacatatcacattgatcaaaagaaaaatgtaacagaagtctttctttaaaaaaagaattctcgtgtaagacacctcatttgaagatcttagtaaatgaagcttaagggtcaatattaataactttccttattagggctcaccaaattatttaaaaaaatatataaaaataatataaaatgaattaattaattattggtataaaataataaagtgacacataatgaaaaaaaaatgtctgtatgtacaaatattttttgtgactctacctaaacattatccataattatatatgtaaaaaaataaataagaaaataatattaaatagacatcaaataaaataatgacacatatataaaaaaagactctatataaaatggtttttaaaactgaagaattatcctttcttttatactttatatattcaagttgaaaaacaggttaaattttttttttcttaactacaaatgatttttattaatatgtttttttttttaaggtgcatattcatttctcacactacattttattaaattgtagatttggtattgatatttgtaatttgaaattgtacttgttttcatataccctaaccctaccttcaaatttgatcgaaactaaaacattaataataggctaattagtaattttttcttctgaattttgacatgtaccaaattgtgcccctaaacttttttggccgttaaaaattccactcgaactattgagattgttaaatttaaggacttttgtc

SEQ ID NO: 341155 - DNA, 969 bp, Cannabis indica
gggaatgggggtcccctaaccgctggaaagaggccccctccggacggttgtcaacaagaaagccttagagggttttcatggacaaaagtcgggtgcaagaatctcacagatagtgacattacacgtaagcaaagaaaagaaaagaaaaaagaaagggtaaaaattgagaaagacaaagtcttctctatacccttgaaggtcatcacgtaaagaacagatgggtctttggaagaatataatgtgcaaaataagataaatctaaacgtgtcacccagaaactcaaggcgaaaaatccccagaaacttcgaacattaaacccagaaaagcagatgaacagtaaagcatgccatgaacacaaacaataaagtgagggatgcgaaaaacttacataaagtgttagaactgggagttgttgttgatcgacgatgaaatgttgactgacagcaacgaatgaaggttggtaagaaacctatagaatttgaaggttttctggtttgagggttttctttctctctggaaaattcgaagaaatttggtgaaaggctgaaagtaaccaaacgaaggaagtatggtggcttttataggcaaaggtgcatgtggaacaagcgcaatcacctaccaatcgaatggctggagaggcgcacgattcgaattcccaagatccaacggctagattggttcgtcatcaaggcggtggaaacgcttgagtgtccgtctaacacccattaatgcgccgtatcaattaatggacgtgaaatgaatcgacgcctgcaaaaagtgaatcgctgcagtaatggctatcattaattacgccttcacgtgcctaaagcacgtgccaggaaaccgaggagccaaccggaggcatctgaacaagccttgttcattttttcaattaacaaggcttgggggtaaatgttgctcctgattttgcccaatatacgtgcaacaaccaaacagggacacgtgggc

SEQ ID NO: 341156 - DNA, 482 bp, Cannabis indica
acatattttgattaaacatggatgtaatataatgaacaaattaacaaattttgagaacatcttcttggtttttttgttccaactaatatgttactgtagtaatagaaattgataccaataaagttctcggatatagtatcacagtaccttattcgagtgggagaattttaaaattctaagcccatcttcatttggatgacatttgtgataggaattttagaattcaactgagaaagtaaatctaacaattcatatggatagaaataacttactagaattctgaggataagataggaaaatttttgcatggtccatttgaatgacttaggaaaaattccttatcctcatgaaatgttttatgatatctctagtgattacttatcttaagcaagtattttacattaatgttaatactagattgctatgttgatgacttagtttagaaggaacttacagtttcagactaagataatattgttgga

SEQ ID NO: 341157 - DNA, 577 bp, Cannabis indica
aattcgcctggagccatggagatatgatagggatcaaccctaacattatatgccatcatttaaatataaatccaaactacccagcgaagcgacataaatggagaccattggattccgagaggcaaggggcactaaaataggaagtggacaagttgttagtcaatgactttatacgcgaggtgttttatcccttgtggataaccaatcctgttctcgtcccaaagcctaacggaacttggacaacttgtattgatttttctgatctgaataaggcgtgcccaaaatattgttttccactacctcggatcgaccagttaatggatgcaactgctggacacaagcttatggcatttatggatgcatattctggatataaccagataaaaaatgcatgtcccagatcaatagcatacgagcttcgtaaccaacatgggactctatgttggaaattatttttaccaggatcttagatctactcacaagtatgtttattacatcctaaatatgaactttctaaaacgaatgaattaaacactatataaagtttaagtaaaaccgttacattgggtgcagcgga

SEQ ID NO: 341158 - DNA, 630 bp, Cannabis indica
ccaaacttctgcaaatttttgggtcggatcgcagattacttcaagacccactacaaagatgatcaacaaagaactagaaagcaatgcaaagaccattggaacaagatgaatcaaaaggtgacacgtttcaatgggtgttacaagcgagtacaacaagcacatcacagtggttggtctgatgaccaaattattgagaatgcacatgagatatacaagtctgaaaataataattcaaattttcaacttgtagactattggagattgttaaaagatgagccgaaatggaatgcaatgtaccaatcagaaggtgttaagagagcaaaggtgtcaagatcagggacatatacttcatcatccaatgcagacatcagtgagcatgaagttcgtgaagagcgccctattggccaaaaggcggcaaagagaaagggaaagagaaagcaagatgagaaacttgctacattttatgatattaatcaacggaaagcaaatgcgttggagaattaggtggcggtacaagaaaaaaaaaagtaaatggcaaaatacatggattatctattcttggacacatcaaatatgactcttgagcaaaaaaaagatcatgaaaatttggtagctcatattaagactaat

SEQ ID NO: 341159 - DNA, 984 bp, Cannabis indica
acctatccgcggtttcaggagtaattactcgtaacggtaatgaccgtttccaacccttagtcataactgaggcttaataaataattaatctggatctcaatcataatcgagactatacaatacaattatcaatcacttaaccttaagtgatgcataacacttttcttatctcaatccagaaattaggtgtgcgggccaacctgagtggaattacgctcgacaatcccgggtcctatgccacaacaacaaaattcgataaacaacttatccaaactcaagaatcaaaccctaatctccataatcagaaatctaactcccactagatttggaaaatccaaatatcggtaaattaccctaatctaggttcagaaaaaaaaaaacccgagtgaaaaaccagcttcgaggcttaaaccaaaattttcccccgctagcaaaatcggttgaccgattttacagcacctgtaaaatcgtttaaccgatttcttagctaacagaaacgggaaaaatttttctttgccgagaaaccacacgaatctcctccaaacctattcaaacttcccagaacaatataatagtacaaatactatgaaactcaagcaccaatttacaataattcatccatttatttaaaattgcatactcaagtgaagattaaacctcatctagctcaaatcaagctaaacagtccctatctctaacatattcaaactcaaacaaactcaaacaaagtcaaaaacaaccctcaaatcttactctaacctcaatctagcattacaaccccaagatttctaaaatcctaatctatactaacctaaaactcaagaaatcaataaataattacaagggaaacttacccgaatgcttgagcagccttaaattcttgcaagaccagctgaaggaagacaattgaaggagaaaactccttggggcttctagtccttagggttcgaagggggaggggaaataagggtaggtttttttttt

SEQ ID NO: 341160 - DNA, 635 bp, Cannabis indica
aaaaaaaattaacacgtcgaaaataatgttcaaatagtttgttgtacgcgtgacctttttttttatactcgtgtgaaatagacggtttaaacattgatttctatattgtaaattattctgaatttttcaaaattttgcgggatgtctcaaataactataacttatacaactatgaaaaaatttagattaaaatttttttatagataccgaaacagttaagggttgcatcagtacacccttttaatggggtgtattgtagaaccaccctatatcttttacggtgataatagcagttttttaaagaaaaaataatgacactaactatggtcatttttagcatttattttataaaaattaaaatatttattattcatattatagttaatagatatttaaaatttcaatcttttgatatttaattaatatatagcatgatatttattttaaattacttaatcaaaagtatattttgaggtaaataccattttggaccctatttaatttgtaaaagttaccaattagactctattttgttaaatgataaaatggaccatgtattttttaaaatggtacaaataggaccctgaactgattttttgtcaaaataaaatttaataataatctgatctaaatgt

SEQ ID NO: 341161 - DNA, 538 bp, Cannabis indica
atattaagataacatccttattattatggcacgatagatcaggtcatatttctaaagaaagaattgatcgattccttctagctaaaattcttcctcctgttgatgtttctggttggaatacaagtgctgattgtacttgtgaaaaattgactaaaataagaaagcagagtgctatctgtagtcaatctttattagagattatccacactgacattagtggatctttttccactatgttaagtatgtcataactttaataaatgatatttctctatatggcttcacttgattcaagaaaaatcaaacgctcctgataaagtcaaaatcttttgaaatgttcttgagaaacaattagaaagagtcatcaaagttgttctttcagatcgtgcatataatattatggtcgttattcagaatatggactacgcatgaggccttttgctgaatattttctcgaaaatagtatagtttctcaatacactatgttagcttcacctgagcaaaatagcgttgctgaaaggagaaatcgcactctcat

SEQ ID NO: 341162 - DNA, 604 bp, Cannabis indica
aaaggaaaagaaagaaaaagaaatattttttttcagattttttattttaattttttaaaagaaaaaaaattgttacaattttttacttttaaattaattttttaaaataattttttacatggaccaataaaattataccatgtgtatactatgtccacgtagatgtacatgtagatagtgacacttaacaactaaaatagatgaaaatattaaattgataacaaaacacaagtattgagggttttatcgccaaaatttgagttttagggattaaatgcaagtaaaataaaagtattggggaatttgccgcaattaactctttaaaaaataaacaggtgatcctaaataattacaacgtacacgatcataaatacaaaatggactcaatactctcctaaataccgaaacagataaaaattgtgttaaaatacctttgcttcggtagtttttatgtgagttgctatatgaatttcagttacgatttaagttgctccattagttattacgtgcaggggcgaagctatttcggctccaaaggggaccatgaccccgcctaaaattttggagaaaaaaaatttataaagcaatttaatgttaaaaattt

SEQ ID NO: 341163 - DNA, 906 bp, Cannabis indica
aactagcaaattcaaaaaatagttcaaacatagaagagaaaagtcaagcattgggagcagcaggagcagatccattcgcggctttgctgacggcttcattctcgacttcttcagcatttgcaacctcagcctcctcgagaagattccctccaccgccttgagtttgtgtgggcgacatggcgcgaaaagcctcagccatttcagcggcttctgctccgaggattgagaagtcaaaatctggaattttggaaagagtggtgtaaatatagtcagaaactgcctggtcatactatttcttcccattctccttctcgacctctaagtcgcgagacatctcctcgatcttcatctgagagttcttggcctcgagctcgacctgctccttagacttgcgaaggtcttcaagctccctgtccttatcagcagcgtcttgttttagtttctttatgctctcctagagttgagcattttgcctcttcagcagttcagcttccttagaaccagcggcaacggctttcatgaacagagtcatcgactgcgaagccaactccacagagcgcggaacaagttcttcagtagggatcctctctgccttggatatgaactcctcgcccacgaacttctcctgcatagccagaaaattgcaggctcagatagttggctcgatcatgactttcttccctttgtcttgcgcgatcttagccagtttcttggaggaatctgcgggaagaatagttataacgtcgctcttcctcttctgggcaatgacgggcgatgtcgtcgctgttccactttttggcttgcggttgaggacgggcgcggacttcaagaaagtcatctctgcgaggacaaataaaagataagtatgaataaatttcaaggcactagtttataacgtgggatatg

SEQ ID NO: 341164 - DNA, 666 bp, Cannabis indica
tgtgcaggccggtctgaagttggcttacacttattcccaggctaagtcttctgcttctaggaacacagctctgtccgataccatgagggcggaggcggaactgcccaagaaggatgctgaggaagccagggcagaagtcggagctgttcggttggatttgggtgaagccaacaagaagctgtttgctgctcaaaagaagatcactgagcagactaaggatctcgaggttgatggccgttttgaggacaccatcgagaccttatctgttgaggtaaacagtcttcaggaagagaggacttcccttcgggaagttcttcatcggatgaaggaggagaaagaagccaaggaggaggagcttttggttgaggtggccaggttgaaggagaaggtcaatgccttggagacagtcggtcttgagctcttctttgatttttggaaggctaatcctcaggccaattttgactacttgggtgatgctaaggacatgtacattcgattctgcacgtcccaagtggcctatggaaaaactgaggcgactacttcaaccttcggtcagactgctgatgtacctcctgttcaaacaacagatcctcctgctctgattggcccagaagaacagaaccaagagcctgggactccagcagcttaaacacttctctttttatc

SEQ ID NO: 341165 - DNA, 755 bp, Cannabis indica
gcataaataaataaagttaaaggattatgagtttttctgtttttttacatttatataggtatttttaatgccatatttttataaaaaaagatggaaatcccatatttgtaaagaataataagttttgtcagaaaaattgctggaaaaattactgtcgccggaaaagtcatcgtcgtcgaaaaagtcaccgtcgctggaaaaagttactgaaaaagtcaccagaagtagatgtttcaaatataacaaaaatagaaccgattataattgaaatataatcggttctgtaacacaaagaataaaaacaaataaattaaaataactaaaactaattataactaaattagaaccagtttaactaaaataaaaccggttatataacataatgaagtacaaacaagtaacacacaataattcaaaccgattacaattaaaaataaaggagaaatcaattcctaaaacactgaaacataaattaaaaacaaaactagttctacaataaaaaacttcataataatacctcataaaaccgattataatttttttaaaaaaaatggagatcaatttcaaaaaatattgaggcataaatatgaaaagaaccagttccataacaaaataaataaacacaaataataacacacaataactcaaatataatataaagaaactatttatatttatcaactagttaaaaatttaagacaaaaaaactgattccgtaaagcaactaagataaaaactcacacacaaaaaccagt

SEQ ID NO: 341166 - DNA, 1017 bp, Cannabis indica
aaaagattaattttcacacaatcaaattctcaataattttgataccgagaatatcaaaattaaacactaacttagacactaaacatgtctaaattacacacttataactttagacacaaattacatgtcagagttacactttatttaaggcaccaagcatgtcttatatatctacacatattaagatttagacaccaaacatgtctaaacttctcatattggagtatgcaaacatttcattgacaagataatatgtgtatcttgatttaaaaatatataagaccactttatttctataactattttaaatttaatttctttcttgaattttttaccactgaatatgtcaaaattttacatatgcacatagcaaaatattaatttagaatattaaattcaaaattacatatatataatcaataatttctcaacaaatttaattaaagtcaaatctcacccccacattttacaattaagtgaaaaataccatatcactttagaataaaatctctttattttgttttgttctctacacattatctttcaagataatgtgtactaaaaattatcatgaacctttagagatcacatgataatctcaaatactatttagaaattaatagaattatgttatacccattattaacaaaattatacttaaaatttgttaatagataatacaaaattctcataataataaaattgcttgttcaattttatagttatctcctcattaagattagcccaaagttaataaaattacttcttgttaacgtacgtagattttcgttaaccaaatttgagcctaaatagtgataaatttacacagaataataaaaacagtaaaaaaaaaagtaataaacacaaaggtttttacgtggttttacagttaaaattttgcatagtccacgagtcaatcttattagatttctgatagtgtttcagggcttatgatttcttcctcccttttttcagtctaacttgcctctattaataattacatagtcaggcagttaa

SEQ ID NO: 341167 - DNA, 757 bp, Cannabis indica
ttgggtccgagtctaggtcccagtacaagttcaggtgttacttttggtctgggtccagaatgagtccaagtccctattgggtccaggtcggggtcccaaactagggcccagacaaggcctaggtcacgaaccaggttttggtctgggttttggtacgggtttaggtcttgagtttgggtctaggttttggtctggatctgggtcttggtcctgggttccaatctcggtttgggtatgggtccgggcccgtgtctaggtttcggtttagggtttagggtttaatatttagggcttagggcttagcgtttagggttaagtgtaaagagtttagaatttagggtttaaggtttaggatttagagtttaatggtctgcttccagacccggttccaatttcaggtcacatggtacaatttaaggttcgggtgtgggtctaggtccgagtccttgtttaggtctaggtccgtgttttggttcaggtttgaatcttagtcctaaatccaaacacaaaccacatgtcgagtctagtttcgagttttggtacgggtttgagttctggtctgggtctaggttcgagcctaggtctaattactagatttagacaccgaatatgggtcgagtccaagcctcgggtcttgggtccactaccgggtctaaatccagatcctggtctagttctagctcatgtcttaggtcctggtctaggtcttatgtccaagtttgggtctaagtttgggtcttgggcctaagtcatgggt

SEQ ID NO: 341168 - DNA, 507 bp, Cannabis indica
gtttaaaccacatctgttatataatagtaaactatctcagattccttttatttacagcaagagtatatggagctcgatcaatgttccaaagcatcggttcatcttgtggcaagctgtcaatgttcaactgttaacaagagataaattgctttagtttcgagtcaatttggacagcaatgtgtgtccggtctgtgctgaagctgctgagtcaaaccaacaccttttctttgattgtagtctatctcaaagagtgattgatcaggtgagtaattggctgggggcaggggcttggccgaaagactttcaagcttggaaaatctggctggtgcagattagtaaaaacaaattgtgcaaaatttatacctctattttggcagccatgatttatagattgcggattaacatgaatgattgtgttttcaatgataactcaagcacaactataagaattgtacaggatatacaaaaagttatgttttatagattaacaatagcaaaaagagggag

SEQ ID NO: 341169 - DNA, 919 bp, Cannabis indica
gtcaaggtctgagtctccaatcccgagtcaggtcctgggtccgggtctttgtccaagtccatgtttgggtttgggctcgtgtcccgagtcccgattcgagtttttattcgggtctgcatcccggtaggggcctagttctgggttttattctgattctagttcctagactcaaacccagtgttggactcggacccaagtctggggtacgggtgtgggtttttgtcagggtccgagatccaaacactgactacgggtcagttccaagcaatgagtcaggggtcaaggtcctagtctagttctactttgggtccccggtcctggtctgggtcctaggttagggtccgcgtttgaggtcgggtctcgttcctaatttttatggccatgtcccgggtgtaggtccctcatccaagtccgagtcctaggtcccagtctaagtgcaggacccggtcgtgggtcaagtcctagtccgagtttgggttttggttccgatctcggtttggatgcaaatttgggttcgagtctaggtccaggctcgggtccgtgtcccgagtaccgatctgggtctaggttctagggcccaagtctaggtccccaatctaggtgcaggtcctaggtccagatctgggtcaattcaggtttgtgtccttgtcccagtttatattttgattcagtttttgggttcgggtttgggtctgggtctgggtcggggtctgaatccttgtccgagtctgagtctgggtttgggtccagttcgagatcctggtctgggtttgggttcgggttgggtccgatttcaggtcttgggtgcgggtctaggtttgggtctgggtcagggtctcggtctgaatctaggtctcagtttcaatctcggtctaggtgtagtttgggtttgctccaagttcgtatccgaatccctatc

SEQ ID NO: 341170 - DNA, 544 bp, Cannabis indica
gtttgggtccaggtctcggtcagggtcttggtatacgaacgtgtttgggcctgagtttttgtttcaatttgggtctggggctaggtctgagtttggttctaggtttgggtccgggtcctagtctggcagttcttgttcagtttccagttttgggtcccgaatttgggtcaaggtctcggtttgggtactggtctgggttcggatcctggtttgagtcccagatttggatccctttcacgtgtctcagtctagtgttaacgtctcgtgtcccaggtttgagttgggttcgagaccgagactagggtgcggttttgggtcccagccccagttctgtgtctcgagtctggttccatttttgggtctgagttcggatctaggtttaggtctcgagtctaggtctgggttgggatctgggtctgggtcctagttcgggtctaggtcagggtttgagtccgagtcctagtcaggttattgttctaggtctaggtcgaggtgtggttacgcttccaggtccaggtccaagtcctggttcggtcctgtgcct

SEQ ID NO: 341171 - DNA, 673 bp, Cannabis indica
ccttcacagacttctctttgagttcttgagaagcttctccagcttctttctgtccagccatgtccgacgatcaaggaacaggacgtgacaacgaagccactacccaaatcgacaatggtgacaatcagattcaaacgccaggtacgggactgaatactcaaataaacagacctagaaatccttatgaagatccatccgatccctattttctgcatcatggagacaaccctggaaatgtgttggtatcccaattgctcactggacaggacaattacattgcttggtgtcgagcaatggaattggccatttcagtcaagaacaaattggggttcttgaatggttccatacccaaacctcctataaccgatcaaactctatacaatgcttggattcggaacaacaatattgtaatttcttggataatcaactcggtttctaaggagatttcctctagtattctttacgacgagtcagctgctgcaatatggaatgatctaagagttaggtttcagcagaggaatggtgctcatatctacaatctaaggaagattttgatgaatctgaagcaagaaacccagtccgtcagtatgtatttcaccaagcttaaaacagtgtgggagcaattgtccaacttcagacctaattgcacttgtaatggctgtacatgtggagg

SEQ ID NO: 341172 - DNA, 501 bp, Cannabis indica
cttccaacaccatatttataggcaaaattgagagattaaattaatcaaaataaaataaattgattaatttaattattgttgagaagaaaaggaataaatagagtatgtgtaagagtgttggaaaaaataaatgtttgtttggatagaaaaatagtgaaaaggatagggtaaaaataaattaggaatatttatttaggtgaaataaattggaaagataaaacggatatttaagtgtaaagtgtgggagacaatgtaattttagactttgtgtgtgtaatttgggctcaagaaaatgcatttgctgacttttcaatttcttcttcagcagggacacatggcgtgcgcgggttggaggactggagctgacggctatgatgtggcgtgcgctggttggtggggcgctaacgagctggggacatggcgcgcgctggtaggcaggagctgcttcagctgggtcccacgcagaaggaaggctggcaggcgggtctggcgcaccacttg

SEQ ID NO: 341173 - DNA, 1071 bp, Cannabis indica
gataaaggtgtagaaactttgttaaagcttttggtgattcacatatccactttgggtgtttgatcttctattcttatccactttgttacattctctagttttatattgttctcttcttctcctataaatactcttatatatatgtactatcatctattttgtatattctatatcatatatatacactattttatatatatatgtttttatatagtttacttttatttgtatctttaagatttgagttgtaactctatttctttatttgtattttatgctttgggattgttaatattttgcttagagttgtaattatcttggtcttttattcatccattgtaatctctattttattatttacaattaagaatattatttttttgttttcaatagaaggagaaacaatcaagatgatgaaccaatagttaatgagatttgaccgctttgatggtactaatttcactagattgtaagacaaggtgaggttcctcctaaccacactcaagattgcctatattctttactccaccttagagctcttacccgcacctaccgacaaagatatcgatgaggtcaaggcacaaaggaagaagagaaaacataaaaatcttctatgtagaggacacattctcaactcactctcagataggctttatgacctacactgacactaaagatgccaaagagattggggatcacctttaaaagaaattaaaggctgaggaggaaggtaccaagaaattttttaatttctcaatattttgatttaaaatttcttggtggtaaatctcttttacctcaaattcatgagttttaagtaatttttaacaaattaaaagtgctcaaaattgaacttctcaaggcattccaagttggtgcaatattgacaacattgccaccatcttgaaagaattagcagaagagttaatccttcataaaaataaggactaatctttgcaaaaaatcaaaaaacatattcaaatcgaggagaaattaatatgtagggataagcttgtggaggggtctaataaagaaaattccaaagtaaatgttgttgaaaattattttacc

SEQ ID NO: 341174 - DNA, 1098 bp, Cannabis indica
cctaagaggggcatatgaactttcaaattcaaaaggccgacgcatttatccgtgtgttaatggggaagttcatcaaaaaagttctacactttaaaccaaaaggtatttacccatggtgtagacagcgcactttaaaaaaaaaagggcgagtgtgcaatgaactacgtaaggcttgatccccactccgggtacgtaggcaatctagtttataactaggccaaaaaaaaaaaaaaaattgtaaagaactacgaacggcttgatcccttaaaagggtacgtaggcaatctgaacaaaaattggatgcagccacaaaataaaaaaataaatattctttattcctcctaacaaaggagtcaaaattctaaaaggtctaaatgacaaaatactattagtcctcaaggctaataaacaaaaaaaactaacaaaaactaaaactaaaaagttttagaagcaaaatcgtataatctttagtccatctggagaaacaaagttaaagcgccgagtcttctctggatttcttcttcttgaatcttgagtgttgctttcgctctctcagcttcatggaatttttctacattagcttggtcctttgaccgacctatctcctcagcgagatgtcgttgctccttcaaggaatcattgagactagaaagatctacctcaaatgatgcttttttggcttcgaactcagctcgtcgttgttgtatggctagttctgctgcaataatctctgcttcctttgctttaaaatcttcaaaatcctttgtcttgttagtaacagatatggacaaatgatctatagctgccaaattatccttatcacgacgaagaagatccatgataagagattcatcaagactaagggcattctcaacaacttgagcagaagcgagagacttttcttgagttttgagcaaatcattaacattgtcagtgaaccatgcaacctctgctaagccacatttataatgcccgcaaagggtactcaacacgtcaagttgcacacccacgtccgcacgatgttttgagatgtctgttgttgtcaaaggagaaaaaaaaaaaaggaagaatgtctttcatgcattcaatcacaaacct

SEQ ID NO: 341175 - DNA, 918 bp, Cannabis indica
acacttggattagcgagacatgccgagatctacatgtaagtttcaaattttcgttttataatatttttaaaatgaatgaatgaaggtaacattatgtttctaacattttattttatcaggagcaaatgaatgaagaggttgtctgcatgacgggaacagaaaatgattccagcgatggatcttctaccaaatacaaacaatttcatgctattaataaagttcttgggaatcggtcaaactatcaaagagaagtgggttataaattgaaagacaaatcggtaacaagttctcgtactcaaagtcaagctcaatcacaaggcccttctccatccattagtccagaagatataggaatctttgctaagtttctgttaaaaatgcgtgatatgattgatcaaatctggtacctctagtgacccttctctacatgacccacagtttgaaaacgttttacaaaaatttttaccatcacagcagcaaggtagtgcgtctacttctaccccacgtccaatgtcaatgccacaacaacaagtttttcaacaactacaaaatatgtctcctaacatgtctggtaactcccctcagatgccccagttctttcaataacatcaataaaattctcccaacatgtctgttggctcttcacagtcgcttcaattacattacatgttcgggcattcctcacaacctcctcttatatattttccggatgccacaggagaatctcagacacaataacctatggctggccattttagaggttcatcgcaacaaccataataccctatgtatggtcaatttgggtcatcacaacaataacccgtgtatggtcaatttgggtcattgttgcagcaacaacctatgtatggtcaaataggaggatctccacaacaacctatgtatggttagattttcagt

SEQ ID NO: 341176 - DNA, 838 bp, Cannabis indica
ccaaaccgtaaatttaaaaaaaatgttaagaaatagtatatgggtaattaaaatagtataattctacaatttaattatcattaaacaaaatacaacctatgctaagctcagtttgtaacctagttataaataaaaataataaaattattttggttaatataaattttattctattatattctcctatcaaaccaaatacaataataattctgattagaatatacattccaagtacaaactaaacattataattaggggcggagctacatacacccctatagggttgtgcccctcaatttttaaaaaatttgcactactaaacatataaatataatcatatataaaaagatattaatacataatttttcatgtatgaaagaactaaaaaattagtatttacatatttaaatattatttttattaagaaaatatatacagttttattttatactaagatgagagttacgtagcaagccacgtaaatattagttttatataagttttagtggtttttgtttaacaattcagtatctaattgtgaattattttataaacgatatgttttatataactaatagtttcagggctcgtttggtacgccgtattgtattgtattgtaatgtattgggttgtattgtattggattggattgtataattttaatacaatactatgtttggcattgaattgtattagtgttgtgttaaattatacaatgtttggctcacattgtattgtattgtattaattaaaaattttgcaaaaattcaaaaaatgtaataaaaactgaaaaaaaaaaattaacaactaaaaaaaaattaaagacactaattttttt

SEQ ID NO: 341177 - DNA, 555 bp, Cannabis indica
cttgaaacattttcttaatttttttttcttccaaaaatatctcattgatcgaatcctacccataaaattttaagacatattcttctaaacacaaagaaaacttctagttacactgaagatgtaacgcaacataaaatatgtaaaactaacatgaacatattgacaaaaacttacagtacagtgagtcgagctcgtctcgtggcaatgaactttacatgttagggtcaaccacatcctttaggaccgtattgctcataatctttacataaaggggtggtggtgcagttggctagcgcgtccgtagatctcatacctgtgttgagttctcctgaggtcgggagctcgagcctctctcaccccaattataaaaattgtgacagtcagtagtcccgtgattcgtaaggggaaataccgggtaagctgtgcagtcccacatcgcctggggaaggtcaagtgggatgattctgagactgtgtaggtatgggactatacagttgaagatagcttaaatggatctattggtactacctatatcaacaaggtgcatcttgtttt

SEQ ID NO: 341178 - DNA, 1978 bp, Cannabis indica
caaaaaaccttagagagaaaaagcaatatattgattgtaaaaactaattctgtatccagaaatatctgaataagatagactcgtagactatgtagagttaactgcaaaaccacgtaaaaacctcgtgttatttttatttcaattattcttctaaaatatctcatagtttctatgtctaatctattacgaaaataggctcataatcgttaataaaaatctgcgttaacaatttggcgctttcattgagagcctacgtgataaaagcttagaaaaatccctcctaaccaaagaagaaagaattttttcttcatggctaataatgaggaaaacaaaaacaatcgtcttgaagagaccaatcgtcgtcctggaaaagagcctatgggctcacggaggccacccaattaacgaacaacgcgttcaacaccatcaacatgttcaagaagaagccaaagtgataatgatcaaaacccaaaaattgggaatgagggaatcaatactgaagttggtggttatataccaaagagtgaggatgcctatgatcccaccaggtacgtgctattggctgaattggaaaatcgccaactctaacaacgactgaccgaggctaaccatcaaaacacttagttggagagggaggcagtcgtagttagggcgactcaggaaaaaaacacaatgaaccaacctgatcctggagtgagaaggccacgaggcagacatcgaggctcaagaactaagaggctggagatggctcaggaaaacccccagaacactcaagaggaacaatctgagctctatgtgattatttgtattttgaatgccaattttatattatgtgaaagtagatttagggattaactctatacttatgaatcccataatttgtgactaggataaccggcacttggttaggagcacccaggcatttggaatctccacgtgtgcgggacatcaggtaagacagtagttagcatgtagagttatgcgtggtggtgcttatattgaaaatgatatatgtgagtaattaggaaccagaattagggttattaccctaacatgagcggtttaatgacctagggttattactatagtgattattaatgtgtaaatgctatgccatgttaaatatgtgtatattgagatttagggttatgtgttcaaggcaatatcagtgaaccattctaaggccttattgagcgtaacacgtaggtctataacacataggcataaataggcgtgtgagcgtaacatgtaggtctgtgtcatacagacaaaagtgaaatggcattaatgtttatattaggtgttaattatgattatttatattttataatgtcttgctgggcttggctcatgggtgctctattgtgtaggaaagggtaaatttgtctctgattagccatgaaggcaagatctgggcgatgtatgtacatgctcgggcaacactagaccaagcgggttggggtctacaagtgatgaacttttgtaactttgattttgccgcttaggtcggctagtgaaaaaacttgtaatattttgtaaaatatttttgggatcctgaaacatgtaatttttgattgtaaagttaaagttattacaagttttattttcattatgttttcaattaaagtttaaatttcacgcgcttttctttctagtaatcctgatttaggggataagggtttcttaattggttgtcgtgacgtgcctaattgttagggcgttacactagggattcacaacctaagggaatgaaaacaatgatttaccggagtcttctcgtagaaacgggaacagaaggtaacccaggattaggaaacacgaactccctcgtggtaacgagagaaatcctacgactcaacctaggaaaattgggttaccaccaagacactgtcaacgtccttctcgcactaatagggaggaggcatatacacaccccagcaggggacatgttgttgcgaattattttaccaggatctta

SEQ ID NO: 341179 - DNA, 565 bp, Cannabis indica
atgcaatttgaattagggatttaatgttggatattgatgcttgataatgtgttttaatccctagtgattgctagtagcttcagtttgtgatttggaggttttagttgtgaatttgaatgagtttggttgggtttggtagctgaaaattcgaagttttcttgctagtttctgggttctgcacctagatgccacagcatgctcccagctcctctgagtggacctgggaattggtcccaagtgccgcggcatggtttgggcatgccgcggcccgccctcgcgtttttgggcagttttgaattgatttttgaaagttcgtaacttttgatttcgaactccaattttggagttctttgtatcgttggaaagctcgttccgagctctgtatgattatctgagttgtaaatgccatgcttgaatttttatgagtaatagtcaggggttaaccctaagtgtgaattatcccagatttgtgtgactaggattaccggcacctgattaggagcacccggggattcggaatctctttctattgctggacaacaggtaagacagtgattagcacgta

SEQ ID NO: 341180 - DNA, 676 bp, Cannabis indica
ttcccttttccgacaaaggggggagatggccgaacaggtgaaatgggttcccttatgcgaatcgcatgttcaacaagcatgggtgtggccgggagtttcttcttcctcttcagtggggtcacctgctcgtcctcggcctcatcttcaggattcaaaggctcccaagcatactggttggccctggcacctcctttcaacttagcctcgcgcttaagttgaataagctcattctccttatgagctcattcagcctggccagcaccgtttttcctcttcttccctgccacagacttaggagaaaagtcctcgggatagagcccgtacttcacaagattctcattggaggtcaactggataataatcctgtcttgccccggcaaccgggcaagtttctgagctctatccctaagagcaagagtgaggggaggacggtgatatgtcagaatctgctgaaactgagtctgggaaatgctaggatccttcaccatgaagtactcatcaacaaaatgccctatcttgcttgatggccttggcatccgttccgatccaccacttgaagcctgactgagaaaaataaaagtaccccgatctgccttgtttgggggtagacttcagatcaaagaaccaggcaaccttgtggggagaaggagcaccctatccttgggaagcgtagagg

SEQ ID NO: 341181 - DNA, 626 bp, Cannabis indica
ttcttcacagtcttacacactatgattgaggaataacttgctacgggtggttatgcactcaataactaaagcttgaattttaatggtgaagaacactataggattcaaattagaagagagaaaagaagaagaataagtctcaaactctctagttgtctgacaagaagaaaactaggttaagagtcattagttggactgtaaggccattcttttctttttatactaattcacttagggttaggattgaattatttggaataaaattgataaaataatagcaaaaaatagatttagtggcggaccccattttctcaactatttatctatttttcataaatatcatattttgcaatttcaatcatataaatgccaaaactatttatcaaataattaaattaattatcaaataaaattttcatttatattatttattaattagactccacaaagtctcttaattaataaataaatcctaaaatcctatttcttcacaattaagccatatcttagtgaaaattcataaactagacatagtctaattttagaattataaatgattaattaaaattaattaactgagtcttacaagaagtttgtctcaactagtatggagaccatgtgcctat

SEQ ID NO: 341182 - DNA, 625 bp, Cannabis indica
tgtcccgagaccgaacactccaggtcgcactactttgacatgtacaatctcatcctagttcaggttcattcatgttcagcttttgcctttcctttaccaacacatggaagcagaactctgagtcgatagactcagtaagaaaagcatataacatatcatataatttccgaattttatttaagctcccatacacctatttacaaggctcaacagatgagtaagaacgttccataccagggtatagccactataccacatatactacgtacctccctgtacgagtgttggtagggtttgtttcataccctgagtacccctgactgatgtaccacacatactcagtacctcaccatacttatgctggtatcacggtactctcaaacaacattcactataccaatacactctataccttaaccgtataagtgttggtagggcaactaacattttaagcatgcatatacacataacatatacatacactcagatattcatatcacacattatattcagttcttaccttctttccagattcaagtgtgctggctgacctgaacgaaaaatctcgtcctagataattatgttgctaatcaattttattaggttaaactaatttaattaacct

SEQ ID NO: 341183 - DNA, 770 bp, Cannabis indica
tactacatcagcaaatggctagtcggcccagaaagtcgatacccactcatggagaagacctactgcttgctcttggcttccaaaaagctaaggccctacttccagcacaccccataaaggtgtacaccaatcaaccattgcggcaggttttgcagaaacctgaagcatcaggccgactactcaaatgagccattgagcttggccagtttgagatcaaataccaaccaagaataggcataaaaggacaagaccttgcaaattttgtggctgagtgcaccaactcaactcttgagatccctcaagactcaggagaacaacaagagccagagaagaagtgagagcaagagcaacaacaaaatcccaaagatctaagatagaaactccatgttgatggaagctgcactaactaattgttcagtgcaagcattgcccttacaacacttgggggaaaaatgcatagagcaatcaaattcgacatcaaggcctcaagcaacaaggctgaatacgaagccctaatagttggcctcaagctggcgcatgaagtgcgggttgaccacctaggcatattcagcgtttctcaactagttgtgaatcaagtcatgggtgaatacatatgtcaaggtgataaaatggtggcctacttgagtaaaatcaaagactttctaagtcagctcaaaggttacacgatcaagcagatcctcagagaacagaatgctatagtagatgcacttgcccgcctagcgagtagtaccatagttgacaaagcaaac

SEQ ID NO: 341184 - DNA, 927 bp, Cannabis indica
ctgcattcccattttgttgtggtctcttcacaactgttttgtgtcttgcaatgccactgtcttgacaaaactttgtgaactgatctcagcaaaattctaatccattatcagtccttagtttcttaatctttactgattttctatcagtttcttccagttaacaaaagtttgaaatgcttcatccttagacttgagaagaaacacccaaactctcctagaatagtcatcaataatgctcatgaagtagctagcacctccaatggtcttagttcttgaagcaccccagagatcagagtgcacatagtgtagctttcccttggttgtgtgtagtcctgaagtgaatttcactctgctgcacttaccatacacacattcttcacagaatcctagttctttgccaagtttacctttgagaataccctgtttctccaattcatagagacctctctcactaacatgacctagtctcatgtgccatagccttgtgttgtctctatcactgctcttgacaactagattcgattttcccacaactgtctttccttgcagatagtaaattccattcttaatgtctcccttcattactatcctagtgcccttcattactttcattgaaccatctatctttacagtccaacctttagatacaagttcactaattgaaagtaaatttctcttaagttcagggacatacctaacttcttgtatgagcttgatctgaccatcattcattttgatcaagacacttcccattcctgaaatcttgcaagctttattgtctcctaacagaactgatccaccctcaatctttttgaagtcactaaacagttccctccttggtgtcatgtgaaatgagcacccagagtcaagaatccattcacaaccagattcttgacttgccacaaccaaagcttctgcagactcata

SEQ ID NO: 341185 - DNA, 684 bp, Cannabis indica
actgctatagacatgaaggaaagtaatgttcccagcagtaccaatggctataatgtgttgcaaaatgcagaaattgaaggggatatacttcctaactctaatcatttttgatggatgctttaaacatgttaggatggaatgttagagggatgaataaaaaggacaagcaacttgctatccttgatattttgagagtgaataaaattgggtttggtgctttgtttgagaccaaacttaagcatgacaaagcttgttctagtatggaggagaattttacttcttggaattactactctagcactgttattgctggtagaataatcttactttggcagaagaattatgttcaagtgaccatgataagcgaggatagccaatttgttcattgtaaagtcaagttgtttgaccaaaaaaaggctttttttgttactgcgatttatggcagcaactctttggaaactagaaaggatttgtgggataagcttgctggttttgggaatataaacgagccttggatcatctttggtgacttcaacgctatgttcaactaccaagaagatttgggggaagacagattcttagcagagacattttagatgctcaatcttggcttgctttaggccaagttgaggagctaaaatgttccggttccttctttacttggacgaataaacatgaagttgg

SEQ ID NO: 341186 - DNA, 1164 bp, Cannabis indica
atatatgtggtgctctgtttggcgtatctcttgcgagcaaatacatggagttgatttcacgtgtcaccattgtgtgatgccacgtcaaagtgccaaaattgggataatagaaccctaaggagccaactaccatttaagtattttctccagcttgttcctcaagttcttggaagatttagctaagaagtgaagttatcttagtgtaggggtaagcttttacactttattattgttttatttcaagttatagatgtaaatttaagttagggttttatgaattcatgtttgatgaaattattgagattttgatgatatcttgagtttaattaagtttgtttaagattgagttaatggttttgagctgaacttggaagaaaaatgggtttttgatccaaactttgattctaacttagtgtcatgtgtaatttactgaagtaatgtgaattaatgtgttggatgagttatatttatagtattatactattctggaagtgttggacatgtttgtaatagatttggttcaattttggagaagaaaccccaaggttttctagtgtaccagaatcggtcgaccggttggttctagtgcaccagaaccggtcgaccggttgccctgtatggggaattcatggggttttcttcaagttctattttggctcggggttgtacctagtacttgttttaagttatttatgtgttgtgtagcctattttgagattgttggaagttaggttatgtccagtttaggggaattagggttttattcttagaatttcaattttgaggtatttatcggaattttgttgtcatgacatagggacgggatcatccagctctgtttccactcaagccggcccgcacgtctattttccggactgaggtaagaaaaagtgatacgcaccacttatggttaaataattaacgattgtagttgttatagtctcaattataatggagatcttgtttacgtgtttgttatgcctcggttatgattgagagttggaaaacggtcattaccgtcatgagtaattactcttgaaactgtggttaggtttcttacttatcgttccctatatcgggcaacaatagtgatatacgtagctcatgggtaacgagtggtgaggattaaaaacggtcattaccgttatgagtaattactcttga

SEQ ID NO: 341187 - DNA, 811 bp, Cannabis indica
ggtctcggtcccaatttttatgctcgtgtcacggatctaggtcccccatccaggtccaagtcctaggtcccggtctgagttcgggacccagtccgggttcaagtcctggtccgagtctgggtttgggttctgatctcaatatgtatccagatctgggtttgattctcggtccaggctcgggtccgagtcccgagttccgatctgggtctaggtttcgaggcccaagtctaggtcccaaatgaaggtccaggtcctaggtcctgatctgggtccattcaggtgtgggtccttctcccagattcaatttcgattcagtgtctaggttcgggtttcggtctgggtctgggttggggtatgaatcctcttgcgagtctaggtctgggtttgggtccagttctagatcccggtctgggtgtgggttcaggttaggtccaagttcgggtcctgggtgcgggtccaggtcttcgtctgggttagggtctcggtccgaatcaaggtctcgagtttcaatctcggtctagggcttgtttgggtttgagtccaggttcgtgtccagatccctatctaggtccgagtctgggtttgggatcgggtcccaggtttaggtcctggtctgggttcgggtccaagtctcggtcccgttctggtacacgaatgtgtttgggcccgagtttttgtctcggtttgggtctggggctaggtctaggtttggttctaggtttgggtccgggtcctggtcttgcagttctttttcagtttctagtttcgggtcccgaatatttgtcagggtctgggtttgggtcctgcttct

SEQ ID NO: 341188 - DNA, 506 bp, Cannabis indica
atttgtgaaataatccattttttctattactgtcagtactaatatcaaactgagtactatttttttatgcctgttgtgaatgaagaatttttattttgatttttttttttacattcttttattttcttttctataattatataaaaaataacaattatattattattttttttattattttaatatgtagaaaatatatatttaaaataaaaaataatcttttactttattttatatgttgttaacaaaaaaaattaacatatgttaataaaaatggttaattgcggcaaaatccccaataattttattttacttgcaattaacccccaaaacccaaattttggcgataaaacccccaaaaccagcattctgttagcaaaaacacactttcgttcccttgactccgttatttgccaacatggctcagttcagttcagccaacgtggacacagtgtacacgtgagacaatattattggtccacgtaaatattttttaaaaataaaat

SEQ ID NO: 341189 - DNA, 698 bp, Cannabis indica
atgatagagattaagaaaacaaagtctcactcttatgaaaaaaatagtaacaaagtaacaaagtaacaaagtaaacctcaaaaaggactaacctaggcaaagaaaatagatacaatgacagtcatccctactcataatcacttcagcagttacaaacttacaatattatggactctttcaggatcgtgatgcttagaaataactctgagatgcttccaattaagcaacgaaaaacgacatattttcttcaagttttctggcaatatgagtgccttcatgcaaacatataaacataacaattaatatacactaattacaaacttgaaatcaagccacaaaatcaaattaaaaaataataataacaaacttataacacaagtacctcatatgtaggaacatgtaggcttagaacattccaagagcaattaagaatcacaagagaatcaacatgttggtgaaccaatctgtgtatatatctccatgtcagcacaaaacaaattgcttctagatgagacgtgcacttcctgaaagataagccaaagcgcacgttgaagggacttcccgaataggaatagaacagctagagtcaactatccataacttcctttcaggagggaacaactagccatccgggaactcctttccaggagaggactagctttccctagagactccttccggatggacaagttagactt

SEQ ID NO: 341190 - DNA, 839 bp, Cannabis indica
caaaatctacggaaaaggaaaatgtaagagtgtaatattacctcagatacaagaggagagaacaaatagaggcagcgaaaatggcgatgaagaacctcaacaatggcaacgtggacggagaggtggcggcattgcggcggcgacaacaacaacatcgaaggctagggtgatcttttgactgcgtctttgtgtaatcaaaattgaattgagatgaaaatagtaactgggttgggctgggctaaaaaatttctaagaatggaataaaagagtaacagggctaatttcatttttataaaaaaaactcgtccgtaaaagtgtttatacattgtagacgctataaaagtgtctgtgttatttttgaaacttttatagaccaactgaaagcccccacaaaagtataactacttttacgaacgctttctcagctttcaacgcctttattgctaatcttttgcaagcgcatcaattataaagcgcctgtaaaactaatcattcttgtagtgacattatattattggtttgctattttattattagacacaatggaatacaaatacaacataaatgctatacatagtatgtttgcgtttagatgttaaatacttaagcacaaatttggttagggctttggttggtggtgacacatgtctttagtagagaacacaacatattgtgatttagtttctcgactatcattgtgaccagtaattatatcgctattactccaatttattctacatcaataaaaattatagaaaattgttcgcattatagggtgtcatttcagactacgcattgatgccccgtaactcaatagtaatatttaaaaaaaaaaaaaa

SEQ ID NO: 341191 - DNA, 645 bp, Cannabis indica
taaaataatttccaacaacgtgtagatacgggcgtcagtgatacgaaaatttcaaggttatggcatagaatgaaactgttgtagggtttcctcctagcgacgtgaagatacaagcgtcagtgatataaaaatgcctggttatggcatagatcgaactattattgggtttcttcctagcgacgtatcaggcataggtacagacgtcagtgacatatgataagtatcgagcgtagctacgagctcgtctaattagacgatgtgatatattggtgccaagttgtggcacgggctcacttgattaggtgatgcaattatgtacttagtgtaggtacaagctcgtctgattaggcggcaatatatagattttaggttgtggcacaagctctcttgattggatgatccaattatatgatatatgagtgcaagcttttggcacgggctcacctgattgggtgatgtagttatgcaatatatggtgttaggctatgacacaagcttgcctgattaagcaatacaatacaagttatcagtttaaagcatcgacttgcctgattaggcaatgtgatgtaatgaagatggttactttatgaagtaacatatatataatttatatttttaaatgaatatgattcctattattggtat

SEQ ID NO: 341192 - DNA, 1059 bp, Cannabis indica
aaaaggtgaaaaccgaggaacctaccattacattcatagaggaagatgagaagaatgtgagataccttcacgtcaatctgctggtcataaccatccaactcgccaataagaggatcaagagagcgttaatcgataatgggagctcgataaatatcatttattaggagactctaaagaaaatggggctcaaaaaggtcaagttaaggccttatatggtgaatctctatggattcaccggagatagcatcgtcagccttggcataatcgagctcgcattgaccgtaggcgaggcacctttaactgctactgttatgcaagacttcttggttttcggcctgccctcagcttacaacatattgttgggtcgcccaccactgatcggactaggggcaatctgctcgatcaagcacttgtctttaaagttccaaacctttgatggcatgggggtggtgcgtggcgaccagatgctggctcgcaattgttatcgcatagagctacagcataggaaggccagtcatcaactgatggcgatcttggcaagagtatacaagaagaaaaacgaagatcttaatcctcgagttcaagatgaaagaaacctgctaaaaccaattgaagaattggaggaggttattctcgaccctggaaatcccaccaaatgtgtgtacatatggaagaaccttgatgagtagctcaaatagcaattaataagcttattgaaggaaaaaccaggatcaattcgcctggagtcacggggatataatagtgatcttgttgggttttgtgccctaaataaaacccatttcaatataatcaaatttactaattaataaagattagaaatcattttatgttgcatggctcacatgatatatttcatgattatatataatgtataaattctattaagtccagaacatatgtatttgttcattattatagtgttgtcaatacagtggaatataatcatgattatatgttcaaaaagtttaattccctgatttgtcaattcactggatttagactggcatgataatcagtgataggtatacttacaccttg

SEQ ID NO: 341193 - DNA, 558 bp, Cannabis indica
tttaaatcatatgataagttttttttatagatttatcgattatttttttctataaatctctatttttgtgtgaaaattttttaattcctaatattttcttaactttaattactttgaatgtagtggtgactaaaagtcacatacagtgatgacatcagttttaaaatcatctcacaagtttttttttttcttagattaattatcaattgtatttatttatcaaatgcgatacggtgatgatctgtcttctaattttttttctttcactatgattttttttttaaatcaaattcattttcactatgatgtttgtagatatctctttcactaaataattattaaatattaaataaattaattaaaattatttaaatcatatactatttaaatttaaatttgattagatttaattctatatctactttttcattattaattgacggactttatgctaatttgggctttaggtaaaaataaaaatgtgaaaattacatgaaatatgggatttcatacaaagatagaaaaatatggtatttttaagtttgccactcttctatg

SEQ ID NO: 341194 - DNA, 850 bp, Cannabis indica
tttttctttatctgcctcaaccaccttttagctactatgggatcttatccaccctcaaactcaggcacttggatccaatgaaagatctaaaaatgatgactctgtcgagtggcatagatccatcttttgagcaagaactgctcttaaggctttgagaagagcattcatagagaatttaacttgtggaggtttgacattagcttgaggagagttttctccaacaattctccttgtcttccttcctttaggaggtattttcttaggtttgagaaccaaaagctaatcagttagtgaagattggatgctaataatataaatatgtcttatacatataaatatcaagatacttataactattcttatttaaaataaatctaaactatttggtgacacactctgaggtaattaaactcgaagctccaataccatttttctgtcacgacccaagccctaggccgtggcagatatgtaatatccataacttgggttgtcaaatgtcacactttgacccttgtagaaagataataattataaatgatcctttaatttatttcacaaaatacttatttaaaaataatagattaactcctatatcgataagaaaatattagtaaaagaataagtatcactcatcaatataaaagaataataatatccccacagctatgtagtcaccaaaaaaatagatttaataagtcaataaaatatcaaaataatatttagcatccatcatttctcatttctaactagtacatagctaatttaagtctttcagaccatccattcaagcttaaatacaaaattagtttcattggaaagtttgataaataaaataagactaaactaataa

SEQ ID NO: 341195 - DNA, 1728 bp, Cannabis indica
atcgctgtgaggactgaatgccacaattagtcgggacttgatgattgccactgctcacgacatcttatataggaaagtggacgtactagccttaattgttgagcagactgagcaacatgcaataaaggagcagattgtaaaggatgccgtcatggcatcgaatcctcttgttagtggtaatatcagtaaggggaccgacagtgctaaccctgatcacaaacggaaggtagaagcttccggaacatcagggagtattagaaagtttcagggaaacgaaggtgcccgtcaaggtcatggatcctctttcagatcatatctagaatgtttgaaatgcaagaaacaccatcaaggtgaatgccgggccaaggctgcataccatatttggtatggattatatgaatcggatgttctaggattacctggacagatgtgtgattgtgtttattgatgacatatattatttattctgaattagaaaaggaatatgagttgcatctcagatcagtattgcagcgattacgagatcacaagttgtacgctaagttcaaaagtgtaaattttggttatcttatgtctctttcttagggcacatagtggataaatatgggatcatggtagatctagccaagatcaaagttgttcgggattggccaacaccaaaatcggctactgaagttaggagtttgttgggtacagctgggtattatcgttggttcgttgagggttgcttaaagatttttgtacccttaacagagctgacccaaaagaactggaagtttatttagactgatcggtgtgagaaaagttttttagagttaaagcatcgcttgattaccgctccagtgttaactcttccttcagataaggaaaagtttgttacatattgtgatgcctcgagacagggtcttggctgtgttcttatgcaagctggaaaggtaatagttatgcttcacgacagttaaagaagtacgaacaaaggtaccctcctcatgatttagaactcgcagtagtagtatttgcgctaatgatttggcggcattacatatatagtgagaaatgtgagatatacattgatcgcaaaagtctgaatgacttcctcacccaaagagacttgtatatgagatagagacgctggctagtgtttgtgaaggattatgtttgtgagattctttatcatcctgggaaggccaacgtagtagttgatgccctgagtaggaaaggacaaagttggatgaataccgtgaagtaaatttctaggcagttagtagatgagatgacctgaaccaagattgagtttgttgtggggtagttggctaatattaccctataatcttctattttggagaaaattacggaagcacaattgtaagatccagagtaagtgaaatcccgagataaggtttcggctggaaagactagtaattttataatggatgacacgagatgatatggtttatgaatcgtgtttgtgtgcctatggatgatgatattaaaagagagattatgaataaatctcatacgactccttactcagttcatccagggtcaacaaagatgtatcaagacctcaaagttatgttctggtggccatgcatgaagaatgatatatgttgctaagtgtcttacttgtcagcaagtgaaggttgaacaccagaggtctgcagggttgctgcagccactgaatattccggagtggaaatgggaagacattgctatagacttcgtggt

SEQ ID NO: 341196 - DNA, 774 bp, Cannabis indica
aggtagaacagcatcttttgtttccatcgcttaaaatgtaatccctcaaaacagaaaggcttattaatatcgttagaagcagaactaggaaaattcatcggtagcagccatagcagaacgaaacgtcttaaaattgttagaccaaaattaaaaacaataaaattggaacgaattaccgatataataatctggctgagtcgcagaaaatgtcgctctctttaagacgtttcgcggctctacccgaagtgtacacggcagtctagcaaccacggtgtccccatgataaaacaacctctgtatacatacgatatgttctgtaccgaactatatcgctctgttacaccctaaagttcgctctgagaaaaatcgtaaggaagaaagaaaagatttttttaatgttggaaaagatatgttcttacgttgttctgatacgacttatatagaagtcgatccaagaataaacagtaagaaaacggtaatgctatcgttcgttgaggagttggatcatgagagtaaaaagcggatcattgactgatcgcgttttcttctgatcacgtgttaaaaataaaaaaaattaaatctttatttaattaaataacttttctttaaaaaattaagtgacacctcacccaccaacccaacccagcttggtcggatggacggcggcggcggcggcggcgtgcgcgcgtgtagtggtccagtgtgtgagtcctcacccatacgcacaaaactgggtaccccttgggtcccaaacccatatctcaaacttgcact

SEQ ID NO: 341197 - DNA, 809 bp, Cannabis indica
ctcgaggccggagtgtccaccctccgggggcatttagaaggctcctcttctaccatcttgcccttgcgcttgcgcacaagagcaacctcttgctcttcttcaccttcttcagcttcctcaataagtgcctcctcctcgtccactaagacaatagggcccgaaggggcgctggaagaagccttcccggagtgaccaactgggaagaagtaggaggaggggaaacatcaagactatgggctccagcaagagtggccaagatttcgtccatgggaacggctgctgcaacaagagaaaaggttaagtgttagaatatctgtgaaagcaacgtacacttaacaaaaagcaatcaagctagccctaccctgactctctaattcggccctagcaaagtcccgaatcttaacactggctgcatcatccccgagatagctgtccgagggacggaaccagctagaagataaataggctgaagggtccaagagtatgggcaccgaaggtccagaacccatccgggaccgacctaaataatcgcctaagtgagagaaataatactctttggcatgatccccccaccgagtggaaggcatcctaaacctatggagacgttcatcgaaccctataggcctaaggctagcatactcacggacagaagggacatagtgtatcattaaaggggacttaccagaacccaaagtgctggcatcgggagcccccgtattcggcactgggaccacaggcgttggtctgggggtccttcgctccaccggactcccaatacaaaggggccttccggcgaccacctgggcctt

SEQ ID NO: 341198 - DNA, 535 bp, Cannabis indica
tttaatggaacaacacttatcccaatgggaaaagtgaggctcccagtcaccttgggcccaacacacccaaaagcactttcaaatactacacgtttgtggtggtggactgcccaacatcttataatgcaatcctcgaccgaacgaccctggtggattttggtgtagtcacgtcaattaggcacttgtgcctaaaattccctactcaagaggctggaataggaaccgtaagagggaaccaaggggaggccagacagtgttacaatgttgctgcccacctacctgtcctaatggtccgtgaaattattgagccaaaaatggtggaagaagatgagttggatccccgtgtgggatccgaaaaaattgtagaacccatggaggacgtcgaggaagtgtcagtgtgcgaccttgactccactaaagtcctccggctaggaaaaagcctaaagccagaggaaaaagaaaaaataataaagacactaaggggcgccacggatgtttttgcgtggtgtcaagaagacatgaccagcataagccc

SEQ ID NO: 341199 - DNA, 842 bp, Cannabis indica
taggtgagagaaatctcactatatcagtagggacaactgtactggcttagggctatcctttgaattgtcttcctctttgcctgtacattccaccacaaactttgccaaagcctgcccttttactgctgtacagggttgaaagattatttcatactgtcccaactctatggcccacttgagtaaccgtctagaggcattaggattttgtaaaacttggcacaagggttggtaggtattaacccaaacatgatgtgcttgggaatagggccttaactctcttatggccaagatcagacagtaagtgagtttttcaattaaaggataccaaccttctgcttcaacaagtcgtttgctgatatagtagactagatgttggacattatttttttctcttatcagcacgacgctcatagcatattcagtgactgccaagtacatccctaattcttctccgtcgaagggttttgagagtacaagaggctttgtgagttgtattatctgaggattttgaagcattcatccagatcctctatgtgcccccagccttcttggatttgacgagcatgttatccacacatacttccatattctgttcgattggattttgaacatcttgtttactaacctttgataggtaacccttgcattctttagaccgaacgacatcactttatagcagtataaacccatatttgtttggaagcttgtatgtgttgggttttatgccctaaataaaactctatttcaatgtaatccagattattcaatatcaataaagtaagagaagtatttttcattcatttgtgtatgttttggttcaattaatcaattgtttgtctatt

SEQ ID NO: 341200 - DNA, 639 bp, Cannabis indica
gggggtcatcagaccttgtgcacttattggtagtattttcttagatgttcactgttccaataccttggtactagaaccagtttcatgttttcatcataccgaccaagtttctatgctctagagtctgtaaattctattacttgatatggtccttccttgttaggttcgagcacgccagatgcactatttttggtgtttaagaacactcttctgaggaccatatctcccacaaagaattttcttgccctcacttgcttgttgaaatacagacctaccttttgttgatgtgccactagctttaggtttgttaaagctatttttctttgaattcatcaacttattctgctaggaggacatgattaatctcttggtcataagttagccttttgtgggaaggggattataatttcacgggcagcattgcctcataaccatatgccatggcaaaaggtgcctggccggttacccttctttcagttattttgtatgaccacaatacctctggtaattcctccggccaattccttttagcttctttgacctattttttcatggtgtctttgagtgtcttgttgactgctttgacctgcccatttttttaaggatgtgtcacagctgaaaaactcttgatgattccat

SEQ ID NO: 341201 - DNA, 831 bp, Cannabis indica
attgaggaacttgatattgtggatagtggtcgttataatgagtatgggtggggggaatgagtgttttgagataaccattgaatctcttaagggcaagattgatgtctgtattaggactgtgaagaagaaggataaggatggcagtttttataggttgttaggttttccttatgcaatgcaagtttggttttttcgagtgatgtccatatgtcattggaaaaattactttgtattcaaacattggcatccctaggcttcttaactggcctaaaatggagaagcttaaagtttctcagctaaaaatggacaatgtgaaaagcatcatcttcaattggcctttaaagcaggtatatgtgtgttgttttcttttgttttttagttgttttagggttattttttttcaattttttatgaattgtatttttatttcaattttattcatttttttgtgcttattctatttcagttacaacatgaaaatatttttccaacttctgttgagagaaccagtttgaatttggttgattatttttaggtgacactactccttccattattaaggataaaggtaaaggtaatcaagaattcagctctaaatctgtgcccaatgctgttgtggaaggtgatcaagttggtccatcatcgtctaaggctcatgagcatgttactcgttttgagtacgaggatttaaaaaaagatgtatctcttgttcttagccagcagcgaattattatgttttgctgatttgaacagaaagatggatactcttattgaggtattattttttgtctcctttttaatgtagttgttttgttatttttgtattatttt

SEQ ID NO: 341202 - DNA, 659 bp, Cannabis indica
ttttagtgatttgatgttgtatgctacatgtacttcttgactttgctattttggagttgttcaccatctattagttgtatatggagacactcttgaagtgagaatgctggaatcactgagttaaaaggtttcgacgagcttggctaaagtgggaggcccaaaaggaaagggaaagagcaaggccaaggcctataggtcctgcaagccaaggcttccatcaacctcctctacatataatatgtaacaccctaactagcataggcgtgttaacgtgattttaaacttactgtgcagctcgttgctaatcaacgaggttattggaaaacgtgattaattaaaattttgctttttaattaaaacataacatattacattaataaaataccgggatctcgtttacaaaatacagttataaaagtttgctatacatataatcaaaagtttgtcgcccagcgactaattaacgaaagccctgatgtcccgaggatcgtacgctccaggcctaaccgccccgacatgtacaacctccatttgctcgttctcacgattcctcagctttggctttgcccttacctacacataaacatagcactgtgagtcgacggactcagtaagaaaagcataatataaacataaaaataacccgggttataatctgg

SEQ ID NO: 341203 - DNA, 753 bp, Cannabis indica
tttgacgagctcgctggagcgggaacccgttcgggtcttgttcttctctgcttagacaatgactcttcacgtttaggcttctcgggctccatatgataccaagaactcgcctgaattcatctcgtaaggcgttcaggtccaggcccttcttccaattactctttcagaggctgatacaactcctcaaacctagccagaagctgttcagccatggcgtaaatgtcgtgccctttgggattataagtcatggcgttgtgaaacgttagcctcacatcaaatgcaaaatctactggcgatgtgtataggttcttggcgaggttcaatttaacggtacccagatccatcaggcgtttaattatgtcgtggtaatcgtggagcccctcagctagggcatcaacaggcttattaaagacccatgcgtgcttatcctttatcagattagataatatcagactgcaattcttcatcaaaattgggttgtcccaatgcgatcgcttgaaattggagctcgattctttagcgaattgattcgaattcgagggtgggagggtttctccagaaaaaagaagaagaaagaagaaagaagaaagaagaagaagaagaaagaaaaagaaaaaaaaagaaaaaaaagatttaattttttatttttttttaaattaaaaaaagtaaataagaaaaaaaaattctgattttttaattttttttaaatatttgtaattattttttaaaactaatattacgtggaccactaaa

SEQ ID NO: 341204 - DNA, 505 bp, Cannabis indica
cgctcatggactgacgactgtccctatagaacaacatgagtgtttccagcgtgctttgtcctcactcgcacactcactgggaaaacttcccaagcggtcacccatcctaaaattactccaggtcaagcaggcttaactgtggagttcttttgtgataggctactaaaaaataagatgcaccttgttgatataggtagtaccaatcaatccatttaacccctatttaactatgtagtcccatacctacatagtctcagaatcatcacacatgaccttccacaggcgatgtgaaattgtaaagcttaactggtgtttccctttacaaatcacgggactactgactgtcacaatcacctcccattacagggtccgacatcctcctcgaccacacttctggctaggtcaaggctttgagaccatttgtaatgttctcgcttcaagccccattaggtccttaaactcatggaataatggctcttatacacgagtacgtcactctggctgc

SEQ ID NO: 341205 - DNA, 602 bp, Cannabis indica
aaatgaacttgttaaaaacaagctcgggaggtaaacccagcaatgtttcaacaaggactgcttccacgagaattgataactcaggggcttctggtctaaaaagaaaggacagaattaaagaactgtcaaaggataaaaagaaacaaaagaagcatgacaaatacatgccagtgtataatatttataccgagcttaatgaaactcgggaaaatatttaactcacacatgagcagaaggtagcctttggtaaacccgagcctatgaggaatttgaggagcaaaagagatcctaacaaatattgtaaatttcataaagatattgggcatacgaccgacgaatgtcgccaattgaaggatgagatagagactctcatcgctcgaggccattttaaacagtatgttaaaagacagggccaaggatacaaccagctctgtcagcctagaaacccaagcaaccagtggttacaacctatccttgtggaaggagaagacatcctggttattttgggaggaccgcatattgtaggggaaagcaataaacgctcagaagaggtatgtgaaggagataaagaaggagaagaatgtgaaaactgaggaaccccc

SEQ ID NO: 341206 - DNA, 547 bp, Cannabis indica
aggttaattttgatgaaaaagaacccctctcttcctttttttcggttgaaggtatgaataatttcttgagcaattacattattgtcttgaatgtctcttcctggcacaaatgccttttttaagctactttataaccgtttgaacaatttagtttatcatgtattagagaagttttttttattatttaattttatttttattacgatccgttttgaagattatgttgaacctgaattttagtggtttatttggtttagttattacttttttataccttgtatggtagtagatatatgtattaggttttgtgtcctaaataaaacccatttcaataaacagatttactaattaataaaagaacaaaaatcgttttatattgcatgattcacatgatttatctcatgattatatttaatgtatgaattctattaagtccagaacatatgtaaatatatacatatatatatatttgttcatgattatagtgtcgttagcacagtggaatataatcatgactatatgttcaaaagtttaattctcatgattt

SEQ ID NO: 341207 - DNA, 575 bp, Cannabis indica
tcctcgggacaacagtgcttttgtagttattcgctaggcgacaaatattttgtattgaatagtaaacttttgtaaagtattttgcaaacaggatcccgaaaatattttgtatgtaatattataagttttaattaaatggcaaaattttaattaatcatgattttcattaacctcgttgattagcaacgagctgcacagtacgtttaaaatcacgccaacatgcctatgctagttagggtgttacaatgattgaattcaaaaaataagttagaacagataaagagagacctccccacacttcctcacgtgtttcactcaaaaagaaaaaaattcactcaattcactcgtgttttcactcaaattcgatggcttttaccctcaaataagctcacacctctgcctttttccactcatattcttctttaagttctttaaaaactaattatacagtacaagagaggattcaagcaggaattccaaccaaacaaaccaaacgaacacagatgaaaactgaaaataaatgatgatttttagaacacttgtgtggggttttggcaaacaagcctctagactat

SEQ ID NO: 341208 - DNA, 809 bp, Cannabis indica
gagttcaaatcctactaacaatatttttttctttaaattctgtgttctcaccactgatcggttatgatctctagagaattaataatcttttttcttttttttttgtaaggagagaaataataatgtttagattgtactgaaaagtggaaaattgtttaaaataaattgaaaataaactgaaaataaacaaaatcaaataatattatgagtgagaccatttaagaacaaggaagcaaaacgatccatttgatgcttcttcaaaacgaaaccagcctcaacgccaccacttccatctccagactccgccattgaaatggatccattctctatagatatcacagccaccttctccggccgaccccatccaaaatctatgctgtagacgccgaacctcggcgacccagctactccaacgtagcaactattgtcagatttaaacgaactcattctcgacaacatgtcctctatttcgctctgtaaatccatttccttgctcaaatccttcactaaatcacttaccttcaccgcaagagcagtcaatgaatcttcctccttaccaatcacgtgctccctcatgtccttgaaattggccttgattgcaacgcaattgccgaagtaatttctggcaccggaggtctcaaacggctccggtaatcagcggcgaatcctaaaaaagctttactttactttcatcatcatctgttgctttgagaaagcaatcgaacatgtaagcgtacgtaagtcaaaaagaagataaatgaagctttggctttgaactatgccaattggacgatacccttctaacgtcg

SEQ ID NO: 341209 - DNA, 633 bp, Cannabis indica
ggagaattaaaacaggtatgcttgatttcactgttttatgtaattttcttttgatgtttgtatttgtttattttgttctgttgtgtttggatgtgtttgtagaaaataagcaaaattttcttaatgggttttgatattgagttttgattattgagttgtttcaaggaatatatatgatgatgctttgcttgttcaaaaatattattaaaaaagaaattgaaaaattccacagcagaagatctttaattgcaaaatatctatgcttgggtcgatctaaatgatgttataatttctattcattcttaagtgtttgtgatttaaatatgttgtttcatttcttatgggattattataaaaagcagaacgatcaacaaatcatagcttatgtatgttcccctgtaatatcaaaaagtggctagattctgaatttccctatatgtttttgattcatctccggcaacgtttaagtacatagtactagtaacgcaagtttagtagctgaccttggaatgtaattttgtaaactgtattggttacgacaatctgagtatttgagatccatatacggccttgttctatgatctttgacttttatgaatgaatgtagcattctgacttgtgtgcatttttttt

SEQ ID NO: 341210 - DNA, 644 bp, Cannabis indica
gattgcacagcttacccagtatttccccttacggatcacaggactactgactgtcacagaaaatctctcaaatacttgagagaatatatcaacaactttgaaatatctttaactacttttcaaattcaaatatttatctgattgaattaattaaataattaattaatccaaaaagagaaactccatagggcataggcctctaccttgtcttttttaggacaatgatggtgtcttttgtcatgacaagttttgtctcaacaaatattgtcttgacaattttttttaatttttttgtctttccctttttaattaatataaaaaattatttatttattacaaaaataaataattactattttgccaattcaaaatagatttttctaaacgatattatactactctttatcccttcccttgacagtgtttgaatgtggcaatttggggaccgtggacctataattctatgctccaataaactagattatttattgagtctcatcaaccaaataatatttatttattagttacactatttctctactaaatatatagaattgaactcttagtaattatagaattatatttactgagttttactacagtgtccattgatacaatcaattctagtgattagccctccatgt

SEQ ID NO: 341211 - DNA, 1526 bp, Cannabis indica
ctcacaaatataatcaaaataacgcacaatgtacaacaataatctaaaaataaaatataagtgtgaaaactcgttttgaacctagaaacaaagcaataaaaaacttaaaataaatatacattaacatcataaaattgagaaacctcattacaaaaccctcaaaacccgtgaaacaagtttcaaacctgtgaaccctgtgaaatcagttttgaccctataaaagatcataacaaaacttgtgaaatcataacgaaactagtttctgcaatatcaacataatagatttaaaccacttagcataataccaaggacccttagagcagcaaaacttaaccagagacaagcaaaccaaactaataaatttcacacaagcaaactagccctctgaaacacacaaactaataaatttcacaaccaaaaacacaaactcagtttctttctatctaacaacatgaactaacttgttcttgttgttctacaatcacaactaggctatatagtaaataaaagattgatataaaattatgattggttatataactaacacgatcatagtatacaagaaagttaaaagcttgttctcttaattagttttgccctacaaataagaccaaattacaaattaaaaatgtcataacaatgacaacaaattaaaaccaatgtatacacaattagtgtcaggaaaatctaaaatttaaattaattttattcaattcaactgtgttgtctccatttttgcagaaaaactcaaaattgcaaacccaataaaactcttaaacatttgtattttaacattttcaagcaaccaaactataaattaaataaaaattgatgaacaagaaagaaatgcatactgtagcaatatatcataccataagatcactacaatgtattagacccatccatctccgatgagtcttctctgcaagaaactagttttaaaggataaaatgaagaaatacaatacaatccaaatgtgactttagtagttataatagaccactatggataaaaacatatgcaggttttttaactgtattttagctgttaattattaaattataaaacacttgaaaatatatgtatctatagtatacttgaatcttttcaatataatatccaattatcatgtaaagagtaaatattaatatacgagctattaatggagaggagcttgtgaatggagatgagtgacagtgaaggttagagctactgatggggtggcgtagctagaattgttgaatagaggagaagaaataaaatcaaggaccctaaaattaaatatgggttttaaaatttaagtttacatatatatggcatagtaaataccataaaaaaacttaaaaactaaaatatgccatagaaagtggccaaacttaaatttgccatatttttgtaacaaaattttaaaaaaccatattaagtgtaattttcacttttaaaagttcttatgataaatatggcacatttaagtttgaccaattcatataatactttttttgttttaggtctttttatggtatttg

SEQ ID NO: 341212 - DNA, 1259 bp, Cannabis indica
cctgtatacatcttccaggtcagcaatttcaacttgaggggtagctctagaacattgatctcaggagtaaatggggatctgtgtgctcgatctaactcgagattgttgaacttttgaccggcctagccttcgaacatattttttagttcatccaactatgctttcatggatggatgaacctgtttggcctcttggccgatcagtgctacgttaagatctctttaagctggatcttgaatgtggattatgggctgagtggcaagttgaacatattatttgtctaaacctctcattctattcaaatcatccttgagattatgagatgttcccagtcttttaagtattgaaacaccaagttgtctcagcgactgattggtttggccgatcacttggccagatgctctagtctgggcagagttattgggtataaccccaccagatgaattgctagataaggtttggccacctaccacttggaccacaggtggaacctgtgaccggggattggacggctgaccgttcagagtttgggaagtatgccaagtaggaatttctttcgagctgcccagtgggatgctagacgcaggtttctggttagcaacttggtaggctcttcgtatcagtatggtggcctatcttgttcggttgtcgatggctgcctattgagccttcaatatttccatctctatccttccattcggcgaactggggcctttgctctttgaatgcaaggttcactgcaacacggagctcttcctgattatgatgcaaggtattagtatgaccttgcatgagcccaagataattatggaggttctagatctcagtgtcatctccaatggtcgtctaaacatttgttgctgaagggattctagtactgggagtacccagttcggctgctgaactggtgtttccagtctctggcgcaccgggtgtgattccagccaaaagagatgtcacacctgacccgcggtaggtggttgcgtgtttggttgctcaagataggtgactggtgggacccttgcattccctggagtatgcagtgttggatctgtcgtcagtgggtccacctgatcgaccacgcctttgtaagtttgtaccaccatcttttgtgtctgatcaaacttaacgcaaagagcaaacttggattattgctctcaatgaaagcaccaaaatgttgacctcgcttttagccaacgagaatgagtcaaatagtaagcgataaaaaatataatcaaagtaaagtatgaactaataag

SEQ ID NO: 341213 - DNA, 784 bp, Cannabis indica
attagggttatgatcgggtgtacgggcgccaggttataacctgggtttttttttatgtttaagttgtgcttttcttactaattctgtcgactcacagtgctattttcatgtgtaggtaaggacaaggctaaagctgaggagccgtgagagtgagcaggtgaagattgtacatgtcagggcggttaggcctggagcgtacaatcttttagacatcgaggcttttgctgtataatcactgggcgacaaacttttgtttatgtgtatagcaaatttttaaagagtattttgttaacaggatcccgggattgtatatatgtaatactttaagtttattaattaaatagtaaagttttaattaatcacgtttttcattaaccttgttgattagaaacgagctgcacaatacgtttaaagtcaccctaacacgcctatgctagttagggtgttacaatttggtatcagaatcgctaggttgtcttctgaagatcatcatgacatgtacaatcatcatcagcagattgctcatttcacgattcagtaagctgttactgctttagtagtttctttcctatagtatgatttaagaaaagcatgttaggaagaatgttagtagcttgatagtagaataggcgcatgtttttaatttccaaataagcggcattagtaagttttttctttgatcacggtgtgaccaaactagctcttggttacgtaggctgttctaaattagtatggacgtcaggcgaagtactaggagccagggtaattcggttggatccagtgg

SEQ ID NO: 341214 - DNA, 528 bp, Cannabis indica
tatttacatttggagcctttttttaatctaatttattttttttacgtaactttttattttttgttaagtttactgttttttgataccgtatttgatctaattgattttttttatctacgcgttcatttttaatttttaatttttagtttttcaattttgttttcggtaatttttttgattaggtatacattttaatttttcattttgttattttattaatttttttgtgtttgttatttttctaattttttttttattttatttattgttgtttttccttttgttagttttttttttgttttttactcaactgagatctcaattttgtttacattagggttagtttcttttatatttttatttttgtttacattagggtttgtttctttaagatctagttttttcatcatactttttgtatattttaggatttttttttggtttgatttcttttaggtattaattctatttaaatatattattgtatatgatttagtttacttattttttgttttcttattttttttt

SEQ ID NO: 341215 - DNA, 1025 bp, Cannabis indica
ttcttctttgttatatattataagctgattttaatatgcaccatcttaaaacataaaacagatgtattaatgcactttttttaaaagaatgtatttattttgacattcaaaataattttttaatctaatttttttttatattcatgtagttatagctatttaagatatcttataaaattttaaaaaatttgaaataatttacaatataaaaataatattcaaacagtctattttacacgcgtataaaataaaatagtcacgcgtgcaacatactgtttaaacacaattttcggcgtgttaaacttttacgaattttttaaaattttgcaaaatatcttaaataattataatttacatgggaaatttttttaactaaaaaattatttcaattactaaaacaggtaaaaatatatcaatacatatacattatagaatttttctatattatatgagcaacaactataagagtaaagactgaaattaattgttataattaatattaatggcagaaggtccaccattttcattttttttagatattccgttttttttttattatcataaaagtctattacacaatgaggtcaattatagaaaccgaatcaacaaaaatagccacctaatttacaataatatgaaaaactctaataacactgttaaaaaagattaataaattaggtaaaaacttcaaaaaaaaaaatgtaaaaaatactaaatttttaactcaaaattaggtaatcacaatcagattatttcataaatacaaatgaataataataacaaaaatatagtttcacaaaattttaaatatttttacaatttttttttaattttatttacagaaaatacaattttttttatgttatactcttgttaatttgttgttaattttttattatctatatattattttttgttgttattttaatgttatttagatattattttcatgttatttttatattactttcgtgttgtttctatgtaaaatcgtaaaattatataaaaaaaaaaaaaaaattaaa

SEQ ID NO: 341216 - DNA, 1828 bp, Cannabis indica
aaatattaaattaaaatttatatttagagttatctaacttagaaattttaattaaataaatatatgtaaaaataaatagattaaaataagtatcaaatgaaaatacaactctttaaaataatgagctttagttataaggatattcgatctccattgttggtcttacatggttaaatgtttcaatataacctcgagatgctagacttcgttccccttatggatgattatttgttgaagcatttaacaccgtaaagatctcaaaatagaagtattttgtaagttttcgtctctattagactctcccctaccgtgactacttagagataaatttacgaagtatgaaaaaatggtagaagctcataaaataagaatgaccttgactctcgcctatcgagataacgttggattcttatttagatcgaataaaaggttgcaagaatggtgagctgactacagtattcaatgaatgatatctttgactcttgcctacttggatactgtaccagtttgttggaaaccttagaaattatttaagatatgatagttttttaattttgacatatctttgttacttgctaaatctgaatatgtatgaatttatattgaagcatgttgttatccgttattaatattgtagtatgaattttgaatcttcattgttagtctaacttagtttgttattttcaatgggacaaattccaaaggattgtcattcgttagacaaataaaattgtgttagatcttgacagataaatatatgtaaatgtaacatctagttatacatctagagatgacaatttagactagtatttacaatatgaaacaatgcagaaattcatgaaataagaatactttgactcccacctactgggacatcattggattcttattttagtcgaaattatccttcagtttttcctcttagctttttcatttaggattttcttagatagtatctgattggataaatggtttataaatcctttacttttgatgtcattttattttcttccatgaaattgaatggcgcagatgactatattgtcgacattctatcccgaaatgatataaagcctcgatcttaaactctcctacttgtatgtgcttacttaaggcaatttaaacttagagttagactagtagtggtggtccaagaaagaataatgacttgtgtatatttggtataaattcaagtcttggactttaaattttagattctaaataaaaaaaaattatttcagtttcgaagaatgcattgaacattcagtataactttcccaagttgtttaatatccactttctgtcaatggatccaaactgtatgtttatgtatggaacatgagttttgtattctttgaccatatccacttatttaattctatgtactctttactataactaatatatctatggaatttgtatcttattcatagttgttttgataagatgattctttgcaaagagaatgtatacctatatccacttgaaagtaggatcatctgtatttgatataaggatgtacattcaggggtggacatcagttctcgttaaattcatatgacaatcactctagattttaccttatgcacagaaatttgaaatgtttgaaaaatttcttgaatttcctacaatggtgaaaacccatttggtggatatgcagttcaaagatcattaagttgaacttcaaattatatcgaaacttacctctctagaaattcagtttgcatattgatgaaagtgtaagtctatgattagttactagcatttgcctaagtccttctagggatataccctagtgatggaaaattttcagaatgatggaatggtt

SEQ ID NO: 341217 - DNA, 766 bp, Cannabis indica
atactttattaattgatttcattctctgggggtcgccccatggactagtaatattttggagatcactgataccacgtataaatctcttgtggaaagttatttaattttctgaaaaatattttatcttctgcctgttctgttttgtcactacaaaacgagtatctacagtagcagaattacattttgcttctgcagacgcatacagtttttatattttcttatatataattgacatttgcaaaaacacggtttttcaaagtaaattaattataataattatataattaaaactataaaatatctacttaaattaattttatatgtataattaaaggattaaaatatacgaatttgagacttaatcacaacccccaactagcttattgctagtctctagcaattcaagcaaacaaaaataatgtcaacaaaatattttttaggtcaaattttaaaaatgccacaaatattaaagcaaaatattagtaataagccaataagaactatacaaaattaccttgaataaatctagaattgtgagtgtgtgcaccaaacctgaaccttcttaccgcaaatcataacacataaatgctttcgaaaaatgtaccaagtagaagtctcaactccattagcctcacagatgtttgaaaatatttattcacggctaaggatttcactcatggggttggaaattaaaaagtgagcactcgaaatagaaatggatagatcaatttaggacaaacatttgaataaacattgaaacaaagat

SEQ ID NO: 341218 - DNA, 677 bp, Cannabis indica
tgttggtttttaatgtgcacttattaacttgttttgttttctctgtatactttgtttggttttaggttatatacaatggataagtcccttgattcaattgtctatgtaaagaaaaggaaaaggggtgaagtaagtaaggtatgtttttaaattttcatgttttattttgtttgttgttttttttttattttactgtattttcttgttttagtgttgtttattttatgttcaatgtttacaggacattattccttatgtagatcctggagttcagcagaacgattctaatcaatttgaaattttttccaaaaatttgaaggaccaagtatataattggtttctttttccatatttgtgttaattcatgttcatttattctattttttgattcttttcttttattcttgttgtgtttataattggttttttaaccagttttaatattgtattttttattttgttaacaggttgagcctggtaatgttgcgtttgttggtgctgaatctggaactagttcagaagttccggttgatgcacctaagaaacctgagattaagaaatctcgcgctaagaagaagaatgtgagtttattaactggttctgttattgttgttgtttttaactggtttttttttattatagaaatgtgtttttaaatgtttattgtatgtaattta

SEQ ID NO: 341219 - DNA, 1405 bp, Cannabis indica
gtacatgtcgtgacgatcttcggaagaaaacatggcagctctgataccaaattgtaacaccctaactattttaggcatgttagggtgatttttaaacttactgtgcagctcgttgctaatcagagaggttatcaaaaatcgtgattgattaaaattttccttatttaattaaaaacataaaatagcttacacataaaattgcgagatcccgtttacaaaagtttcactgtatatatacaaaagtctgttgcctagcaactatacaataaaagccctgatgtcccaaagatcgtacgctccaggcctaaccaccccaacatgtacaacctccatctgctcgctctcagggttgctcagccgtagccttgtccttacctacacatggaaatagtaactgtgagtcaatagactcagtaagaaaagcataaacaataacatagcaataacccagattatgatcggacgcccatacccccaatcataaccctatcctcgtgtcccacacggtattgagtctagaacgttcgtatgacagtaccattgaccattaatatcagcatacactcggtacgctagtcatactctagctgtactgatgtgatactgtcaagtagtacagtactatcgaccataatatcagcctatactcggtacgctagtcatactctaagtgtaccgatgtgatactgtcgaatagtacaaaagccaacatacatatctgatgtaatctaacatgcttaactaacatgcacattaaacatgtatatacatatgcataccattatactaatcttaccttgttaccaaattcaagtgtgtcagccaacctgagtggaacagctgctcgacgaattacaggctcctaaatcacattatttgcaaaattggtgagcgccacactaaatcactatctggggacttaaacttgagactaaaagtttccctatcgataaataacatggcaataccctaaatatcgcaaaaaggggaaaaactagggttcccaaaactgccccaactggtagaccgattccccaacccgaattccagttttgtgggtgttgaccgaggttttcggcaaccaatttaataatatgtaaggaagttgtaggaaattagtgcacaagatttttacgtggttggggcattaatgagctttagtccacgagtctttagtatttatgagagtatttattacagagaatgttcttggtagcttttctctctttagttcttatgaaacccagaattctcgacccctaccttaatgtgtttggggggtatttatagtgtttttgtggggtgatccctaaaaccgagctacatgtctttctgtatttttcaataggggcacacattcccaacaagtgtaaaatagtaaatgcatggtctataccctaagtat

SEQ ID NO: 341220 - DNA, 565 bp, Cannabis indica
tttatgaggtattatgtgttatggggtattttgttgtggacttagttttgtttttaatttatgtttcattattttaggaactgttttttttttaatgtaatcggtttgagttattgtgagttaattgtttgtattcattgtgctatacaaccggttctattttagttataaccgatttgacttatttcgtgttatttgtttttatttattataacactgttatgaaaccgattctatcataattataactagtttgagttattttgtgttatttgttttttattcattatgttacggaacaagttatattttaattctaactggtttgagttatatttttgatttatttgtttttattcattatttttagaatcggttttatttttatttatatctgagacatctacttctagtgatttttttcagtgatttttctggtgatgatgacttttttggcgacaataaccttttttgacaatgttttcgacgtcggtgactttttcggcatcggtgacttttccggcaaaacttattattacaagttttattaagtttatttactgtt

SEQ ID NO: 341221 - DNA, 555 bp, Cannabis indica
cttgagctaccaacccaacattcgattcacgatcagacctcaatctccactcaaattgagatccttccttttgagttttatgggtttttgaaaactcttaggtcgtattgatcataactttcaagtagttctgcagcttatagcatctaggtcgaatatgacccctcctgttacagaagtgacacactgggatgaatctctccatgtgagatatattctcctagctcttacgagttcagctgaaagcttgtagatctcattgtccttctcatcaagaagtttgttgagattcttaacagtgtcctccagcttgactttttcagactctatctgctccttggcactattcagacctctaatctgcttggtcatatattcccactgagcaaacatctcttcatatgcattttgtcttccattactgttggcttcagacaaagtggaaaccccatcatcctcagattcaacagaatgatgactttgagccatgaaagccagtacctgtttatcctcatcaaaacttttggttgcaacagaatctttttcttcgtcact

SEQ ID NO: 341222 - DNA, 906 bp, Cannabis indica
tatagttatcattatatgctaataccgacactaagtgagcaacacttaattatgttagtccacataaaatattctaacattctctcacttggactacataattacacatatatgtgctctcactatgcaatagtgtcaacatgcagaaatatcaagaaacactaatgtctgtaaaactaattatgcatcatattgtatcgacaagatacaaatataatgcataatgagacatctgagattcataaaacataatgataactactgatctggatccactcgaacatagcactaagactaagccactagcttgtaacaacaagtgtgcagacacaacatatcataagagttatccagaatatgcatgttttcaacaaataataacaatccttaacatgtctatcatacatgagaacaatgactctccctcaccaaatacaactttggctccaacaatccaaataagaaatgacttcttagtagacatgttcaggtaagccgtgtcagtgttgtctgtaagtgtgtgttatgataaaatagaggaccccacaactttctcactacatatggaacattatcaccattaatgaagcaatgatgcttctcaagttccgagagaaagatatcactgcgatatttatcacataagttcagtaagttcacaatagagtcaactactcttaacactgaaacaaaatatcacaattgtaatgtacaatcaatgtcctcgtaacaggccacacattctgtaaatgtccatacaacacctagtcacatataactccctataccattacactttctttgtataaaagaggaagttgtaggtgttcatatggcacttaattacaaaatattggtatcagtaaaaccaacttttatatgtcacaatattggtttgtcgattgt

SEQ ID NO: 341223 - DNA, 1330 bp, Cannabis indica
atcactatttatagggctataaacgtaaagaggaagtatttcccttctcatgacagtggatataagcaaacagattgcatgataaatacagaatacactgatcgtgggatttggatagcttgccatatctctgcaatctgatccccaagttatagggatttctttgatgactcacgatgcgaaagctaaattcgctaagtgttggttgctctgcgcggattgcttatcgctttgcttcaggcatgcatatgaggcatcctgttcgaactttattcttcgagcagatactcgaagtcgattccacgtgtcaccatcttctgatgccacgttagagtgcaaaaattgggataacaaattctctactcaaatttcattttctgtaaatatatatggcaaaattcgaaatccaatgtatttaaaaattaaatacattttcaaaatttacataaaataaaataaattctgaaaaataattctaatttatgttgttctaaaattaattaataaattaactttcaacacaaatataattttccgatttaattcaatttctaagaaaaaggttaattattcaagtatctagaataaaatcaacttaaatattagttttctatttaattaaatataactagaaaaataccacaagtttatagaaaataactatctagatatttcattaactaattacttattttcttattaaaatgtaatatattttagtctatttattttaataaattattaatgaaaaatgtacttgatttaagttggtttaaaattaattaaataattaattttcaactttaatctatttttcaatgggaacatttcaaaatattagcatttaaatgaaatgcaattcgaaatcatgtataaaatgattaataaaataaaattaaatatatttcgaaagttattctaattcaagttgttctgaaataaataaaatttccaacttaaacataattttctatctaattatatttgttgaaaaataactaatatttaagtatctagaataaaatcgacttaaatattatttttttatttaattaaatatattaaataaaagaaaaaaataattaagtatctagaaaaatattctaatttaagttgatctaaaattaattaacaaattaattttcaacttaaagatattttttaattaattaagtatttgaaaatataaattagttactagaaataactatctagaatatgtctcattaaactaagtgtttttctaaaattaattttaaaataatctaatgaaaaataatttcatataattaaaaataaattaatgttgctaattcaattttaattaggt

SEQ ID NO: 341224 - DNA, 646 bp, Cannabis indica
gttgtttgcctgaccatggcattgaggcgaaagctgaaggcttcgataccccaggatcggaggtgcacaacacattgggaaaagccatagatctgatctggttgatggccacaacatccatggatctgatctagtctccctctcattttatcttcctttatttttttttcagaatcgtatcatattaattttgtgtaataatctttgattttttttacagttataatgaattatgatatttttttttttgaaataaatgaattgggatatttaaatttagaaatatattaattttatatattttagttaatatttttttatgaaaattaatactattatatatatttaatatttacaaaatatatattaaaaagtaattaaatttaatttagataatacttttgctaacagttataaatagtcatttaatgtgatttttctcaacggttgtagactgtcatttaaattgatttttcccacatagccaacggttttaggaatcgttgggaaatagtataaaagactgttataaactgttgggaaaagtcgattttgtagtagtgtaaaatgacgaaacattccttctctacaaagggagagtgtaaagcccgcttagttaatttggaaattagcagttatttatgtt

SEQ ID NO: 341225 - DNA, 675 bp, Cannabis indica
  modified_base (637)..(637): a, c, t, g, unknown or other
taaacatatatatagtaatacttaattaattaacatatctattctatatacaaattaagtcatttcttaccaaaaaaaaaaaaaaacaacaaatatatataaatttagtcaaaaattggataaagaaaaatatatacatttatatgataaattagaaaatgccatgtgtccaccgtgagtgacgggcttgcatgttgagaataatagggcggggactaattaaattgccgccatagacttcttctacggttggatatattggccaaaattacacagtatggaattttaaaagtttttatgataatatgacacatttaagtttagccaatttatatagtatttttttatttttaggttttcttatagtatttgatgtgccatatatatgtaattagatttttaaatctcatatttaatatttttatttatttgggaagctttatttgtcattgatgccggaaaagtcatcggaatttgatcggtaccagaaatgtcgccggagtagcggtcggtcccagaaaagttgccgaagtagcagtcggtctcggaaaagtcgtcggagttgatgccggcgccggaaaagtcgccggagttgatgtcggcgccagaaaattcgtcaaaattggcattatcgccngaaaaaatcactgaaaaatactaagaaaccggttcttg

SEQ ID NO: 341226 - DNA, 737 bp, Cannabis indica
ctgattctcagggagtgtctcattttccctgggttgtttttcccaggcctttccctatctcctggtttgtgagccacgaggtctgcctcatggtcttctcactccaggttcagcttgattatgagcgttcgtcccctgcgccgccctggccgaggctgcctctcgttctaacttagagttttgacgatgcgcctcttccagacggtgtctcaggcgatggctctccgtctcataagttctctctcccacagatttggcatctccacggttgagctcttcagccctcatcttaggattctgaccattcccacgctgagttctcctcaagcgcattgtctgcgtactaggaccaaccccgggttgagttctctggggatgtgtggtcattctggactacgaattagttgatcttctagagcccatgggctcttttccagaacgatgcttaatttcctcatgtggggtgttaatattctctggattttcagccataaaggagaaggtttttctttgaaagaagggaaggctttttctgagctttttcacagaggctctcaatgaaaagcaccaaactattaacgtagatttttgttaaccgaatttgagcctcacaatgataaactcaaacacagaaataataaaaagctaatagaaaaaataaaataatgaaacactaggtcttttacgtgttttgcagttaaaattttgcatagtcacgagtcaatctattcaaattt

SEQ ID NO: 341227 - DNA, 375 bp, Cannabis indica
agtatttctctttttaaaatgctaaaattctacatttaagtatcgaatcctatatgatttttaatataataacttttatgaaatattgctaatcattcgaaagacatctcgtgttgatggcagggctatagcccaaccattgagcaacttgggctattgcacaagacccaaattctttttattttgaaagaaaagactatttcttttcttttttcttaaggtaaatactattttagaccccgtgtttcgcaaaagtcattaattggactctttgtttagtgaaatgacaaaatagaccatgtattttctaaaatggtacaaataggaccctgaactgatattttgtcaaaataaaatttaataataatttgatct

SEQ ID NO: 341228 - DNA, 520 bp, Cannabis indica
ccaagcagcattgttggacctgtaaaagaattagaagagatcaaaatcgatccagatatctgaccagaaagctaaagattagaaaaggtttgttcctcgaagtaaaattagaattgataaaatttctgagagcaaacctagacgtttttgcctagtcacatgcggatatggtcggaatcgatccttctaccatttcacatattctgaatattgatcccaactttcggtcagttcaataaaagcgaaggctgttggacaaagaacgagcagtagccctgaaggatgaagttgaaaagctgtgcaacaacaacttcataattgaagctttctaccccgaatccagtactagtgcccaagccgaacaagaaatggctagtctgtcttgatttcacagacctcaacaaggcataccctaaagactgttttccacttccaagaatcgaccagctcgtagatccaatagcagagcacgaaatattaagcttcatggacgcttactcagcctacaatcaaatgaaaa

SEQ ID NO: 341229 - DNA, 1435 bp, Cannabis indica
gaccagatgcgttgaccgacgcaaaaactactttttgtagtagtgcaacttccttgttgctagaataaggcagtaagcgagtttttctatcaatgggtatcggctctcagcctcaatgagtctttcacagacttaatagactgggtgttgtacgctattctcttctctaattagtacggcactcgcggcatgttccgtgacagctaagtatgttcccagttcctctccgtccagaggttttgagagtattggaggttttgcaagttgtccttttagctcttggaaatctttttcacactcctctgtccactcgaactgcttgtttcctcgcatgatgttgaagaatgggacacacttatatgttaattttgaaatgaatctggtgagtgtggcgatccgaccagttaagctttgcacttctttagttttcgttggtgagttcatatccaagagggcttgaatcttctctggattagcttcaattcctcgggcattgacgatgaagcctagaaactttcccgagctgactccaaaggaacactttaagggatttagtttcatattatattttctgaggactttgaagcattcgtccaggtcgtctatgtgccccccagcctttctggatttgacgagcatatcatccacgtacacttccatatttcgcctgatctggtctttaaacattttgtttaccaatctttggtacgtagctccagcattttttagaccaaacggcattactttgtagcaatatagacccatatctgttcggaaacttgtatgttcttggtctggtggatgcattttgatttgattgtagcctgagtaagcgtccatgaagcttaatatttcgtgccctactgttgcatctacgagctgatcgattcttggaagtggaaaacattctttagggcatgccttgttgaggtctgtgaaatcaatacagactccccatttcttgttcggcttgggcactaatacgggattcgcgacccaagccaggtagaaatcttcaattatgaagttgttgttacacaacttttcaacttcttccttcaaggctactactcgttctttgtccaaaagccttcgtttttgttgaattagtcagaagttgggatcgatattcagaacatgtgaaataatagaaggatcaattccaaccatatccgcataagaccaggcaaaaacatctaggtttgctctcagaaattttatcaaatctgattttactttgagcaacaaaccttttcaaatttttaacttataggtcgggatatctggatcgatctcgatctcttctaattcttctacaggtccaacattgctacttgggtccctaagtcgaggatccacatcttcatccccgcccggggaagttccctacttggaaatgttttttcccttgtctgtgctctggctggaggatact

SEQ ID NO: 341230 - DNA, 493 bp, Cannabis indica
agaccaagagcaaaatttctcaagacaatcccagtatcccttggcctcctctagattggctttaccaaccagaatgaggtcatcagcgaagaaaatatgggataaaataggccccccctctactcagcctgataccactaatagaattcttagcttgggcatcttccagaagcctagacaagatgtccgccgcccaaataaaaaggtagggggaaagagggtccccttggcgaagaccacaggaggggataatctttccaaaggggccgccattaatgcaaatgttgagggtggtggtagaaatacactggcaaacccaattccgaaattccactggcaccccaaagctatcaataacatgctcaataaatcgccaactcatcttatcataagctttcatgaggtcaatctaatagcaaacaggccttctcttcctctcttcctattaaacgagtggataatttcctgggcaatcacattattatcttgaata

SEQ ID NO: 341231 - DNA, 1043 bp, Cannabis indica
ttggtattttattgacttattaaatctatctatttggtgattacataactgtaggaatattattattcttttatattgatgagtggtcatgattttgttgctaatattttcttattaatataggagttaatccattacttttaaattagtattttgtaatataaattaaaggatcgtttataagctttatcttcctacaagggtcaaagtgtgacctttatccaaattatggatattacatatctgccacggcctagggctcgggtcgtgacattatctatatttaagatatgtaaaagaaaatcttatacattttagtgtttggataatcatttatgtgattgtttattacaatgtttgggatcctaatttttttctttgttttttttcttgttcagcccacaaccactgctccttcagctccaccaagacacacaaccaatcaagacccactcctccaaatacacatgttagttttttttttttttccataataatttttttgaatgattttctataataattttagttgtacatttatttagaaaaatgtatagttagtaagtttttaattttgcatttatagaggatccagctagtgttattcgaacgcaaactgaaagctgagattgtagatttttctaagaaaagagattcatatattatagagagtttatattactcatggttaaattgtctttgtaatttttttttcttccagttattgaatgaagagattaatgggatttctattgttgcaatgataagggctgccatgaagattaatttattgttgtggtagcacataccttgttcttaacaaaggtccagtaacaggaagagcagatgttgttgctactgctaatattgttgctcaagtagttgagtcgaagcttgtaaggctcgaagaaaaagtaagttttctatttatattttctgaatctagctctctttcaatattgctttgtaaaagtgaaattaaaatatttgttggcatataatctttgatcctgctcattgccattaaatttggcaaattaatg

SEQ ID NO: 341232 - DNA, 636 bp, Cannabis indica
aaaaaaattccgccccacagtaaaaaagtagaaacgttagaaatttcagtatgtagtgtaaaaatcttttttttttaaaaggttacatcatattcatcattcagtaataataacaaataataattttatgatatatttatttaattgtctctaaattttattttttagcaaattggtcctcaaatttatataaattttggcaagttggttctcaaattttatttttttgacaaattagtccccaaacttttattttcttaaaaacataaagtcctcattcttaaatgatggtattttatttatttatttattttgtattaattttaaataatattattaaattaaattaatatgttttttttatttatatatattttttaaaatatgtcaaaataaaaagaagaaaataacaattaaaattgcttaaataatattattattattttttataactataagtaaattatattttaaattttatttttaaattgtgctctacaatgaacttatgaaattttacgattcaaaatttaaataattaataaatatatgtacaattaaaaaattattaaaattataatactatatatttattaatcaacaataagatatattataaatgttaaaatataaaaa

SEQ ID NO: 341233 - DNA, 623 bp, Cannabis indica
gcaacaccaagccgaccaacaaacaattaaagaacttcagaattcttttaaattccttcaagctaatcttgttaaaaaacaagttgaccatgatcaaaagctcaaagagttggagggtggaaccaaagagagcgtcaacaatatcggtaggaggaccatctatcagatttggtcagccaaccccgagttggactttagttttttgggtgataaggccgaaaccatgcttgcctattgcgagaagactcagaaggaagaatattgcaaggaagaagaggttgacgcagaacaagaaaatctcgccaagtcccttataataatgtacacttagtcttgtacaattatttatttttcttttctgtttaggaaaatcgcccaatcgtttgccccttgtggaatttttgtaaagacaagtttgggaagctagttggccaacttagcttttatttgtcttaaatgcctcgtagctttacattcaagcttaatatatttatgtttgcttgcgttttcattcacaatgcaaataattatattttgatcaaatgcggagtactctccgtctttccattcctcgtatttttcctatttaagtagttagtaatctactatgtgcgtgagcagtt

SEQ ID NO: 341234 - DNA, 964 bp, Cannabis indica
cccaagagggaatacaagggaaatcagaactcaaatggctacaaaggtaaccattcaagatccaattctagaaactccacaggagggccaagctctaatggagctgcaggaaagcaatgttattattgcaagaaggagggccactttagagatgagtgtttggctttgaaggctaaactgaagagggaaaatcatcacaagtctaggaagcaaggagttgctgatgtagctgatggctatgggtcgtctgatgcacttacagtgtcatctgatgttcttgtgatgtctagttcagattcaggtggagattggattctagattcagggtgttcatttcatatgacaccaaacaaaggactgtttaggactctttcagagagtcatgggggctcagttcttcttgggaacaacaaagcgtgtgagatcaaaggtgtgggaacaatcttgttaaagaatcatgatgaagtcatgttgaccttgcagcaggtcaggtatgttccagatctcaaaagaaatcttctctctattggtatgtttgataaattggggtatgttgtcaaagttgaggaaggtgtaatgaaaattgcacaaggcacaggaactgtgttgagaggaaggttgagtaatggattgtatttcttggatggaaagacaatatcaggtagtgcaacacctattatggactcaaccaaacacagtcaagtaaggctatggcacctcagattggggcatgtaagtcagagaggacttgaggaaatgaacaggcactactacaatttgggcttttagtgacactatttagtgacacacataaatgtgcgcgtcactaatgagttaggagtgatttttagtgacatgcagaagttgacattaaacattcagtgttattcacctgtaatgtgtgtcactaaaaatatgaagtgtcactaaaagatcaaatctaaaattttataatttttattaa

SEQ ID NO: 341235 - DNA, 1500 bp, Cannabis indica
aaatagtcttttgggcacgccttgttgagttcagtgaaattgatacatacttgccatttcttgtttgacttgggtaccagcacaggattagcaactcaggtcgggtagaaagcttcaattatgaaattattgttgcgtagcttctctacctcttcttttagtgccagggctcgctccttgtccagcagtcttcgtttttgttgaataggctagaaatttggataaatattcaggacatgtgaaattatagaaagatcgattccgaccatatcctcatgtgaccatgcaaaaatatctaggtttgctctcaaaaattttatcagtgctcattttacttcgagcaacaaaccttttccaatcttaagctttctggtcggaatatttgggtcgattttgatttcttctagttctcccactggacaaacattggtgtttggctccccaagtcggggatccacatcttcatccccgccttgggcagttccctatttggcaatattttttcccttgtcagaactttggctagaggatacttcctttttagccttggttagagcaaggttgtaacactcccgagcaacttgctaatttcctctcaggcaccctacccccttctttgttggaaacctatggcatgagtggaatatcgatgtaacagcctttaagtcatataaagcttgtcggcctaacatgacattaaatgctgatagaacgtctaatattaaaaattgtgtcattatagctatgctctttggagcttgcccaacagtgagggataggcgaatttgccctaaaggtgcaaccctctggccgaagaaaccatacacgcgctggaggcatggagttaagtctttgagttggagcaccatattttcatacggtatcttgaacaaaatatttgtacaggctccattatctatcatggttcacgccaccatcttgttggttacctggacttctacaaccaaagggtcgttgtgtgggaaattaatcttgacagcatcttcatcacaaaatgttatggtgggccctcctgcccgtggtatctttggcttcctctcttctacagccaaaatcacttcttcttgctcgtgctaaaatgtttgggcatacctttcccgggctttgcctgaatctacagctatgtgcggacctccaatgatgacttgcaaatttccatctactggtggtggtagtaaatcttgattgttgtcagccatttgattttggtcggccttgacatatttttgtacgtgcggattattctcttatcaaaaattcaatttcccgcttcaaattattgcattccttggtgtcatggccgtaatccccatgaaaacagcaaaacttggtcatgtctctcttgcttacatcttttttcatgggtgcgggcttcttgtactgagctaatgactgagtagccatgtagatagtttttatatcttctgtcaggacagagaaagcagtaaacttggtaggattttgttggaaattatttta

SEQ ID NO: 341236 - DNA, 503 bp, Cannabis indica
agaagaaaaaattgaagaacaatacaaacttacattgtacggaggacatctcatgaatcttctacttgggtttgcatcagtccaagaggtgaaagtcatagctctcttcggaggacacaacgatatttcatagtcacgtaagccattttcttcccttcttctgttcttcgtccttttagtctttttctttttttgatcttcgtctccttcctctttctcttcttcttcgtctccttctttttatgttcttagttttttttagatgtctgttcttaagtttagggttttgtttatattttaaaggttttatttttattttaattactcattttaatttttacacttcaagttttgaaaaatatggctacgtaggataattttttagtgacctgtcattgcgacgtaggtaaaataaggagttaacgatattgaggagattagggctgagcataaaatccaaaaaaccgttcaaaccgacctaccgaacactgctggaactaaaa

SEQ ID NO: 341237 - DNA, 233 bp, Cannabis indica
gaagctgcacgcacccgagaaaatcgggaattcgcgcgtgtaagggaggtgtcacacctcctgatttttttcaattttaaaaattcataactaattcaaataaaatcgaaattaagttctgtaaaaaaaaatgaattgcttaattttttccatactatctaataaaaataattccagaacgaaaatctaattattttacgtaaaaaatttgcaaacatcaatcaatcatcaat

SEQ ID NO: 341238 - DNA, 794 bp, Cannabis indica
gggatccaaggatcccaccagattctagtatccctcccattggccacccttttacaagcccctttccgaaggattgagcttgctttaactacatttttccaaaaccaggagtccgagtctttataattgcagttgagaaactcttttcctctaaggtacttagactccagaatctttgagcataacgactgtttgcccgttaaaaggttccaaccccacttagccaaaaaagctaggttcatttcctttgtttttcgaaaccccaggcctcccaatgatttgggaaggcaaagcttatcccaggctctaaggtgcaggccatggtttcctttctcgaatccccaccagaaatcacgagttagaccatcaatccgattcacaaggcgattagacaatttggtagtctgcatagcataaataggcatagacaagcctaccgatttaataagagtagcccggccagcttttgataaagttttggccttccagccttgcaacttggacgtgaggttgtcaagaatgaagtggaagtcagcgtctttctgtctggatcggaacaggggtaaccccaggtacttggtaaccccttcaggggaggctatacccagagcttctttgattgctctcctcataccatctggggtattcttgctgaaaaatatagaagtcttagctttattgatctgctgcccagaccactcacaaaacttttccagacagctccaaaagcccttagcctcaattaagttggcacggccaaccaaaattaggtcatcagcaaagaaaacatggga

SEQ ID NO: 341239 - DNA, 583 bp, Cannabis indica
agcatgcaccctagcctagttaattctacttaactaagcattaaaacacctctgcaaactaacaaaaacatccagcaaatatacagaaacaaaacatggcattttctctcaaaatttcataatttcacatagaaacctctagcatgctcaacctagtaatcaagcatcaaaacaaccctaaactaacatgtttatactcaaaataatcactagattacagcagcaacaacaacataaaatccaacatgcatttcatccaatttcaccaaaaactcaagaaaactaactagaagagtaagacaagaattaccttgatttagagacacacaacaagctaaaatccacaagaatttgaagaagaaaaatcacccaaggggctgcctctaatggccgaatagagagagagaggaaaagagcttctttttttttttttttctaatttttgactaagtttggaaaatgaaggaaattaaaatttaaagccataatataccatttattaaatcctttttcagccaaagcaattaaacaaataaacattcaattccaattaaaagtcactaaaagacaaaacactaatggg

SEQ ID NO: 341240 - DNA, 563 bp, Cannabis indica
taacccttagcaaccagtctagctttaaaagtttcgactttgccaccagcacctcttttcttcttgtagacccacttacatccaattggacgataatcatcaggtgagtctacatattcccaaactttgttctttttcatggaatccatttatgaatccatgccggctgaccattatttgtgttcaggacttgtcattgcatgtttataggttaatggattgtcatcaatactgtcaccaacgaccatattgatttcaccatccaagccataaacgagatggttttataaaaaccctcccactacgacgaggagtcgtgaccttctgaacaagaacatttttggtagatttctcaattgtaataacttttgtcgttatactgagggagtgggattgtcttctacttgagtagaagatgatggaacattaaaaggagttatatctgaaagcatttcttctaacactactttacttttcggcttgaagtctttaatatagtcatcttcaaggaaggtagcatttgtagaaacaaatactttgttatccttgtgactataaaatag

SEQ ID NO: 341241 - DNA, 566 bp, Cannabis indica
taaagaggaataatacctagtattatctagcataatccctaaactcaaaaaaaaattagaattaactaattccatcatatttcacaaaaggacaaaaatagcgaaatggcaaaagaccattttcccctgcatacaccaaaaagcataaagtcacctaggggtatttcggtcaaacctaataccgtgaataatctcaacattctcgatgtctatctagcttacctcgctattaataaaatactaaatcataagaaaatatgattctattggccaaacgtcgcgttccacagttactggacataaaaatatgaaaaatcataaaattcatatttaatataaataacacacctagaattcaaatatgtcttcaaaaattcataaatcataactaaaagtttaattccaaataaaacccacattatctgctaattctcatactaaaatttagcggtctttacacgagagatgagtgaggtaatgatcaatattctggtttttttttacatttttaagtttttttttttaacttttttcaaaaaatagaaaataataattaaaaatataat

SEQ ID NO: 341242 - DNA, 936 bp, Cannabis indica
attttcaaagttggataggttggatgtctttgaacatggacaattgggtgagaaaaatcagcatagcagctgctgccgcaacctgctactacctttggagtaatcgaaatagatgtgtttttgaggggtattcgcatagggacactcgcattgttgctgatattaaaagtatagtaagatatagagttcaacttgtaaataatagaagattgaatagagttgagagcaggtttttacagattattcaaatgtaattagttggttgtttgtttcggctgagggttgtttgtcccttgcttgattgttttgtatttgtttgttcttgattaatgaagttctttccttcttagataaaaaaaaacaataattaataaaacaaaaaaaataatacaataattaataataaaaaaatacaataattaattattaataataaaacaataattaattaaacactagttaataaatcaatacaaataaaataatacataaaacaattactaaatcattaatatttaaaaaaaaacgaaaaaaaaacgaaaaaaaaaaatcagctcgggtccgactgggtcgtgattggtcccggactaggagtacccactcggacccatcggacataactcctgctgcccatacagaacactccgaacccccagccatcagacccctttaatcgtaccatcggacccgagccaaagggaccatcagacccatactcgaacccataatcggaccatcgtaccgacctgcacccatcgggccggccttcttccccagatccgaaggccattttcaccattttcacagtcggaatccaattttcacggatccgaatcccattttcacaataaaattcttaaatctaaccaataatattccacaaacaatctcaaacaaaataaatctttaaaacctttctaaaaaaacaaaaaaaaa

SEQ ID NO: 341243 - DNA, 537 bp, Cannabis indica
tatatgtttatcatattttatgtgttttatgttttattattataaaaaatctatggtataataatttttgcaaatggataataccacataaacacttagaatttaaaattcaatgtttatgaatgttatacccaaaattcggctggaggacacgtgtcaagataaagggaatgtaaattgatgcaaatacattttatggaataactcattaaatacgtaagtatcagaaaatatttgtaacccgctgaatgtaagatcttaggcgagaaatcaatgtacaaactggcaattagtatattagcgagaaaccatatgtcgctaaatgcgcatagcgaggcaccaaagaaagcgacacatatcaatcgtgaaattccttagcgtacaatgaacaaactaagtgtaaaagtatgatcaactcaagaacaagtaagcaaggtgaccgtctcgttatgggaagacttcgtacaacctcatcccgttagcgtcagcgaggcttacaatcctggtgagccaaaagatagcattcaaatgagcctc

SEQ ID NO: 341244 - DNA, 604 bp, Cannabis indica
tttgtcctcacttgtacgcttttcgagatgactccacagaagattcccaccttgagattaccctaagttaagtattcttaactccaaggtaagctcatggtgggttatcacaaagtagatgcttctttgtcattcctacttgtatttcttgttttcatcccttgatctcaaagctttgtatctgtgttaggtagaaatcctgaaattctctttttaacacacctacaaatacctcaagtatattctttgttttattgacaatcccttggtatgaactaccactccaacttgtagtgagtctctcgttgatggtgttgattcatcaacatctaagactcttatattcttttcctgttattaccactaaggttttactccatgatttgtacgctactattgcttcgttgcaatcatcaatatcttcatacttggttaatcactctaaaactcattttaccctcatttatgtagtccattgtttaataaacaacctactttgtgatccaacattcaccaatcactcaaatacatgtccattaaattgcaactcaatttataagtgtttctcccaatctaggtgagtatgcctttccatcattgctta

SEQ ID NO: 341245 - DNA, 581 bp, Cannabis indica
actcaaacttaactttttcttttcttatttttcttgctaaaaatttttttttttttaattttttaccgatagaacaatttcagcccatatgatataaaaatgagaaatttttttaattagatagaaaaatcaagcataaaaactcaaaattttcaaattttatccatttatgggtaatacccattaagagtgcacccatacatatatattagtttaatttatttaaatttttattttatatataataagccctcattcaatttgtatattaagcccacactcattttatttctacccaactccaaatgtcaacataataaattataggaattatttcacaaatacacaaaaataacaaaaaaaaattatataaatacaattttacagaatttcaagtatttttacgattttttttaattttatttatagaaaatacggtctttttatgttgtactcttgttaatttgttgttgattttttgttatttgtatgttattttttgttattgttttgatgttatttagatgttattttcaagttacttttatgtagttttcttgttgttttcgtgttgtttgtat

SEQ ID NO: 341246 - DNA, 781 bp, Cannabis indica
aatttaatattttattagttgtgaatattattgtaggtaaattaataataaaaatatgggtaaatatattatagcatattgtttaattattattattaataataataatattattattactattactattattattattaatactaatattattattactattactattattattatttattattattattattattattattattattatatattattatttaactaggtaggtatgtatatatatatattatttttttgtttttaaattttaagttgttaatctagggttatattagggttaggattatatataagatgtttatatgattgtttagggtttgaagggtttagaaacggggtgagaggcagagacggagagagagaacgaaaccgagccgtgaagaaaaagtgagatttcgggtttgtcgtttgagagtttgtgggctgctctaaatcgtttctttgattctaaatcctctcataaagcttttagaatgtgatttagaggttggaaattaaactgttcgaattcaccatcatttacgttcaaaaatacggttcttgaaacggacccgaatttgaacgtgtttaagttgtttagaagatcaaaggaggttgtgtttaagtttatgggaccctaaggctcggtttggacgaaaaataatggagctttgacgtcaaaaacacagaaccaatattttgacaccataaacggcggtacaccggagctaaagaagacaactcttttaggacgtgatttagttgtttctttggacaa

SEQ ID NO: 341247 - DNA, 715 bp, Cannabis indica
cacgatttgggaatcgctaaaagcctgtagatactcgattttcatctcaagagcgagtttcaatcctgcgattaaagcctcatactcggcttcattgttagatgcagaaaattcaaaacgtaaagcagcgtgtactttaaaatttctgggactgattaataagatcccgccaccagagccttcgctatttgaggctccgtcgacgtacaacatccacgcctctctattggctatagcagcgtcgactttgtcttctatgagtgccactttggtgctggggaattcaaggataaaatctgccaaggcttgccccttgatcacagtttttggtttatacttgatgtcgaattggcttaactccactgcccatttcaacaacctccttgatgtctctggttttgctaagacttgcctcaaagggttgtttgtcaagacctcgatactgtgagcctggaaataaggtcgcaattttctcgacgatattaccaaggcgaacgccaattttttcatttggggatagcgggtttcagcatccagtaatcgtttactgacataatacaccaggtatggtcgtccttgatcttcgcgtattagtaccgaactaatcgcgtattctgacactgctaagtagatggataggacttcgccggtcatcggctataagattgaaggttgccccaaatgcgtttttaaggcttgaaaggcctcctcgcat

SEQ ID NO: 341248 - DNA, 487 bp, Cannabis indica
taagtcggtgtccatctatcttgttgtctctcaatgtattttgtttcatgtgtctactaaacttaaacttaatgttagagatattatcacaatggaagaaaattaagatattataactctattgtaatataatataaggatcaataaagagattaaataaatattataatacataatatacaatatagttacactatatatgtcatatatatatgaaaggtaaaagaagaagatacaacacatgttataatatattcatatatatgtatatagcaagagaataatatatatgtatacactcactcacaaccttgagtgtagaatagtggggatcactatgacttgaacaaggtattttaccctttgtccaaaaatttatttccccctatctctaagcactaaggtaactctcatggaaatagctttgggaattatcaagccttttacggttttctaacaaagtgctttcttgatagaaaacttctct

SEQ ID NO: 341249 - DNA, 950 bp, Cannabis indica
cccccttaaaagcgaatatgggaaatcaaaaataatctagtgccactgtcaaccgtggtgagagaaaatcatatttcaaaatatcaattgttagagcatttattagcagaaaactaaagggacccccagtcagcctcacatcgagtcgcgaacaggcgcgcttaacatgtgtcacccattcaaatggagaagcaactcggatgaagtctacacgcaacttcgaaagtcccatacagacttggggggcaaatgttatcccaattttcgcactctgacgtggcatcacatgatggtgacgcgtggaaccgattttgagtatctgctcggagaatatagtcctaacaggatgcctcatatccatgtctgaagcaaagcgatcagcaatccgcgcagagcgatcaactcttagcaaatttagctttttcatcgtgagtcatcaaagaaatccctataacttgggaatcagattgcagagatatggcaagctgtccaaatcccacgatcagtgtattctgtatctattatggagtctttctgcttatatccattgtaacaagaagggaaatacttcttcttcaagctcatagccttataaatagtgatgcatattcactgggcaaagggttgaaaacattctagtagagagatattatctaagaattcatattcagagatactgttgtaagagctataagaaaaggaatctttctccttattcttgagttaatacaaataacgagaattaggctattatcgaactacccgggggtgaacctctataaaattcttgtgtctttatattggtttacttcatatcaatcgctataaattacttatcgcttagtaaataagactcactgtcattggctaaaagcgaagtcaacacatataatcatgaaataaattatttgaaccatgcaacataaagggatttttgatcttttattaat

SEQ ID NO: 341250 - DNA, 1843 bp, Cannabis indica
tcctgaaattgagaagacttgatgagaaacagaaggaacaaaaggcaagagagagtttcagcacctgctgaaatactagaaatcatggctgacaacgctaatgttgcaaataatggaggaaacaacggtaataacggaggtgccgttgaagatcaagctaatggtcgtagcttgggagattatatcctcccaactcttacgggggtccagtcatgcatcaggccaccggcagtggatgctaacaacttcgaaatcaagcctgccatactccaaatggtgcagtcttcagtccagtttggtggactcccttctgaagatcccaatctgcacttatcaaacttcatggaactatgtgagactttcaaagtcaatggagttagtgatgatgccatccgtctgagattgtttccattctcgttgagagaacgagccaagagttggttgaactccttgccaccaaactccatagccacatggaatgacttggcaacaaaatttctgtctaagttctttcctccagcaaagtctgccaagttgcgaggagaaatcaacaacttctgtcagcaggataatgaatctctccatgagtcttgggagaggttcaaggatctcatcagaaagtgccctcatcatggtattgagaagtggatgctggttcacaacttctacaatgggctggtaggtaacactagaactcttatagatgctgcagctggtggagcatttatgaggaagagtgcgaatgaggcttatgatctgttggaggagatggccctaaacaatcagcagtggccaactgaaagaagtcaaacgaagaaggtagctggtgtgctagaggtggatgccattacaaagctgacagcctaggtagaggccctaacaaagctaatagctgtgcaagccaaacaagctcaagtggtctctgagctatgtggaggtcaacatcacttttctgagtgccaggaagatgtgaatgatttgccaatggatgaagcaaaagccattgggaattattctcaaaacaacaactatgggtttaatcaaggaggaaaacgaaggaacaatggtttctatcaatagagaaatcagaaccagtcacagaaccaacaacagactcagcaacaaaactctagtggaaattctggtctccaaacagatttattattgcagctcatgacagagacgagatattccattaaagacttaaaaactcaggtggggcaactggcaactcagatagcaactcggcctcagggaaacttgcctagtacaaccgaagtgaatcctaaagaaaactgcaaggaaattaccctgaggagtggaaagaaatatgatgggccagagatgatacaaccagatgaagagattaaagatcaaccaaaaagaaggctactgataatcttgcaccacaacaacagtctccaccagtcagtattgatcatcatgtgaagataccttatcctcagagactccgaaagaccaacctagacaagcagttctcaaaatttcaagaggtctttaaaaggctacacatcaacattcctttcactgaagctttggaacagaggcccagatttatgaagttcatgaaggagattttgtccaagaagagaaaaatggaagactatgaaacagtggcattagctgaggagtgtagcaccattctgcaaaagaaactccctcccaaactcagagatccagggagtttcactattccttgtaccattgggagaattgaaggaataaatgcactatgtgatttaggagccagcattaacttgatgcctcaggttttaaaagattgcagttgggggaagcaaagccaaccacggtaactctacaa

SEQ ID NO: 341251 - DNA, 1296 bp, Cannabis indica
aggaataagaatgcaattcttggattcctaaaggagaaaatgcagaagaaatttttttcttgggaaagccgattattgtctaaagcgggaaaagaagtgttgattaagtctgtggcccaagcgctccctaattatgctatgagcgtatttctcctcacaaaagagatttgttcaagccttgaaggaatgatgtccaaattttagtggaaatctcagtggaactcttctcaaggtgtgagttggatgagttggaaacgactttgtagacacaaacatgaagggggtattagttttagagatcttcgggattataatttggcattccttggtaaacaaggatggagacttttaaccaatgaaagttctttggtaagtaggatttataaggcaagatattatcctaatggaagctttttctctgctactttgggtcataacccaagtttcatttggaggagtcttttggaagccaaagacttggttctgtctggtgcaagaagatatattggtggaggaaactcagtcagtatattgtttgatccatggttgcctgatgatcaaactccatttgttagttctcatcaccttgctttggagggccagctggtatctagttttttatcggtgggaagtaaacaatgggatgctgaagtgattgatgatttattcaatgatagggataaaaatttaattttttttgttcagttgagtgaaaccgtggacttggattcatggtactggagcagatccccttctgtttttttacactgtgaaatctgcttataaaacattgtagcagaacaattgcaacttcatcacagatcagcagaaagaaggctataagcggctgtggcagtttgatattcctcctaaagttcagcacttcttatggcgtgctttgtcagagtgtctccctactaagattcagttaaatacaaagcatgttaatgtagagacttcgtgtcctttctgtagcttagcagaggagaccatctttcatattctactgggttgtggctttagtaaagcttgttggaatttatcttgtgttagtactgctactatacgtgagaatgacttcaagctttggttctttagtttgcttgattcttaacctgtagatgttatccgagaggctgctatggtaagttggaaaatatgggctgtgcggaatgatgttgtttggaatagcaaattttgttctgctttagaggtggtgcggtcagctagaattactcttgaccaatggagtagtgctcaatcacaaaaagggggcattgttagtagatgatatta

SEQ ID NO: 341252 - DNA, 1468 bp, Cannabis indica
ctagtacgcggacaacacgctcgaggagaactcagcatgggagtggccagaaccctgggacaagggatgaagagctcaatcgtggaggtgcccagtctatgggagaaggtacttatgaaacagaaaactgctgcttgagatgccgtctggaagaggcacagcatcggaacactgaattagagcgtgatgcagccttagctagggtggtacagggtacgaatgctcaaaatcaacctgaacctggagtgaaaagaccataatgcaggcctcgtggctcacgaactaggagacaggaaaatgccctagaagaacaacccaaggaaaatgagataccccctgaaaatcagaacgaacactcagatgggaggcaaccggaaagtaatgaacgagaaattcctcatgacaatgaggaggatcttgggactcacccgggagaacgtaggtcacctgcgataaatcactagtgttcttccccaacccatagagcaaggactcgtatagaccctaatgggggaaatacgatgaaccgtagtcagggggaaagaacagagcgtgaagaagcaagtgtgacctcaaggcggtcaagaacccgcagttgatcaacttgaagaggagaaagtactcaatgagctaatgattgagaaagtatgggaaccagtaaatccgtgagtcgcttaaagacaaagtctatgagtaggacatgatctgtgagtaagacaaggtttgctagcagttactcccaaccagatttgcgagcgcacttgaattggaagaaacctgaccttcattatcagcttggtccaaagcaagaggatcccatccaattgtggataaacgagctggaggacaagttcaggagatatcaagtggggtaactagggagacaatctggatacgactcagatgaggagcttgagccgtatcatccagatataacgaataccccttttccttcaggatttaaaaacccgcatgtctcgtcatatgacggaaccactaattcagtctcacatttgaataactttaaaacagtaatgcgggtgagtaaagtgatgagcaatttacgctgtattttgttccgcacctcgcttgttggagcagcgagcagctggtttaacaagtctagtcatcattcattaacttcttgggagcagctgtccagggatttcaagaaatagttccaagctgctagggatagacgacccgaagcgaccttgctaaccaatataaagcagcagcccagtaagacacttaaggcatacttaagtcattttagtacagctgcagctagggttaggaatttggatgacagaacacaacttacagcccttcaggcggggatctctactaatccattaaccacaggggcgagttgtgggatgacttacaaggtcgtctagtaagaagcatcactgagttcaatgaaagggctcaggtattcgttcggaaagaagaagcccgaaaggaa

SEQ ID NO: 341253 - DNA, 569 bp, Cannabis indica
tgttgaacatgatttttggaaatatttatggcactagtgctatcacaaaaaattgttaaaacacccaactcaaatccataatcaatcaatatttgtttcaaccataacaattgagtacaacaactaccagcagctatgtactcaaccttaatagtagacaaggaaatagaattttgtttcttgctatgccaaaagaaaagagaagtcgagcgggcctatataactccaacgaaaaataaaattggaatggaacctccactcatactcttacgatcatcagcattgcctgaccaatctgcatcactaaaacaagccaagctagaattagtgtctttagaataccagattccaaaatcaagagtactattaacatatcaaataatcctttctactgtagaaacatgagattccattggattactttgatatcgagcacatactcccacactataactaatatcaagatgactagcagtcaaatacaataaactaccaatcatactacgatatagagtagtgtttacctttactccatgttcatcttttgtcaatttcaaagtggtgctcat

SEQ ID NO: 341254 - DNA, 651 bp, Cannabis indica
agttataaagctagtcaactagctcaacacataacagtcaactaactaactaaactaccttccctaactaacttcaaactcttgataatcctcctcaagatggagagctaatgctcattaatctcatcttgtctttgaagctattaaactgagtagggaagagagctttggtgaaaacattttgatgaaacatggctagttttaataaccccctgctgcacttttttccaaactaagtgacaatctatttcaatatgcttggctctttcgtgaaaaattggactagcatctatatgttgtgttgttgttttatcacagtacaacatggcaggtccttggtgttcaatgttgagctctttaaggattgataacagccatacaagttcacatgttgtatttgccatggccctatattcaacctctgcagaagacctggaaatggtctgttgtttcttacttttccaagatattaaggaatcttcaagaaaaatacaaaaaccagtagtagattttcaggtgtttgggcaagcagtccaatctgcattagtataagccttgagtttcgcttcaaaatttgtagggaagaataacccatgtaaagcccgcttagttaatttggaaattatcagttgtttatgattaattatgaaa

SEQ ID NO: 341255 - DNA, 928 bp, Cannabis indica
ttttttaaaaaaaacttaattcaagactcggatcccttgggacctgacccaggcccaggcccagacccgaaacccagacccgcgcccaggactgggaccctgacccgagacctgtacctggactatgacctgggaccaagacccgaacacggactcgaccctggacccggacccaaacccgaactaggggcaggatcaggacctgcacccagacccggacataggacctgggacccggactcggaccaagatcgggacccgggacccaaaacccagacctgaccctgaacccagaccgggacccaagaccaggatcgaacctgggactcgagattaggactggacccaaactcggacctaaacccagactcggacctcaacccgaacccaaacccagacacaagacccgaacccgaacctggacttggaccgggacccgatccggactaggcacccagacctagacctagaccctgactcgggacccttacccagaccgggaccgaacccgggacccgagaccaggattgggaccgtctcgggatttgggacagggactcggaccggacccggacccggacctaggacctagacccaaacccaggacccggacccggacccgaatccggacccagacccaagaccctgacccggacccagactcggattcggacccaaacttagacccgaacctagacccgaacccaaacccagaccgagactcgaacccggaccgagacctggacccaaacttggacccagacctgacccattgttggtgttggggtagagtttattaaaaatatattatctttacacaatctattgataaatttcaatgccaaacatagtattgtatttaataatactaatacaatgttaaaatggatatacaattaaaagctaatattaaaattctttaaaaaaa

SEQ ID NO: 341256 - DNA, 2125 bp, Cannabis indica
caattattgttagcgaggcactaaatacaaagttttcacgcctcgtttttgttagttggaagttctccgtcgagtagatagttgactataggagtcatccatgtaggagagctgtctatcatctctacgtcttccatttcacatatacttggctcgcttagcatctccaccggaaccaagttcaattcatccaagtccttctacgaggccagttttgtcaaggcatcaacgttggagttttgttctcttggaattcgctcgattttaaagtaattgaatctttccaagttcttccgaaccttctctaaatactttaccattttcaagcctttggcctggtattccctgagaacccggttcacaatcagctgcgagtcactatagcagatgagatttttgactttcaatgcttcgactatctttaagccagcgatcaaggcttcatattcagcctcgttgtttgatgcgtcaaattgaaatctcaaagcatagtgaaacttaaagccttatggtgaaattaatattacctttgcacccgagccctgctcgttggatgcaccatctacatataacttccaagtgtccgcgtctcggtgaataggtagaatttcttctggagttatgccttctattaagaagtctaccaaggcttggcccttgatggatgtttgagagtggtatgttatgtcgaactgccccacttctattgacctttttatcaatcttctagaagcatctggttttgataaaacttgtctcaaggtctgatcggttaaaacttttatagggtgtgcctagaagtacgaccatagcttgcaagacgcgtggactaggcacaaaatgagttttttgagagggggatatctagactctgcccctagtaatcttttacttacatagtaaataggttgctggtgtttaccctcttctcgcactatagccgcactaatcgcatcttccaagatagccagatagaggagtaacgtttctccaattattagtttttccaaaactggaggggttgctagatgccgttttatgttctgaaaggcctcttcgcactcttttgtccactcaaatttcttgttgcctcgcaatacattgaagaatggcaaacacttatcagttgcttcaataccccctgcgttgactatgaatcccaaaaactttcctaaggagactccaaaggaacacttttttgggtttaacttcatattatacttctttaatattttgaagcattccgcgaggtctgtggtatgattcccacttcttattgactttactaacatatcatcgacgtaaacctccatgttccgcccgatctgatttgcgaacatctcgttcaccaatcgttgatatgttgccccagcgttcttcaccccaaacgacatgactttgtagcagtaaagttccatgttggttacgaagctcgtatgttcctaatcggggacatgcatttttatttggttatatctagaatatgcatccacaaatgacataagctcgtaacaagtagttgcatccactaactggtcgattcggggtagtgggaaacagtcttttgggcacgccttattcagattagaaaaattaatacaagttctccaagttccattgggctttgggacgagaacaaaattggctatccacgagggataaaacacctcgtgtataaagtcattgactaataacttgtccacttcctattttaacgccccttgtctctcagaatccaagaatctccttttttgcttttttcaggtatatctctcttccttttttctatttaaagctcagcagtttgtttccagattatctttcacctgtattttttttctacttttgttcttttatctttctcttttctgtacctacccatggctaacttacctacttcccaatccacccacttaaccgctgaagaagctcttgtccacgatttcgaccatgtttccatacatccaaaacctcagtcccagtcctattgtttggttgttaagatcttgtctcccaaaactttgaaaattgattggattcagaaagctatgaacgaagcctgggttgcccgatgccccttcacgttctctgaataccattcaggccttttcctggtccagtttgg

SEQ ID NO: 341257 - DNA, 922 bp, Cannabis indica
gtacaaaggtttggtcgagcccaaaaccccaaacaggcaaaaaaaaaagcacactcgcgaaatagtataagtgaccaagagtcataagtctgctcagtcacttgggggacatctatacctgtacaaaacatttcgtaaaaataaaacaaacacagttgcacgatgattataaacagagatgaaattcagtaaagataacaaaagcatgtaaaaccgggattaaaggctgaccggtcagcctgttgtctaaaaaatgaaaaataattccaagtttaaggaccgcttggtcgctcactttgtcttaaaaaaggccttatggttgaacagatataaaagatatagaaaaagaaagtattcaaacggctggagtcccaggctctttgtacgggtcttttgggtcagttggagctggaggatcgtttgtctgagtgggaggcacttcaatttttaggccagaggtggaagtggtcgcctcggagtccccgtaggccacctgagaagtgcagtactagagaaacatgtctttggtatcacctaagtaatcaaagtttgcctggggattagcctttcagaagtcatagaaaatcttgagaccagctgtctctaaggcattcactttccctccgagccttgccacttcggctctatgctgctcgacctttgacttatacttctcaacctcagcttcaagctcctcctccttggtcttcttctcttcttccaacctgtgcaagaaagctcgaagaacctccctttcctcttaaagggtggtcacttcctttgacaaggaggcaatggcaactttaagttgatcagaggcatgtagatctttagtcagctcggccaccttcttctcagccacaagaagtttcttgttgacctctcccaattccatccatacagccccaagctgaaccctggc

SEQ ID NO: 341258 - DNA, 809 bp, Cannabis indica
atggtaatgatatactttcatgaaatatggatttaaaacaatgaatatggtttgtgttgatttggatatgttcatgttactttatgtgttatttgatgaatgtatgtgatttacgaaaattttccatgcaaataattttattttcattctgaaaatattttatttggattccttgtgaaaaattaagcaagtttaatttttacggaactcaaatccgataaaaattgagaaagttgtggttgtttgaaaatccgggtgcatatgcctcaattgcacgcacgagtcactcggacaaggtgacgtgcgcgcgcgcatgaaggggacaatccctatctgaagcttcagtctgttggaatatgttttaccaggatctagaatttactaccatgtatgttattaaacatcctatatatgaatttctaaaacaatgtaaataaacacatataaagtttcagaaaccttacagtgggtgtagcataatattaatggctccttccactcagatctctaacccttgtatcctgtctgtagtagggtatcactaagatctgagtctgaatctcctcttgaaactggattcttcacagccttacacactatgattgagtaccatttgatgtgtgtgggcacttacgctatcactgacgggtatgaaaatatgaagagagaaagagatcaagagagtggttcgaaaatagcaagagagatagctcaggaaattttgactgaaggcttgaattttcatcatctttaagtgtgagccatcactatctatttataggcaaccacctaggcttaggttagattta

SEQ ID NO: 341259 - DNA, 486 bp, Cannabis indica
gaaatatgtggtggagccgtcgcgtttgtggtggtcgagcactcttgttcaaatctccctattcagaaatagagacaactatgatccgtcgtcataaaccccaaacgccgatttcgtttcactgcgaatctctccaagcgtttcgaagtcgctgctatgcgccagaccaatcaaaagacgtgcctcgaccgtgttccgatggtgtcggtgaatcctgaagctcccatcatcgatgacgacaaactgaagcccaagctctgtgcagttgtcggcagtttcatggtcgtttaggttcgtcgtcggttgccatcggtggttgcgcatatgaatagtggctgaagtggtagtccgtttttcatgcgtgatggacgactttggcgcttcctttttctgtaattgttttattattattattattattagtaatagtagttaactaaatgtcttccttatattttaaatgatcctaatataattatttttcta

SEQ ID NO: 341260 - DNA, 902 bp, Cannabis indica
ttttctcctctttttaggagttttattgaacattatgacaattttattattgttgttgatggatatgatatgataagaatatagtacttcttttctatcatgtaagagttggagttttcaaagagaaaatatgaacggttaccaaatcaccacaaatttgtatgtgagctaaggaaaaataaagaatttgtattgtataatattgtgtcggattctattgtataatattgtgttagattgtattgtattatattagtactatttaatacaatatacactatgtgtttggtattgatttgtattgataggttgtttacaataaatccgacctcaattttggccccggccctagatccagaccccatccccaatggggtttgggtcaggatttaggagtttaaggttcaggttcagggccagtgtccaatgtccgaatttggggctggggttaagatgcgggtccaaaatccaagttccgaggtcttaggctagtgttgggtcacgaggctaggctccatatttgggtctaggtgccctgggtctaggttcagggtccagggccgggcctgagttgagatccgaatcaaggatctgggtctggggccgggttcaagtcaaggtctgggtccgaggccgagtctaggttcaaggtctatgtttaaggtctaggttcgggggcgagtctagagtctagagctgagtttagggtccgaggctggattcgaggtccaggttcagggtcagggccaggtccaagtccaaggtctggggtctaggtctaggtccggttctggggttcgagttcaggtctatggtcgggtccgagtctgaaccaggtccctaatcaccgacccttattaaaatcttatgatacaagctaaaaacaaactattcaatgccta

SEQ ID NO: 341261 - DNA, 1186 bp, Cannabis indica
tcctgagtttgagtctgagttttggtacgagtccgggtctggttccaggtctaggtctgggttttggtctaggccaagttttcaatccgtgtctgtgtccgggtctttatctgggtctgggtctgggtctacgttcgagttctggtacgagaattggttctggtccaggtcttaggtcacgggtcctaggtccaaggtcatggcgaaagtctgggtccgcgttcgggcctgggtcctgttattgatcccattctaggtctgagtctgtgttcggttccttgtcttgatccgattttggatcgaggtacaattcctattccagggttcttattctggttcttgttcctatttcgggtctcgggctccgagtttgggtttgggtcctggtctagaaattgttctaggttcgggtctttgtacgattccaagatctagacaccaactacgggtcaggtccaagcctcaggtcgtgggtcaagatgcgcatcccaatcttgggtccctgtctcatttccattcggatcttgggtcccagtatatgtctgtgtctgggtctggggcaaagaccatggttgggtctttggtttcagtcctagtcttgagtctttattttggatctaattttgagtttgggtccccaatctaggtctgggtccttggtgcaggtctgagtctcccatccgggtctgggtcctgggttcgggtctaggtccaagtccgtgtctcggttcgagtttgtatcccgagtcccgatctgagttttgattcagattcgcgtcctgatccgggtccgcgtcccgatccgggtctgggtctcggtcctagtcagattctagttcccggattcaaacctagactcggactcggaccctggtctggggtacgggtctaggtctaggccagggtcttattccgactacgggtctaggtttgagtccggatatgggtcctagatccaaacactgactacgggtcaggtccaagccctgggtctagatctggatcacagtctcgagtcctagtctagttccacttggggtccaaggtcccggtctgggtcctaggtcaaggtccgggtccaagttcatatcctgggtctcagtcccagttattgttggaaattattttaccagtatcttagatctactcacaagtatgtttattaacatcctaaataagaactttc

SEQ ID NO: 341262 - DNA, 756 bp, Cannabis indica
ttttgggtgttttgaacccagtcgccgctgcgactggatttggcagtgagaatgtctatttttttcgattttgttttcgccataacttttgactcggattccatttgggacgttctttatatcgttggaaagctcattccaagctgtattttattatctgtgttttgaatgccatgtttatattatgtgaaagtggatttagggattaaccctatatttgtaaatcctgaaatttgtgactaggattaccggcacttggtcaggagcaccagggggatttggaatctcttcgcttgcaggacatcaggtaagacagtagttgcatgtagagttatgcacaatggcgcttatattgaaatgttttacgtgagtaattagaaaccgggattagggttattgccctaaaatgagctgtttagcggcctagggttattaccctagtgatatatgatgagtaaatgctacgccatgttaattatatgattaaattgagaattagggttgtgcgttcaaggcataactgtgttagactcggtaactagagtcgagatgaaccattctaaggccttattgtatatagacgtgtgagcgcaacacgtaggtctatgttacatagacataaataggcatgtgagcgtaacatgtaggtttgtgtcatacaagcaattgtgaatgtcataaatgtttatataatgtgatatttatgattatcgatatttttatattgttttgctgggcttggctcacgggtgctct

SEQ ID NO: 341263 - DNA, 466 bp, Cannabis indica
tttcattaaagtgtccttcaactcttactgtaactataaagttaagacagaaaagaccaacctttggttggcaagcaacttaaggtgtttgtactcaaaacagtaaaaatacaagaaaattacagatgcaaatcaaaatatataataattttactttgctttaagcttgtatcttatttgttatttaaatatacatatatggatggattctttttaaactgttagttacaatttacaagttttattataactttttgtgttactatataaaaaaatatattaattgtaaaatatttacatgacatgaactgttaaagacttagtaacagatgaaaatggaaggttcaagtacttattctttgctataggagcttcaataagaggatggaaccattgtacaccaatagttgtaacagatggcactttcttaaaaaatccacatagagggacattactaattgctaat

SEQ ID NO: 341264 - DNA, 733 bp, Cannabis indica
ccaatttatcccaaactcctttcaatgtcttctttgtgatgagttttcttcgaacactgttggatagatacatgatgattgtgtagtacgccatctcctcctattatgctttttcctttggtttcttttcggccaataacttctcatctccaagaaccttagaaactttttggtgcacaacgatccccttcaaactttctctccatagagcaaagttcccagttccaccaaatttctccaatttgaatctcgccattgatgacattcaaagtttcttcaagattgcagcggaaaaaatctttatccattacttagctctgatttgtgagaaaattaagactaaaaggtatagaatcaaatcaataaaattttaaacaatcaaaccattagttatgataagtttagcaactagaaaaataggggcgaacagagtacaagaaaccaaaaataataaatgcataaaataaagaaaacaacaccaagatatatattggctcaagaccaatagatcgatgtgatctatggctctactctagttctggaacaccaccgtaaaacttctttattgattgagcaagaataggtacaatataatcgacacaagattctctgttgagccctcacaatgtgtttcaacactcacactttcacccaagaatattcttcatctacagaagattcttcttacaaaacccaaactcaatctctctcttttctctgcacctctctctct

SEQ ID NO: 341265 - DNA, 623 bp, Cannabis indica
taagatcagctaaaaaaacaaaaggacaaaaaacaaaaaagacaaaagatccaacattaatctcatagcaaagaaattaaagttgtaggattttttgcagggtcgaaaacatcagcccaaaaaaaaaacacaagaggcttcccttatcatatatatatattaatagtaaagtagtatatattatatatattatatatacattactcatctttaaccgcctcattactcatctcttttttttagaggaaacttgtgttgcttctcttgtactgtagtatgcataatttcatatacaaatatatatttttttatgaattgtaatgtatatggctgtggataaaaggattttcttttgtgtatgtgtttatgcagattgaatggaactccatactatgggccataaaagaatgacagtttcttcaactgtagagagtgcagtttcatctgaatgtgatgacgctccaccttctcgtgatgaattattttctattatctatgagaaagacagggtttacctttatcaggactcaatgagagatcatataatttctggccaaaatcttccattgcgttgtcattatgaaggcaatgattttgaaattgactatcgatcactttcaggc

SEQ ID NO: 341266 - DNA, 593 bp, Cannabis indica
cagcttctctcctttttttttcgaggttagcgtttgctgcaaccccacgaccctttctgaccggaggtggaactatatttattcgagagaaaattattattattagtaaatcatacattcactatttatattcagaacaatgttagatctgaaaaaatatgaaaacctgattcgcaggacgacggtaccctagaaggatcagggggatccctgccatcaccatccccaccatggtatgtcgctaacgtagctgacattgtactttactttgaagacggaaaaaaatgtaagaattcacaaaatgtgaaacacataattgaaagttcacacaaatgttaatgcgaaagaaattaaaaagtcatttaattgtaaaaagttttagtaacaaatgtttacaaaataaaagttacactgacgaatcactatcatttccatcattcaccaagtttacattttcatcctccacatgttcaactagtaaatcatctacttcttcagcaacataattttcatcaagttcattattctctatctcagaatccactaactgatcggacgattcaacaattactggaggttcattcgattgcata

SEQ ID NO: 341267 - DNA, 1009 bp, Cannabis indica
ttttagaaatactaatttcttttctttttttaataatttgaatattatttaaataatttttgttagaaataatttgaatagagagtcaagttgaaataattttattggaaacaatttaaatagagagtcgggtagaaataattttttaaaaaaatcaaatcaagcctagaatatagaagaaatttttttttttttaaaaaaaaagctaacctattcattttttaaaaaggtaaaaaaaaaatgagatcatgcctagattatagaaaaattaaaaataaataataaaaattctatgtgtaatacctcatgataatcaaataaactacaacaaattattaccattagattaaaaatcaaatgtttaaaaaataccctcatgagtgagagcataagtgatgctctcacataaaaattttccaataattatatatactttttaatttttaactttatttttttaagatatatttatttttatagataatgactttattagaccgtttaaattaatataagttatagtgagtatattaggcaagccattcataaaagtgggtatattttaataaaatataatatgaatgtatatttgattagtggagaaaaaaaaaagtatttctcaacttatcccaataattcatatggtctcatttttacactttaaaatagttcttttttttacatttttacggaattctacatagaaattcttatagcaattaacggagcaacctaaatcataatcaaaattcgtataacaactcacatagaaaccactagaaaaatcatcagaacatcccaaaccgtaaatttagaaagaaaaaaaaaggttaaaaaatagcatatgagataatttcccataattcaaatcatagcattaaataagtaaatgttcttattttaaaacttaactcttttatacttattattattgtgaaaattacatgaaatatgaaatttataaaaaaaaaaagttacaaaaatagagcatttttaggtttgccactct

SEQ ID NO: 341268 - DNA, 1003 bp, Cannabis indica
gatcctagttgctttattttgaaaggagagctacttcacatgcgttgttgtgcgcatattttgaatttaattattagagatggtttgtctgttatcggtgataacattgataagattcgagacagtgtcgcttattggtcgggcacaccaaaatggtatgagaaatttgaggagaatgcttgtcaccttggagtgacatgtactgaaaagttgtctcttgattgtgttacaagatggaattcaacatacttaatgataaagacagctttattgtacaaaacagtatttgagcgagcaaagcttcgtgatcgaaagtataaatgtttgccatcagaagatgattggattagagcttaaaagttatgtgaaaggctagaagtttttcatgaggtgacaaagttattttctggtaccaagtaccctactgccaatctattcttcccggagatgtgtaaaattaagagaaaaattgaagaagaaatatcatcaaatgagttatatttattaaggatatgtcaactcaaatgatgtttaagtttcaaaagtattgggaacagattcatgggattatgactattgcagtggttttggatcctagatacaagtttttgttgctccaattttattttcctcaactctatggagatatgggaggttgaaattagaaaggtgcgtaggctttgtgatgatctattcaatgagtacaaatctaaatgtcctactttaagtgaaaacaattcacttgtggaagggtcatcatcttcttcaacacaagatcatctatctaactatgacttatatgttagagcttcatctggtgcaatgaatgaaaagtcagagttggatctctatttagatgaccaagtgttacccaggactgatgaattctttgatatatgcaactattggaagataacaggatctaaatatcctgtgttgaacatgattgccagagacatatttgctgtgccggttagcactgttgcttcagagtcatcattca

SEQ ID NO: 341269 - DNA, 601 bp, Cannabis indica
ataatttaaaatacataaaaaattaataaaaatttatgaaattttttcttatcatgcattgaaatggtctttcattctattttaaaattaaattgtcattccacccaaatagtagaaatgtcattccattcgattgatattccaacactttaatatgcaactaaacaaaggaatagaatgaagattgtttattttccattttatttctttacctcaaccaaatgccgtgtgagattaacattagtaatgaatgtcacttgtttatttgctagtaaaaactggtttgaccaaaatgtaacttccagataaaaagtccaattaagaaattaaaacttataaatgtagctatcaagtttgttcttccgctatcttgtaataaattgtcttacttctaatttagtttgcagccagtgaaaattatgaaagactcttttctttttctttcttgatctcgtattatagaaaatcttgttataattaaaaaaaaatattaagaaatcaatcttgttaaaatatacaaatcatttattaaatctaaataaactacaaaacattctaaaaaaataaactgtttttattaatcatataaaagatagaaaaa

SEQ ID NO: 341270 - DNA, 2231 bp, Cannabis indica
aaagaggtctaggaactgtctaggacaagtttgtaaacgaaaagatctcatcaaaggttgctataaatgtaaccagaataaggattgagttcatgattagagaacttattaatattacattgtagtttaatctgttggaaaaaaattgagtggcccagcagagtgactctgaactttagaagtacaaggaaaggcttggaaccagattgacaaaggactttttgattccgtttgaaggaattttataatataaagacaaggttggtgtatcagtctgataaggatattgaatagaaggttctaaatgagtttcatactacaatatactctttatactcaggagtaactaagatatataagatcagtacaatttctttatcatagtggaatatgtttgtggtggattagtgtactaatctatttgtcaagggaatagttcaaccctgtgatgctccaaaagaaattatctcaggttgagatttaaagtttacatccaaatgctgagagagtctgtaacaagcatgtgtgatatattttgagggtccctgaaataagtatcttctgctgattgagttttcatgtattaacagttattagagtgttgttgatgtggcactcctgatgtgatttaggaatgagcgaggccataggaaagattcgagttcgtatgtttactttatagagtaaatggaagagctatgctgatccaaagtgtaatgatattaagttccaaattgagaagaaaggaaagttaagtctcagatttatcggtctgtttgggtttctaggaacggggagattaggtggcttatcagctagccctacccctgttctatctggagttcaaaccaacttgtcacatgaagaacaaccagtacagattctggacaggaaagaaaaggtgttgtggaataagactattctgctagttaaagtgttgtggcagaacagcaaggttgaagaagcgacttgggagttagagtcgaagatgcgggagtgtaaattttgaggacgaaattcctataaggggggatagttgtaatatcccgtaaaataaaatgatatttaattagacatattttattaaatatgtaattattttggtaatgaagtaagattatgatcttacttggatcaattagtgaaatctataaaatgattatataaagggtaatttattaataacggagtttatattgagatatgtgggtatcgtggatactattttggaaataaaaatattttcgggcccgacgactggaaatttgacgatgtggtcagaaatttcatgacattaagggatggattattttaaggatattccgaactattttagaattttataatgtcggtttggtggattagtgaaattaccaaaatgcccctaggttattttaaagttgaatttacttttgagggtaaattagtcattctttaaataaacttgttttgtccctttcgatttttattttagggggctgattgtatataaaaaaaaagaaaaagaagaacccttactataaattacttagaagctgagtaaccacaaaaaaaaaattcaacctcctctcttcttcctcttcgtgcaacctaaaaccagctagctagaaggttttcttcagccattttcttcttcttttcaagctggttcttgccccaagtcagcctagaagagtttggaggtaagttctcaaccttttggattggaaactctaagttttgagttggttttgaggtagggttttgctttctgtggctgtagggattagactaagattggggtgtgtttagggtaggtttttgaatatgttggaaatggttttaagtggtttctatggctgcttgattgagtttggtttgttgaagccaaagttgagttttcttcactttaatgtgtgaatttgattcaatgattgaattgttgtgttttgaagcttggaatatgttgtattatggttattatactgttctgtgaagtttgggaacaattggttaggtttggtgcaaggtttgggactttgaagagctgaaattttcgagttcctgctgtagtgaaccagaattccggatggtacagggctgcaccaaccggaattccggatggtcaattttcaggaatccctgattttcatattttagccataactgttcactcgggtgtccgttttagacattctatatactgttttgaagcttatgaagagctctacagtatgagacatagattagag

SEQ ID NO: 341271 - DNA, 537 bp, Cannabis indica
cgccctaatgctaaggcacgctacagtgatttttcaattacattgctatctttgctaaccaaagaattttctcaaacatcgtgtcaaattaaaacttttatattaaatattaaactttataatttttacataaatatatacaaagctgagatcctgtttttaaactttttacaacatattccaaaatacatatgtcaggttgcacaacaactacaaaataacaactccgatgtcctgagtccgaacactccaagtcgcgccgccatgacatgtacaacctcatcctagctcaggctcactcctgttcagctttcgccttttctttacctacacatggaagcagaactatgagcagacagactcagtaagaaaagcatataacatatcatataatatcgacttgtatctaggcgcccatacacctatttaaaaggcttaacagatgcgtaagaacgttccatactacggtacaaccactgtaccacatacactacgtacctcattgtacgagtgttggtagggtttgtttcgtaccct

SEQ ID NO: 341272 - DNA, 962 bp, Cannabis indica
accacatacactacgtaccttgctgtacaagtgttagtaggatttttttcgtaccctcgagtaccactgagtgatataccacagacaccctcgcactttcccgtacttgtgctggtatcactgtgatgtactattaaacaatattcactataccaatgcactctgtaccataaccgtacaagtgttggtagtacaactaacataaaagcatgcatatacacttaacatatatatacactcagatattcatattacatattatacatagtttttaccttctttccagattcaagtgtgctggccgacctgagcggaaagtattgtgctaaatggatgtcgtaatcaaataatgaaactgagtaaatcacatgatcaaaaccctaatttgggaaacccgaacccacaactcttgggtctattatactctctagggattacactaaatcaggaaacaaggaaacatccaactaaggcactgaaatggacaagagttgagaataaatgggacattcgggaaaccctacaaaaactggctaatcgattttacaagtactggtaaaactagctagccggtttataccagttcacccaaaaatcccatattttgctcaaaactccaccaaatgcaaccaaaccttccagagtacctaattacggtatacagaaaatattccaaccaataatttctaaaaaaacacactgaatcactgaatcataatatgccattaaagactaaagcttaaggttcaaagctcaaacttgagcaaattcatcccaacacaaccaaaccagcatacaaaacttaaaatcaactcaaactaaccttagaattcgaattgcaactgagcctaaccctaatagcccttaacttcaaaaatcacatacacaaaccaatttcaaagcttttaaaagcttaagataatggtactagggtttaccttgcctcaaagctacttgaatcc

SEQ ID NO: 341273 - DNA, 764 bp, Cannabis indica
taacattgatgaaagttcaaggggcgtgatttagtacatatcaaagttcgaagggcataatttggtagatatcaaagtctggagagcatagtttagtacataaacaatcattgaaatagtaaaattgaatgaaattagatgaaagtccttaaatctaacaatctcaatagttcggggggaatttttaatggctaaaaaagttcagggagcatgatttggtacatgtcaaagttttggaaaaaaaatgctaattagccttttttattaaactgacgataaaaattaggagtttttaatttttatactttaaagtatttttttatacttttatagaaatctacataggaactcacgtagttaacgaaacaacctaaatcgcaaccaaaatttacatagcaacctacatagaaactaccagagcaacccaaactgtaattttgcaaaaaaaaaaaaaaaaatcaaaaaatagtatataagataacacccctaaaacttagcactattatatcaattaattaattattttacttttaatatattcaaatttaattctctattaaaataactcatattaaattacattgcatatttgagaaaatatgataaaattaaattagatttaattttttttataataactcatataatttaggaaagttatttgacagttatttttatttattttaaattaacactttcttttagtataatgtatttgtatgtacaaagttaaaaaatgtggttaaaaataatcctacaatatt

SEQ ID NO: 341274 - DNA, 888 bp, Cannabis indica
cactagtcaattaatgcatttaaggatgacaactgtagaagggtttgacagttttgttaccgtggtatatgctgctaatgatcgagctacaaggaaaattttatggaaagatctgtgtgatttgagaacaggtggtaattgggttgtaatgggggacttcaatttcattttggctaaagatgaaaggattggtattaggaccaagacttatcctgacactgagttccttcaatgtgttaaccattgtcaattggaagatgtcaaatcaagtgggaatttcttcacttggacaaacaagcagcatgggcatgacaaaattttttcaaagatagatcggatcatgggcaatcaaacatggattaacaaatatgagtttgctgaagctgtctttctcaatgaacgtctttttgatcatactccgggtattttatcaatttatcctaatgtggtgagtggaaagaaaccttttaagtacattaggatgtggaaatctcatcctcagtatgatactagcttgaaagaagtgtggaagcaacatgaaaggggatccaaaatgttccaagtagtgactaaattgaagcaatttaaagtgaaactcaaggagattaataaagagggttattctgatttacaaagtgctgtcattcgcattaagcagaacttagatcttcttcaaagtcaaatacacaaacagcctcttgattctaagcttcacctacaagaaagagaacttagagaaaagctcatcaaggtgcaaggagactacttgtcattcttacaacagaaagctaaagcagactggattcaacaaggggattgtaattcaggtctgtttcatgcttgcattaagcagagactgaggcacaatcgtatcctatctattgaaag

SEQ ID NO: 341275 - DNA, 881 bp, Cannabis indica
atccacttttgatccatttgttcttgctatgagaagacaattctcataagtgtaactctcatagttcacttttccttatctcataacatgagataattatcactttaatttctcaaagaatgtaacttctcacaagttacaatttcttttctcaaaatcactattgaaaaaagaattccaaattctctttattcacaatatatatgataataatctccacatcaatagtaataaacactattatattactatcaacattattatcatatacattatataatttatatattaatgtacaaaattaatatataactcccatgcatgaattatagctctcaaataataattctatgccaactaatataatatatatgtaacatacataatattaattatataaatatatatgttatatatctcatatacatataacatataaactttaatatacatgtatatatataatacatatacacataatatattaattttatacaactatatatgttacatatctcacacatatataacatatatatactttaatatacatacatgatatatattatatacacatatatattatatatgcatgtctcatataaatacatagaaataattatttctacatatttaatctcactaatatatattatatcacatgcgctacatatagataatatatattactcatatatacatgttatatatgtattatatatctcacatatatacatataataacatgatatagaattcaaatatcatattataaattactatttataaaaatataatataataaacacatgatcacatattatatgccacatatataactcacacatatatatatatcatatatatatattactatcata

SEQ ID NO: 341276 - DNA, 533 bp, Cannabis indica
acaaatagggaagccataaaatggcacaaaaaccaaaagaggtacaaaagtcgtaaaaggcatcaaaactatcaaaaaatcctgtacaataatatattttgtataaaaattgttataacttttagtatttttcaaatttagaacactttttaaaatattattagaggtccatagtaagttgtttgttataaattattttttttatgaagcaaaaaaatacttcattaatcgaacaaaaccaattacaagccgtaagctaataattacattgaaacttcctcaaaaaatcactttctttacaagaaccttttctattagttacattttgcaacctatactaacaaactattcttatattcgaaccattatgatcaatagagttagagcagccctcaaagagcattgctattaggcaccagtagtgcttaatacttttttaacatgtcgcgttgtgattggctagcgatactccctaaaagttattatattaaattatatgagactcgataattaattggactaataacgatatt

SEQ ID NO: 341277 - DNA, 672 bp, Cannabis indica
caaatccactagacatgatatcatatggtctactcaacttctcaataattctactagaaatatatgaatgtgtggcaccagaatcgatcaaaataataaacataatacaaccaatagatatctcacctgtaacagtcgaaggactggcctcagcatctgcctgggtcaaagaaacaccctggtaggaaccatagggctctcccttttagtctcaggtttctgtaactacgggcagttgtttctgaagtggcctgctactccacattggaagcaaaccttagaccaatattcccccaactggtgtttcttacactttgaacatttggagtaagactgacaagcttcatttctacctcgacagaaaccttggttaccttaaaaccttctgtctggacccataaccgatggctcatctggtttcatttttcgatcattagggttaaaactcttactcattccagtacttgacgatgtttgccacatatcattcctctaattactctttttacgattcaaactttcagcccccttagtagtgagagttaagtccacaatcctaaggtaggtcttcacaacccctgattgcttggctgccataatcacatctctagcaatatactcttgaaggcctctgatgaacttagcctttcttgcagctgttggaaattattt

SEQ ID NO: 341278 - DNA, 751 bp, Cannabis indica
ctctctctctctcggcttggtgtggattgctagggctgggagttcttcttgatttttcaagaattttcaaccaatctaagtctaattcaagttgttggtaagctcttgaatcttgccccttgggttttttggttttgaaggaaaaagaaaatgattgcatgtttagtttttgggctatgtttgctgcagtttgttgttgttgtttcagaggttttgaagtgtttatttgagtgaattcatgcttgatatgttgttagtttttgggttttaaccttgtgtagagtttttagctaaaaactatgattttcaatgtaatatgttgattttcgttgctgtagttgtagttattgtttaatgttgttttctggggttattttatggtgaaacatgatgatttgagcaggttctagtgcatgtttattagatttaaccaagtttgagttttgaactcaaagcttggagctttaatggcatttttagtatctgtgttttctgggttgttttgatgctttagaaatgttctttggagtatttagaacaggtctggaaggtttggtatgaattgggtttgatttgaatgagttatggaattttgtatgtttcctgcgtggaaccggaattccggttgtgcaaccggaattccggatggtgttccaggattcccagaaccggaattccggttgcagaaccggtctgccggttgggggatttttgggaaccctagtttttcccgtttttatgtggtttaggg

SEQ ID NO: 341279 - DNA, 1088 bp, Cannabis indica
ctcttccacctcgagtttcctgctctattttcttttaatgaaaggacgtgtttctctttatgaactatgatactataagatcagctttttcttcttaaatttattttctaaaattatttattgaccattaggattatttttattctttatatatatgaaacatttttcaatgtatagtacctattaatccttattaaataaatttaactataaatattaattttaaaaatattaaaccataagattttaatctattgaagaagaagaaaagagaaatttatttttatatgcttaatttgactaattaattaaaaaatatataaaaaatatcttttttatactataacaaaatatatttatatacaatatatttaagtcaaacttagtaatttttttattttttttcaagaaaaacaatataaataaagtacaataaatagaatgaagagaaaaacttcaccaaaaaataaacacataatagagcagcttcaaaaaaaaaatgagccaacaaataatacatatatacatgataactaataatgtaatgtatataactaacctatttattttctttccaacagaaatagtaaataatcgttaataataggttctttgggtttttcctctcttctcttcttctcacttgctgttgaaatctaggattcttataacaacaaaaaattgataagttaatgattggattccgagaagtattaaacacagagaaaggttttaaggtttgtcatttgggtattattaataaaatagtgagattattcctattgtgattaaatgacctagagtataaattataagtcatggtgtcatgtcttttgacatgcaaagttcgtattggttttgagtgatctgctatcccatgtttttaggttttagtgctctgttttttttcttgttttggttttttggcagtggtacaatggcaccagacatgactgaagctttagccattgaagaggcgttaagttggatcaatgatcatgaatggcataatgttgaactcgagtccgattatctctcaattgtccaagctattcgaagtaacatcaccatggtttcgcctcttgggg

SEQ ID NO: 341280 - DNA, 1563 bp, Cannabis indica
tgaaacttgaagccttctggcgaaattagtatcaaccctgcacccgagccatgctcattggacgctccatccacgtacaacttccaggtgtctgcgtctcgctgaacaagtgggttctcatctggagttatccctcctattaggaaatctgccaaggcttggcctttgataaatgttcttgggtgataggttatgccgaactgctccagctcaattgaccattttatcaatcttctagaagcatctggttttgataaaacttgtctcaggggctgatcagttaaaaccttaatcagatgtgcttggaagtaaggccttaacttgcaagatgcatggactaggcataaggcaagtttttcaagagcgggatacctcgattctgcccccagtaacctcttactaacatagtaaacaggtttccggtgctttccctcttctcacacaattgctacactaatcgtattgtctgagacagccaagtagaggagtaatgtttctccagttattggtttcgccaatactggacgtgttgacaaatgcctctttatgcttttaaaggcctctggtggaaattataggatctacaataacttcttccaattcctcgattggtttcaatagattccgttaatcttcaattcgagaatcaagatcctcatcttgcttcttgccttcttcagtcatgactgccattagttggtgaccagcctttctattgtgcaactctatgtgttcgcattcacgagccacaagttggtcacctcgcaccactcccatacctatcggtttctgaaacttcagggagcggtgcttaattgaactaattgcccctagtccaattaatgatggtcaacccagcagtatgttgtaggctgatggcaggtcgacaactaaaaagtcttgcattatagtggtggataaatttgtctcgcccacagttaatgggagctcaatgattccttgactggggacgctgtcgcctgtaaatctgcatagatttaccatgcaagattttaattttgctttctccagccccattttcttcagtgtatccttgtaaaggatatttactgaacttccgttatccaccaacacctttttttttcctttgttggtgatctggattgtgatcactagtgggtcgacgtgaggatatctcaaatgctttgcatcctcctccaagaacacaattggaagttcttcagtcttagctttcttagaagattcgggagcaaaaacagactgctcgttcttaacttcctttacatatctcttttgggcattttgttactttctccagcgagatgtggccctcccgagataaccagaatgtcctctccttcaagaggaggaggttgtaatccctggttgcctaggttattgggcagatttggctggttatgtccatcaccttgtcagttcacatactgccagaagtaacctcacgagataagactttctatctcgtctttcagttgacgacattcttctgttgtatgcccaatgtccttgtgatacttacaaaattttgttgcatcctttttgtgtctcgcatgcctcatg

SEQ ID NO: 341281 - DNA, 1047 bp, Cannabis indica
ttcattcgtagtaatcaccaagtcgtgtctaatttttgcatttagaccttgtagatatttctccttcttgttgaagttcataagcacaatacctaaagcaacttggccaaacgatcaaattttgttgtgtattcagttactaacataccctcactctgcacaagctcggtaaattctttccgcttagcattgcggactgccttgttgtaataattggcattgaataaatctcaaaactcttcccaagtcataatagtgacgtcttgggtgagggactttccaccacatgagtgtgtcttcctggaattgaaaggtagcacaagtcacccgatcatttccaacgacccccataaaattcaaaattctctcttatcactatgagccactacgtagccttcattacatctggacctcctagaaaaactggaggtgcctgcttgcaaaacttctcgtacagtggctccatacggttgccagcaataggttgttctactagcactgcgcgaactaacgcgacctgaacttgtggtggaggcacagtaggagagccatgttgcctcaaccacagaatttcttcgtcttgttggcgaatacgatctttcatttctgcaaatctctgctcccaatctagaggagcttgaggtgggttatcatgtctaccaccctgaaaccttccacgccctctgccgcgtccatgaggattttaaggaattagatttccctgaccgccttcggtcttgaccctattaccctgactccttgtattttgttgggcgtccatttaataggacttagcccgcgaacccataagtcaggcaggtcagacaacaatcacaaaacttaacaccgctctttatggattttgaggaaatgcattaaaataaacaattataaactacaatgcttcctaacatgctttacccattacatacaatactaaacaggtgaaggcttactaaactgcgagctgagcttttctctgatgatggttgtacatgttttggcgatcttcggtagacaaacttagcggctctgataccaaaattg

SEQ ID NO: 341282 - DNA, 863 bp, Cannabis indica
tagccttaaacttgtcgttttttttcctctcttattttatttattactattgttgtacatatatgtacatatatatatatatttataatttcttttgtgattttttttctttacatatctatatatataacaaaagaagaactttagtgttatatgaatcaaaactctcaccacctcgaactcacatcccatcatcatctctaatgtgaacttttttcaccatattttacaaagttttatcctcacttccctaacctttttaatgtttgatttgtccttgataacttaagcaattaggttcaggtggtgaatgatgaatttatgtgtgtgtgtgtgggtctattaactttgatgggcattaagaaaaactaggcttttggctcaattaggggtgactgttgacaattaaatattctcgggttagcttgaaaggttcaattgtccaaagatggcctaaattatttccaagttgtaaaactagataggatttcgcctcaagtagtacactaaccaattctagaagtttaaactctctcaaggttttaatcattctaaaaactcaaagcataatgggatagcacaagtacacctacttgaaagaattcttcctaaactagcatttagacaaaatagcatttaaacttggcattttcaacacacaaaattaaggcacaaatggcgagaaatggatgataagtttctttttcttcatcgagcggtacgctaaaccaagctaaagcaaatgaaatatacttcttagttacaagctaatacaaaacaaaacaaacatgaccaagtaacatgactaacacatatctaaccacacaatgttactacacaaacaactaaggccagaaacaaaa

SEQ ID NO: 341283 - DNA, 980 bp, Cannabis indica
aaaagctttcttttctctttcctagaaaaccctagcacaaaatctctttttctcttcaagcaaaggcagccggccctattctccttctccttcttccttgagctgtgaaaaatacagcaacacttccttccttcaatctttgaaatgcagcagccctatttcttcctttcttcttttttttctttcctgcaacacaacccagccgagactccctttatttctcctcttctctttcaagctcttcaagagctttcacacataaacctacaaaaatagacacaccagaaataataacaaagataaaataatctttgtttgttgatgagagtagacccgaaagttaatgtgcagaaaaataaaagcaaaagacaaagagattgatttcggagttccccttgaaatcaagagtacatctccgtcaagcttccctcaaagacgcttgattcttcactatgatgtcaaaaccggttacaagttcatggagattccatgctacaaatcacagcaggtaatctctattctttctctcttttcttcactttatttttctgatttacataacaatatctctcactaactctctctattttctctcttgtttctgaggtgtgtttcaagagaaaaatcacagctgctcccttatttttcctctgctggccgaaatgattgtgttgtgtaaatgtgaaggttgtatgtctatttataatgttgatgttgttgctggctgtgtatgtttctgctgagaaaaaagactgtattctgttgagatattttgccttgaatagctgagagtttgttagagtcttgagatatttatttgcttccttttattgttaagaaataaaagacctaagcctaggaaaacagaaccgacaactctatgagttataatggtctgttgaggctttataaagaggtctaaattattttccttgtaactttatttatgggacaatagtatgggaatttatccaacagct

SEQ ID NO: 341284 - DNA, 964 bp, Cannabis indica
tttgtgtaggtattcatcatttttaatgcagaactttccatcttttaaatatttctccttcacaatgtgacccgaagcaaccttgagtatcatcccatcaggctgcaactgacggtgcatccaacacgataaggtctacaaatccaaattaaaaaagcaacaattcaatttgtaaattgaccttatttataatcttgcattagatcaattcgtaaaataacattaagattacctcttctgaactaccaccagttggtggcagtgctgctgctgcagcagatttttctctaaagcgcagtggtgatggagtagagaccttggcaacaccagacagttgtgctatgggatctggtggaatatagacattgacaagacccggtggttgtgctactggatcggaagcaaggtcaacatgggattgttcatttgatgctcctccaacaccagaactagatgcaacactgctatgctgggaactaataagacgaatgagctcatccactttatcctccagctttctattgatttcctcgatctcacgcacgcgtctctccaaatcagatgaggcttggttcgacccattggcgtttttccttttagggcgtggtgtgttgaaatatttagtttaggtgacgccaaaacccatggctcaaacccggccaccatgctcatctgtccctagcgccatggttaacacatcccttttaccttccacttgtacaacaccctcttccacttgcttacgatatttgccctataaacataacaaatagagttagaaataaattatgaagcataacaattagtacaaataaaattaaactttaaacttacaattcgtttaacgatttctatagctgggccctccacctcccctttcgtgttcatgtgaagtcttttccagatttcaaatctatcaaattcagtaatttggtggcctgcctctttctccatctgttcttga

SEQ ID NO: 341285 - DNA, 884 bp, Cannabis indica
aactcaatttgatggtgagttatccactgagttctgcgaaagaaataaaattatcaagagcttctcgtcagtctcaaggcctcaggcaaaatgggcaagtagaagctattaacaaaaccttgaaggatactatcaagaaaaagttggacgctggaaagggcagatgtgtagatgaactaccataagtactttgggctcacaaaatgactaagaaaacagcaacaaggcatactccattctcgttagcatttggctcggaagcaatgctgccagtagaagtcaatattgcgacccacagacgagatttttataatcaagaagaaaaccaagaactcttgaaattgtccttggatctacttgaagagaaacatactgagtcgcaaattactaatgcagcctatcaacaccgagctacgagatatttcaataagaaagtgaagaaaaggctcttgaatgtcggtgatttggtgctaaggcgagtatttgcaaacacgagagatacatctgcaggagtatttaaccctaactaggaaggtctttatgtgatcgaagcaatagtgggaactggggtttataaattagctcggcttaacggctcgctaataaagaaccagtggaatgttaagcatttgcaaccctactaccaataaactaatgttgtaatctctctttctgatgtaatagtttgaacttcaattattaataaagttgaattattttccaagtaattacaaagttttattctttaaaattacttgcgaggcatatatatatatgtgtatgatcaactgaaaattatctggaaatacataatatgttgcaaactccccatttaaaaaaaatcaaagttttttaagtcgttgattgaagtcatctatggacga

SEQ ID NO: 341286 - DNA, 639 bp, Cannabis indica
tcttactcatctgttaagccttgtaaatgggtgtatgggcacctacatacaagttggtattatatgtacgttatatgcttttcttactgagtttgtcgactcacggttctactttcatgtgtaggtaaaggaaaggagataacgaaacaggagtgagcttgagctgggatgggactgtacatgtcatggcagcacgacatggaatgttcggtctcagaacgtctggggtttccattttgtagtcgctgtgcgaggtgacataatatattttcgaatatttttgtaaaagtttagaaacgggatcccgacattcgtaaatattttaaataaagtttataaagtttcaaagtaatatcaaaagttttaatttgtcacgattttcgagaaaattctttgattagcaaagattgcactacaattgaaaaattattgtagtgtgccttagcatttgggcgttacagatagtcagtatgctacttattcccatcatacactattattgtctaaggaagtaaggcaatagcaaataacaaaaatacttattataagatgagtcgacgtgtcttcgcagtcaatgtacatattcgaccattcttctagacctttaaactcattgctgctctgataccaagttgtaac

SEQ ID NO: 341287 - DNA, 667 bp, Cannabis indica
  modified_base (12)..(12): a, c, t, g, unknown or other
tttttttttaanaaaatcacactgaacattaggatgacatttagttagaatgatcttttcttctatttcaaaatggaatagtcactgcaaaaatatttttagtgacaaatttttatttacaacattttttttttgactaaatgtgacttttaatcacaattaaaaattacttgtgaactaaacatagtgtttagatacaaaatatctctaatttaattttagtcacaacaagtaactaaaaatacatttagtcataataaattgtaatttttgtgactaatacatttagccacagactttttagtcacaacataagaatggtaatttataatttgtcacaatttttttacttttagtcacaagttaattataagattttttgtagtgagtcattccaccaaaatggtggaaggtcattctaatattccaatactttaatatgcaaccaaacaaagaaatggaatgaaaattatttcatttccattccaatattctatttcattatctccaaccaaacgccatctaggggtgttcatccaaaccaggcccggccctcggcataggcgggctaggcctgtgcctagggcccacctagcccaggggcccaattttttttccctcttttaaaattatacatttttttactgattttgaaaaataccacatt

SEQ ID NO: 341288 - DNA, 550 bp, Cannabis indica
attctataacaatcatattaaatatgtgagactcaatacttaattttattaatagtaataagacactttgagtagtgctagacattagtatttacttataaatttctaacaatctgaatttactattaattaaactattatttaactctaaaaaaagaaaaaaatattaaaaaccaagacacaaaatcaacatgttataaatttttaaaaatttatttaactacgggctcacgcgaagcacattagacccaaactagtataatatatagatttttttgcggctaaaccctctcaactatcaatccacttgcagttaacctccaagcttaaattttggtggtaaaattttccgaactactaaatgttagaaaaattaataatgaacccaagatctatttgtatataacatagaacacaatagtaatatataataattaggtatgtgtacctgattgatccatagcaattatctctgtttgatccacagcagttactccactttgatagtgcaatactatcaactaagtcttcctccctagatctctaaatc

SEQ ID NO: 341289 - DNA, 1261 bp, Cannabis indica
tgtagagttaaccgagaggtttgtaatggagttgggttttatgggaaaatacagcgacaaggccgagaggatgtgcttgcattcctcatgcgaatttcaagttctttcactaaggatgaatctgaattttttctggttctatcttggaacctttggtatattcgcaactcggttaatcatgggggacacaagcctcaagatagtgcaatattggaatggggcagcaagttccttcatgaatttagagagagtaatgtgtcgaatcaagctggatagccaagagaagaggcaagatggactccacctaggcgaggctcttttaaaatcaatgtggatgcaggggtaaaggttggggaaggcatagctgggcttagttcagttgttcaggatcatgaaggtcgggttgttgtggctgctaacagctttgtgcagaagaaactcacgccattgcagggggaattgcaagcgattctgatgggtctttaggtcggtttataccgcaacctgtccaccttctctattgaatctgattgccttcaagcagttaacttagtgatgaaagaggaggaaggatgtcgagatgtcgatgggctcattgcgcagattaaatggctgctgcaaaatgaaagagtggcagggatttcctttgcatttagagaagcaaaccaagttgcacatattttagctaatgatgctttgattaacaaagctagtgccatgtgggtaggggttgttcccctttgtgcgagtcaagctattcggcgagattcgccatatccattgtaatattttttattaaatgaattttgtttaaaaaaaaaaagtagcaatttcatgtattggtataataacaagatgaagcaacaattttgataagaatttttatttatacacaagaatttacgcatgtaaaatgaataaaggatattgctaactgaaaaacaaccaacggtgcagtggcagaactatgttatggtatggggtggccatggtcccccctaatattttagggaattatttttaatatatataatttatacaaattaaatttaattattaaagaaatatagttagtttagtttacctcaatgtacataaatagatgtgtattattatatacaggttgtataggtgtattctatttttaatattaatttaacctctatgtgtaggaattgtccctatcaaatcgtcttttgaaatatttatttactattccctttgaactatgtcacaatgctgaaatataagacttctaata

SEQ ID NO: 341290 - DNA, 632 bp, Cannabis indica
ccttaccttcccccaccgaaagtaaaacattgataaggcatattttttttttagaaaagaaaaaaaagaaaacttgttagaaatacaaatacaccactacccccttccctacaagagctcctctttttcttttcaaaagtttcttttgactcaaaagctaaaatgccatgattatgccatatatttattactatatttatgtgtaatttctttttgttttctctaatttccttttatttctttaacaaaaggtttttaatttcgatccttccctcttttgaaaggattctttatgagaaattatgtcattagaagtgatatatagaaaatacttacaagtctctatcacaaatcttgccgagattgcagctaggttaaatatataagaatatatataaccaattaaaatataaacgaaaactcatttcgacaatgaaatagaattaaaaaagaaaaaagacccacttgccgcggaaaaagcactacattaattttgcacctaatatatatatataacacaaaaaaaattaaaatcggattcatatattagggaaataatgatttttataaaaaaggtaatatatattactaacgaaaaagatgaaattttttttaaatcagtaaggcaaatt

SEQ ID NO: 341291 - DNA, 509 bp, Cannabis indica
aactgaatcgggagcaagggacacgtatccaataccatggcaaatttggaagaaggagagatcgacgttcaagtccagatacctactcttatgtctcggatgagggaaataaatgaaagattttgaggtacaagaagagaataaagcattctgggaagagaatgctcttctgaaatcaaaggtggagatattggagtccgttcaacgtagtacgacggagtctcagtcaaggtttcgtgttctaattccattaatgcaatcccttgattccactatgatgacaaacttaggccaacgtctagcggtcacaggaatgccatcgaaccaacaacacaccagcattcaactacaacgactactggagcagatggatcgaaactagggggatctacttgttggaatatattttaccaggatctagatttactaacatgtatgtttattaacatcttaaatatgaatttctaaaataatgaaacttaaacacatataaagtttgagtaacctta

SEQ ID NO: 341292 - DNA, 576 bp, Cannabis indica
tttggaaagactcagattgcaatatttgccttttattgtaattctcaaacatttttttttctactctgtcttaccaaaaatagatgacttagtaggttccctttctgttgctctcaatctaacagatacagagagcacagttcactcctttcaagactcctccacccatactgatcctaatctccattctaccaacattttcattgtggccaaacttcactcgatcaagtcctatagtaggaaacactttagagaaactatgacaaataattggaataaattgtgtcatttcctgattgtcattactgaaatgccccaaacctcttccttattaaatttgaatgcgatggtgataggagagtcatgattcaacaaccgttagtttaccttaacaatgctatcctcattgatataccaagtttcctgaatgttctaaatggagaatgttgacctcacttctagccaacgacagtgagtcaagataaagcaattagataaaacaaataatagaaagcaaaaataataaggtagaaagaacaccagattttctagaggttcgtgttgggttttgtgccc

SEQ ID NO: 341293 - DNA, 680 bp, Cannabis indica
caagacaacctaaaaaccaagaatgtggtggttttatatattgaaatacatgactgacatcgtcgcacttacaaattccatctgttacatacaagatcaaaaagctgtaagttttaattattgattatagtattttttataataacaaataatacacatatataaactaatataaatttttactttttttttaacagtttggggataagcgacaatacgatccaaaaattgaattgttatcaatacaacgacagtggatagaacggttgatggcggtgattcacgatgacgattgatgctgaaaggcccaagaatttttcttccctaggttatttttttaggttaacttatagttagatttattaacttgttaatactttaactaattttacaatatttgtgtaatatttaattacttctatgaaatgaaattatgtattttggccaattttaaaattaattttaataatatttaatttactataaatatgtaattcaaatttaaataaaataaaataatatataaattaataaatacataatttaaataaattaaataaaatataaaaactgaaattcgaccatatacggcgtcggttcctacgccatatatggcgtcggttatgagataggaaccgacgccatatatacccctatggcgtcggttccaagctaataac

SEQ ID NO: 341294 - DNA, 839 bp, Cannabis indica
ttaataaattacataaatgacaattttatttactaattaattataattattaatagtttcggcatttataggattgaattgtaaaatatggtattattaaaaagaagaataagtggttgaaataaagtggcaaaaatctaactagaaatttgtcttatttgtgtgcagccataagtggatttttgcccaatattttatttttttaatctatataattcagccacaatccctaatcgaaacactataaaaggaacatgatactctcactcattcacttgatgccttcaactaaatcaaacctaattttctatgtcagccaactagtagaggagagagttccttccttagtggcttcagcctccttcattattcttgacatttgaaacctatagttaatgagtgccatgcccacacatagcaagtcaattactcaatcatagtgagtaagacggctgtaaccaaactcgaaggagagaaagagatcgaggttcagatcttgataatgctctgctacataaaggaatcaagggctagatatattgaacggaaggagtcataatattccactccaattaatgtaaagtttcttaaacccttatgtgtttattttattgttttagagaattcatatttaggatgttaatccacttacttgttagtaaatctagatcctggtaaaatattcccaacaactggcctcaaagccatggtaatgatttactttcatgtaatatggatttaaaacgatgaatattgtttgtgtgttgatttggatgtgttcatgttggtttatgtgttatttgatgattgaatgtgttttacgaaatttttccatgaaa

SEQ ID NO: 341295 - DNA, 670 bp, Cannabis indica
gacccggatccccacccaaacctgactcaggacccgaacctgaacccggactcagacccaaacatggaactagactagggacaaagaaccagggtcgagacctagaactgcacccctgtctcgatcgcgaacccaaactcaaaaatgggacctgggacatgaaccagaacaagaccgagaccagtgtcagtgatccagatcttgactcgggattcggttaacggggcctgtaacagtccaatagttggtgtctaaatctgggattcagactaagaccaaaaccaagacgaagaaccaaacccgaaccccaacctagatctgggacacaaaattagaacatgaactagaatcgccaaaccaggaccctagaacaagactaggactgtgaccaggacccggagccagacctagaaccgaacacagacctagcctcagacccaaactgagactggaactcaggcccggacacggtcgtgtacccacaccagaacagagaccccgacctggacctaaatctcggacctgatcccaaacacaaacttggacctagatagggatccggatacgatcctggagttcgaccaagacccagaatgggatcgaaatgctagacctaaatctggacagagatcttgacccagaccctaacttggacccgcactagggaccc

SEQ ID NO: 341296 - DNA, 591 bp, Cannabis indica
agagcattatcaaggtctgaatctggatctctttctctccttctttgatgctgattttccacagtcttacatactatgattgaggtaccacttgatgtgtgtgggcattactctatcactcaagggaaattctaaattagaagagaagaatagagagagaaggggcggcttggtttttctctgaaggaaacaatgtgcaaagttttgaatttcctgaagccaacactttctatttatagaatgccgtctaggtttaggttagaattgtatggcattgaaataatggaaaaataaaatggtaaaaggctttgcatagtggacggccatataaggaaattgggcctcactttgcaactttcccattttgttatttttcaatcccattttctcaaaaataccaattttccaatttaaccatttaaatgtcaattctaattatttaataactaaaaattaattattaaataatattgtcatttaatatatttattaatttagtacatataaagtatcttaattaataaataaacctagaatctcttttctttacaatttcgcccttgattagtgaaaattcataaagtagacata

SEQ ID NO: 341297 - DNA, 767 bp, Cannabis indica
aggctcaactgctctgagccactcatcaagatttttctgctagtcaatttggcccaactagtttgttacctcacaaatcacctttatagaaaaaagcacatttaaaaaaagagatgaatatgagactctgaagttaactcacaaacaagacataataaagactccacattaataaacttggtaaggagatcacgagtcaagagatgttcattaaccgtctaccacaaaacaaaacgatgcttcgggacctttaacttatgccaaactaccttgtggtaattcaccttctcttttaaaataaggggcaagtagaattttttcgccttaaactttcttaagctaccaacatccaacaactcatgtttgtcaacaacatttctcaacttgataagttttctaaagtactagtttgtgtccaaaccaggagaaaacaacaaaaaaatcttgatttcttcatataaatgttattaatccattggacccaaagacaatcttactttgtaaaaattgtccaaatacacatgaaggcctatctctttatgtaacgccctaaataattaggcacgctacccaataatcttatgaaaccctaatcccctaatcgggattactagaaaaataagcgcagaaattaaactttattaataaacagaatgaaatcaacttgtaataatttaaaccttataatttaaaagttacaaaagttgagatcccaaaagtatttacaaaacactattataagttcttttcctttggccgacctaagc

SEQ ID NO: 341298 - DNA, 680 bp, Cannabis indica
ttttttctaatttcccaaaccgcctaaaaaactgcagaaactgcaccgcaaaaaatagtgcggtgttgtttttatagtttatgcggtttagactaatcactaataattaaactatcacaaatacaacaaactttgagcaacacttgttaaaaataccataaagcttgaaaataaatatgaacgaaaaaattgagaaaattgcattgtatacccattttacttaatttattttaatttttatcttcattttcatattctttaagatatacctacttttataagtgatgttcctgttatatcccttagcttaatgtaaaatatgtgctagacttaagtgaagagtgagggaatattaggcaatccactcaaaaaatgggtatattttaatgaaatgtaatataaggatatttttgattaatagatacaaaaaagagacgtttctcaacttatcccaaaaaaatttaagttttaataatacaattagtgaactttgggttgaacatttatatattggacctaaataaatataaaaattagtatttttattatgtgcgatgtggtggggtttgaaccacatattaccaattcaaaatcacaaatcgcaccgcaccacgcggtttaggaaaaattcaaaccgcgactgcatcgcaaagaatttcaaactgtatttttttgcgatg

SEQ ID NO: 341299 - DNA, 681 bp, Cannabis indica
taaaaaaaataacgaagtaaggaaaatatatgaagaaatatataataaaaaaaataaaaaagataaataataagtagaaaaatataaagaccaaaaagttaaagaaatactaagataaaaataaaataaaaaatcagagaaataaaaagtagatggaaagaaaaataagaaggaataaaatatataaaaatgatagaaaataaaagagaagtgaggtgtatgagttaaaaaaataatgataaataaataaaatgaaaaagaagaataaaaaaaactgatgagaaaaaagaaatgtaaatatgaagatgtaggcagtagaagtgttcatcaaaccgctcaaactgcttgtaccgcaccataccacactgtaaaaaaatgcagtttgaaatttttttcggtgcggttgcagtttgaatttttcccaaaccacgcggtgcggtttgcgattttgaattgttaatatgcggttcaaaccccatcgcattgcatattatataaatacagatttttatatttatttaggtccaatatgtgaaggtccaacctaagcccactaattattgtattgttgaaacttgaattttttttcatatttattttcaagccttatggtatttttgacaaatgttgctcaagctgtgttgtgtttgtgatagtttaattatttagtgatactccaaa

SEQ ID NO: 341300 - DNA, 640 bp, Cannabis indica
ttgttattgtaataaattaattagttgttttattttaatttaggtaaaactataaaactaatacaggaaaaaaatagagaaaatacagatttttcttccattaatggcaatggcagaaaaatctgtttttttttctcttttttttttaaaatctcgacagtttaataccgtcacctataatagggtataggcgacagttttaaaccgtcgggaagtccacattagcgacggtttttaatgtcgcctattttgcctgttttgtgacgtataggcgaagattatagaaaccgacggaaatagttcaaatgattgtttaaaaacgtcggaaaaaactattttttgtagtagtgcttgcaccttggataagtgatatgtccgttttaggacattgattaaagtaagcttgggttggatgtatggagtatgcatcagaagggactgatattgaacttggataagatataataagcttacagtagtatctattcaattcaatatcacctaattgatcttagatcaaattatctcaatcctaagatggttaggttctagttcagttgcattatttgtattcttaaatctgttcattaaagtcgaccaatggttcttctcgtgacatatagattaaggacatggtagt

SEQ ID NO: 341301 - DNA, 665 bp, Cannabis indica
gcctcggtcattctgactcttcgaccctcgacatttcaatgttgtcttagtaccttagtcctgctgactttcaccttaggccaacattgccatgatgttatcttagtacctgagtcccgcagattttcacccaagataattggctctgcctgtgtcctgagtcttcttgactttacatcctgaacaacaatcaatctccatgatactcatctcgaccttaaaggccaacatgactactaagtctcactggtacgaccctctggcctccacacaaactctagcgccatctcaacgcttgcgctcggtcttctcagccctactggcttctttgatacattcattccacaactccgcttctctatcaatgtctttgtgtgaattacgccctctggcggttcaacaagccaacacattcaactcaactgccttggcgcttccatatggatcaaataaaactcacatgtgaacacttccaagtacaaccatcctctgatgattgcggcctctgcccgccttggtctccatgtgcgtccctcttgacacacacatgtagcaactgaagcattccatgtctatcccaatttgaaccatcttagatatcaactctcaacctctgtcgtgactaacaggatttgacggtccctgcaccacttccacactcctgc

SEQ ID NO: 341302 - DNA, 592 bp, Cannabis indica
tatttggattccttgtgaaaagtcaagcaactttatttttacggaactaaattctgataaaaaattagagagatatgttgatttgaaaaatatagtctaagtggtgtcgagcatggtgctctctctcgcaccagcaactcggacaagaagcctctccgcgcgcgcgtgcttagacaaaaccgtgtttggaggcacatcacaggctcgttcagacactatgcatatagaatatttatctattcaacactatgaatatagtgaaaactacattttgtgaaaagatagaagatgaatttttaagtgattgtttactaatatatattgaaagaaaaagagtaatttgtgacataatacataagtttgactctatacttaagtttaatttttaatagtagtaatacctaagttatatttctgaaactttcgtaggtacctagccgttaagtatcaagtcaacttttgtgggtgtaagggcccaatggaggcttgaagcgaggacgttacaaatggtatcagagccttgacccagccagaagtgtggtcaacgaggacgtcggaccgccgtaaggggtgattgtgacagtcagtagtc

SEQ ID NO: 341303 - DNA, 661 bp, Cannabis indica
ttactagcccccttccttaaaatagatttggctttcacaacatttttctagaaccaggaatcggagtccttgtagctacaattgagaaaatccttccctttaagatacttggcttccaaaattttgcaacataaagattgagagccctttaacaaattccaaccccacttggcaagaaaagccagattcattttctttgtcttcctaaatcctagtccgcccaaagatttaggaaggcacagcttatcccacgcctttagatgaagaccatgatttcctctttcaaaaccccaccaaaaattcctgactaaaccatctaccctcatgaccacacgacgcaaaagtttggtggtctgcatggcatagataggcatcgacaaacccacagactttataagagtagctcgacctgcctttgacaaagttttagccttccaactctgcagtttagaggtgagatcatccaaaataaagttaaagtcagcgtccttctgttttgatctgaaaaggggcagacccaagtaatttataacaccttccagtgaatttatgccccacgcttccttaatccctctctgttgggttttatgccctaaataaaactcatttcaatataatcagatttactttttaatatagatcagaaataacatttaatgtt

SEQ ID NO: 341304 - DNA, 701 bp, Cannabis indica
agtttcttgtaactagattttaataaactaatataattactgaaatgagatcttttcattcaacacctttgaccaagctcaaaggaaattatcatttcacttctaataaatagagactatagatgttcatatctatgattaacactcccactcatttgtactaccgatgtcccaaagttcaagtgttggctagaccacatgtatgctttcaacgaacaaatcaaagaacttcaaatagcacaattagcttaaagttcaatcatgtcaagattcaaatttaattgatcaatgataaactagttgatattaccttagaatagttataacagtaaatatgataactattctatttgtcaatatcgatctcattctgatgtaaaccttatacatctaatgaaaaatttactttgcttaatccctaggaagagacacaccacttaccaaaagtgtaagtaaaccttattgatgattattacgttaatgtaaattcagtgcactgataaatcatgaaacttaaaatatttgaagcatataatcataattattttctactgtgatgacattacttatgaataattatatgttgtagatttaaataggatttatacattaaacatataatcacgtaaataaatatgtgaatcaattgtaattaataacatgaaaatatgatttatgaactttattaattaaaaataata

SEQ ID NO: 341305 - DNA, 723 bp, Cannabis indica
tccaattaactgtgcttattttgttgaaagaggaaaaattaaattaataggtaaaagaaaaagaagcaaggaagaaaagaagcacaagctgaaactgggctgattgctgaagcaatgctaaagcagtgctgaagtgaattcagcatcctgacagtgacatggaagcacgaattttacttatccacctcagcaacttcgatccagtcactcaaattgcatcagccagctgacgtggaagaaaggggtcttaccctagtgggccaaagtggaaaagtttgggcttctattttggggtatgaagtttgtaccctaaaaacccaacaacaaaaagaaaagaaaaaggaagtacaagggagtcatcttcatcaattttcgtacttgagcagctgccatttttctggagaagctttaattcacagcagggagtactaaaaagaagaaagaagaggggaccaagccttagtgtttgacttttcttttaccccttctctttagttttctttctttactctcttttattgttgtttgtacttagtattaaaaacttcttgagattgtaaatttgggcagcagtcatggatgaattgtttttagcttggattttatcttcttacttgaatatgagctaaacttttgaggcttgaatgactatgaacttctaagttgggtatgattaaattttaagcttagtttagcatttgtttgcctttgttcattcaagtg

SEQ ID NO: 341306 - DNA, 865 bp, Cannabis indica
gctttacttcgaccagatctcctaagtgcagcagaagttggcgagaggaggaaaattgtgcttggatcttcaaggagaaagctttccatgagttgaactttgcgggcgccaacttgaaatactattgttgggcggcttttgagagggtggcaggaaaaattctgcagcatatatctcctcgtactccttgtagatccatttgcatctcgaaatactttaggtgggataatggatcttccttaccaatatacatcttccacgttggcatcttaaacttgtggggcaactctaggatattgatttcgggggagaaaggggttccacgtgctcggtccaactcgagatcgttgttcctctgaccggccatgcctttgtacatactatttagttcgtccaactgtgcctgcatggctggactaacctgttcgacatcttggccgatcttagtcacatcagcatctttttgagtgggaatttgagcgcgggttccgggccgcacgatcagcgtgtcaagctaattgtctactcctctcctcctattcagatcgtttctgagatcatgagtcgtccccaacctatcaaatacggaaacgcctggttgtctcagtgactagttggtttggccaatttattgactggcaccattgacttggttggaattaatgggtatgacttctcccgatgaattactagacaaggtctacccgcctaccacttggcccacaggtggaacttatgatcagggatttgacggctgaccatttatagtctgggaagtattcatcgctaaatctttgtctgtttcgtccaaggggatgacattcgcagcctgctccccgacggtttgataggcttttcgtatcag

SEQ ID NO: 341307 - DNA, 1328 bp, Cannabis indica
ccatgatcccatctttatccactttgcgaaactgctctgagatgaaattcatgtttttttttcttctaattctgaatacaccaagatgtcattgataaacatgattacacatctgatttatatcagatatagtatgcagccttggcccgccattcaccctgatggtattcttacattttgaatactctagatatgatctggaaaagaatctgtgaccttgacggccaccttaattccccatgctttctattaccccctgatgcttcggaagcctccgccttccgtttgcaatcagggttgccactgtcggtctccttactgacattaccactagcaggcagattcgatgccatgacggcatccttcacagtctgctcttaattacttgctgctcagcctcctcaacaattaaggccaagtttaccactctcttatacagagtgtcatgtgatttggtaattttcaagtcccgactaattgtagcattcaatcctgaacatacttctgctttctggtgaaatctgtgggcaccagatcaccatcaaatttagataaccgatcaaactccagagtatcctcggccatagacatcttcccccgagtcaacttcacaaaatcttcctgatgtgaagtccttacagcaacattataaaacttttcttcaaaaagtttctcgaactcttcccatgtcatcacacttacatcccgagtttgattcactatatcccaccagacgcgggcatgatcttgaaacataaaggccgcacaatttaccctctcagttcccgtcacccccatattatcgaggatccgggtaacagtgctcatccactgaccggacttaataatgtcgatacctcccagaaaaaccagaggttgcagcttcacaaaccgctcgaacacagagtcccgatgcggcataacaaacccttggttacccaccactggcacaggagctggtggtaacccttgattagctggaacagcttgttgcctcaaacgttgcaactcttcttcttcttgacgaagtatgatacctcgcattccttaaaacatctgctgccagtcagcaggaggattagcattaacagcctccgcattatcccccggattttgcggaggtggaggcggtgctggtggatcggttcgggtagccccgggctctacttgctcgccctgtggtctggatgattgcggagggtccattactagtacccctgaaatcaacaaccccagcgagttaagcaccgataccacacttacgcacttattgccttaaaccctaactcatctatttacctcattcatatttacataataattaacat

SEQ ID NO: 341308 - DNA, 2230 bp, Cannabis indica
gagaaaatgggttgtttgtttggggaatctgccaaaactggttaatcggttttatgggtactggcaaactaaccgggttgcactagttttacccaaacaatccgtaaccttctcaaaacttatccaaatgccaccaaactttctagagtacctaaacagagcatacacaatattttccaaccagcagaatccaaaaaagcatcctaaatcaaaacatgccatggatgagccaagcttgagtttcaaactcaaactttttcatccataaccccacagctcaaaaccaacaaccagatgaacaattaagttcaaaataagcttagaatttgaattacaacaaaacctaaccctaacaactcctatatctcaaaatcacataattaaccaaatttaaagcttaaaagatacaagactatatgttctagggttaccttagcttcaagaacacttgaattcctagctgaattccagaaaaatgaagaagaaaaggtgattcctccttggttttttgctggttcgaagagagagaagagaaagagagggtattatttgatttttttggctttcttgtttttcctctaaatgaaaaaggattttctaaattaatccttgctgaaaaaaatagaagctaggtgtcaacacccaaggcagccaccaaatcacccatttgccaaattactaaaatgccctttttcttataacttaagcaaaataaagcctaggggtaaaatggtcaaaaaccataaccccactcaaacctagcactctatttcctccaatatacatcccactaagaaataagattctagacttacccatgtgattaaactagctatccattgcattttctgttatcgccgagcaaaaattgtaaaaattgcataattcaaatataatacaaataatattcctagagtttaataaaatcttctgaattgagaaattataactctaatgtccatttctaacaatgggacccacaaataattaaatccacaaatactataaaaacatcaaataattagtgctaattgcctttactaattcatattataaaatgcggttattacagttgagaaccaattttacacattccctcattattccgcaagcctataacactttgagagaacctttagaatttcatcttcatcaagctttcaagtattcctcacccaaggtagaaaaacttttttttttattttctcttcttctcctcctttgttggtcttattctaaggactatcaaacttccaaaaacccttgaaacaatttttctaatatctccaaaaatcaaaaacactctccttgtgccttgaaaaattccaccaagttactttgactttttctaacccaattttgacttttcttgagtagtaaccaacttgagttgttgagcttgagatgactaggatgaagagaagcagaagattaactaatgaatatgatccccaagttgcttagttcattagatctaagctgatggtcgctaagtataagaacttagacaaggcacatggtggaaaagtgatggcaatgagcttctcaaagctgccataaagagtgatgatctgagagatcgagccttaaagcttaggcctcttctagtacccttaccgagcttcaggctcaaaccattcggggtgattattatcttcctaaaattatcgttcgtaagcctcgatatggtgctcccaagagttcccataatacttgtagtgcctgtagtgcctggtcgagattccacatgaacacaggtgcttactttattgggattttataccctaaataaaacacctttcaatattattttattcgttaccaatagaagattagaagttatttaagctaacatgttattttcatgattatggtttaatatataatttctgataaatccaaaacatatagttatttacaattacagtgatatcattgttgggcttttttccctaaataaaactctttttaaatgtaatattttatatttatttatcattaaagaaacaaatttattttcattacttatttaatgtgctatttggttcatgtgctcatttagttatttatttgacttataagttcatccaaattcttatcacattgatattcttgtttattgtgctgttaaaacagtggaaaaaaatcaagattgtgtgattaaatgtattcctatgatttatcagtacacaggatttaactgataggataatctgttgggttttatgcc

SEQ ID NO: 341309 - DNA, 946 bp, Cannabis indica
tttccaggttggtttgtcttcattgttgctcggctgaggttcttgtactggctctgagttgtcttttgaaatgatttcttctttgcccgtacattcaactacaaagtctgctaaagcctgtcctttgactgttgtttggggttgaaagattatttcatattgacccaattccactatccatttgagtaaccgtccagaggcgtcaggtttttataatatttggcatgatggttggttagtgtatacccgaacaggttgagcttgaaagtaaggccttagcttccttgttgctaagattagtcagcaagtaagcttttctatcagcagatactgtccttcagcttcaacaagtatttttctgatgtagtagaccggatgctggacattgttttctttcctgatcagcacggtgcttacaacatgttttgagagtacaggaggttttgcaagttgtctttttagctcttgaaaggcatttttgcactcctctatccattcaaatttcttatttactcgctggatgttggaaaaaggaacacacttgtcagttgactttgaaacaaatctactgagtgcggctatccgactagttaagctttggacttcgttggtttttgtaggcgatttcatatccaggagggcttgaattttctctggattggcttcaatacctcaagcattgacaataaaaccaagaaacttacctgagctgactccaaaggagcactttgagggattgagtttcatgtagtattttttgaggactttgaagcattcatccatgtcatctatatgccccctgccttcctggatttgatgagcatgtcatccacgtatacttccatatttcgtctgatctggtctttgaacattttgtgtaccaatctttggtagggagctctagcgttctttagaccaaatggcatgaccttataacagtatagac

SEQ ID NO: 341310 - DNA, 527 bp, Cannabis indica
ttcttcttcttcttctatcctccgcctctttccttctaaccctagccgactccccaaaatcagccccatcattttcattcatggctccttcttccctctcatctctccttcagtttcactctcactctcttttctcttcccacaatcctaaccctaaattcactcacagtcacaccctcagcctcccttctcgcacctccccacgtagcctgaccatccgctctgtttccaaccccaacccatccccaaccctcggcaccgatgagtcatcaccttctctgtcacgattgcctccgtcgctgcctgtcagaaagtctcttgttgttgccgccggagagctcttcttgggattggcttcgcgcctcattaacaagcccaaccgtggcccaaatggcgaggagctggcctcaattgctatgttcgaaaactatggcagtgtggttcggagtaagaatgagaggattggggcggtcattgaggatgaaattgagcttgatgttgtgtgggagcagagcgtgatggacgtc

SEQ ID NO: 341311 - DNA, 749 bp, Cannabis indica
gagttattttttacgcttttaaactgaaagtatgagaagagtagtgaaaatttgtttatttgcttaattttagttagttttagtttcattttctagttagtaagctaacttttaagtcttttatagattgatattgttaggtgtgattttctaattaattatgcttgtttgttgttgaaaaaagaagcaaggaagagtggaacataagctgaaattgggcacattcttgaagcaatgctgaagcgaattcagcatcctgacagtgacgtggaaacacgagtctcacttatccacattagcaaattcgtcccagtcactcaaaatacaccagctagctgctgtggaaggaaggggactaaacctagtgggccaaagtgcaaaaagaattgggcttctcattttggagagtgattttgtactctaggaacaaaataactaaaagaggagaaaagaggaagtacaccaccatcatcctccattacgtgagcagcagctgccattttaagaggagtaattgcagaagtacagaggaggaagaagaaaaaagggggaccaaagagcaagggagaaggacacaagttcttgtacttgaatttcttttaccttctctttatctttttctttcctcttttcctttgttatttcttgtctttagacatttcaaacttgttgaactataaaagcatatgggcagcagccatggaaaatatttttttagcttggatattactttcttacttgaatatgag

SEQ ID NO: 341312 - DNA, 1228 bp, Cannabis indica
accttctccaaattctctaagcaatgatcaaatgacgaaccaaagaccgagaaatcatccataaagatctcaatgcaagattcaattaagtccgaaaagatagccatcatacacctttgaaatgtagcaggagcgttgcataacctgaatggcattcttcaaaaatcaaaagtaccataaggacatgtgaaagtagtcttttcctgatcctctagtgctatggctatttgatggtatccagagtagccatcaagaaaacagtaatactcttgccccgccaatctgtctagcatctgatcaatgaagggcaagggaaagtgatctttccgggtggctttgttgagttttcgataatcaatacaaattctccaaccagtaactgttcttgtggaaatcaactcattcttctcattcttaattactgccatcccccctttctttggaactacttgcaccggactaacccatttaatatctgagatagggtaggccactccagcatccaaccacttgaccacttcctttctgacaacttccttcataggtggattgagtctacgttgagcatcaattgttggttttgcattttcttccatcagaattcgatgcatcagagttgagtgactgattcccttgacatcacccagtgttcatgcaatagccttgctgtgcgcccaaagtactctgagcaatctatcagtttccacatcaaaaagtgaggttgacactataactggcagattcttatcttctcccaagaactcatatcgtagatgagtaggaagcaccttcaactcaagctctggaggtttatctgtagacggcacaagctcttttggtactactcccaatccatcataatactttttgtttaatggcccataggaatcaagccatttaacagaacccattacttcttttccctcttgctccgtcaaatcatcttcaatttaactcagttctaaaggatcatctatcaactttttctcactcacaattgtatcaatcagatcaacaaagtaacagttatcacttgcctttgggtaagtcatcgcctttaacacattaaaaaccactttttctccttagactcgcagctttaattcacctttctaaacatcgatcaaagcttggccggttgccaagaatggtctctcaactatgattgggacattgttatcttcttccatacccagaacaataaaatcaactggaaaaatgaacttgt

SEQ ID NO: 341313 - DNA, 900 bp, Cannabis indica
gcattttgatttgattatacccctaatatgcctccataaagcaaagaatcttgtgcccagctattacatcgacgagctgatctattcttggaagtggaaaacagtctttggggcacgccttgttgaggtcggtgaagtcaatacatactcgccattttttgttgggcttgggtaccagtatgggattagctatccaagccgggtagaaagcctcaatcatgaagttgttattgcgtaacttttctacctcttcttttaatgcttgtgcccgttctttgtctaacaatcttcttttttgctgaacaggatgaaatttctgaacgatgtttagggcgtgtgaaattatagaaggattgataccgaccatgtcttcaagtgaccaggcaaaaatgtccaggtttgctcttagaaattttatcaaagcttattttacttcaaggagcaaaccgttgctaattttgagcttcctggtcgggacattaggttcaatttctatctcttccaattcttctactggcccaacatttgtatttggttccccaagtcggggatccacatcttcgtccccaccttgggtagcttcctattcggtaatgctttttcccttatccgaactctggctggaatattcttcctttttggccttggttagggcaaggttatgacattcccgagccacttgttgatttccctttaggcaccctaccccattctttgttgggaacttgatgcacgaatggaaaattggtgtgacagcctccaagtcatataaggctggtcagcgtaacataacgttaaaggctgatggaacatcaattatcaaaaattgtgccatcacagttatgctcttcggatcttgtccaacagtgaggggttggcaaatttgccctaaaagtgcaa

SEQ ID NO: 341314 - DNA, 585 bp, Cannabis indica
actagtaatggaccctccgcaatcatccagaccacagggcgagcaagtagagcccggggctacccgaaccgatccaccagcaccgcctccacctccgcaaaatccgggggataatgcggaggctgttaatgctaatcctcctgctgactggcagcagatgtttcatgaaatgcggagtgtcatacttcgtcaagaagaagagttgcaacgtttgaggcaacaagctgtcccagctaatcaagggttaccaccagctcctgtgccagtggtgggtaaccaagggtatattatgccgcaccgggactctgtgttcgagcggtttgtgaagctacaacctccggcttttctgggaggcattgatattattaaggccgatcagtggatgagcactgttacccgtatcctcgataatatgggggtgacgggaactgagagggtgaattgtgcggcctttatgtttcaagatcatgcccgcgtctggtgggacatagtgaatcagactcgagatatcagtgtgatgacatgggaagagtttaagaaactttttgaggaaaagttctataatgtggctgtaaggacttcaca

SEQ ID NO: 341315 - DNA, 770 bp, Cannabis indica
tattagaatccttttatctacacaaactcataacctgttcgatatggtggttactatgtgggtggaggaattattctagaagagtataaaaacccatctataataatttaagttccacaactgaagctaaataactttattgttttcgaaaagtactggaaagttattcaactaaagaaagttcttaactgtacttatctctattccattacggatagaattagagatatgtcttcggtttattcatatgcacttaatgagcagtaaagaattcagtatccctagatgagtaatacatatagaatatgatgctgcataatattttatgaacacaaaaggaggtattggtggagaaagtagttgcttaccacagccttcgagttcttgtagtttgggtttagtcagatacactacacttgatctggacattaagacaatagattgattaaaatgcactacttgttttatgttcatgcaagtgggagtttgttgagattttataccctaattaaaatctatttcaatataatctaatttgttatcaatagaagattagagatcatttatgtttacatgtagtttttatgtttacggtttaatgtatataatttctatgaagtgcagaacatacagttattcacaattacactgacgtcaatacagtggaaggtaattgtgattatatgcttcaaaagataatgtcccatgattcatcagtgtactggatttacactgatgtgatagttagtgataaagcttacttacacctt

SEQ ID NO: 341316 - DNA, 856 bp, Cannabis indica
ttgtaattacttgaaaaatgattcaacttcattaataattgaagttctaaatattacattagaaatagaagttacagcattagtttactactagtagggtcgcaaatgttccacattccattggttttttattagcagtcgttaagccgtgctaacttgtaaacaccggttcctactattgccttgatcacataaggaccctcccagtttccattaaatactcctgcagacgcatctctcgtatttgcaaatactcaccttagcaccaagtcaccaacgttgaagagcctcttcttcactttcttgttgaagtatcttgtcacttggtgttggtatgctgcattagtgatttgtgactcagtacgcttttcttcaagtagatccaaggacaatttcaatagttcttggttttctacttgattatagaaatctagtttgtgggtcgcaatattgacttatgctaggagcattgcctccgagccaaatgctagcgagaatggagtatgccctgctgttgtcttctcagttattctgtgagcccaaagtatttgaggtagttcatcgacccatctacctttggcagcgtccaacttctttttgatagtatcctacaaggttttattaacagcttctacttatccattcgcatgaggcctggatactgacgagaagctcttaataatcttatttatctcgcgaaatttagtgaataattcaccattgaattgagttccgttatcagatactatcttaatgggtattccaaacctacaaattatgttcttgacaacaaagtcgagaacttttttgtaagttatggaaactagaggttcagcctctgtccactttgtaaaga

SEQ ID NO: 341317 - DNA, 525 bp, Cannabis indica
taattaaataattctaaaaaaggaatgtctatttaattaattattttaagaaaatagttaattataattaattaaatctaaaaaaggaaagtttacctattagtaacctgctattacaggttaaagaaaaatgtaaccatatagttacaataaaaatgtaaccattgaatagtcacccatatatataaatatattttttttattgagtctatccacagttgatttactgtgtaggtgaagaaaagattaaagttaagcaccaataagttgggaatttggatgaatattgtacatatatgtggctgtctaaatttagagagttgccaccttcgagagatatattgactttgtatttgtcattgaacgaagtgcaaatttgaaattttatgacatgatttcataaattagattttgggatgatggtttgtaaatattttgaaaaaatgtttaatataggtaaagttttaattatgatatttttttaaggggaattattctatatactattctttttttttttttttt

SEQ ID NO: 341318 - DNA, 545 bp, Cannabis indica
aaccatgcaacattaaatgttatttctgatctatattaataagtaaatctgattataatgaaatgagtttatttagggcataaaaacccaacatattcatccaattggacgaaagataacgcctccaacccttcttcacctcccaaataaagcgatcgtacccttctcctgcgatctgctcggagtaagagtggtgttgcactttgggttttggagtaggggaacgatcactactcacttccctattctcaaagctcaagttagaaagtctgtcgctcgaagaggacagactagcgcgaagacgaggttgatcctcgtacagaaattgaagcagatgctgctcaattcggtgttcgcctccccaaaactcaccagggttcatctaccgaagacaacacacgagatgagtgtttggtcgggctatcgaacaaaaaataggcaaatatgccaaccaggaccacccaacaaattaaaatacaagaaatgcataaaaattaagtcataacccatgagttttaaattttgggttaagggttaaatttcac

SEQ ID NO: 341319 - DNA, 733 bp, Cannabis indica
aaacacatgattcaaaaaaaaaagcattaccttcattcgaattgtttagaagtctggaacatcgttcttcatgatgtcccttctcattacaatttgaacattaaagtgtattaccatcaattgtacttgaagaagcagcattgttagaagcttcatgctgaattcttttcctcttattcaagtttgcaagaccagagggtggcccccttgcaggtaagtaccgttgataagctcgcaattctgcttctatcttgtccatgttggatgagttaaaattattgatcatattagatacaacaaatccattatactcagaaagaagactattaagtatcaactgaacccattgttctctagataactcaattccaagcaagtttgctttctggaatttcaaattcatcattaacaagtgtgaattaatgctctttccagggagcattttcacactatagagttcatttgcaaaggcatttactaggagagggtcaggctgtgggttgttcattttgatactacaaatatcaataaacagaagtaaatcatttggttctataaattcatacaaaaattcagaaaataacaagtatagcaaatatgtttataaaaataacaaaatgaaaacatattcaatattttccaaggttttcaacaagctgatacagtttctcgtttaagcgagagtaaaagatatcatccattgaatggagtagtcaactcatctaaaatgaca

SEQ ID NO: 341320 - DNA, 596 bp, Cannabis indica
ttaatttatttattaaggggccctaaatcttaggcctccatttttttatcgtcggccctgattattatgtcacaataatgatgaacaaataaaaaggcggttaataatgtagctaattaattattattattattattaattacaggccaacatttattcaaatatggaaaagaaaatcaatggagcaatactcagctgtgccatacttggctacacttataaattgtcttgtttggacactttatgggctcccttttattcatccaggaagtattttggttgtgactataaatgggtctggtcttgtaattgagtgtacatacttaatcatcttcttaatcttctgagataagaagaaaaggattaaagttgttcttgttgttcttgctgagcttgttttcatttctattctcacccttttgattcattctcgaaagcattgttggtaccatttgtaaactctataatatcatgatgtatgctgctccattggatgttatggtaaattactagttactagttattaattagttactttttaatatcattatttcttgtttgattttaatggtttattgtttttggtgcagaaattg

SEQ ID NO: 341321 - DNA, 768 bp, Cannabis indica
tatttaagccctctgatacaaaacaattttcttactttccctctcattttcattttctccattcacccgaagctttcaaaggcaaaaaaccccctttccaaacaaatttctgttctgccccttttgaatcgtcaaagcttctcgaaacgatcgagactatttacagagaggagcatcgaatcccaaggttagtctttcgaatcttcttttgaattctgtttctttgtttgagaaaaagccttacacttctgaatgtttttggaaaaaaggttgaaaatgcatgtttagttgtaggaaatacacatagagttttacccccttgatagaactaggtaatccccaggagaaaacagacctgtaattggcataaccaccaattcaggaagaatattttgaatattcgcatctttttgattgcttatctttggaacactcgcgagtttggatgagcatcttgaatactcgcatatctgcttcctttaagaattctggggattttatcacttttacccgttgtttagaaattaggtttttctctatattctctgtatattttgttgtggggatactggttaagtctttcaaatggtgggtgtgtcgccgtattccaatgctcatgcgtgcgatcgcatgttccttgaggtactgcgatacacccagccatttgcgacatacgccagcgttccctgttcccatataaccgtatattttgactagtaggtttgctcgaaatagtgaggtgttccgttagcccaaggtttatgcgag

SEQ ID NO: 341322 - DNA, 807 bp, Cannabis indica
tgtcacctttgacgcggttggaaatcatcagttcgagcttgatgattatccctaaacccaaagtgagtatttctatttttacttgctcccccatcgagatagaatgagaatggataagaggctcatgagattgaggtgaggaggtaggtatggctatgttctgggagcaaactccaagtaaatatgaagcgcataaatataagttatgccttagaatgaaagacaattttgaatttgctttgtttacgaacaaggaagctatgcgtaatgcaactatgaatctcatatagagtttgatcctggctcaggatgaatgctgatagcatactttacacatgcaagtcagacgaaaagttgtgtttctaatggcagacgagtgagtagcgcataagaacttgcccgttgggaggggaacaatagctggaaatggctgcttataccccttaagttgagggagagaggagcaaaaggaggaatccgccaatttttttttcatttttttattattatgaatactttgcttaaatttataaattttatttatcttaatacttttttatggagcttaattttatttattcaaattctcttattatggtccaatcttaatatttgttaagttatttttatctacaaaattaatagtgaggcttaaaaaattaattagaattaaactatctttataaatttgtatactagagatagcttaaaaaatacattaaaattaaaaataccactatgtttttctagtaacacttttgacactacaaaattttttacttttagtcacaacaaaatttatgacta

SEQ ID NO: 341323 - DNA, 645 bp, Cannabis indica
tacatgtatatattttattaagatgtaattatttttatatagaggtatactttgttaatacgagacttagaaaatgtataactaattacaatttagaggttattcttatttataactggcccaaatcgggacttttattttataacaaattagaggttattcttgaatagagtattcttaaatagaggttctactgtatatgagttttttatattctgggtaaaaaaattgcttccctaacttttgatttgatttttgggtttgggtttgattttgtaatcttttgaacaaggttgtgcaaaaccagaaaaatctccaaaaccaagagcaaacccccaaaaaaatatcaaaacccaaaaaatctcacccgaaatctaagtttgctcctcactcgaagacgttgaagaagatgcaatcaatcgatgccgaggtcggagatagaaaacctcgaatgatggtcttctttggagaagatggaatcgctagtcttctcccaaagaatttgtccctcttcattgtgttcctgagatttttttttcaatcgtgtttttgagtttttgttggaaagaaatgataagtttatttagtttttgtttccaggttttacaatttatattttaaattttgtttcaattaatgtattga

SEQ ID NO: 341324 - DNA, 663 bp, Cannabis indica
agaaataagaatgtcactttcggctttctaaaagagaaagtgaggaaaagaatttacaattgggatagtaagctcctgtctagagcgggtaaggaagtgcttatgaactcagttatttaatctttaccgacttatgctatgagtgtgttcttgatccctttggaaatttgcaaggatgtggatcagcttatgggtagatattggtggcatacgaagtcttcacaaggcctagatattcattggaagagttgggataaactttgtctggataagcataaaggggggttgggttttcgaaatctaagggattttaatttagctatgttaggtaagtaaggttggaggcttttgacgaataatagttcattagtggctcgggtctttaaagccaggtattacccccattccttgttccttgatgttgaactaggtgctaatccaagctacgtttggcgaagtgttttagaggcaaaaactgtggttaagatgggtgcgagatggggtgttggagctaatttttctataatgattttgaatcaaccatggcttccatgcaaagaaaatccctatgttatctctactcatgtggctctccacgattgtaaggtcaataacttattaaaagtggattcctttgagtgggatgaggaagtacttcaagat

SEQ ID NO: 341325 - DNA, 585 bp, Cannabis indica
taatgtgttatttggttcacgtgatcatttatttattttatatataaattcatctaaatccttatcacactaatattcttgtttattgtgttgtcaacacagtgaaaagtaatcaagattgtgtgattaaatgcattcctatgatttatcagtacacagggtttaactgataggataatctacaatgtagtttactttcaccttcgataagtgctatgtctattttaggtcattggttaaagtaagcttggattggacgtatggagtatgcatcgaaaggaaccaatattgaacttgaattagatataataaacttatcgtagtatctattcaattcaatatcacctagttgatcttagatcaaatgatctcaatcttgagatggttaggttctagttcaattgtattatttgtgttcttcaatctgttcgttaaagttgaccaatcgttcttcttgtgacatataaagcaaggacatgatagtttaattgagtgggagctattatcatagatacgaaatctatagcttctattcggacatagaagtgaaacaataatttccttcgagtttgactgaatagagat

SEQ ID NO: 341326 - DNA, 1426 bp, Cannabis indica
tgtttttgaaaaacaaaaatgcgttgtgttgactgaatttttagccaatcgacgcagagtcgtaataaatgagatttaaatcaaaatcgttacaataaatgtaattaaagacaccaaaatttacaataaatgtaaagaaaagataccagaatttaatgaagttcggcctcagatgtcagtaatagcttactccccttgtgttttattaatttgagttgcaaaagtcaagaatagacttttgagcaaagaatgaaaaagtgtttattgttttcaagtgcttaaaattacggatccccttcccaggtcatggatgaccccttatataggggaaagggtcggtgcttctcgcttcaggaggtgcgaccaacgcggagctacctcaaccgtctccttgattttcagagatagttgaagtctaatttttatgataatatttagctattttcgtgggttgacaactgtctttgagcctttcatgatttgaacatttgaaatggtcactaacgatgagggtctcttaagggtatgacacggtcgttgaccacctttggggatgaagccaatacttgggagcgacactcccgaaacccaacttgagaagggcgataatcttcatcgcgaggtgaccccccgagatccaacttgaggagagtgacaatcgtcatctcagggtgaccccccaagaccccttgtttgctgtcagtatttataatgttatgtagatgttcttatttacctttgagagtatcattatgtctatggtgggggtagtgtcatctaccccttagactaacttgtcatgtgggtgtgtaatgattgttcattctgcttacgaaggtgttagtccatcattttttctttttagagacgcccgccttactcaagccaggggtaaaggtgaccgtctgacttccattctaacggtcatgatcacccttcatggttgacggtcatgaccacccttcatggttgacggtcatgaccacccttcatgattaacggtcatccaaacggtcatgaccttacatattcttcattaatttagtctcggtatttttgtgccaagtgttgctactcttgacatgtcatcgttattaaaatttggataaacatttgcccccaagtttctagcagtatgacaatacagtagaaactttcttgtgtaatatgggttttgcttttgttgttgacggcttggcgcagcggcaccaaaaatactacgcctatactaaaattacattctaaaaactcaaaaatgttttccccaaccattactttttacacattttacaatatatcccaatgataattttttcctttataagcaaaattaaattataaaaaaaataaattaatttacaaaaaaaaaaaactaaaactaaatatttactaaagaaaaaaataaataaattacttgtagcattat

SEQ ID NO: 341327 - DNA, 581 bp, Cannabis indica
ggagctgtggttataattgttgtataagttagaattctggagtttgtttgaagttatttgtgtggatttaagttgattttggttgtggtaataaggttgtagcaaggtttgagttaatgaactcaaaccttgacctctaatggcatcttgagattttgtgttatttattgtattcttttgcttggaattggttcattatagtgcatacaggtattttggaagtttttagaaagtttgggattgaattgaggtgtgggggtcggattttcggttcccagttcgaaaccagaattccgattcttgggagcctgtggcaaccgttcgaccggttggtcccagaaaccggacttccggttgggaaccggtttgccggttggggttttttttcccgagccctagttttctgtttttgcgtgatttagagtattagcatcctatttattgatagggttattcttagtttcgattttaaatccctgataagtattttagcgtgtctctcatcgaattctaaatattatggtttagggccttgtaaaagcgtcgagctgtgtttccactcaggctgaccggcacacttg

SEQ ID NO: 341328 - DNA, 653 bp, Cannabis indica
gtgtgagattaacgagtctatgaacacagcggttgtgtctaaatcttatttccatttcaaatggaaaagagagggaagaggatctgatagcaaacgatggtgtttcagaaagccagtgcttttgtttcaatcagctcttggctcgctataatgcctacatttttgttttcttattatatgttttttctttcatttgattttggattttaaatttgaaattctacctcggggtctattttattttaggggaaacttaagaagttgtgatatttttttattagattgatggagaagtggtagttttaatgctcatctgtgcatctgtgaaaccggtgatgacttgttgcttgtattcattttagagctcatgataaaaattaggggtctttttaatattatacttaaaaatacattttatttacaaaaatatcattacgaaaattatttgtacaaatatcgctgtctcacgtcattgtatagaccgaatatatttttctgtctcaaacaaaaaagacgattaatattaaaagaaattattttgtttttttttatatttttaagttatattatgttatttaattgtttaagttacagatattttttgtttgtaatgtaattcatacgatattacatatactatttaatttatttac

SEQ ID NO: 341329 - DNA, 994 bp, Cannabis indica
ggattgcacaacttacccggtgttttcccttacggatcacgggactattgactatcacagtagaagcctccaaagtgttgagcagatcaataagagaatgattttgatcttgtggtgctacaagaggatagtaagaagttggttgaacatattgattgatctcactgtaggaagtgctaaaataatctccccatcattgattgtatgcgtaagtgtcgtagtagggatcatattaatatacttttggggagatataatctggatcatagtattattgatcatacatcgccatatttctaaagaaatatcttaaaattaaaaccacaacgtactcaaagaacaagttagtaacaagaaaaaaatgaataacaaattgaataaaatagtatccggtaacgacaccgaaaatttgatgcgtatcgtttaccacaataaatttcctatttttatttttatattaccaattacttcagtataacggtaaatacaagtcgatcccacaaggacaaatatcaatttattattcaaaatcagtaacaagaattacaaagagaggttttaattatgaagattaaataacataaataaaaaaaacaaatagaatgatatactacaatattcaagaaatagttctccaccttaacaatcattcttaattccaaataatgaatgttattttagattttcaatgaaactattaaaccctgagataacattgaagcagtcaattattctagtctccccactgcatgtaatcaaggcgaatcgctcactaattaactcttttacctaagcaataaatccacaaaccatgtaatttatttaacttagataaagctttaagttcaatggagatagattaatagacaataaattaatgaaacatataattcatttaccataggttctattcgtcatcataattaaagatacctttgacaatattagaaattataatttatcaaaacacttagaattctagactattaggtga

SEQ ID NO: 341330 - DNA, 702 bp, Cannabis indica
gtaggggcgtggttgatccagcgaaaggtgggggaccctgcactacagaacccaagaaatcaaagggttctgcgagccataaatcccgaacagccaccaactacgggtcatggtgtgacgactcccgtggatgaaatcgcgcctggtgtgcaagagactgggaatactagttcaacagtcaagcagagcattcataacacagccattccgcccgctaccaatgttcaaacaaccaatgcagatgacactaagatccagaacctctgtgctgctcttgggatcatgcagggccatacaaacaccctaaatcatgatcaggaggaactctgtgctgtggtaaatcttacatttgaagagtagaggcacatgtttgccgaatggagggacaaagagatagaaatgttaagggctcaacaagcagtcattgacgatcgcagcaggcaagcccctgtgctaatacaaaaagcctatcagactgccgggcagcagcctgcgaatgtcattcctttgggcaaaacaaatgaagatctagcgatgaatacttcctagactataaacggtcaaccgttaaatccctagtcactggctccgcttgtgggttaagtggtaggcgggcagaccatgtctagtaatttatcaggagaagtcatacccaacaattctaaccaggttaatggtgtcggtcagcacattagccaaacc

SEQ ID NO: 341331 - DNA, 526 bp, Cannabis indica
atcaaatcaatgtcactgcaagatgcaataccaccatgacatggcacaaaaggcttggacatgttagtcataagggcctgaaaattctgcaccagaagggagtttttggtaaggacaatattcaagacctggaattctgtgaacattgtgtgcttggaaaatctactagggtcaagtttggagttggggaacacaacaccaaagggattatggattacctgcactcagatctttgggggccatccagaaccatgtcaagaggaggagctaggtatttcatctcattcattgatgatttctctagaagagtatgggtatatatcttgaacaccaaagatgaggcttttcccaagttcaaggaattcaagatattgctagaaaatcaaactggaaagaggatcaagaagttgagaaccgacaatggtcttgagttctgtgcagacctattcaataatttctgcaaacaagaagggattggtagacatttgtctgtggtaagaacaccacaacaaaatggtctagcaga

SEQ ID NO: 341332 - DNA, 1000 bp, Cannabis indica
aaaattaataaaaaaaaattaattaattttagtatgataattagatttgaaatttcaaaaataaaaatcaaaatacaaaattacacaaaaaattcaaaattaattccatgaaaaaacattaaaaaataaaaaaaattgcatttggtgtggactgcataccattcgcgcgcgcaggagaggtgtgctcggcgtgaaatgccgcacacggatgggggggattcagacaaaaactgaccaactaatcgagaaaattcagacataaggcttgtccgaagctgcgtgcacctgataaacaaaggatccgcgcgcgcaaggaggtgtcacacctcttgattttttccaaattcaaaaattcataactaattcaaataaaatcgaaattaagttctgtaaaaaagtgaattgcttaattttttccatactatccaatcaaaataattctagaacgaaatccaattattttatgtataaatttcgcaaacatcaatcaatcatcaataaacacatagatcaacatgaatcacatccaaatcacacatacaccgttttaaatccatatttcttgaaagtaaatcaattaccatggctctgaggcccgttgttggattatattttatttaacatcctaaatatgaatttgtaaaacgatgaaaataaacacataaaaaggtatgagaaaccttacattggttgcagctgaattaaatgactccttgtgctcagatctttaacccttgtatcctttctgtcgcagagtatcgccaagatctgagcccgaaactcgttcagttgtttagattcttcacagtcttacacactatgattgaggactaacttgctatgggtgggcacacactcaatcaacaaaggcttgaatttgattgtgaagaacactaaggatttcaaaaattagagaagaaaagaagaagaagaagtctcataatcctagagagaaagaaaactaggtttgttgcctttgaagcattagttcgataatgag

SEQ ID NO: 341333 - DNA, 801 bp, Cannabis indica
attacgaaaaaaactgtttaaaaaaatattgaaagtgatttttttttgtttttaaaattttgatttctaattataaaattaaaaagtaaaaacagttttatagaacatatttttgaaaaatattttcacttttccacttttaaaaacagaaaattgattaaaaaagtgttaccaagcgccaccatagcttttattaagtttcttattaattaaataatcttgtacgattgcagaaatgaccttaaattaaattatacgatgcgattattatgtcgtaaaaatgatcataggtttacacaatcgcataaagtaaattaaattaagttattttgtaaattttagcattttataatgctagtttgcaaattttacactacaaaaaattgctatttttaataacaacatgttagtcacaacataattttttttttgactaaatatgatttttagtcacaacaaaatgttacttgtgattaaaacatagtatttagttacaagttgtcactaatttagtttcagtcacaacaagtattgtgactaaaaatacatttagtcataataaattgtaatttttgtgactaatacttttagccacggactttttattcacaacataagaataataatttataattagttataatttttttcacttttagtcacaagttttgttgtgactaaaagtaagattttttgtagtgccacttcaaagtcacgtgacttttacagtttaaggtctcatcttcaggggcggacccacgtacaggcgaggtggggcagtcgtccaccctgaaaaaaaaa

SEQ ID NO: 341334 - DNA, 676 bp, Cannabis indica
cctttttttttttttaaattcagtttattttatttatttatacaaatgttgaatactactaactctctatacatatataagcatatgaatggtaacatattctcgtcactaaatagtcttatcttcactgatgttttgtaactaaaaatcactatcaatattcaaagtcgcgactaaaataaacatcagtacatactagttgtttttaaatattttaattaatatggaaaccgtgcatggtatatatatatatatatatcgataatattagatttataataaaattgcaatatatatatgtctataataaattaattaataatgagtattagatgattaagtagaatatatatgtatataagaccatatacaatatatgaccctatttatatataatacaaggcaaggtagccatgcacatgcattaatttaataaattaatatacacggtcaacactccaaattttaattaccttgaaattaaattctaagattaatttgtgattgtgtatatatataagccttaaacacttaagttcacaaggtgggaagtgggaacacatgcacaccagagcaccgacttatacatatatacatatataatcgatacacagacagacagtactgaaatgactgattagaaaagagaataaaagcagaagaaaacaaacaagca

SEQ ID NO: 341335 - DNA, 650 bp, Cannabis indica
taaacttagtttctgttttaaatctccgataagtgctttagcgtgtctctcatcgaattttgaacattatggtttagggtcctgtaaagcgtcgagctgcgtttccactcaagctgaccggcacacttgagcatggaatgaggtaagatagcgtaagaatatatatatatgaatatatatgcttgttttggttgtttgcactactagcactaatatgatttggctattagggtgttagtatagtgttgcatattagtgtggttacggtgttaccaacacgagtacctggggtacgtcgtgttcgtggtacaacacttagtaattcccaggagtacagttagggctctaccaacacgagtacataattagtactttagagcatttggtacagtagtcgtactacccttaagaacgttcttaaccatttggtgagcttaattattgagctcagggcggcttaatcataaagtcgacatcgcattatttttatatatttcttgcatatcttactgagtctgttgactcatcagtttactaccttgtgtaggtaaaggaaaagcaaagctggaggaacagtgagatagagctcggcagtgattgtacatatcgcggcagtgcagcctggagggtttcggtcttttactattttt

SEQ ID NO: 341336 - DNA, 1740 bp, Cannabis indica
atacactccttcaagaggaaaaaaaggaaagaggggttttttgcaatcaagattgacctggttaaggcgtacgacaaactaagttggcaatttattgaccacgttctgcgtaatttcaaggcccctaacaaattctaccactatgtatgccagtgtatcacaaaaacttccttcaacctttttctcaatggaagcaaatttaacagtttgaccccaaagcgtggcattagacaaggagaccccctatctccgtacatctttatctgggctgctgaaatcctctcacgcatccttgagcacacccttgataacggtaccataagtggtataaagctaagcagagagggccccaaactctcccatcttttctttgccgatgatctgatccttgttggcagggcaaaccttgaagaagcaaggggtatgtggcattgcctggaaaagttttgtgattggtctggtcagagaattaataagctcaaaacctccattttctttagcggtaacacaagtgatggtatgaaacgaggcatcaggcaggctctgggattgaactgtgaaatgggtaacataaactatttgggcctcccgctttttagatcccgccaaaaggatgcggattttaacttcatccttgataacctggtgtcaaaactccatgggtggaaattaaaatcgttatcaaaggctggtcgtgctacattgatcaaatcggtggggcttgctttgcctgtttacacgatgcagacgacaaagctttctaaaaagcttgcatctaggattgatggtatggtgagggacttctggtggggctgtgaacaaggtaatagaggcatctgtcttaaagcctgggaccagttgtgccttcccaagtcccgtggggggcttggctttagaaagactgtggagatgaaccaggcattgctggccaagtggggttgggctctgcttactgaggaaaagtcgttgtgctgtaatgttctcagatctaagtaccttaagggtaaacagttttttgactgtgaggttaagagctccgattcttggttttggagaaatgtggtgcgatcaaaagagattttaagaaaaggggcgtgcaagctaatatccgatgggagagagacaagtatttgggatgacccttgggttatccatggtacggatttttaccctaagtccaattatcgtcaacagcggggcttggagaaagtgtcggatttacttctacctgacggaaattgggacacacccaagctccacaacctttttgaccaggaaactgttagtaacatcttaagaggcggtaatccgagtggccagggaagggatagatgggtctggacaaaagaatcaaatggtctgttttcaaccaagtctgcctatcttattcaagcccttgatcgggctcctttgtgcaacattgctccggcactatggaacaaactttggaactcaaagattttggagcgacacaaggtccattggtggagtatcctttccaatgctctacccttaagagcccctcttgctaagagaatgggttttgaggaggtttcctgccctatttgtggggaggctgaggagaccacagagcacttgttcctgtattgcaactttgccttccacctttggcgatcttctccttggggggttatgcctgttctggattcaggagcccgaatgtgggactgggttacttttctttggaatcttaaatccagaggagttgatactgatgag

SEQ ID NO: 341337 - DNA, 617 bp, Cannabis indica
agtggcctctaaataatatatgctatcaaatttgtcagaattaatagattagattataacaacacaagtatagaaagtgtctccataaaatagcaagcaaagtaggcgtctccacaagtatatacagctatgccagaccatgtcgtgaaccatgcttagttatgataagttcacatagaaaacaatgcatatagataaatcttagctaaaaaataatcctctgccacaaaaccaattgaatcaaccaatgacaaaaatcactagcatactcaaaacccactaatttgtttttgaaattaagcaacaaaatctcatttcagatattaaacccaaaaccaatttgaaaaattaaatccaaaaagctaataaaggctaagaacaaattttctcaaacaaaaatcctaaaatcaaaataaaatacaagaaaaaattatacctgtaataacaaagatatctttcacactacgaaaccattctcatgtcatgctattctcattttttcattttcaaatctgagaatgaaggaataagaaaaaaatatgagaaataagaagaaagagaggccagatatatatatactagctgttgaccgagattttcggcaactattaaaatat

SEQ ID NO: 341338 - DNA, 576 bp, Cannabis indica
tattaataaaaacagattttaatcttaattttacaaaaagtaatattaacaacgattttacaaggaataaagctgagggtggaatgtgatttagaaatttgagagattttaatctcgccatgttaggaaagcaaggttggagactcatgctcagacaggacttcttggtcagcaaggtctttaaagcaagatactattctcagggtgacttcttatatgctgaattgggatccaacccaagcttcatttggagtagcatttacgctgctaaggacacagtcaagttggggttgaggagaggcatcgactctggacatctgtgggaattacttctgacccgtggctgccaatacttgacagagccaccccaattccgattgtccctggccttgaaaacttcacagtcaacagcttgttccaaatgcacagtcgcaactgggatgtcgaagtggttagagatttattctctcctgctgatgctgcaacaattttggggattccaatcaaccaatcggctgagggagactattggtactggtttggtgaaaaagatgggtcttactctgtccgtagtgc

SEQ ID NO: 341339 - DNA, 611 bp, Cannabis indica
cttgagagattgatggctagcttcgtggtggaaaatcgaacaaatccaacagtaatggaagcgagattgtatggatgaactgggatagaatgacaaggaataaagctgaaggtggaatgggatttcgaaatttgaggggattttaatctcgccatgctaggcaagcaaggttggagactcatgcttagacaagaatccttggtcagcaaggtctttaaagcaagatactattctcagggtgactttttatctgctgaattggggtccaaccccagcttcatttggagtagcatttatgctactaaggacacggtcaagttggggttgaggagaggcataggctctggtctctcagtgggcattacaactgacccttggctgccgattcttgacagagccaccccaatccctattgtccatgggcttgaaaatttcacagtcaatagtttgttccaaatgcacagtcgcaactgggatgatgaagtggttagagatctattttcacctgctgatgctgcaataattctggggattccaataaaccaatcctctgagggagactattggtactggtttggtgaaaaagatgggtcttactctgtccgtagtgc

SEQ ID NO: 341340 - DNA, 1904 bp, Cannabis indica
aacctcgagaagttatatgacgagcccccagctcgccatcaaagctaactcggctccattcccagcgagccatccacatgagatgagacttagcgtatatctttaatatgcgttcatctctgcccaataaaagcggcatattcacagctgtgtgaattctaaatataaactgcatttactttagcgtgatttgtaatcaaatcccatgatttcagggaataattgctgtagagattacagtcaactttgtaatttattgttcattgtattattataaatagtggcagacaagatcaaaaaagggacgaaaaaactcgcacaagagagcccctgaaaaacaatcagaaatctaaataagattaactcgtggactgtgcagaagtttaactacaaaaccacataaaaaaccctgtgttcatttttttatttctacatcttttattttttctgtgtaaaatcattattgtgagactcaaatttggttaacaaaaatttgtgctaacagtttggtgctttcattgagagcctctgtgaaaaacctcagaaaagccacctgacataaaagtaatggatgacgccgaagaaaataatcctcatgaaggaatcagtcatggccctggaaaagagccaatgaatcctcagggacctattgagtcctcaatgatctattaagtcatcgcatgaacaaactgtaagccccaggaaaacccaatattggggtccctggcttgacggaccttggataaacaatgaccggtcacttcctaaccaggttgatgagatggcgcctacaacccaattaggtacatacaaattgtggaattagaaaattgccatcttaggcgtcaattggaggaagcaaaccggcgtaatgtcgaattagagcatgaaatagccgcagtaagggcagcgcatgggaatagttctcgatatcaacctaaccttagaagaatagattcacgaggcgaacctcgcaactcgcaaaccaaggggcaggagacaacccagagatatacttagaactctcaggaggtgcatcttgaggaaactgaggaaaatctggggacacaacctagggtatgtggaacatcggacagaaatcgccaaccctctcttcaggttcatcgtaaaggaactcagcaaaccctatagggagaacaaggtgaataaaaccttaagaggaagagcaaggtccgatagcagttacgacaggagtgacctacgagagcatctgaacttgaagaagcctgatctttgtcaaggactcgatccaaaacaaaaggattccctccatttgcgaattgacgagttggagaataagttcagaaagcatcaagtcaggaaacctggaagacaattggggaatgattctgttggagagtttgaatcggaagcattaggatcaaagagaaaagatgattccaaaaggctacccattgataagaaacacaacagatatatccctctttatgctgaatataccgagctcagtgaaactcgggaaaatatctacctcgcacatgtacaggaaatcatttttagcgagctaaaacctatgaaacatgcgaggcgtaaaagggacccaactaaacggtgtgaatatcatgatgatattggtcataccacggaagagtgtcgtcagctaaaagatgagatagaggtctcatagtgcgaggacactttcaaggatatgtaaaggggcaggacgatgttcatgatcagctcgacctgcccaataacatgagtgaccagggactataaccctcctctgtaggaggaagggacacctaggttatctcgagagggagcgagtcacaagaatacaaggggcagttaatccagtgaagcaaatttagtaaaagaattgcgacatgagtaaacatcgacccactatggttgccata

SEQ ID NO: 341341 - DNA, 617 bp, Cannabis indica
tcaacaacattgatccaagaacagtacaaaccatgcttgaactgaaagtgaagttacaacttgagcagtatagctcgtttattgaatataacaggaaaagtatttacagtttgatgtctcaaccaaaaatatctagttacaatgaatgacctaaagctatttatagctttgtcctaagtgtctaactagttactaacagaaataactaactctcaaaaggagtttaacagaataactgaccataactaacacatacatactctcacaatttatcgttagacaactatttatgtatttattttttgtctaaactcttgaattgtgctagattaatgttatgttaatgctatatgaataggttgtttaaataatgaccagaatgcaaccacagggggacatttatagttcgggagggttttgcaacaaagaaaagttcaaggacaaaaactctacaagggtcatagtttaggagggataaatctgattttttcaattatatattacctattatattatatacctcattttgaaattataaaattttattatttctattatttatgtaattatttatttaaattttaaaaaataaattatcattctagttgtcactaact

SEQ ID NO: 341342 - DNA, 448 bp, Cannabis indica
agaaattcaaatttctctttcattattagctatgagatcaaaatctaatagcttaatagttttaaaattaatatttatagttaaatttatttagtacccatcaatgggtaatacccattaagaagtgttccatatatgtatacctgtatatatgtatatgtatgcgtatatatatatacatatatacatatagggatctaatacaataggtattgtaattcttacctattgataggtataataatttatagccattgatttaatcaaatggcttaaattatctcttagaaactacagcgtaattaatatattttttttatttataattaattttaaatattaatttggatccaactaacaatacttcaaagctaactccaaacctataatttttattacctatttaccttataactttttataattttaattaattattttaattttg

SEQ ID NO: 341343 - DNA, 619 bp, Cannabis indica
aaacaccatcccagatgtagatttcctgtcatcaagacatgcctggaaatctgaactggtatagcttacaggatttaaagcaccacccttgtagactaacatgaatttccttgtacttttcaagttcttcaagatatgcttaacaacattccaatgttcttgtcctggattcgtctgatacctgctaacaattcccactgcataacaaatgtcagatctagtgcataacattgcatacattagactcccaactactgaagcataaggaacccttctcatgtcctctatctcttgaggatcagtgggacatttttctttagatagacggatacaaaatctagaaggcatggtttcccgtttggtgttggtcattgcgaatctctctaaaactttatatatgtaagttgtttgagagagagcaaggaatctgttcttccagtgtctaataatatgaataccgagaacataggcagcttcacccaaatctttcatctcgaattgagtgtctaaacattccttgatgttagtcattttcttgatattgttgccaataatcaaaatgtcgtcaacataatggactaggaagactaccacatggttttccttgagttggtaaaca

SEQ ID NO: 341344 - DNA, 1254 bp, Cannabis indica
tattcaaggatttcctcgatatctatgttattgtatttatcgacgacatccttatgtacactcaatcagaagaggagcacgagcaacatcttcggatggttctacatcggctacgacaacataaactatatgccaaattcaataagtgcgagttttggctatctcaaatgtcttttcttgggcacattgttagtaaagatggaatcaaggtggatccgagagagattgaatccatcaaggattggtcaagattgaaaaacggttacaaaagttagatgtttcctaggtctagctgattattaccgtcagtttgtagagggattctctaagatttcaacacccttaaccgagctcactaaaaagaatcagcagtttgtgtggacggacaagtttgaagcaagctttcaggagatgaaacagagattaatcactgctctagtgttagccttaccttctgataaagaaatatttatagtttactgcgattcatcgagatagggtctggggtgtgtactgatgtaggccggtcgagtcatcgcctatgcctttcgtcaattgaaagaatataaacattgatattcaattcatgatttagtacttaccgcggtggtatttgctttaaagatttggcagcattatctctacgaagagaagtgtgagatttacactaaccataagagcatcaagtacttctttactcagaaacatttgaatatgagatagaggcgttggttggagttggttaaggattatgactgtgaaatcctttaccatcctaggaaggccaatgttgtgggtgatgccctgcgaaggaagggtcccgggtaggtaactagtatgattaagatttcacctcagctagcacacgatatggttagctctagtatcgagtttgttgtaggcaaactttataatttgatgctacaatctaatctgttacaacgaattaaaacttctcagttagctgatgcaaagttagtgaagatccgagaagaggtttcaactggtcaaaccaaagattttacggcgtcagatagcgaaatgctattgtttaagactagggtttgtgttccaagaagtacagaacctagaaatgagattctcaaggaagctcatactactccatattcactgtatcctggcactaccaagatgtaccaggatcttaaaccctacttttggtggtgcaggataaagaaggatgtggtagaatttgtatcctagagcctaacttgtcagcagatcaaggctgaa

SEQ ID NO: 341345 - DNA, 1186 bp, Cannabis indica
ggcaaccaattaaataatagaatgagaaaagctatagaagctttaatgcaggtgatttttacgtggttcgatcattaatgagccttagtccacaagtcttttgtatttatgagagtgtttatacagagaatgttcttgttaaatctctctctatctcttctttaccccctttgattccttaattaatcgatcgaccccttttctattctatctatggggtatttatagtgtttttcgggaggatccctagaaaaggatcacttgtctttaagtgttagcctcttaggggcacaaattcctagcagatacaaaataggaaatacgtgatctatgccgcaggtatcttggggattaggtgaatataaccctttatcctccctgattgatgtgagttttcataatggagccatcactagactcgtcgattgtcgtgtaatcgccgtaaaaaaggctcacgccatctgtcaaatcctcttatggaggttttgatacgtttcctcccatgcgacattaaatgtgaaatgattgttcgaacaaactctttccctctcggagatgccttgctacaattctagcctcccggagagtaaaggcatgtcttatgctctcctctgggaagctcactcgtgagatgcacttctctgcctatgacttaaccaatttttgtaagtggatgttctttgagatctacgtgtcgcacgcagtcgctgccacgtattttaggaaaaatctgaggcaacaatattattatagtaaggtatgatacgacaatagtgttgttgaatgtagagataccttattccatagcaatggtagtgctaaatgtaaatgtgcccaggttgttgttggccaatataaccacaagttatgtatgtaatgaccatgatacgataaatggcatgatataattatttaattgtattatggctattctatgagtatgatataagagttatgatctctacgtatgttattatggtttggattagcatagaggcatataatataactttccatgtataaaattatttacttatagttattagttaaagtatgatgttaaaatacttaatacattaagaatatgacggtattgtatatagttgtattgttgtgaatttaagacatatacagtgtattgaatgttaatgtgtgttaaaatatttccttactgggcttttagctc

SEQ ID NO: 341346 - DNA, 761 bp, Cannabis indica
taccaaaaccaccaccaccaatatcaaaacctattttttagttcttaatccaacaaaatcaaaataaaatccaaatcaaattcaattccaacaaaatcaaactaaaacccatcaaatccaacaaaagcaaacaaaaatacaaatgaaatgaaaaaaaaaatacagtgcagttgattcgaagcttcgtcgtcccaacctcctcaaccgagaagcctaactccagacaactatctcatcctcaagctcgtcgattcgaagcttcgtcgtcccaacctcctgcagttgcgagttcctccgtcgacatacagtgccaaagatgatcttgacagaggggagcttagatctcgttgtcctcgacgcccactaagaagatgaggagtgagagagatctagaatgggagaatcaacgttgtatgttcgagggagttctgggaaggaggtggtggtggtgtcgtgcgaagagatctgggcattggatcttgccgtttgaatcattcacgattcccatttgaacggctatgggtttttaattttttccaaatgtgattatatttatttttggggttttagtctttaggttaaatgaatgttcatacctactattaagtgagagagtatggagaagaaatggggttatggtggtgagtgatgtgggtgttggtatggtgatgatggctctcggtttacagagaaaaaaaaaggtagaagaagaagaagaaaaaaagagaagggaaaatgaaaaaaaaatatatataattttt

SEQ ID NO: 341347 - DNA, 902 bp, Cannabis indica
agacatgttggttctgaaaaaatctagaaaatccagcagttaggccccaaaccaaaccttaacgttcaaaaaagggaatggtggtcccctaaccgctggaaagaggccccctccggacacttgccaaataagaaaaccccaagaggctttccttggcaagaatcgggtgcaagaatcccaaaggcagtgacatggaaaaaagaaaaaaaagaagggcaagatctactttaagccctaaagacgttattacgtaagatggggatgattcctcaaacagaaacgtaataacaaagagcgatctaaacgcaaaaaagaggaatttaacgcattatacagtaaacttaggcgaattcattcctagaagtttgacatccaacccagaaatcataaaacatgctatataaacaaacagtaagcaagtatacaatatacgaagaacttacatgaagtttgaaggctgggggttggtgttgatcgctggtagaacgaagactgacatcgtcgaaggaataagagcaagaaatcaatgatgttcaaagcttcttttctctgtgagaaaactctaagaaaatttggtaaaatgttgaaagtaaccaaatgaagtaagaaggctggcttttataggccagaacaagtgcgagacagctgtgatcaaccaccatcgtacggtcaggatgacaatcgattcgaattctacagattcaacgattggattaaatactcatcaaggtggtagaaaatgcttgagtacccgtttgacacccatttaatgcgccatatcaataaatggataggaaacgaatcgttgtctgcaaaaagcaaataactgcagtaatgatggtcattaatgtgtcaccacgcgcccaaggcacgtgccaggaagctgataaggcaaccagagg

SEQ ID NO: 341348 - DNA, 748 bp, Cannabis indica
aagctgcttgagatgagaaatttcttccacgaaattacctgtaaccacaatatcgtcgacataaacaatcaatgctgttaattttccaccaactgagtgttttataaacaaagtatgatctgattggcattgggtgtaaccatctcctttcaacacttttgtaaacctgtcaaaccaggctcgaggggattgcttgaggccgtagagagattttttcagtttgcacacttttccttttgagaatcggtcctcaaatcctggaggaatgtccatgtatacttcttccacaaggtcgccgttaagaaacgcattttttacgtcaagttggaataaaggccattcattgttgacagcaatagataagagaactcggatggtgttcaacttagcaacaggagcaaatgtctcttggtaatcaatgccatacgattgggtgaatcctttagccactaatcgggctttaaatctttcaatgctcccatcagccttatacttgaccaagaatatccatttacaaccaactgtgcgtttgccatttggcaaatctgtgataatccatgttttattcttttcaagtgcttttatttcctccattgtggcagcattccaattgggatcctgtagagcttcctgaactgaatttggaatctgaacttgatccagggtggtgatataaaagctctataggtaggagataagcttgagtaactcaaatagttgcgaatgggatgttgagtgcaagagcgaa

SEQ ID NO: 341349 - DNA, 804 bp, Cannabis indica
gaaggaaaacaaacacggttagagtgaacatttgaattaatagaaaaacaaatcaaaattctaacaaataactgcttacttgtatgtccttccaaactttattttttagagtagggttgacttctttctagtttttataggacagccctatcgtttgtcagcatctgactcctagagttgatacgagcttggcatagtttttcccgcagtattgtcctttgtcatcaacctccagggccactcttttgccctgatccattagtttggatatttcattcatctgtgtgggccctcgtgtaggtattacggctggacactctacctctgcgcctgaatcagatcttgttcccgaggtggccatatctacaccattaacaaacaaaatttaaagttacctatatatataacaagtagtgcatatgaaatattaaatgcataaacaaattgttaagtattgagcataaacaaccacaatataaagtaagatatatatcaagttaccaattagacacgttttcttttcttttttttgtttatgtttgcctgaatcacaattgacccatattccctcactgatatcgtttctaatgtattcatcgtcgtcttcctcaaggttacgatcaattcccataacttgctcatgaattggttgtccagcaatgaagtcatcataacataagtcagcattctcctcatcctcttcagtctctaagaacctcctctctggtgtcgataaaacaatagaccatttatcattagccggatcagaaatgtaaaaaacttgagctgcttggctagccatga

SEQ ID NO: 341350 - DNA, 927 bp, Cannabis indica
aatctagaaaaaaaaaacacctctctctctctacaacactttcattctctcttaatattttgtggcagcagctagggttggagtagtttggtctgaattaagggtttttagttgtaattgagtgctttggctcaaggtaattttccctagtctctccctctttgtgtttcttgcatgaaagttaagttttggtgttgaattatgattctaagtttctatgtgtattgcaaaggtttgagattgaattctaaggttaggttgagattactaaggttggttatagctgtttcagttggtagttgtgaggtttgggtgaggttggagtttgagagctcaagctttgggctctaatggtatttttattttttgggtttgtttattgtgtttttatgcttgaatctggttcactatattgtatacaggtattctggagatgattggagagtttggggttgatttgtgattaagggatcgatttttgggtttccttgcactaaactggttaactagttttagtgggacctaagaaactgggttattccttgtttgattgtaaagtccccaaaaagtgttttagagtgtctctcaccaaaattacaaatgatgtgattaagggtcctgtgaaacgtcgagctgcaattccactcaggctgaccggcacacctgagcacggaaatgaggtacgatagcataaagtatgtatatgtgaatgtatgcttgttattaattgattacactactaacactaatgaaaatatagttttaagggtgttggtacagtgtagagttttagagtagttacggtgttaccaacacgagtacagaattagtactctagtgcatggggtacaacacttggtaacttctgggagttcaaattggccctaccaacacgagtacgaagtcggtactctagtgcatatggta

SEQ ID NO: 341351 - DNA, 798 bp, Cannabis indica
aaattgaccaagtggatctttccattacttacatcttgagaacatggcagtaaaattgagtgagagcgctaatcatagatatagatctataacttctataactatttaaaagtgaaacgatgatttcttttgagcttggcttaatgcgataaatgattgaatgctcatttcagtaattatattaattttagaaatatcatttacaagtagctaaagtgtttaaaggataaaatacattgaaagatagaacggtaaatttacccctactcgatgtagatcatctatagattgaaacaatggacaattcaaagtgcaactatttttggtatatatagtgttctatgtaatcaatagtgcaattctaaatctatagtggactcagggagaattaataagttaagaaatttactaggtaaatttcggatctacttatttggagcttgattacataaggccatggttcccacattaactgggataatattgttttgtagtctcggttagttagttttaattaattaattagaattctaaataagactatgtcttgtttgtgaattttcactatgtaagggcttatttaagaaaaaaagaggatttatggtttattttttaattaagagacattgtacggtctaattaataaataagttaaatgacaatttgtttgataattaattataattattaaataaatacaattaaaatttatagagttagaattaaaagatggtatttgtgaaaagaaagatgagttaaataaaatggcaaaattaaaatccataaggcccatatagg

SEQ ID NO: 341352 - DNA, 642 bp, Cannabis indica
ttttttataaactaaaaataaaattttcaaaatatatttttttaatttaaaaacctttaaagttaaaaatttatttctgataaggctttttaggggcgactttagtgtaacgcgctaacaataggaacgtcacacacagtgacttaacataaattaatttcgctaaaccagaatttattagagctaaactagaaaattaaacttttaaaaaaataaagattcaaaataataacttgtaataagaaactttacaaacatccaaaaatacacattttaattcgagatccttaaaactttttcaaaatattacaagctatttatacatgccgacctaagcggcaaaagtagagaacccgatattttttccttggtagacccaaccctcgtggtcgagcttagccatgaacatgtacaatacaccgcaaagccctcaatctcatggctgatcaacaacaaatttactctttcttgcacaatagagtacccgtgagccaaggcccagtaatacaataataatattatagtattataatcataataataattacacttcatacagtacgccactgcgtatatattgtgccaccgcactttatattacattactctatacataataatgtcactataattaatgtctat

SEQ ID NO: 341353 - DNA, 682 bp, Cannabis indica
ttttgccccttgtggcaccttttttttgtaaagacaaatttgcaaggttggatggccaactttgcttttatcttttttaaatgtttcgtacttttatgcttgaactttaatatatacttgtttgcttgcgtttttattcacaatttaaacaattatattttgatcaaatgcaaaatactttaggcctttccattgctcgtattttcctctggtaagtagttagtagctactatatgcgcgagcagtttattatctaccacgcttttcatttgcgagcagttatcaattctatctcgcaataacagttataatttgttttaaacaaacttgaatatactattaatgatttatcactttgaatgatttatcactttgtatatttttgattgcttatatgaatagttagatcgtctattcatacattaggtttaagtacttttttcaaggcatctttgtgtctcgtataatactttcctatacaatacgagtcgttagtattcagcttcacatatgagttatgagttatatctcatttacaacttttgattttcctttctcgtccacaggtttttaaacaaaaagttatttataatagtttgattctcctttctcattagaaaggtttgatcaacaaaaactttttaaaaaaaaaattaaagtggtgggtttgcactatatcatg

SEQ ID NO: 341354 - DNA, 2256 bp, Cannabis indica
tttaaaaaaaaaaattaaagtggtgggtttgcactatatcatgtatttctagataaattctggttaatcatacacatatgcccctcaagtaattttaaagagtaacactttataattacttaaaaaaataaatgattaactttattcattaaaaaaatttcaaaatattacctaaaaaatgtgagttacaatcatcaatatactagtagtagggtcgcaaatgttccatgttccagtagttctttatcagcgagccattctgccgagccaatttgtaaatcccatttcctactatcgcttcaatcacataaggaccctccaagtttgagttgaatactcctgcagatgagtctctcgtatttgtaaataatcgccttagcaccaagtctccaacattgaatagcctctttttgaccctgttgttgaagtatcttgttactcggtgttggtacgttgcattagtaatctgcgactcagtacgtttttcatagaggagatcccaaggacaatcttaagagttcttggttttcttcttgattataaaactcttatctatgagtctagatatttacttccacaggtaacattgcttctgagccaaatgcttgcaagaatggagtatgtcccattgctgtcttcttagtttttctatgatcccaaagtacttgaggtagttcgtcgacccatctacctttggcatcatctaacttcttcttgatagtatccttcaaggttttgttaacagcttccacttgtccatttgtctgaggcctggatactgacaagaagctcttaattattttgttcctctcacagaactcagtgactaagtaaccatcgagttgagttccgttatcggatactattttcattgggattccaaacctgcagacaatgtttttgacaataaagtcgaggactttcttacaggttatggagacaagaggttcagcctcagtccatttagtgaagaaatcaactgccaccactgcgtacttagctcccccttaccttgtgggaagtgccccaatcagaacaatcccccatatagcaaatgggtaaggcgaggtcatcatcctcagtccgtcggtggtacgtgatgtatatgtgagaatctctggcacttatcacattttttgacaaattcgtgggtgtccttgttgattgttggctagtaatatccttgtctaatgatttttttttgatagactttgccatcctgcatggtccccacaaaagtcttcatgaatttctgtaagaagaggattttcctctagtgttattccttttattagaaagtctaccaaagcttggccctttatggatgttcaagggtgataagttatgtcaaactgccctagttcaattgaccattttatcagtcttccagaagcatctggttttgataaaacttgtctcaagggttgatcagttaacactttaattaggtgtgccgggaagtaaggacgtaacttgtaagatgtgtggattaagcataaggcaagtttttcaagagggggatacctcgattgtgcccctagtaaccttttactgacataataaataggttgatggtgctttccctcttctcgcactattgttgcactaatcgcgtcttccgagacagctaaatagaggagtaatgtctctctagttactggtttcgccaaaactagaggtgtttccaaatgctttttaatgctctgaaaggcctcctcgcattcctctgtccattcaaatttcttgttgcctcacagtacattgaaaaatggtagacacttatcagttgacttcgaaatgaatctgttaagtgcagccatccttcttattaaggattggacttccttaggtttggttggtgatggcatatctatcaaagccttgattttctcaggatttgcttcaatgcccctcgcgttgactatgaattccaaaacatttccggaggaaactccaaaggaacactttttcaggttaagtttcatattgtacttccttaatattttgaagcactccacgaggtctgttgtatgacttccactctttatcgattttaccaacatatcatcgacataaacctccatgttctgccaatctgattcgcgaacatttcatttactagtcgttgatatgttgccccaacattcttcaacccatataacatgaccttatagcaataaaatcccatgttggttacgaagcatgtgtgttgctgatctaggacatgcattttttatctggttatatccagagtat

SEQ ID NO: 341355 - DNA, 527 bp, Cannabis indica
aatccaaaattacttcaatttcagtaagaaaacatcggaactagacccatgactacccaagaataatcctataaggtcagaaccttcatgactattctaattcacaaaacccctatacgaaaccaattgttattaaacttaaaacgaaattaaaccttaccttaagctttcccgctctgagaattcgttatcctgctactaccggagctgagatcgctaagtttcagattgaaaatcaaagaaaataagtataaggagagaaggtttaagtgaaggagaaggaacgagggtttcgttcgttctttttctgcttcaaacttatataatataagttataacttatatataatctatatatatacttcacacgatcaacttttcaacttttaaaaaaatattataataataataataatattaataaaaagtttattattaataattatcttatcatttcttagttactaaaaaacttctacttctagggcgctacctaaaatctcatatactcttaattatcctaatac

SEQ ID NO: 341356 - DNA, 635 bp, Cannabis indica
aaattctagagcgagctacatgggacaaaaatgcccccagaaatttaagcaataaagctataacatcctcaaacagcacacccaaagagttagagctttaacttcatactacacgccaactcataaatatatcaagaatgatccccaaaatatctacaaaatagaataagataaaagtgaattaaccctctagcgataatattaaaattaataaaagaaattctcaataagtaagagataacaactctcaaataaattatatttaaaataaacttatcgataaatctctgtaataattggccctcctcaaaactgacctacaaattaacaaaataaaactttattaccacacaatttaaagaaaaataattaatgtgaataaagatggtaaaacaatccatattataatattaagacttgaaacacttatctgtcagatctgaaaaaattatttgtagaagacatgagtacaaaaaaatattccttgtgcccattgaccatatcataatataccttaaataattaggggcaaaccataaaaatgacacaaacatccataaaaagcatgagaaccatcaaaaaataggggcaaaaaaacaactcgtcatcaatcctaaatatcactattaaactct

SEQ ID NO: 341357 - DNA, 507 bp, Cannabis indica
tttctatgaaatactggttggaaaatattgtctttacattgattaggtacttaggaaggtttggtggcattcggtagaaaattgagcaagaagtgaaaagtttggggtcaacttgtgcaaaccggctagccggttttaccagacctctaaaatcggctagccggttttggcagggtccccaaacacttcactttctcaatttttgtccgtttcagtgccgtggttgggtgtttccctatttccagagtttgtgttatctctagggagtataacaaaacctagggttgtgggttcgggtttcccgagattagggttttgatcatgtaacttacctcgtttcataatgtgattagggcatcgatctagctcgagactttccgttcaggtcggccagcacatttgaattcggaaagaaggtaagaaccgtatataatgtgtgatatcaatatctgagtgcatgtatatgttatgtgtacatgcatgcttaatgtgttagttgcactacca

SEQ ID NO: 341358 - DNA, 611 bp, Cannabis indica
ttttgttttgttttgtttttcctttgtattattatccttttttatatataggtttataggttttcagtgtaaagcattttttttgtcatggaaattctttattttttttctttcccctttgccatcttagtgaatggtaagaataggaggggttgtattggcaaaattacctgtctataatgatagtcaatagagttagttgtacacaagtcacaagggtcattgttgttcctctgctctttattttcttcattattaatttattctcacgtggaagggactaactaacaaatacactcttaacgatccttactattcttccttttcattttctctaataacattttaagcaacacgctcaactcggttatattgattacagtagcacatgctttagatcaaagtgttgaaacttgacatacgattggttataaagagaatacatgaaaaatatgcataataatgtagtagcgatatgacccagctgctctttaattgttgggctttcctaagctgtgatgtgttcaagcaaccttataagatatagaggaacttatgagcaaattacgttatatattcactttataaaatttattttaatttttacttct

SEQ ID NO: 341359 - DNA, 1281 bp, Cannabis indica
ttggtagttgttttgatagctttaagaaacacaaaaacattatctgtaagaaacacccacttattaataatagagactacggtttattaatgcccgaaccacgtaaaaatatatgcattaattatcctaagctatcattattacattaaatatttggttaccgaaaacctcaatcaataaagacaaataatatatattttttattttaagtctctacgaaataaaaattatagattcacactaatcatcgcatatattttagtaagcaaataaataattttacctttatgagatatatattattaattcttttattttttttatggtatgagatatatattattagatacttgtacaattaaaattatgatataagattgttaaagaaaagataaggattatatgaattatttttcttcttaaaaagatataaaaaattatttatttaaatgttttttttcaagcataaaattaatgctaattttgaaacaattattaaattattttagaaaaactcatacaattcaaatacagtttttttttttacaacaataaataaataaataaataaagtacatttttctttatttggaatacattttcctttgttattaatacaatctccaaacaataaagaagaaagaaatttattttttcatccctaaaattaatgatttagaaatttgagaaaagtaaagtaatttaaaaataagtttttcccctacaatactgtagaaaccggttgagaaacttgtagtgagaggccaaataataaaaagtttacctggatctatagtaagagaattttgtcttatgtgtgggatctcacaccttaaagcatagtgagggattacataaaccccatatatatattagtaggctttggctgtagtcccattgttaacaattcaagggatggtcctttgacaggtgttgggcaagcattggtctttgtaatattgtcatgtgtactattttgttgatatttattttatttttggtttttaaaaataattgatacttataattgtaggttttgtaaccggatgaagaaaaagacaaaaatttatgagagtatttttggagtttcaaatcacttaatgaagggtaagtttgtatttacacacaaattaaaaattttgtaatttttgtgcaatgcataaatttgacaacatcacatgttggtgaacaaacaacaaaatttaaagaccacttgcacatcaaattttgacaagttatcatatttaagatacaatcacttttttatctcaaaaaaaaaaa

SEQ ID NO: 341360 - DNA, 878 bp, Cannabis indica
gggacgtcgtttctgctggaccggcggcatgtccgtgttgacatttaggacatgggtgatgacatgggggcttatgtcgtcatgtcctcttggcaccacgcaaaaacgtcaatggcacccctcaatgtctttattattctttctttttcctccggttctaggctcttccctagccggaggactttggtggagtcgaggtcgcacaccgacactttctcgacgtcctccattggttctacaattttctcggatcccacacgaggatccaactcattttcttccgccatttctggctatataatttctcggaccatcaacacgggtaggtgggcagcaacattatagcattgcctagcttccccttggtttcccctcacggtctcccagcctcctaggttgggaatttcaggcacaagtgccgtattgacgtgaccgcaccaaagtccaccaaggtcggtcggccgaggattgcgttataggctgtcgggcagtccaccaccacaaatgtgcagtatttgaaagtgctctggggtgtgtctgggcacaaggtgacgggaagcctcacttttcccatgggaataaatgttgttccattgaaccctgtgggttgggaaccacttggtgaaaggtctcggtccgttaggcctattgcagtgaaggcctctttgaacagtgattcacggaacttccattgtcgatcaggactctagccacgatcttattggcaatgggggtccctatgaccaacgggtcatggtgaggaaaacacactgttttagcgtcttctttcgtgaaggtaatggattgatccattagtcggggcctttgagttgggagttgagtaacttccaaacctcattgtgtttcacggcccctgc

SEQ ID NO: 341361 - DNA, 618 bp, Cannabis indica
gagaatgcaaccaaggcgtaaaagagaagtttgagcgttgacagaatgccaacaacaaagctcaatacttcatgttgtctagcatggttgacaccttgaagacaaggtttgctaacactctcacggctgtagaaatcatgaaccacttaaattaactgtttgggatggcgtcaattcaagctcgcttggaagcgactaagaatttcatcaacgcacagatgaaacctcatcagaacgtgtgtgatcaccttctccagatgactagttacttccaggaagctgagaatcatggagctgttatagatcagacaactcaagtgagtttgatcttaaacagtctgatttcagcctttcttcccttcacttcaaactatgtcatgaacaagttggagcttgactttaacgagttaatcgacaaccttcacacatttgaaaatttgattaaaggaccatagaaagaaggagctaaagctcctaattctgtgaatgctaatgcggcggctaaggctgaggcaaacattacctctacttccaaacccaacaacaagaagaagtggaagaatagcaagaagcctgttcaagctgtgaaaacagttaaaaagaaaaaggttgctaatc

SEQ ID NO: 341362 - DNA, 542 bp, Cannabis indica
ataaagttgtttctgtcattccaaataagccacattgtgaaaaaaaaatcctttccatatcagccttagagacaatggtaaataaatgcataataaaatctccattcttcatcctcgaagcagctgcataatctatgaaaaaacaagcagtcctccaaacatatttggcatgtttgcaccagaataaggcatggccaacagactcccatgcatttgtacaaaggttgcaagcagccgagtctatgatcttcctttggaatgaagatgcagcaataggaattgcatcgtgagacactttccaggtaaaaatcttggttttcgaaggaatattcatactccaaaagtatttccaccaagaagcctgatttgtagagcttgaagactgatctgcctcttcaagggaatcggctaggtgataacctgatttgactgagtattccccttagtattcttcatctttagtttagtagcagattctcaattttgtttgattttattggttttactttcaagttacaatacacgcttttggagtttactta

SEQ ID NO: 341363 - DNA, 594 bp, Cannabis indica
aaatatgaaaactactgaataacataaaatgcattactgaattcaataaataacagtataaataaattatttaaatagatataaataattttcataattaatcataattaactgctaattttcaaattaaactgagcgggctttacacccaacgtactatgctgtatatgttgagataaagaattatgtgggtaacgcataattgggttagactcagtaatcagaactaagataaaccaatctaaggccttattgtaaatagacttgtgagcgcaacacgtaggtctaggttaaatagacaatagatgcggtggcatcgatatttatttgaattgagactacattacatattgttatttatactatcttgttggacttggctcacgggtgctctactatgcagaaaaaggataaatcagtttgtgattagccatgagttcgagggcttggcagtgtattgtacatgttcgagccacactaatccacgggggttgggtctactagttgatgtattttgtattctcggttttgccgttttggtcggcatgtaaaaataacttgtaatgttttgcaaagatttttacgggatcccga

SEQ ID NO: 341364 - DNA, 658 bp, Cannabis indica
gcctaaaaaatatcaatataatagtcatatatagcccacagaattaaatgagttttcaatattttcgcctaattaatatgtaccagacttacatggtagaatatggtcctctttgcctaagttttttttttttttttacacggtgattaaaatcacacatgattaacaaagcagctattataattgacggcggtacgataccctcttaaactaggataactcattgtctaaccaaatggcatgctttatcaaactatactttgcctgagtctatttgtttatagctaaaattataagatcatttccaaaaccaaaaaaaaaaaagtattatatttgctacaaaagacttaatatgtgatatacattacaacatctatctaaaaataactttattcaagaataatttttaatttgttgtgaaaaattaaaatcctaatttatgttagttattataaaaataaactccgaattgtaattagttatacattttatatgtctcgtattaagaaaatatacatttatataaaaaaattatatctcaataaaatatatacatatagttataaattaattatttatgtacaattaatacttttttccaatgaataaatattatatttattcaaaaataatttattataatataatattaataatt

SEQ ID NO: 341365 - DNA, 723 bp, Cannabis indica
tttcttttttaaaaaaatttaatatacaatgaaaaatttagcagtaaaaagcatttacaaaacccaaaaaatacattaagaaaaattgaactaaaacattcaatttaatcacatactaaattactggacaatgtttcaaacttatcaaaaaaattcagataaatgcttcaaatttcctatgcccgtcgaacaccaagccccatcccacttaaatcaccaacccagcatcccgtcagccaccaagctttcgaacacagacaggcgagatctactcgagcttcaagccttcgaacacagccacctgcataagagagagagactgagaaacacaaataaagaaaagggaaaaataaaaagccatataacagcacccacgactgggggaggcgaagagaagtcgaggtagagagaagtcgaggcagaggttgagtcgttatctcagatctggaggttgaacttctgtcgtggtaggcagagaagctgaggtagagagaaaatggggtttatgttgcacttcgtcgaagattggctgaggtcggcggagaaaaaaagcaatagctccaattgagagaaagaaagaggctttgattgacagaaagaaagagagagggaggcgtgaatgagagaggggagaatgacagaaagaatgagatagatattagggttttattttttattaaagagagagagagagagagagaagcagtacatatactgcctttt

SEQ ID NO: 341366 - DNA, 798 bp, Cannabis indica
tgttcctttcacagaactgagtggacacgacgccatcaaactcggttctgttatcggatactatcttcatgggaattccaaacctacagacaatattcttgacaacgaagtcgaggactttcttgcaggttatggaaacaagaggtttgacctcagtccatttagtgaagaaatcaactgctaccactacgtacttggctcctcctcgccctgtgggtaatgccccaattaaatcaatcccccatatggcaaatgggtaaggcgaggtcatcatccttatttccgttgacggtacgcaaggtatatgtgaaaacctctaacacttatcacacttttttgacaaactcatgggtgtccttattgatcgttggccagtaatatccttgtctaatgatctttttagataggctctgccaacctgtatgatccccacaaaagctttcatgaatttctctaatgatctcgattgcttctataggaagaacacaccgaagtagaggcattgaataacctattatgtatagtttgccttcaattattgtctatcgaggctctgaatacaagagttttcatgtcttgctttgtcaattggaagttgcccatcgagtagatagttgattataggggtcatccatgtaggtgaactgtctatcatccctatgtcttccttttcatatatacttggctcgcttagcatctccactggaaccatgttcaatttatccaagtcgttctgtgaggccagttttaccaaggcatcagcgttagaattttgttctcttggaatttgctcgattt

SEQ ID NO: 341367 - DNA, 606 bp, Cannabis indica
ggaacgctcatccaagtcaaagcatattgacataaagttcctagttgtgaaagaaagagtgtagagtggacaaatatccatagagcacattgggacaaactccatgatagcggattcgctcacaaaaggattaccacccaaggtctttcatgggcacactactcatatgggtgtagtattgcttgaggatatcatgatttagtgggagtttttattttctttgcttcatgtttctttaagacatttatgtatttggttattttctgattcaaaaataaagtttcagtttattcactctgttttgttatgcttaagtttgacctcactttggtttaaggacgaccagttggaaataggcatttcggttcacattgcatgtaatttccatgctacacatccatgattgatctatgtcatttggctatatacgtatatgtgaccattgatgggtttagtcatgattgatttgacaaaaatcgctttgatcctatatgggtatagttgatggacgacattgttgtgaatacctttacataatagcaaattttgagctcataagattatatatttataaggtaacatatgttgcccaagtgggagattgtt

SEQ ID NO: 341368 - DNA, 622 bp, Cannabis indica
atccctcccacatttactcctagttaaacacaacacaaagtccatcgaaatatcaacccatggtaaactaagaatagctagggagtgtgtaaagaccatttggttgaaccctcgatttaacttgcttacaagtgacacatctactacaaattcataaaaacaaaaatagtttttttttattcaacatcatcctataaatagtgataacattttttattgttctcatatcaattattcactatatatattatagttgattagtattgccttaagtttttgttttatgtggtagttttttttaattattgatttttttaaggagtttttacaccacatactgaaatttttaatttttttacatttttactatgggtagacttttttacaaaaatactgtgtaagttttatatagtgtactgataagttttcatggttgttctacgatttttttttagttgttccactgtatatttaattgttcaattttgttgttttacggttattttataaaagacagtatttttgtaaaacattctgtgtaacatattgggcaaaaatcacttaatgaccgtacacttaaagggaccattctctagttacaattttaccactttatttcaac

SEQ ID NO: 341369 - DNA, 529 bp, Cannabis indica
acatccaaaaattgggtagtcgcatctgatatccaccataataccagggctcaaatttaattcactccctgtatagattctaggtctttcacctacaggtgggtgtacaactgatctacctatgatgacacagagactaggtcgtgaaacaacaatatgcaccgaacatgatcaacatggctctcctcagtataattgaagcaggtaagtaataagaataacaaaagaacatattcctttttattttctaaaaaaaattcagccgcatataaaagttgtattttgaataaacccaaaaatcatatcctgcataaatatttgtacaaaaatatattcggcacttagtgccccagaacagtccagaaaaatatgcagattaagttttcaatttttcaaaaaatttgtaaattataaaattggagtatgcccaatgttatacaacacatataaaaatcaagtccaataatcaatttgagtccctacctctcccaagtcgttaaaccttttccaaaagacgatcttaagctct

SEQ ID NO: 341370 - DNA, 598 bp, Cannabis indica
agcaaattcagccaagcacttcgtgagtcaccagctcaatccctataactcagcgatcaactttcgtggatattggcatacacacgattccactatcggtgtatacgacctcaatctcacgatcctagcattcagcaatgatcccacgatctttgtgtttatgcactttgtaacgagagaggaaactcttcctcctcaagtttcctgccctataaatagtgaggaatgttcactgggcaggggaggagaaatcatacgccgaaacgctataagctaaggctatctaagatttatatattcagatatactattgtaagagctataagaaaaggaatcttcttccttattcttaagtcaatacaactaacgaggattaggctattaccgaactgctcggggctgaacctctataaaatttttgtgtcttcttattattattatttgctttattacgtatttttattacgacatatcgtttatcgcttattaaaagactcattgtcgttggctaagatcgaagtcaacaatcacaatgaatcaatatttatttaaactcatgtatactatatgacattgaacttcaggttcaataaacttc

SEQ ID NO: 341371 - DNA, 786 bp, Cannabis indica
ataaaatggtgagtgaaaggggatgatcaattaaagagcttagtaaggtagagatatagttatgcaaattatattctaataccgatattaattcataatgcagctgtaattctacaccattaattacaactggaagatatatatattatgagcacaaattaaataatcttgaataaattgaatctcacttctaacttaaaagcatattatattatatatcataaatcgacaaaataccactattggcagaatgcagtaaacaacatacaatataataaatacactaaaataattaatagcctaacttatataagaaaagcatgactgaatttatatataatatactactaaatttagaataaaaattagaagatgaagaacaatttaataatgagatatggagatgaagtacaaaaaaaatcaatgtcaataacagaaataagaattacaaaagctatattctaacctcatcaatattactattctaatacagttatttttgtcactaaaataagtatagataaaatagcaataagagagaaaaataacaaagtgtattttctactctctataaaatctgatactttttacaatgtcaaatggtgttatttataatgaaaatttgctttttacaatagcatttttgtgtacacattagtgggaaatatgactaaaaattgagaaatgctaaagggcaccagtggtgcctagcaccttccaatgtgttaatatgttaatatcgctattggtttaactaaatatcgggtcctacataatttaatataa

SEQ ID NO: 341372 - DNA, 573 bp, Cannabis indica
gagcctcgtattcaccagatacatgaattaccactagctgtgaatcactgaagatctcaatgcgctcggccttcatctccttctctagtttgagtccagcgattagggctatgtattcggcctcgttgttagaggctttgaatctgaatttgactactgcatgcaggtgttgcccctcaggtgtgacaagggcaattcctgcaccggataattgatcttttgccgacccatccacatgtagcttccaggtcagtttgtttttagtattactcgactgtggtattggctcaagatcactttctggtatgctttcaattttgcctgtgcattccaccacaaagtcggccaagacttagcctttgatagctgttcggggttggaagttgatttcgtacggccccaattctaccgcccacttgagtaaccgtccagtggcatctggcttttgcagtttttgtcgtagtggttggtcggcgtacaccccaacaggatgagcctgaaagttgttgggttttatgccctaaataaaactcatttcaacataatcaaatttgcttattaatatagatcaga

SEQ ID NO: 341373 - DNA, 669 bp, Cannabis indica
gcaagatgttgaataattttttttaatggctaacactataggaagtcttttgactcgtagacatagaatttatttatctaaggaacagttttaaccattccagaaaagataaaggccatggaaagaattctttaaaaatcaacagtaagatgtctcatgtatgctctggtatatgcattagaccagacacttgctgttgagtggaagttatgagtaagtattagtttaatctaggaaaaggaacattatcttaagatcaaaagaggaactatatgttagtcgataatggtagaattttaatactcttaaactacaccaaatcaattttctagacttgtgttaatgctagaaagtctaattatgagatggtgattactctaggggtggagcagtgatttttagagaagtgtagaaacctatctgaagtctctatctctaccagtgagattgaatgttaaagtggccaggaagaaagttctatacagtttttggcgttattccagtcatggattaactactagtgttgcttcctaactaacacagaaatagttgccaaacagtaaagaatccagtatcctaatatgagtaaacatataaagaggaatttcacaatatcaaggattttgtgactaagaaaatgtaatggtggagaagtttgtagtaaataca

SEQ ID NO: 341374 - DNA, 406 bp, Cannabis indica
tagggcataaaatccaacacctatgtcactatcattgccccataaagaaaacgataagtaagcaacctatcagcggtttcaggagtaattactcataacggtaacgaccgtatcttaatacattcacaacaacgttgataatcgtgttcttccctcaatcataaccaattcacaaacgacaataatcgtttctcatcattacctcgattaccatcgagtcacaacaaatacatattagtaatctcgatcaagatcgagtcaaaacatatacatatcgggatctcgatcataatcgagaccataacaatcatatcgttaacaataaacagtgcttaatacttttcttacctcaagttttgttttaggtatgttggccgacctttttggagaatgattgatcatccca

SEQ ID NO: 341375 - DNA, 1253 bp, Cannabis indica
gttaacaaaaatttgcattaacagtttagtgctttcattgagatcctctaaaaaaacctcagaaaaagccttcccttctttcaaagaaaaaaccttctcctttatggctgaaaacccagagaatattaacaccccacatgaggaaactaaccgtctttctggaaaagagcctatgggctctagaaaatcaactaaaccaccatccagaaggactacccgtttcaggagggcccaacctgaggatggtctcagtgctcggaccacacatccctagagaactcaacccgacagttgtcctagtacgaagacaacacgctcgaggagaactcggcgtgggaatggacagaatcctgaggcaggggatgaagagctcaaccgtgggggtgcccaatctgtgggagaaataacttatgaaacagaaagtcgtcgcctgagacgtcgtctggtagaggcgcagcgtcgaaacgctgagtgaggacgagaggcagcgtcgaccagggcggcacaggggaggaacgctcaaaatcaacgtgaacctggagtgagaagaccgcaaggcagaccttatggcacatgaaccaggagacaggaaaaggcctgggaagaacaacccagggaaatggagacaccccctgaaaattaggatgaacagccagaaaggagacaaccggaaactgatgaactagaaatccctcatcaaaatgaggaagatcttggaactcagccgggagaacggagatcacctactaggaatcaccagcattcttcccaaacccatagagcgaggactcgtacgtaccctgatgggggaaatgtaagaaatattttaccaagatcttagatttactaacaagtatgttgtttaacatcctaaatatgaacttctaaaacgatattaaataaacacatataaagtatgagaaaccttacattggttgcagcagaatatattgtctccttccactcagatctctaacccttgtatcctttctatcgcagagtatcaccaagatctgagcccgaatgtccttctgttgaattaggattcttcacgatcttccacactatgattgaggtaccacttgatgtgtagtgggcactcactctttcactcaaggggttcggtttcaatagtgaaggagagagaagagaagtggcggctaggttaatggtagaaggcactcaattgggattcaatgccaagttcgatcaaatgatctttgaactgcatattcatatattctccaccccta

SEQ ID NO: 341376 - DNA, 751 bp, Cannabis indica
atacttcatctcattcatagatgattactcacgctacatgtatatctacttacttcataataaaagtgaagcattagatgtctttaagatatttaaagctgaagtagagaaacaatgcaacaagcaaattaagatagtgagatcagatagaggaggtgagtattatggtagatacacagaagatggacaagcacctggtgcatttgcgaagtttcttgaagaaaatgggattgttgcccattacaccttgcccggtacacccgagcaaaatggtgttgcagaaagaagaaaccgaacattaatggacatggtgcggagtatgcttagtagcaactctaaccttcctaaatccttgtggactgaagcattaaagacatccgtgtacatattaaaccgagttccaacaaaggcagtctcaaaaactccttttgaattatggaaaggttggaaaccaagtttgaatcatgtacgcatttggggatgtccatctgaagtcagaatatataatccacaagagaagaaattggacccaaggaccataagcggattctttatagggtacgctgaaaagtctaaaggttacaagttttattgtccatctcatagcacaagaattgtggaatcaaggaatgcaaaatttcttgagaatgccttgatcagtgggagtgatcaatcaaaggacttaggtcctgagaaagatccttcagaaccttccacttcaaaagcaagattgataatggttaacactcct

SEQ ID NO: 341377 - DNA, 786 bp, Cannabis indica
taaataagacttggggggtaaatgttgtctcagtttattcccaatatacatggttgctgctatgtatgacatgtggacaaagaagacacctcacccgaagataagttaaaagtcgtatggaagaggcaagaagtatggttcgtggcgttagctcccgaacaagtgcaaaaggcacgccttctcctctgagagttaagatataggaaggtacctccaggacgagaaggatctacttgaacagtcaccttgcatttaatgcaacatggggaaaacgtctgggaacgcccataagaggacatgtctgacatcgtaagcctgatttagggcgattatacgataatcaaatgagctggtgatgactccattatgaagaatcacatcaatcaaggaaggatgaaggctaatctcacctaacctctacgatgcctactatgtgggtaatgcatgctctattttgtatcttttgggaacttgtgcttatccataattggctctcaaagacaagttacctcttttcgactattcccaccaatctctataaatacctctgagaaaatgaggaaggggatcgaaaaaagagagagaaaaaacacacaaagaacattctctgtaaggaaatactctcattaataatagagactcgtggactacgactcattaatgcccgaaccacgtaaaaatcatctacattaattatcccaaagctctcattattatctcatttaattggttgccgaaaacctcagtcaacactaataattaatgatcctctatagatgatctaca

SEQ ID NO: 341378 - DNA, 1097 bp, Cannabis indica
ctatctctctctctctctctctctctctctctctctctctctctctctctttgttttatgtgtaggtgaatgacattcaatgggcttgtattcggctgggaggaacttggtgtttggggtctcggcttgctgttgatgggatttagatatgtaacttttttaggtttcttttgattccaaaatataataaattgtattacttatctttggtttttttttttttttttttttttttttttttatatagaaactgatttggtggtttgtatttagttcctacaaagtttttttattatgttgattaatttataatttttagtgattaatttataattttacagcgaaagtatatgtatatacactattaattctcaatcaaaaaatatcttttttttcttatgtatattattgtgttgttttttagtaaaaaattagcaattatatatatatatatttaattactgtttttaataaataatatattacattaataatataaattattatttataatatataaaatttaaattaaaatattaataaaaaaaagaaaaaaaagggatatagtgacaccctatatgtgttgctgtttgctgttattttttcagtctgacaaaatttgactttatacgcctatagtgacgcgccgaaagtgaatgcaaaagggtttagtgacatgtgtggagtgtcactaaaaactgtttttagtcaccttcattagtgacgcgctttgaagtgtcactaaacagttttagagttactcaatgtgtgtcactaaaacccatttttctgttagtgcttgctatgtgtgggcacgacactcattcactcaaggtttcaaatgggtgaagaacaatgaaggaggtttgaatcactaaggaaagaactctctcatctaggttggttgaatagtcaagatgataaaaatttgacaaagtgtcaagtggatgagatgagagcatcatgtttcttttatagtgttttaactagggcttagggttgaattatatggattaaaaaaataaaatattggggaaaaatacttcttggccgtacacaataagtggaccaaaatctagttatatttttgtcacttt

SEQ ID NO: 341379 - DNA, 546 bp, Cannabis indica
aaacaataacataaaattgttggcagacaaaaaaaaaaaaaaaaaaaaacagtataaaagttaatttcgaaaaaaaaaaacagtataaaagttattttgggcgtgtaacagtataaaagaaagaaaatgggaaaacacagtaaactgtgtaaatttcccttattttatccataatagtctgtcattattaatatcaatattggtagaaaataaataagcatcattttttactaccaagccgcacacaaaattgattaggaattcaactacaatgctgtaaattcgcgtgtgttgttctgactcgatccatatttgtatttttccaatatgggtcgtgatgtgtcgtactttaaaaaaaatataggtcatgttgtgtcgtgccaccattttcaaagagtaggcccggcacggctcgtaagcatagtattttcgtgtcatgctcggattcgtgtcgtgttttgctcgtgttgactcgtttttcttaaacatgccagtccgttttcatattcaggctcgaatttgtgttttacttttttatattttttt

SEQ ID NO: 341380 - DNA, 487 bp, Cannabis indica
ttttatgaaaaacaattgaattttcattctggaattattttttttggatagtttggaaaaaattaagcaattcactttttacagaacttgatttcgatttaatttgaattagttatgattttttgaagttttaaaaaaagatagtaatggtaacaccccatacgcgcgcggatccgagtgatcactcggtcacgcgcgcctaagacaagaggctgtccaagatttctcgatcggatgcctctgtttttttgtctgaatgcttggctccgagcgtggatgaggctgcttgcagcttttctcggtcgtgcatcccaggcagcgcgcgcagatggtatgcaacgcataccatccgtaccatttacaatttttttttcaattttcttcattttttcatgctttttcatggaattaatttcgatttttttgtgtaattttgtatttagattttttatttttcatatttcaaatataattatcagaattaaat

SEQ ID NO: 341381 - DNA, 619 bp, Cannabis indica
tttttaattgggcgggttacaattaaatatttgcaacctaatatttattttaagttggtaaaaatatactataacccgactaaaccgaccgacgtacacccctaaaaaataggaccctgagcttaatttttgacaactttaatataaccaacttgaagataattcctaacatgaacagatacataaaatataaatagttgtgttataacacatatagattggattattattaaattttattttgacaaaaaatcagttcaaggtcttatttgtactattttagaaaatacagggtccattttatcatttaacaaaacagaatgtccaaatgataacttctgcaaaacatagggtacaaaatggtatgggaaatttcaatttttgaccctaataatacaacatatatcaaaatttatacccctttataatttgtacaaatttattcctataattttaaaagtttcctaaaataccccctaaattaaaaattccctctctcagacgttccctctctctttctgacgctccctctctctctcgctcttcacgatcaccgaacccccccccccccacactttccctctctcagacgttccctctctctctcattctctctgtt

SEQ ID NO: 341382 - DNA, 585 bp, Cannabis indica
aatattatatttggtatgattttaataaaaagaataataaattaggtttttaacttttttaatagagaacaaagaaacaaagttgatttaaataataataataataatatgagtttttagcaattaaaccttctcaactgttattttacttgtatttaattctctaagtttaaattttgacattaaaattctttaaactcaactggataacactttaaattttctacccgtttaaatttgaacttaaaggattaaaaatagttgagagtattcaattggaaaaaactataataataataataataataataataataataataataataataataaatctttttcttttttattggaatctcaagtatgttccatcatataattaatgtccacgtatctcaattagggaatcatattccttgctctattgctatataagcttttgctaaagactttgcggaaaaaaacttttgctaaagtgaaaaagaaatggaataaaataaaataaaaagtgaacaatataatagttttttgtaaacgtgaaaatggatgtaatcttaagtaagctttatatgcaattccact

SEQ ID NO: 341383 - DNA, 572 bp, Cannabis indica
acctgagtatctgtcttgggcaaaggagcattttcaataattctgctgctttttttgcttgtcttctaaaaatggctggatcttgggtgtcctcctcagcctatgtggcatccaccccaccaatcaggttctccacaccatcgtaagagatggtcctcacatattcctcctcttttgcgcgtggaagtaaccccttcatcccttcaagatgctgtttaagattctaaatatataagagaaaaataatttagcatttattacaagcattaatcttaaaataattactataaacataagagtaactcatacccgtctagaaaataatgtagtgaggtccttcttcgctatatcacccttgctcgtccagttaagcatcctgagaaaccaaatcccatgattcgtgccatacctcttcccaacctctaatatggcctcataagcccaatattgtaatgcaggtgcgaagccataagctgtgtatttgcactcatgctaaacttccaaattcaacttcttctcgtagttggacttctatttcaccatgccttttgaagcgagtgcataagtctggc

SEQ ID NO: 341384 - DNA, 544 bp, Cannabis indica
tcaagtactctgggctcacataagtactgaaaagacaacaacgggacatactccattctcgctggcatttggctcggaagcaatgttacctgtggaagtaaacaacccgactcatagatgagagttttataatcaagaagaaaaccaagaactcataaaactatccttggatctacttgatgaaaaatgcattgagtcgcaagttactaatgcagcatatcaacaccgagtaacaagatacttcaacaaaagggtcaaaaagaagctattcaatgttggagacttggtgctaaggcgagtatttgcaaatacgagagatgcatttgtaggagtattcaacccgaactaggagggtccttatgtgattgaagcgatagtaagaaccggggtttacaattggcttgaatgaatggctcgctaataaagaactactggaatgtggaacatttgtgaccctactaccagtaaattaatgattgtaactcacatctctgatgtaatattttgaacatcagtaaagttaatcatttcttttttcaagtaa

SEQ ID NO: 341385 - DNA, 600 bp, Cannabis indica
accaaagatagtacagcaggtgtactaggatctaactgggaaggaccatatcaagtggtcgaagttctcgacttcggagcatacaaattaggtaagtatgacgaaaaaatgcaactcattctagtaccacggtattggaatggagaatatttaagaaaatactaccaataaagtactaggtcggatgaccactttaagtactaaatgaacatttgcttttaagtgaatggccttctgggcagactgcggctaaaggtttcgataaaagaaacaaagtactcaggtcgggtgaccactttaaagttcaatttcttatgtctgcaatttgttttatttcatgttaagctaaaagatcagattagatcaaatagctctgatattagttactacggtaacaaatacacttttcggtcaataaatgaataaagatagttatttcaaaattcaattgagtcgaaataatcagcatgtttataatttaccatacaatgcgtacaaaaggtttggtcaatcccaaaacaccgaacaagaaaaaaaatatatttgtaaaaagcaagtgacccggagtcatacgtctgctcggtcacttggggggcacct

SEQ ID NO: 341386 - DNA, 612 bp, Cannabis indica
tctccaaaaggtggattaggtctatgccgatcagaatagatggtagagagttaagtgctgacttgatagagatgagcctagtagatttcgatattattttaggaatggatttcctatctaaatactcagccagtattgattgcaagaggaagatggtgatcttccaaccggaaagtgaagaaccatttgtgtttgttggttcggttcggggatctcggatcccggtgatttcggccatgtcagctagggagttactgcatggcgggtgtttagggtttctggccgtggtgatggacaccactcggccagataccattcggctagaggatatcaaggtggttcgggaatttctagatgttattcccaaagaactcccaggtttaccacctcagcgggagattgattttattataggtttaccaccacccggagtggagccggtctccaaggctccgtatagaatggctccagctgaacttaaggaattaaagattcagcttcaggggttgcttgacatagggtttattcggcctagtgtgtcaccctggcgagctccggttttgttcgtcaagaagaaagatggaactatgaggatgtgcatcgattatcggg

SEQ ID NO: 341387 - DNA, 693 bp, Cannabis indica
aataaatatttcgaaaattattcaatttaagttgatccaaaattaattcaaattaattttcaactaaaaatttaattttctataaatatatatagcaaaattcgaaatccaatgtacttaaaataaatacatcttcgaaattgcataaattaaaataaaataaatccttgaaaaattattctaatttatgttggtcttaaattaattgataaattaattttcaacataaatataatttttctgtttaattaaatattaagaaaattatcaaatatttatgtttcatgaataaaattaacttaaatattaatgttcaatttaattaaatataactagataaatacttcaagcaaacagaaaataactatgtagattttcactaactaatctctttattttcaaattaaaatataatatattatagtctatttattttaattaatcataaatgaaaaaatttaattgatttaagttgttcttaaattaattttcaactttaatctatttttcaaaaaaaaaaaaattcaaaattatctacatttaaataatgcaattttgaaattttgggaaacaatgattaataaaatatattttgaaaattatttaaatttaaattgttttgaaaataaaatttccaacttaaatttaattttctatctaatcaaatattctgaaaataactaatatttaagt

SEQ ID NO: 341388 - DNA, 807 bp, Cannabis indica
ttgcatgttttgtgtctggcaaccttggaacgcggtgtatggctattagaatcacatcctcttatttttagtatagcgggacaatagtttagacattgggaatgtcgggaatagtcgggatgttagagtttcccaaaataccccttagtgtcattttatgacttttagtgtgggcaaggtgttaggttatatttagcctatgtttcgggtctaataagtaagcattttctcggttattggtgtcttttgaagcggttttacgcttgattttccttgtttcaggttcccggggtatcaaaagtcaaattcagtcaattgatgaaaagacgagaaaaactggtgaaaaatcggaaaagtctgctcactaggtgtcagtagtcgcgactagccataagccaggtcgcgacccttttctatggtcgcgaccatggtcgcgacttggaagatttggcagaaactcggtttttcgagttttgcctgtagtcgcgaccagcccttaaggtggtcgcgaccaggtacggaaaacgcagttttgacctaattcgaattttttctcaattggaggcacacctttcattcctatataaggaatacgactcagaacgtcaaattaagcaagaacagacttgaaaagtggatgaaagtggagaggaagctatcttgaagacccggagcgatatcaccttctagtttctttctattacccttattctttcttttatgtctactgttgtttcagatttaatcatagatgtttttatgaaataaatttcccatttagggaggatgatgaatgttgtttaagtt

SEQ ID NO: 341389 - DNA, 752 bp, Cannabis indica
gacaaattagtcgtaaatcaagaagttttaagtctactgatgagtccatatttgtcttataaatatgattaatttgcgtattaatattcttaaattgattctttaaattattgattagtttgattttaatttgttaggttattttaaagactattcatgcatttagagtcttttggagggattttagcatattttggtggaaaatagtgaaaatcggcgagcttgattgtacaaggcagaatttaattgcaaatctggacgaccttagaggcaaaattggacttggagctcaacatgaaagttttatatctcgttcttatcttttcagaacatcttgaagcgtccaaatccaaataatatcgagagagatatagccaaaatactatcagtcatcgcagtaggaaatttctagaaaaaagatagcgaaaaaaagatagcttttcaagtagagttgcgatttttttatcttttcttttcaaaagatgagttatcttttcttttagtgagatatttcctaatactattattaatagaatcctaattctaaggatatttatctatccactataaatagaatcctaattctaataggattcatctaactttcctattactataaataagacctcttagactacgaatttggggaagtctaaaaagctacaaattagatagagaaactcttactatttattatgattatcattataatgtctagttttgagtagttttcttttagttaagggttattt

SEQ ID NO: 341390 - DNA, 524 bp, Cannabis indica
gatattttttaagttgatatttcctttaaatatggataaacttaaaatggaatatttttaaaattaagtggttacaacttaattctgatatttaattaaattttatttgaaaaatatttaagttggatattttacattttttatccacaacaacttaaataagatatttttcaaattttattttattatattttaattatttatttaatttcaaatttatttttcgaaaattaaataattgaaatttaattgaagttggaatttttttaaaaaaattatatttttttaaccaactttaatttataattttaattattaaaatatagattaaaataaatgattaaataaaatacatatttcttttaaataatgagctttaatcaaaagacattcaatccccattgttagtcttacaatagttaaatattttcaatataacctcgagacgctagactttgtcccccttatggatggttattcgttgaaagcatttaacaccgtaagatctcatttgataagtgttt

SEQ ID NO: 341391 - DNA, 691 bp, Cannabis indica
gttgacgggcacagacgataaggccatcagcaagattgggcactttgctgatgagtacttcatggtggatggcacgggcatcacttgcacttggttccagcagattccgacctatcactgccctcccctcactcttgctcttagggataaagctcaaaaacttgcccggctttcggggaaagaccggaatattatctagttgacctccgatgataactttgtgaggtacaggctctatcccgaggactttacttctaagtccgtgacggggaagaagaggaaatctggtgctggccggaccgaacgagctcataaggagaatgaactcattcaacttaagcgcgaagctaagttgaagggaggtgcacgggctgagcagtatgcttaggagcccttgaatcccgaagatgatgttgaggaagagcaggtgactccactaaagaggaacaagaaacttccagcctcacctaggcctgctgaacatgcgattcacataagggagcccatttcacctattcggccatcccctcccgtgttcagaaaagggaagctgttatgtctaaaataagatcgatgtcaggtgatgattaactttcgaatcttatttgggcagtcaccttgcatattgctttgtcttgtttttgagcttcttgactttcatgcctcacgtttctgatgtctgttttctaac

SEQ ID NO: 341392 - DNA, 821 bp, Cannabis indica
agtacaatgtttaaaaaaaagaggtaaaagtaatatactttaaaaaaaagggtaaaaataaaagataacaatataaaaagggtatagagtctaatttcctctcttaaaatttcatattatttttcaactcttaaaacttattattattttggaaaatgccattattttattatatttaattttgggagagttgggttgggttgagctttttgcatattgaagcttcttgtgtttctgttaatggatctttaataatatatatctatatgggcctaataattaatatgaccactttccacaatacccttattaattagttaatctccttttctcatatgaagtatattaattaattttatataattgataaaatattatactttctttgcatttttgtaatcaagtcaaatttcaaaagaggaatattgactggattttttcttaataaaatcatcagaattaattctgaaaattaaaataattatagatataactatgagcttgcaatattgtttatataattgttatatgttatatataattataatatatatgtagcactttagtaaagtaaatattctttcaaataagaaaatattatgtatacaatacttaatataatttggtgttgaaagacctgatttctaggaataatgcactactggcattatacatatatggacaaagacatagttcataattaaactttctatatatatatatatataaatatatatacatttaactcttgtcactttaaaaaaagagcatatgtctcaatatttatatgatctctttggaaagagttcatatttttatat

SEQ ID NO: 341393 - DNA, 603 bp, Cannabis indica
tgggtgcgtgagcctatgtgtcgccaaattgtgcatgataattgggatgttcatgagtcgagttctttgagctgaaaaatcaaatggtgtagtactgctttagccaaatgggagaaggatatcactggtaatttcaagcagcgaataaatagttgtcataaaatcctgaagcttttgaaaaatagaagggatgttgaatcggttaacaggtacaaggaggctcaaaatcgtttattcgaagtcctcgcccagaaggaggtcttctggaagcagagatccaaacaattgtggctgcaatctggtgaccaaaacactaagtactttcatgcttgtgcgagtactaggcggaaaaacaatcagattttgtctcttaaaaatagaagtgggatttgggtggattgggaaaatggcttaccgagtgtcgttgaagattattttagagagttgttcacagcttcagagattgattggggtagggtcacgacttgtgtgcataatcgggtgtcgactgctatgaatgagtctcttactattccggttgacgctgaggaggttcagaaagcactctttcaaatgcatcctgataaatctcctggtcgtgat

SEQ ID NO: 341394 - DNA, 570 bp, Cannabis indica
ttttaaatcaaaatgaagcctcattatgatgacctttctgaaaccatcaagctccatcctcaagagttggtttttatatctgcaacaaataatgcaactaaatctggtccaatagtgttgcccaatattgtgtatgaaaaactcctatctgacaaaccttttaatcctcaatcatgcagaaacttcttttcaggattgtggaggaagcaactaggaataacgatggaagaagctattgatggtatgtttctcgtaacttttcaatcaaaatttgttaaacaaaggattattaggggtcaaccatggtattttttgggtcattatttgtcgcttgttgagtcatctaggattaattaggttgtagtggaggattttaagaatatttccttttggatccaagttcatggtattcctataaataacattaatgaaactctggggtccaaaattgggatgataataggagtttttgttgaatacgatgctgaaaactcaagaacttttatgtgaattagagtgttgtgggatataaatcgtcctttattacggggaatgttatttgagggggag

SEQ ID NO: 341395 - DNA, 620 bp, Cannabis indica
agttatttatgattaaaacataacacttaatacaactaacttagttttattcaaaacaaatattgtgactaaaaatacatttagtcacaacaaattgtaatttttgtgactaatactttttgttacggactttttagtcatatcataaaaatgataattcataattaatcacaatttttttaaatgaaaattttttatagtgattatttctttccttttgataaataagtaatttttgtattcacttcaaaattcattattagaacagaacggcaaaggcaaacaaaaattacaaagctccaacgagcaaacctgcacaagatcttgatcttttttaaaaaaattctttaacttcatgtactgtaatttactacaaataatataaataatgttctttacaattactgaaaactgtatggtcccataaaactctattttcgccctgccaaacaaaatagaccaaagcagatattatactaatgaaaatccttcatctgcctttcgagaactaattccttttcagtaaccaatttaacaagcctttaagggctcgtttggaatgccgtattcggtcgtattatattgtattgtattatattgaattggattatatatcatat

SEQ ID NO: 341396 - DNA, 912 bp, Cannabis indica
atacagaatctatagcttctatgcggatatagaagtcaaatgatgattttcttcgagcttggcttaacagagacaaatagttgagtactcattccagtgattatattagttcactgaaatatcatttataagtagccaagtgtttaaaggataaaatacattgaagggtgtaacggtaaattaatccctattcaatgtaaatcatctatagaggatcattgattattgggataataacaaatggatactcttatagcgtatctatatctttgaacatatagcgcgttctatataattgagagtgcaattctaagttctatagtggtgcaatgaggaatcaataagttagagaatttactttgtaagttctaaatctgcttattggaagctcgtttatataggcccatggtccccatactagttgagacaaactgcttgtaagactgagttaattgattttagttaatcaattataattctaaaattagactatgtctagtttatgaattttcactaagatatggcttgattgtgaagaaataggattttaggatttatttattaattaagagactttatggagtctaattaataaatattataaatgaaaattttatttgataattattttaattattaaataaatagttttgccatttatagggttgaaagtgcaaaaagtggtatttgtgaaaaatagataaatagttaagaaaaatggcaaaaatctaactagtgtagggttgtaacgtccccgcttcaagcctccattggctcattatacccatggaataatggctcttatacacgagtacgccactctggtagcttcttggattgattacttaccctacagactaacacgagtattttcaacgtgctttgttttgtgccctaaataaaaccctttac

SEQ ID NO: 341397 - DNA, 658 bp, Cannabis indica
tttgggctcaaatcttggtgatactgtgctacagaaaggatacaagggttagagatctgagcggaatgagtcatttcattccgctgcaaccaatgtaaggtttctcataccttttatgtgtttatttttatcgttttaaaagttcatatttagaatgttaaaaacatacttgttagtaaatctaggtcttggtaaaatatattccaacaactggcctcagagccatggtaattgatttactttcaagaaatatggatttaaaatgatgtatgtatgatttggatgtgattcatgttgatctatgtgtttattgatgattgtttgatgtttgcaaattttttacgtaaaatagttagaattcattctgtaattatttttcttggataggatggaaaaaattaagcaatttactttttaatagaacttgatttcaattttatttgaatcagttatgattttttgaaatattgaaaaaaaaaataggaaacgagtgcctacatgcacacgcggacacccgagtgtcactcggggtgcacgcacattcagataggggcttgtccgaaggtactcgcccatatgttgtccgaatccccctcacgcgcgcagaaatcctacaatgcaaggtgcgtgtgcggcaatcctcgacaactcctcttcc

SEQ ID NO: 341398 - DNA, 1303 bp, Cannabis indica
gggcataaaacccaacatgacctcctggaaagttttttccagaagcgtgcgagtgaggacaaagtacgctggaaacacttgtgttggtctgtagggccagtcgttagtccatgaagcagctagagtggcgtactcgtgtgtaaaagccattattccgtgggtgtaaggatccaatggaggcttgaagcggggtcattacagattactattaattttttattttgactatatatcgtcaaaaagttagtacatcatttactgcttattgatctcaaacttttttattactgatgaaatatacatgtatgaagttgttggttattttcaagttgtctgtaaaacttgtaatttgaagatatatagatgaaatgggagtttggatatgatgtataaacaacgaattcctatattctagtatttcacagtattctagaacttttaatatttaattaattaaaaaattaattttagaaagggtggaaatttaagttttataaagtaatagaattttattgtaaatattataattaagagggttaactattaaaaaattatattaaaattattaatataaattactaaaaaagatcttattcaatattcaattaaaatatatttagaaatatatgtaattaattctaaaaagaatttttacacattagtaacctactattacagatcaataaaaatataaccatcaaagttacaataaaaatataaccattaactaggcaccctttataaatatatatttgatatagtttttctttatactttaaataaaatttactcttttgtcactcattaatataattaaccttttatatttttatttatatatttaatataatttctttatacttttaatttttttattaaaataaaatatattttatttctaatgtgttaaagcgcaattacaaaatttagcttaaatataatattaatttatttttgagttaaatttaacccaaaattttcatcatccaatgggcatagtttaaaagtaagcttcaggttactattcatgattatatatatactaggttattgttatgtgcagttttatatttttttattttttatttgtgttgtgtatttttaaaattttataaattaaaataaataaattaattttttaatttgtttttttttaaatatttaaattttaaaaattaagaaaaataaaatgtaaaagttaaatgaaatattaaaattgaacatactctcgatattaaaaagtaacaataaaaaaataataatgttacaaataatatattaatatttataaatgtatttaaag

SEQ ID NO: 341399 - DNA, 522 bp, Cannabis indica
aataagtttttttgtagtgatatactatactaggcttgtggaagacgtgccagtgctataggcacgtaatctctgtcaaaacttgtgttataactatatattttactttcatcaatataattaaatgattattgaaaaaaaattatatattaaacaaggacatataatgtgatatgataacataaaaaattgttaattaattattaaatctcatatatttgtataatgttaggtatatattgttaaataataatattctattaataataactaaaataattcaccaacaaaaaaattgtacaaaaaattataaataaaaaaaaatcagagaagttgttgtaaaaaaattgtaaacaagtactacaaaaggtaacatctagctagttattagtgcattttagattccataaattttaatttaatatgattcagaaaattactaaccaattattgtgtaggtgaatcggtatagtattgaacaccttagggtgtcacataacaataatagtacaaaaattattt

SEQ ID NO: 341400 - DNA, 831 bp, Cannabis indica
cgatggccgatgctatgggtccgatggtgtttagtttcttttgggatccgatgtttatgcaacgactgcaacaaatgcaactgaggatagttgggctgaatattgtcctaattttgatgctcctcaggagtacgatacctgtttgggagacttgtacaacatttcttggctcgagaattggtatatatacaaatatatttatatacatattatcttttatgtatatgcattttaattttttactggtagtgattcagtttcaatttcaatatcaatattattttatgtgttttaactaggttatatatatatatatatgtacagtgacatgaacgatgtaggcagcgaaactttgctacagcaatacgaatcagtaattaaaattcataaatttgggccctcggttgttaattatttccaacatataatacattattatgtcgtaattaaaggtttacataagtaaggattgctagcttgagggataggcattaatgacggcgggtgtggggtttcgggttggggtcgaactggggttgctccgatgggggtttcgggtggtggtgggatgtgggtgtggtgctttcgtggtcgggagagaggcttgagtttagggatttcaaatgtgaggggtatttttgggaaattaacagtgtagtcatatatgaccaattttaataactatgcatttagggaaataattttaaggtattgtaagtatgaaaattcaaatttccctaacattaatggaaggtatatagtcataatataacagaaatattagcagctaaaatgcttaaattattacaagtattttttttgaaaaaaaaa

SEQ ID NO: 341401 - DNA, 842 bp, Cannabis indica
tttttaatttttttttcaaacaattttgtaaatcataaaaattggaatatgtctaatgttatacaacgcatataaaaatcaagtccaataatcaagttgagtccctacctctcccgagtcgttaaactttttccaaaagacgatcttaagctctcaagtcccgagctccaattgtttagtccaaacttacatattactctcacctataccaccaaatggttaaataattatcattatcgcattctacattcaaaaccgagtccaacgacatataatatgactatatttaaaatttggggttccgaagcctcacctaagcggtgcaccttaacaatcggtggcggtaaaaattggtgtaccggaaatgtcgccgaaaataggagtagtatatatcaaaacgaccacctcgacgagtagatcacacccatgccaaccgtttgtcaaaacggtacacgatgtcaccggaaagtcgccggaaaggggcggagctacaaaaatgtcaccggaaaaagttgtgaaccgggaaaaatggtttagtgtaggttgttctcctcgacgagctgagtttagtggtgaagacgattcgtcaaacggacgccggaggtgaccggaaaatccgttcaaagtttgaaatcccaaactttgacttgcgatcccgagtcaacggcggcgagaggagcggcaccgcttggggggtgaggtcgccgccacttgggctttcgatttttccggcgtgttggatcaggcggtggcgggaggtgggtcaccggagtgtggtggttttggaggtttatgggttttatttttgtattttaaagagagagaaagagagaaagatagat

SEQ ID NO: 341402 - DNA, 654 bp, Cannabis indica
ttgatattatgaaattcctctttatatgtaaactcctctagggatacttgattatttactttttttcaactacatttgtgttagtcaggaagtaacactagtagttaatttattattggtacaatgccgaaaactgtatagaactttccatagactgaataaatatccttcttgcaactttaacattcagtctcactggtagagttagagactgcgaattggtatttacacttctccaaaatcactgctccaccccaaagtaatcaccatctcatcagtagactttctagcatcaagggaagtctggaaagtagaaacttgatttggtgtagtctaagagtataaaataccacccttatcgactaacatatagttcctcttcttaatctaatgatttacttgattgtcttccaatgttccgtttctggattaatatgatacctactcattactccaactcaacatcaggtatcaggtttaatgcatactaaatcatatttgagacctcccactgttgatcctaaggaattctttatttggccttatcttttctggaatagttgaaacctttccatagataaataaattctatgtctagaagtcaagaaacttctatagatttagccattagaaaaatgctccagcatcttacta

SEQ ID NO: 341403 - DNA, 672 bp, Cannabis indica
cttaagttgctatgtttgaattaaattgattttgggaaaaaggaattgatttttctgtttgtggttatccctcacccgaaccctctccctctcttaccctcttgttttgtttcaagacttgaattgttgaagtaagcttgattttggttgtgattgaagctttttggagttgtgggtcttgagcttggagtttaggtaacctcttattgagttttttgcagaaatttaatggtatttttagggttggattttcatgcttaatgtggtgttatgctgctggtttttttttaggattgtgttgggtgagttcatgccctagaacatgaagttttgatgagtttgagcatgattttgctatgtttctcaatctggatttttggtaatcttatgaggatttagatgcatgtaatgtgttaattgagtacctgttatatgctagtaatcctttatgttaatctgaatgtttagttgagaaattggggtgaaaagattggaatggttgctgaattttcgtgtttcaggctgctggtttctgggtttggaacccagatgccgcggcatgctctgagcatgccgcggcccgcccctggttgctggaacctgggttttgtcccaggtgccgcggcatggtctgggcatgccgcggcccgccctcgtgatttttgggcagtt

SEQ ID NO: 341404 - DNA, 1605 bp, Cannabis indica
tggttttaaccatagttctcttggctttgcttcttagtttcttattctgactatctattacttcttagtctcttgtcacaagtgtcttccaagtcgtaacacggtgagttccttaaaaccctcccactacgacaaggtaccatgactttctgtctaagaatattaagtggtattatcctcatcggttgtgtcaagatgacagaggcagtgggaccatatttctccacccctatcagttcgcaagatctttaaccacttaccttaatatttttcaacatttctagaaattcatgaaatttctcaaacatctcaaatttctttgaataaggtaaaacctagagtgatcgtctaaagaatttaacgataactcatatccacccctgaatgtacattcatattttttgaatatagatgatcctactttcaagtggaataaggcaattttttctctttgcagataatgatcttgtcaaaatctatatgaacaagatacaaatgtcatgtaaagaccgcttagcttacacttggaaattagcagataattagggtttaattatggaaattatttattaattttaaattattaatttatgatgatctatttgaattcagaatgtattttatatgtcatatgtagaaattttataattttgcattttcagtgcccgacaacattggaacgcggtgattggctattagaatcacatcttagtatttttagtatagcgggcggtatagttagacattgagaatgtcgagaatagttgagaatttagaagttaccaaaatacccctaagtgaccttttatggtatttagtttggaatgtgcaaaatggccattttgtctcattagatttttgtcctttagtggactatagaggagttaatatgctgatttttagattaatattaacttacgttaattaataaaacctttctttatttcattttatccaaaaaatagaaaagtcatgaaatgactctttctctcttctctctttcgtgagccctagaaaccagtaagaactttgggtttttcgtaaaaaattctgggtctagacagcatctttgttggggtttcaagcttaggtaatctttttagttcatcattttatggttcttatgttaaaagttatgaattttgcttgaaagtatgagtttaggggttgtagttgctattattgtttgttgatgtattccaaagttagtttttggttatttttgttgattcaagcatgtttagaaggcagttagtaggtttaataaagttttgagttttagaactcaaacttggagctttaatggtgaaacttgtttctatacatgttgaggtgtattgtggccttgtttatgttctttgggatatatggaacaggtctggaaggtttggtatgatttggggttgttctggttgagttatgatattttttaatgtttcctgcactgaaccggaatttcgattcagggagacctgtaggaatcagaattacggttggtccctaagaaaccccgcagaactgaaattccagttggggaccggtctaccggttggggcagttttgggaaccctagtttttcccttttttttgatgtttagggtattg

SEQ ID NO: 341405 - DNA, 606 bp, Cannabis indica
ttttttcttttcattaatatttttggagatatagtgacacacaaaaagtgccactacattaaatacttttctaaaaaaataatatttaattattttgattcaaaattttattaattaattatatttttaatttatcaaatatatcttattttatgtttttttaatgctttttttaatttgctgccattaatttttattttaattcaattttagcacaaaaaagtgcaaatcgaccaaatttaaaataaaatgataccaattttttatatgttttttaaaaataaaatttaaagaagtgatttttatggattttaatgctaataaaatttctataaacttatatctaatgtttagcgattaaggaaaccaaatacttaacaaatatttttatacgaaatgaaaaaacacaaatacaaaacagaaaaaattacagaaacttcaatcatatgactatttgaatcaaaaagaactaataaatgttaaaaaaaaatacaaatcttttaacaatgaaaatccgaaatcatgggtatgaacatttgaatcaaataaaatagttagaaaaaaaataattgaatcccacggattctagcttcgatctccgtccct

SEQ ID NO: 341406 - DNA, 849 bp, Cannabis indica
cctcctcctcggcttcagatggactgtcaggacacacttcttcctgatcttccacctcagtaccgcctagggtgcagggattagggttgcagttggttgtacgggcgcctgattgtaacctgggttatatttatgattaagattatgcttttcttactgggtttgtcgactcacagatattgttgcatgtgtaggtaaaggtaaggctaaggttgagcagccgtgagagcgagcagatgaaggttgtacatgtcgagggggttagacctgaagcgtatgatgcttgggacagctagttgtattttgtatagtcgcttggcgagaacttttgtattaagtattttgattcagctgaaaatattttaaactcgaaattcgggatatatataaaaattaatttattttaatattattagtaatcaagtaaagttttaattattcacgatttttaataaactcattgattcgcaacgaactgcacagttaatataaaatcatgataacaagcctagtctagtagggtgttacaatgcactctttactagggattcgaaaatagtgaagaagaagagggagaaggaattcgaaatagctatagaagaaggctctcaatttttaattgtttaataaagaatgaaaactaggttatcttaagttattgagaatgagagtcatcttatgccttttgtagtatttcatgtaggattaagatttaaattatatgtattaaaaaagataaaataatagcaaaataaagcttaagtggccgaccatagttagtggacttcactagctataattttgtcattttattcaacaatttattttttctttcactaatgccatatt

SEQ ID NO: 341407 - DNA, 624 bp, Cannabis indica
attacttaaggagatttaatattttttgggttctaatatactaatatgacctttttcttattaaaaattggacaaatcaattaggtaagaattaatacgatagtagtccctatgatagtattacccaacaaaattaacaaaactaagttaattaactatgatagtagtaccaacaacgattattatgtcaaattttattaaattattcactactgaaatgagtggatgtcatatcacatttttaatttcaccatttcaaccatgtacttattatttgaagatggtgatgtgacatttttatacggccgtaataaatcaattgacttcattcattatgtcttccatgtgtactaatactttaaagcattttatttttactttaaatctggaaattattatttaaatcataaaaccgtaggtatatttgtttttaatataaaaatgtcacatcacatagtactttcccgatattgcttagattttgtttgtgggatttgattgaccttctccttgtattaaaattggttaactaataaatgggtaaattgggatttttcagattgtcgtaagtggatattaccattgtgaaaatttattaactattaaatggttaaattgggaaaa

SEQ ID NO: 341408 - DNA, 814 bp, Cannabis indica
agacatggatttgaattcaacaaggaaaatttgaaattgcatgcttaaactactttataatttttcccctaaatgtatagacattaaaattggtgaccactttaatgattttcctaaactacccctcacatttcaaaacatccctctctctttctctctctcagccaaaccaagaaccccatcccaaccacactctcagccgacgccacccattctcaacccagctcaccgacggccgtccacggtgtacccagctccggcgtcgacatcaatcccgaaccacccaaacactgcaccccatttcagcccccttctctcttcatctctttctaaccgaaaaaaaaaaaaaccaccaggtccgatggtcggaccattgggtccgatggggtccgaccaatcggacccatcggaccccatggtccgaccatcggacccccccttctctcttcatctcttctaaccgaaagaaaaaaaaagaaaaaacccaccaggtccgatgggtccgattgtatcatctaattatatattattaataatattttatttattaaaaaaataaaaaaaatatatttattcacaatattattgattattattatttagtttatttgatattataaaatttaaatttatactataatgtatatatattactgttgaccgaggttttcggcaactagtaaaatatgattataataatgagctgtaagaaagcgagatgaagactttttacgtggttggggcgttaatgagccttagtccacgagccactgctattaatggatgtgtttaatacagattctacacttgagag

SEQ ID NO: 341409 - DNA, 717 bp, Cannabis indica
agttttgttcattttgttttcagtgagatagtgagtgcaaggtgttgtcttgttgctgttggagtggatcgtgtgaagtatactggttggtctttgtctattttttttactgatcgggttctggacggaaatggcttcttctagccgtcattcggaggcgatggaagatacgatacgtttcaatattgaagaagaggatctggaagcagtcatcgtgacagcgggggaaagagaagaaggcatagacgatcgatggtgtttggtggggagattactatcaaatcgggttattgattttgaaaaaatgcaaaatgtgttagcctctctatggcagccaggtatggggatgtttgttaaacaacttgatactaatcgatttctatttcaattttaccacgaagtcgatatccaacgcgtgatcaatggtagtccttggacatatgatagaatgcaattgattattgaaaggttgaatgttggaggagaccggaagctactaactctgaatacgcttgacatttggattcaacttcatgatgtcgaaccggggtgtatgtgggaatcaacgatacgcaaagtggggaacacaatgggaaaatacttggagttcgatcctaagaatttcattggtgtatggagagattatcttaggatgcaaatcactttgaacatcgagaagccactacgaagaagaatgaagatcactaaggaagatgg

SEQ ID NO: 341410 - DNA, 545 bp, Cannabis indica
taacataaaacaagtagtgcatttcaataaatcaattgtcttcatatctagatcaagtgttgtatacttgactaaacccaaattactggaactgtaaggctgtggtaagctactgctttctccaccattacttcctttgtgttcataaaatattatgcaacatcatattctatatgcattactcattactcatctagggatactgaattctatattgttcataaagtgcatctgaatatacagaaaacatttctaattctatccaaaaatggagtagagataaaccagttaagaactttcttcagttgaataactttccagtacttttcgaaagcaacatagttatgtagcttcactaatggagcttaaattatcatggatgggtttttacatccttctagaacaattcctccacccaagagtaaccaccatcttgaataggttgagttggtgtagatataaggattctaatatacatccctacgatcttacatataggtcacttttagagatctttcttgaatgtctcctaatgttccttgttt

SEQ ID NO: 341411 - DNA, 658 bp, Cannabis indica
gtgccctaatttgcaatgccaaagatttacatcagatggtgtggagacatgaaaaacagaatgctcagtagaaagagatgtacttttattagtggaatcaagattacagtaattgtgtgtaaaatcacactgttgaatacaagtacatttattctgggaactgaacataggtgattcgattgcagaagtggccaaatgacactgcagcacagatttggaagaagtagaagaatcaccaagaagatagagtccatccctagctttccctttgagtaacacagccccggttgtcttgtccttaacaaaacaccagtttttatgaaattcaacaaaaacatcattatcttgagtgagtttggaaacacttacaagatttttggtaatagaagggacagtcaagacagcattcatatgtaaaggacaagatttattggaagatggaactgaaacagaaccagtatgggagattaataatttcttaccatctccaattgctagagcatcaggaccagtgaagggttttgagtcatcaagatttttgggatcaaaggtaacatgagtggtggctccagagtcaatataccaggaactatcatctccaaagtcttgaatcatggttgtgtgatacgcctgaggatcacaatcaagatcaagttca

SEQ ID NO: 341412 - DNA, 1046 bp, Cannabis indica
tatatacagtgtatatacagtatatacacagtgtatatacagtatatatacagtgtatatacagtatatatacagtgtatatactgtactgtatatactgtatacacattatataccctgcatatattgtacacacagtgtataaactaacaatatatacattatacaattacaatacacagtataaatacaaaatatataatacacaatatacaatatacacaaaacaacaattaaaataacagtaaactataaatcctaaatctctacaaatatataatatataagagtatatataaaattttcaaatataacacataaatatatcatatttttacagaaaaaaaaatttatgagatatatacacaaatattataagaactaacctccaaatatttagaccaccgaccaatcccggcgttttactcagaaatctcctccccaccgattattaatcccaaactttgaagatgaaaaaaaaaattagatattaagaataaaaaaacaatatataaaaatgataaagaagaacaacaaatacattaccgtgcactggaacttacggccactgcagtggtggtggacggctgacgcacgggcggtgccgggaaaaagtcgaacggggaaggtggaaatgggcggactgtgtttgaaggaaggggaagaggtgaatgggggaggtggaaatgagaaatggggaaaatgggtttctgaaatggggaggggtttttatagacttttaataccggcgggacccgccggtattaattgggttccgccggtattaatctaaacggtcagaatcccaatttaataccggcgggacccgccggtattaatccgccggcaataatattttcaattaaatgggcggtaaaattcccgccctcatttttcgaggcgggtttccgccggtaataagtcctatccgccggtattaattgatttataattaattaatatttatttttggaaaataatttttatttaataactattaccggcggattactaaatccgccggtaatacccagactattaccggc
